United States Patent Application Publication US 2004/0031072 A1 - sequence listing, part 25

SEQ ID NO: 114442 - DNA, 673 bp, Glycine max
  unsure (1)..(673): unsure at all n locations
  Clone ID: PAT_MRT3847_7434C.1
attcacccataataatccttcatcaagatcaagactactcccaaatctcttttgattgttggctacaaaactattcccaaatgggcaaccctaacaaagattctattctattctatggcaaagttggtaacgttacaaatacaaaaacccttccgcggttttcgaatttagaacgttacaaacacacacaagacagcgttccataagaccccaaacacaacttaaaaactttgaaaaagacagaagaaagggacaagggcacatgagtcatttcaccataaagagcagaaaccaagccaacaaatgccacgacccctctttccattttccagctgtgaccaaatcatcctagccccccctcacatggccctccacaactcaaccatagttagttagttaccatttccttagccattatactccttttttcccttgtaaaaactattaagaattgagatgaggcttctgaaggttataatcgagatttcggatannnaaaaacttaaaagagaaaatactgaaatgggtatcnnnagtgtcaagtgttaagttagttgaaaattaaaaattattaaactaacttgttaagttataaagttatagcagatgtttagtcatactatgttttaaattagctaataaaatctaagtgcatttttttgtgaagtaactc

SEQ ID NO: 114443 - DNA, 313 bp, Glycine max
  unsure (1)..(313): unsure at all n locations
  Clone ID: PAT_MRT3847_74350C.1
cagcagcaaacatgagnncttngactaaacaaattatcgaaacttgacacatggcgcttagactatagagatgctagtgcggaaaaaacagatttacttccagcaaaggcctgcattacttacaacctcatacaaatttttctaggcacgcaatcaatgtccacttgggcacaggaccaataccggaatctttcttgtcaccattgttggagatcataacagcatggatgctgcgaatgccataccgaatagcgnnngaagggcatctgatccnnnnagaggttggaacagatgannttcacagcctaaaggt

SEQ ID NO: 114444 - DNA, 260 bp, Glycine max
  Clone ID: PAT_MRT3847_74351C.1
ggcacaagtgagtttgttgatcgagataactagaaacagtgtgatgaaaatgaatgtccttgttgtcatcgttgctataattttggtagcatggcaatgccatgcagtaggatatgtttactctccgaattaacactggcaattgtgcccgtattcctgatgtcaattgcaccttttggaagcattaatgtggaagcacacattatctgctgtctatgaaaacattcctcaacactgcctataaggctcaaccgaataca

SEQ ID NO: 114445 - DNA, 466 bp, Glycine max
  Clone ID: PAT_MRT3847_74352C.1
cttggtttttttttttttttttttttttttttttttttttttttttttttttttttttttttttttttttttttttttttttttttttttcccaggaggagggggtcatcataaaacccaaaaaaaaggggccccagggttttcaagccccccttttatgggggggacccccatttccccattagctaaaagcccaaccagggactttaaagggaaagcccttaggaatctaaaccatgggacgggtaaaacgggaaaacaaggacccatatcagggcattggggcaaaaaaaaaaactgcattagcttttaacaatgggaaacacttaaaaaggaccaagaaattccccgactaccttggctaccccctggtgataaaaaaagccaggggccagtgatgcatgaagggcacccccatagggaagcccatcttcattgattacaaaatagggcgaggggaaaggcc

SEQ ID NO: 114446 - DNA, 350 bp, Glycine max
  Clone ID: PAT_MRT3847_74353C.1
atccgttccaaaccacataagcttcaacaaaggtatcggcttgtccaatttaacaggttttcattcgcttaatcggttttcgttttttcaatttctgatttcgatctatgcctgcggttaatgtaatgatttcaatttgtaattggagatagaagtatgctgattttttttttttgttttctttttacataaaaaggtaaaatttaggaatgtgatgagtttgaagtttctcgattggaaatctttctgtgtggcatttataatttgcattttaaggatgtttgcattgcctctgaggatgagttgactgaaaaaagatgtggttcttttgagttgttctattcggagaa

SEQ ID NO: 114447 - DNA, 257 bp, Glycine max
  unsure (1)..(257): unsure at all n locations
  Clone ID: PAT_MRT3847_74354C.1
ggttttctttctcgaactngaacgaagatgcgtgagattcttcacattccagggaggnccaatgcgggaaccaggatcggagccaagttnctgggaggtggtgtgtcgtcggagcaacggggattcggattncaaacggggaggtcaccaagggggancaaacgnagttcgcaaactcgagncgcagtncaaacgtgcttacttancaatggaagcgagtttgtcgggaaggtntcgtggcctatgggcggtngctc

SEQ ID NO: 114448 - DNA, 312 bp, Glycine max
  Clone ID: PAT_MRT3847_74355C.1
tataagcacaagcagtggctactcatatatgtaaaaatactcgagactaataatggagaacatcgaatgcatagaatacctgataaccaagataatgttagaagtttactagttttacaacactaatcaaattgtggaataccttacaactacaaatacaacacgtcattgaagtattggacgaccatgactagcattgaacttgacatactttgtggcatggatgatatcagatactcatgtgtttctcaaagctgtctctatatacacagataggattggcccaactttcaggaaatattattcatgctc

SEQ ID NO: 114449 - DNA, 353 bp, Glycine max
  Clone ID: PAT_MRT3847_74356C.1
ggcggaggccgcccttgcttctgttgctttttaatccaagagatgctgtttctaatataagaaccagagtctgcactaaatggcgacttacaaactctcgaccttgtccgcatactgacgacgaccaccttacgccggaaaacaaactaaccaccgatccggatatgcagcccggatgagcaggacgaacaaaatcctaatacgaaagaatagatgatgaacgtcacagcgaaacacccaaccacttataaaaaaccgtcgagacctgcatgacgcgagtccgacaccatcgtgtgataccatgctttgccagcagccttgatgagcaacgctttctgcttagagacagtctt

SEQ ID NO: 114450 - DNA, 366 bp, Glycine max
  Clone ID: PAT_MRT3847_74357C.1
aaacacttctatgcattactctgtcaatgaagcaacagtctctgaagtgataccaaggtgacaaatagaactggacatgcttttcttcttagcttttgtaggatgcaggaattctgtgtataagttacctaaagacagaagattaacatatttttaggaagatgaaataattttttggtgtataaaaatgatcgagtttcggaaagtatactttggcttaattgtatttattatcatgggtgatgatctgttatttttttttttttatgggaatcaccttaaccaaggtctttagctttagtttttggtgaaaaaaaacataataaaatctctttgaggaacttacacgtgtatagaaatgggccg

SEQ ID NO: 114451 - DNA, 434 bp, Glycine max
  Clone ID: PAT_MRT3847_74358C.1
gacccgaatgatgattcatacattcaattgaattgtggaccaggtgagagcgaaagcatgcacaaaatgataaggaaatgaacttaaatgataacgtctggatcatcagccactgcagccaatgatcatcggacaccgtgtcaacaggagagattacacccatgcaggccaaccatacacagaggaagattccggagagactcaataatacacgtttttcctctccattatcccatggttgcactattgttatcagtgctgggaagctgctcgtgggtggggtttatgataacaagctcttaggtaagcccaaaattctcatctactatgggaggggcggcccagtagatccattggttggcacaagtccagctcacgtcaggagggcctagtgtcacagcacggttcatggttgttccggagaaggccccacc

SEQ ID NO: 114452 - DNA, 484 bp, Glycine max
  Clone ID: PAT_MRT3847_74359C.1
ctcttggtttcatagttgaccgtcctttgaagttcaagcaattgagccttcgaaaggggcttaatttgaagagacgtcatcgggatttcttgctgaaatttgaagaaatgccattggtgtgcccctataggaatcctgctgaggctttggccaaggagtcattggaggcagagaagagatcttgtgcactggtgagggaggttcttgcaatgacggttgagaagcggactttaattgaccacttgacccatttcagaaaggagtttggcctcccaaacaagttgagagggatgataataaggcacccagaattattttatgtgagtttgaaaggggaacgagactcagtgttcttggtggaggggtttggtgagaagggtgacttgttggagaaggatgaggatggggttttattcatacaagataaatggatggatttggctcgggaatcccagagaatgacacgagagaaaaggaagggtat

SEQ ID NO: 114453 - DNA, 472 bp, Glycine max
  unsure (1)..(472): unsure at all n locations
  Clone ID: PAT_MRT3847_7435C.1
cccacgcgtctcgtttttttaaattaataaaaaataaataaataaataaaaattattatataaaataatttattataaaaaaaattatgaaaggcgcttctctttctaaaaggaatccaagtcttactttacgcttgcttgcaaacgtcataccctcttctttagggtggggtggttttatttaactagccctttttttcccccccttccaactgagtaaaaccttttttttacccgccttattatttctttttgcccgtccctccttttaccagtttgttttttgaaaaaacctttcctttcccatattttatttccttccttttccctccctttttggccactgggacaccccctgaaacggccctttaagcccccttttcctattgttttcccccattttttgcgttttggttcccccctcttttcggccctttccgttnggttttttttgttttttccccgacatttt

SEQ ID NO: 114454 - DNA, 374 bp, Glycine max
  Clone ID: PAT_MRT3847_74360C.1
acgagatggtggaaatggaatttccagatcgctggatcaatttcggggcaagggtcccaacattttatatatcagccgaatggcccaaattggttgaactctgaacaatgggccaacttacccggaaaacagttttgttaaaaaaaagcaaaaaattgctagattgctcccaccgggaacaaatggcgtttgacttctttgtccagagggaaaaaaaacgggctggtgcctaccattaggaaacaagaaacccggctgccctggaagctaaaaaaaattttttaatcccagattttcccccacccaacaattaaagggaaaaaagctagcggccccacctaaagatttctcctcctccgaatgaaaacgagggg

SEQ ID NO: 114455 - DNA, 990 bp, Glycine max
  Clone ID: PAT_MRT3847_74361C.1
agatcagaggaaatcaaattaatttcacagacactattcacttttaagacacaagctagtgatatcaagaaaaagatggaatggaagaagtgttatttggatgtgatattggtgcccttaggatttcttataagcattggttatcatttctggctgtggtacactgttcgaacacatccacatacaactatcattggcatcaatgccagtggtcgacgaaattgggttgctgccatgatgaaggacaatgacaaaaagaacatcctcgctgttcaatcactaaggaacacaatcatgggtgcgaccctaatggccacaacctcaattctcctatgctcaggcctagcagcaatcgtaagcagcacctacagtgtgaagaagccactcgaggacacagtttatgggggtcatggagagttcatgatatcactcaaatatgtcactttgctctctattttcctcttctcattcttctgccactccttgtccataaggttcataaaccgagtcaacatcctaatcaacaccccacaggaccccatcatgtccttggtcacccctgaatatgtgaatgagattttggagaaaggcttccttctaaacactgttggaaacagactcttctatgcggcacttcctctgctgctttggatatttggccccgtcttggtcttcctgtgctctctcactatggttcctgtgctttacaatcttgactttgtggttactggtgcaaataagggaaagatgtagctcaatgagaatagagattttgtatgagctaatgtcgtatataaatattaatgtgttaagtaagaatttatgaagttggtagtttgatttcaatgatcagaaacaagtatgttctactacttctacccttgtggcaaggtattagaagggattttgactgtgttcaatgacgtgtacttagcgttgtgaatgcaaatcatatatatatatatataacaccatgtgcctcattttgat

SEQ ID NO: 114456 - DNA, 295 bp, Glycine max
  Clone ID: PAT_MRT3847_74362C.1
gaaaacaaacgacagagatgaatggcctatcatgggctatgcaccgtctctgcccgagactcttagaaatgacatcatgctgaggtatcttggctttactactttattctggacaagacgagcactcaacaaacaggccgaggcataagccatcttatagaatgcttgcttccacacatataaaaaattagttattactgattcacaagatactttcactataaatgcaggtatatacacctcaacaagaagagatgaaacttgctatcgcatggatccaacatgtgtgtgatca

SEQ ID NO: 114457 - DNA, 498 bp, Glycine max
  Clone ID: PAT_MRT3847_74363C.1
cacttccgctcgaggagaatacgggtcgagctcgagccggtttttgagagatcaactacttgatccgagttacacttgctgctcatgtgagttgccatcagaagctcatgttcattgttatactcatcagcaaggcagcctgacaatttccgttaagaaatcggagtttgctttaccaggggaacgagaaggtaaaatttggatgtggcacaggtgcctgaaatgtcctcgcatacatggttttcctcgtgctacacgaagagtagttatgtctgatgctgcctggggcttatcctttgggaaatttttggagctgagtttttcaaatcatgcagcagcaagcagggttgcaagttgtggtcattctctccacagagattgtttaagattctatggttttgggaagatggttgcctgctttcgttatgcttcaattcaccttcatttctgttatcttcccccacccaaactggaattcaactatgatagtcaggactg

SEQ ID NO: 114458 - DNA, 277 bp, Glycine max
  Clone ID: PAT_MRT3847_74364C.1
ccacgcgtccgggaaaatgaatgctatataagagattccatcgtgtcaaatacttaatgatttttcaaatgaaatattaacttgtttcttatcttgtcctcttctttcttgggagtagacaattgtctattttctttggcttggtgtttagttatggatattcataaccagaggctatttagtagttattattattcccttgcctgctatatcagagattgaatgaatcaaccttcgactaatgggggatgatatataggaacctgtttttgctagc

SEQ ID NO: 114459 - DNA, 131 bp, Glycine max
  Clone ID: PAT_MRT3847_74365C.1
tccgaggaccattgtatattatatatagatcggattctcgattctagccgggcgcaatataaaactcagaatgaaaatattacgtaacagtcaaaaaaaaagtgtgggtctcacaggagtcaagtccatac

SEQ ID NO: 114460 - DNA, 1687 bp, Glycine max
  unsure (1)..(1687): unsure at all n locations
  Clone ID: PAT_MRT3847_74366C.1
cggctcgaggctcatcatcaggtgaaggaatttctttaccagaacatatgcagtttaagacatgcacaaatgatgattatgaaaaaggaagaatttctgctatgcacctaatgaaagataagttttgctctatctatgaccaatctgatacacgttctgtatttgatgatttgaacctccccactccacaagccagggtaaatcaggaacatcagaaaaattacattgaacaatccaggttcaaaagcaggtgcatacattttgaggagttaccctactactctgggaagaatgtttctgatttactcttcccgcaggagcagttttctcaacactatttttctgtttgtgggaatggggttgacaacactgttttgcaagatgtgacagatacaggtggtgacttccctcttgatgaatcatatggacaagatcctgataatgatattggaggatatccaaacaccagtgaaagccatctgccttgtacttcaacagaagatactaaatttgtcaatggattgaattctttagacacaccatgttcagacatcaatgttgaaaaaatagagtctgttaaaaatgacacatcaagcaacaatttctgtcaaaatgatgatcatttggagactcaatatgggagtgctgtgtgggacatattccggaggcaggatgtacccaagctaacagagtacctaaagaaacaccacagagagtttcgccacataaataatcttccagtaaactctgtgattcatcccattcatgatcagatcctttatttaaatgagaagcataaaaagcaattaaagcaggagtttggtgttgaaccttggacatttgagcaacaccttggggatgctgttttcgtacctgctggatgcccacatcaagtgagaaatagaaagtcttgcatcaaagtggctctggacttcgtttcacctgagaatgttcaagaatgcattcgattgacagaagaatttcggttacttcccaaaggccatagatccaaggaagataaattggagataaagaagatggcactatatgctgcggatgttgcaataaccgaagccactaaactgatgagaggaaatgatatgtcagatgaagccaaggaagtcccccagcaacacatttttactaaatgactctcaacgaaaggcttctagtttatttactcttgatttacaaagagcatagcttgtattctgttctgttttgcactgtatccttggcaactccatggaagtttgaaatgaatgttggttgttgcactagcactacacaccagcgagatatagattaatgctaagtacttgtaacaacaatggaaaatactaggtagtcgctataatattggcataataaattgacatgcattttgactttcatgaatgagtgcatcatatcatttttatctcatcaaaaaaaaaaaaaaaaaaaaaaaaaaaaaaaaaaaaaaaaaaaaataaaaaaaaaaaaaaaaaaaaaaaaaaaaaaaaggagaaaaaaaaaaaaaaaaaggggcaaaaaaagngaaaggaaatgagaaaaaaattataaaagaggggaaaggaaaaaannnnnaaatggataaaaaattaaaaaagttgagaaatgataaatatttttgtcagctggaataataggggggtggttttaaaagaattccccttcccaccgt

SEQ ID NO: 114461 - DNA, 523 bp, Glycine max
  Clone ID: PAT_MRT3847_74367C.1
ttttttttttttttttttttttttttttttttttttttttttttttttttttttttttttttttttgaaagccccaagttttattggccggttacaaaaactttacccccatttttccaaacatccccctaggaaaaacccccaaagggacaaagaacaaaaaaaaaaaaaaaaaacccaagctttttatccaaaacaaaaaaaataggccggattctaagggtgaccaacccttgggaaatcccctaaccccacatacaaaccaaacatggcctacttgttaaaattggaattttcaagttttggggcgccccgttttttcaaaaacccccccaatttccccaaaggtggggggaccattttcactggttttaaggggccctaaggcccaacatcgttttttgccaaagggccggattccgctttgattttccccgggacaactacggaaaaattgggggcaaaattgttgaccggccaggtgaagggaaatccttaaggggggggtttgggggagccccct

SEQ ID NO: 114462 - DNA, 417 bp, Glycine max
  Clone ID: PAT_MRT3847_74368C.1
ctggctttgaatgaaccactataatggcataacagaaaacagatgacacgtacgagctacactgtggatcagagtgacggaccataagacgggtcgaccgaaggcactgcaaagtgcgatgagaacgaatgtataggctacacaagctggacactccaaatgccgaggaggcgaacgtgtgcgatttatcatcaccatcgactgaacggtggcataatgggacccagatacctctagagtacatgttatagtgccagactaccgaggaagctcttacttgaaccctaagggaagatgtgcttgcacacgaaatgacaatgcacgtgctttgcctgctggtgtgagagtatatgcaggataacactgtcgggcaaacaatcaatgggccctatcatgcatgggcacaaatagcttgag

SEQ ID NO: 114463 - DNA, 254 bp, Glycine max
  Clone ID: PAT_MRT3847_74369C.1
gtgcatgcgggtataagaggaattcaagtacaaattgccggacgtatcgccgcggaagagattgcacgtgttgaatggcatcaggttggtagagttcctctacacatcattcgagggaaaatcgattattattgctatacagttcgaactattgatggggttttatggatctaagtttggatatactctacatagagagaaatatattatgcatcatcttgaatgtgctatatgctatcttaaatgtgatatat

SEQ ID NO: 114464 - DNA, 281 bp, Glycine max
  Clone ID: PAT_MRT3847_7436C.1
cccgtacgtaagctcggttaacagcttcagttgttatccatctgctgttttctcagaaaaaaaaaaaaaaaaaaaaaaaaaaagaaaatataaaaaaaaaaaaaaaatatataaaaaaaaaaaaaaaaaaagaaaaaacaaaaaaaaaaaaaccacaccaaaaaagggggcgccccccccctgttggcccccgacccccggaatttacttccggcccggcccctgagggcgcccccctttcccctaagggggggcttataaagcctgggcgaaacaagggc

SEQ ID NO: 114465 - DNA, 1727 bp, Glycine max
  Clone ID: PAT_MRT3847_74370C.1
aggacgcacttagcaatcaatcaacacttccaattacaatatacacatcttcaattaagccatgactctctctaagcttatagttgcttcccttcttgcctcgcttctccttcttcatcttgttgatgctgatcaatcggcacatgtacaaacgcaggggtctcttctgcagaagatagattgtaatggagcatgtgctgcgaggtgtcgtttatcatctcggccacgtctctgcaaaagagcctgtggaacttgttgtagacgctgcaactgcgtgccacctggcactgctggaaaccaagaagtgtgtccctgctatgctagtttgactactcatggtggcaaacgcaagtgcccttagacttaaaagttgtgtttggattgctagctgctgatatatcctccgtttatggtcgcacttcgcaatcaatcaaaacattcccaataacaataatatacacatcttcaattaagctccttctcctatagccatggctctttctaagcttataattgcttcccttcttgcgtcgcttctccttcttcatttcgttgatgctgatcaatcggcacatgcacaaacgcaggggtctcttcttcagcagatagattgtaacggagcatgtgctgcgaggtgccgtttatcatctcgtccacgcctctgccaaagagcttgtggaacttgttgtagacgctgtaactgcgtgccacctggcactgctggaaaccaagaagtgtgtccctgctatgcaagtttgactactcatggtggcaaacgcaagtgcccttagacttaattggaccactatcctatgcatgcctttgatttatattataaaataaaaataatactatatataacatgttaattgcttaatatgtgctttaagagtaaagaataacatcgtgaaatcaaattacccctttttcaatacgtgttgaatcatcgatcttggtttgtaatttggttgtatattcacaaaattaataagtatattgtgatgtgattaattcccttctctgttatggtgtacttgccttccctgtattgtccatctccatcgtctgtctattaataagaattcttatgtgatattttcatttcaataaaaaaaaaaaagaaaagaaatcaaagaagtctgtcaacatcactgagtttctgaagccagctgaaggggaaaggtactaccctggtgggcgtggtcggggacgtggccgtggttctagaggaggttacagtggaaatgcatacagcaatgctccagctccatcaattgaggatcccgggcaattcccaaccttgggtggcaagtgaggttttcctgaacccttctgacatttccctgtcctttttttgtcaattttgggttcttggatttggacttaaaagcaggaaaaaaactttggtaattggatttcctgaattagaagggttattattttgacttctatgccttaaaatgtaaatttaggttgttcttcatacgttgtagccttttccttgtgtttttctgttactatggttggacattccgggggggttatatggtggcggataagacaaatgttgttgagtttcgttttatttatagattgaattctcagttttgatttgaaaattgggttatatatgtccttattagtcgttggacattccgggggggttatatggtggcggataagacaaatgttgttgagtttcgttttatttatagattgaactctca

SEQ ID NO: 114466 - DNA, 1254 bp, Glycine max
  unsure (1)..(1254): unsure at all n locations
  Clone ID: PAT_MRT3847_74371C.1
cacgcgtccgcttcttgcttgaaatccattcattattactgttattttgagttcaaacttgaaagttaaaacttaaaatcatggtaaccacacttttcctactgaatcatcacttttaaagtgacacactctcagtgactagtttcatttccacccattgaacttcaaagttcaaatctgattgaggagttttgaaaatggaaatggggactgttgcatggatttccttggtgattatcgtgacagttttctgcccttcctctcttgctctcactctggatggtatgaccttgttggaaatcaaaagcactttgaatgatactaagaatgttctgagcaactggcaacagtttgatgagtctcattgcacatggactatactctcttgtcaagatacaagctaatccaaaagccgctccataaatcattaccacacgcggcttgcagccatacacatcatctgaattgatatcctcagtagcctgtgtcgacccacgcgtccgcagaacagcttgcatggaaccattcctaatgaacttaccaattgtactgagctaagagcactgtacttgaggggtaattacttccaaggaggcataccatcaaatattggaaacctttcatatttaaatatactggatttatcaagcaactcattgaaaggtgctataccttcctctattggccgtctctcacatttgcaaattatgaacttgtctaccaatttcttctctggtgaaattcccgacattggagtattaagcacctttgacaagaactcgtatgtactctttccagataaagcctcgtagtttagctgatacattgtagccttttagactgataattttcacttcttatgcattgcaatagggtgctaatttaatatatttgcaagcttaaatgattactgttatgtttaaatcataggaatcaaacaatagtgcatgattaattgtatattattcgaattgaatggtgaagaatgtggagcaaagattgaactcaatatcttattttttttctggacttctactttctatacttcttacatgttgcgactgttaagtttttacagacagcaacagttgttgtgattcaacttggataatgagaatcttggattttctcaaactttctatatcatctctggtattttgttaatgtatttgcaccatgacctgcaagtttttttttattatatttggacttgnattaacaaatcattgcttgtaaatggtttgttggcaatgt

SEQ ID NO: 114467 - DNA, 1738 bp, Glycine max
  Clone ID: PAT_MRT3847_74372C.1
ctaagtcccaaaacacaaataaattgagcacattagtagattaggttagtgtgacactcgcgtcaccctctctctgtctctcccctgcggctagggttttgtctttcactcactctcttctctttcttttcttctcatttcccttctctttcgatctgaacaataataattaaccatggaaccgtcgctgagttaacctttttcttctgcgcggtgctgttctcttttgttgtttgggtttttttttttctttctgagaagggcttgttgttgttgtgtttcgaaataatggcgactacgaatccctttgatttgttgggcgacgacgccgaggacccctcacagttgatcgcggcggagcaactgaaggccgcggcagccgcggccaccgcgccacccaagaaggaccaggccaagcccggagctcgcagcggcgcgccggcccagttgccgtcgaagccgcttcctccctctcaggctgtaagggaggctaaaaatgaaacttcttacggcggtcgtggtggtggccgaggaggtggaagaggatttggacgcggccgtggtggcggcggtggctttggccgtgatttttccaatgatgataactcatcggcccctgctaaccaaggatcttttgaaggagattctgggaatccctcagaaagacgcggttatggtggaccccgtgggccctaccgtggtggcggcagtggacgtggtcgtcgtggaggttttagcaatggtgaaactggtgatgaaggacgtccaagaagagcatttgaacgccacagtgggactggacgaggaaatgaattcaaacgggaagggtctggacgtggtaactggggtacacagaatgatgacattgctgaggtgactgaggaagtggtgaatgaaactgaaaaggttcttgctgatgagaagcctgtaggagaggaagatgcagcagaaggaaacaaggacagtcctgctaatgaaaatgaagaaaaggagcctgaggacaaggagatgacactggaagagtatgagaaggtgctggaagagaaaaggaaggccctgcaggctcaaaaaactgaagcaagaaaggtggacatcaaggaatttgcatccatgcagccactgtcaaacaagaaagaaaatgatgagatctttattaaattgggatctgacaaggataagcgcaaagatgctttggagaaggaggagaaatccaagaagtctgtcaacatcactgagtttctgaagccagctgaaggggaaaggtactaccctggtgggcgtggtcggggacgtggccgtggttctagaggaggttacagtggaaatgcatacagcaatgctccagctccatcaattgaggatcctgggcacttcccatccttgggtggcaagtgaggttttcctgaacccttctgacatttccctgtcctttttttgtcaattttgggttcttggatttggacttaaaagcaggaaaaaaactttggtaattggatttcctgaattagaagggttattattttgacttctatgccttaaaatgtaaatttaggttgttcttcatacgttgtagccttttccttgtgtttttctgttactatggttggacattccgggggggttatatggtggcggataagacaaatgttgttgagtttcgttttatttatagattgaattctcagttttgatttgaaaaaaaaaagggcggccctcgcgatctagaaccggacgcgtg

SEQ ID NO: 114468 - DNA, 330 bp, Glycine max
  Clone ID: PAT_MRT3847_74373C.1
attagatcgctagcgatcgctctatacgatctaatcttacgtacgtgttcattctacgtgggagatatcatatagtgtctctttaaatcaatttactaacccgtgacactcaaattttgagacttggaaaactctggcgttatctaacttaatggactagctgaacattctccttttgtcagttgtcgtgatacacaattaggattggactgatcgagcttaagaacagatgctcagtctgaatggagaatggcacgcaagctgtaacggcacattaaaagacgccggtgatgagagcactcgcaaagcgaccgataaagttgacatctt

SEQ ID NO: 114469 - DNA, 673 bp, Glycine max
  Clone ID: PAT_MRT3847_74374C.1
gacccacgccgtcctgtatcagtaggaaataaggttatggtagcagaggagagggttttgcagttgcttcgattttccttttaaagcgcttcgacaaggaatgagttatgaattatgatgcgagtggcaaaggcaattcatttctgatttcaggtatttagtaagaaagtgactggataagagaatgagtgctgagattgattcaacttatgctcctgaacctcacaaaatgtctggagcaactaccagtggccaaaagctctctatattttctgccaaatctggatttgtcatccctaaaaacaaattgtcagggtcgctggtccctattttccgaggggctaaacaacatggggtcactgctgctgccatcaatgaagaaagttcaaaacaaattgagaggagatcaaaatggggtcctgatctcacacaagatgcagctgtcaggaggggaaaagttttagctttgcagattcgagtggatcaaattacaaagcagttggaatcagaaaaactggaagttggggacactcagaacttgaatccagatcaaagcatatctggccctcaaattaacagcaaggcagaaatgctcgaacttgaaaacttttaagcaatatttgaaatactaaaattagatcccagtatcaagccttaaataaactcctgatgt

SEQ ID NO: 114470 - DNA, 561 bp, Glycine max
  unsure (1)..(561): unsure at all n locations
  Clone ID: PAT_MRT3847_74375C.1
gcataaggtgattttaatttatttgagaagtttgatcatttaattttttttttatctcttctataggggctaatggataagtgtatccaaattgaatgattaagataagccaacaccttaatccaatggaccatgctttaagcttcttatataagttcatttaaactcccaaaaactcacaaaaacttggtcattcttcttctatttcacaagctggtcattaggaaaggagacaaaatttccattcttcttccaagctttttcaaatgttcttgagcccttcttacatcaagcttaaataaatgacctccattttcaattctaagcttgatttgcacttcatatttcttgctcctatatctcacattggtgggtttccaaaacttatttttngcactcttggaaggttgngaaactagaaatctaaactccctcattcttccttctaaatttcggggagcatcatcaaggtaagggagggtttctccaactcttngaatattcttgttgttaaactttcttgaattgttgtatcctgaaatttttgcattgctgccctgt

SEQ ID NO: 114471 - DNA, 2822 bp, Glycine max
  Clone ID: PAT_MRT3847_74376C.1
ttgcagaagagatctaaacaacgccgtttcttccattctccgccaaacatccaacaacccctaacaaacgataccaccaaccactacacaattccaattcaattagcccacgcgtccgccaattttcatggaacccctgtctctccctcctctcccagtcatggacgacgccgaagacccttcctccatttgggacttctcttacctcctcgacttcgacctcgacgaccaagatattattattaataacaacaactctctccctcttcccttcaacgaccaccccgctccaaacgagatccctcaaaacgacagggtccgaaagcgcgacccgaggctcacatgctccaacttcctcgctggtcgggtcccctgcgcctgccccgaactcgacgcgatactcgaggacgagggtttgcctggcaagaaacgcgcccgcaccgcgcgtgcatctgcatccgctcgctgccaggtccctgcctgcgaggtcgatatctcagagctgaaagggtatcaccgccgacacagggtttgcttgcgctgcgctaatgccgccaccgttatgctcaacggcgaggccaagagatactgccaacagtgtggaaagtttcacgttttgtcggatttcgacgagggtaaacggagctgtagaatgaagttagagcggcataacacgaggggaggacgaaagcctacgacttattctggaggggcgactcatagacaactactgaagagggatatcataaacagcgaggaagagttgcctgaaagatatgggcgtcgatgtttgggcaggggattcttgacctctcgaccagctatttttgtgattgtttctgatgctgtttgtcttggggtatgtgttgccgaccttcatcctggtagggttagtgagttagcagtatcggttagaaggtgcttgtttaactattagtattttttgcatttgtcttctagttggtacatatttgatgtaacactaaataaatcgtattgtgaggatataatacggctgcgagaagacgacagaaggggtcggatttcttttaagctttatgattggaatcctgcggaatttcctagaaggctacgacatcaaatattccaatggttggcaagtatgcctgtggagttggagggatatatccgccctgggtgtacgatcctgacaatttttattgcaatgcctaacatcatgtggataaatttactgaaagaccctttggagtatgtgcatgatattgttgctcctggaaagatgctatctggaagaggcactgcactagttcatctgaatgacatgatcttccgtgttatgaaagatggaacttctgtgacgaatgtcaaggtaaacatgcatgcaccgaagcttcactatgttcatcccacatactttgaggctggcaaacctatggagtttgttgcttgtggaagtaacttactgcagcctaagtttcggcttcttgtatcgttttctggaaagtatctgaaatgtgagtattgtgtgccttctccacatagctggactgaagacaacatttcttgtgcttttgacaatcagttatacaagatatatgttcctcatacagaggaaagtctctttgggcctgcatttattgaggtggagaatgaatctggtttatcaaactttattcctgtactcattggggataaaaaaatttgtactgaaatgaagacactgcaacaaaaattagatgtatctctcctttctaaacaatttcggtctgcatctggtggttctatctgtagctcatgcgaaacttttgcacttagtcacacatcatcatcagacttacttgtagatatagcatggttgcttaaggacaccacttcagaaaattttgacagagtgatgacagcttcacaaattcaaagatattgccatttgttggactttctgatatgcaatgattcaacaatcattttgggaaaaatattaccaaatttgataatcttgacagaaagcatgaaatccaatgttgtaattaataggacaagtgatgttgacataatgcaactcctgaatcacatacataatgctagaaatgccgtatatcagaaacatccgaaaagtgaaagtataattgtgcactctgaaatgaaaggctttatacttgctcagggctgctcccaagataacaagctatcagttgcaattaacagccagggtatccagtcgagagcagatgagaagtggggagtactgaaagtgaaaagtccaacttctaatgagaaaatggaaagaataccacttttgaagagggatattataatgagtatggaagagttgcctgaaagatacgggcgtcgatgtttgggcaggggattcttgacctttcggccagctatttttgtgttggtttcggttgctgtatgtcttggggtatgtgttgccgtccttcatcctggtagggttagtgagttagcagtatccgttagaaggtgtttgtttaactattagtatttttttgtacttgtcttcgagttggtacatatttgttgtaacactaaataaactggtgttattgggatgattaggtagtttattacattggaaagcttaatccaaggttgctaatttgtgcattaccaattttatcggatgtccagagggacttgcagttgcaggtgctgtgactgcaacgagtctgatcattaatagttaaaatttgtaattcctgttaccattattacaattgggtgtttatgccagagttctctctagaaacgtgtaattcttgttatcattatattataatcctgactagacttcatttttttttgtggctcactctccg

SEQ ID NO: 114472 - DNA, 461 bp, Glycine max
  Clone ID: PAT_MRT3847_74377C.1
gggcgtccgctcgaatttgggtcgttcaattgctgttgaatcaaaagttaaaatgatgtcttctaaacctggaactgctcgggatttgaaagcatcaagacatacaaaagattctgcttcatttgacaggaaatttctgtctattattgttcgacctgtgatttgttcaaccatggttagttctgttgaaaacacatcaaagggtgatcagaagcttacaccgcatggcgaaactgctaaaccttctacagtcaacaacaatcgagagtttaaggtcaaccaagatggaaaattatattcatcatcgaaatctatcaataatacaagcagtaaaagtccagaacctcaagttagttcagatagaacatcaacaagtgtcgatgaaactcaacaggataggctgcctcgatcacaagatacagctaatcaggttgacaaaactaaagatagttctagtgatc

SEQ ID NO: 114473 - DNA, 285 bp, Glycine max
  Clone ID: PAT_MRT3847_74378C.1
ttttgaattaaattgaccatgcggtaacatcttatgggcaacctacctagccatctgaaatgggtgattttcgtgaattccttgtaacatatatacatcatactgcagactatgccaaaggaagacggagaagatctatgaagctccttatctatctgatgatcgttctgacaaaaaatcactggtaaaactgttaaaatttatccatagacacaatgaacagacagaggagatactcaacatgtgatagtgatagctatttcttagattccgtgctagatttat

SEQ ID NO: 114474 - DNA, 2116 bp, Glycine max
  Clone ID: PAT_MRT3847_74379C.1
ctcgagacagccgtacgtgttcacgcaagaaaccttgttctcttggaattataacgataaatagacatagcgcgagacgcaaaaaaaagtaaaaaaagcaattgaatttccaatcctgagaccgcaaggaaatataactcaaaaccttattcttcagtgtcgcttttaccaaaacgccaaaatcgccctgtagactgtacactgagactggttttaaagcaacgccacttgttccagccatgcctcctcaagagacccaacaacctctgttatcggaggagcaagaagagacagcctacgattcctcggagaaggttgtggtggtcggaatcgacgagcacgacggcgacttggaggcgccgccgttctcatggcggaagctgtggctcttcaccgggcccgggtttctgatgagcatcgcttttctggatcccgggaacctcgagggggatcttcagtccggtgccattgctgggtactcgctcctgtggctcctcatgtgggccacggctatgggccttcttatccagcttctctcggctcggctcggcgtggctacgggaaggcacttagccgaactctgcagagaagagtatcccacatgggctaggattgttctgtggttgatgactgagattgctcttattggcgctgacatacaagaggttattgggagcgctattgctatcaggattcttagtaacggcgtcgttccactctgggctggtgtcgtcattacagcttttgattgttttatttttctctttcttgagaactacggtgtgaggaaactggaagcgtttttcgctgttctgattggtgtaatggctctctcatttgcctggatgtttggtgaagccaagcccaatggtgttgatgttcttgttggtattttggttcctaaacttagctccagaactatacagcaagctgttggagttgtgggttgcattattatgcctcacaatgtgtacttgcattctgcgcttgttcaatcaaggcaggttgatcccagcaagaaaggccgtgttcaggaagctcttaattactactccatagagtccaccattgcccttatagtgtcctttgtcattaatatatttgtcacaactgtgtttgctaagggcttttatggtactgaaatagcaaatagcattggtcttgtaaatgcagggcagtaccttcaagagaagtatgggggtggactattcccaatcctgtatatatggggtatcgggttattagcagctggccagagtagcacaattactggtacatatgctggacaatttatcatggggggttttctgaatttaaggttgaagaagtggataagggcattaattacacgaagttttgcaatcatcccaaccataatagttgctcttatatttgatacctcagaggaatcgttagatgttctgaatgaatggcttaatgttctccagtcagttcaaatcccctttgcactcattcccttgctttgcttggtgtccaaagaacagataatgggcagtttcagaattggccctgtcctcaagattatttcctggctggtggctgctctagtgatagtgataaatggctatctattgctggaattcttctcctctgaagtgaatggggcagtgtttgccactgtagtgtgtgtattaacagctgcatatgttgcatttgtactttaccttatttcacgggccattacctatacaccgtggcaaagtttaacccgatcaaagacaggctaccacagagagttgagcagtcaaattccaattcctgaaaaccatggagtaggaaatgctttgcagctgaaggctttcacaagtacttttcctcgatttttttaggcatactcatgcttgttaatttgtagaagaaattatgctgagggcagtggtaccttgttggttgtcatacttcaacaaaacaagtcaattatgtatttgtatttctgtcaaaattcgatgcataatgcagctgttagcatgccttggatattgagataatgtagttgagataccttttaaaactatgatgttcacagatagttccctttaaaaaaaaaaaaaaaaaaaaaaaaaaaaaaaaaaaaaaaaaaaaaaaaaaaaaaaaa

SEQ ID NO: 114475 - DNA, 521 bp, Glycine max
  Clone ID: PAT_MRT3847_7437C.1
aagagggcaaagatggagcagttttactttgccgaggaaataaagaacattgtgagctgtgaggggccgttgagaatggagaggcacgagagggtggaccagtggagaaggagaatgagcagagctgggtttcaagctgcacctataaagatggtggctcagtctaagcagtggcttctcaagaacaaggtttgtgagggttatactgttgtggaagagaaggggtgtttggtttttggatggaagtcgaggcctattgttgcagtttcttgctggaaatgctgagctgaatcatcatcaatctccactgtcccagcagtttaaaagttggtgtctgggatcaatgtcaataaataacagtttcatgcgagctgttgtgtgctagaataattggttaggacccaaattgtgttgttcaacacgctaaaactttgggtgagaataatgtcttttatcagtaagtgttgtggctgctcgggatcgaatagatgaaataaagtgataacttgtttggtgtgcat

SEQ ID NO: 114476 - DNA, 177 bp, Glycine max
  Clone ID: PAT_MRT3847_74380C.1
ggaagaaccccggatgtcaaaaaaaatggaccgagctgtttgttactgtccacaccctccagggctggtgaggctgcaaatcctaaaattccccgtattccagcgacgggggatgaccctcccgattttaaaaaaggcctataccctgcgggggcaaaaaaagggtttaaccttttc

SEQ ID NO: 114477 - DNA, 348 bp, Glycine max
  Clone ID: PAT_MRT3847_74381C.1
gcggttaaaaaaagacttccccctcctcctaaagtagcacttttaaaaaaatgtgaccccattacttcctactcctaattaacaacaaacatttcaaccccaatcttccatagctcaccccaccccttctcttaatttaaacgcacatccaacaagaaaactcttttgagatttcttcccccttccccactcacgcattttaactcacccccctactcattaaccaaaactatacatacagttggttttataccccaacacattcaatctctattcttccaattaaaacatttgaaaaaacaaacccccacaacattatctatgataaccacattttctacaccctac

SEQ ID NO: 114478 - DNA, 562 bp, Glycine max
  Clone ID: PAT_MRT3847_74382C.1
gacggctgcgagaagacgacagaaggggaaaaccgagtgagtgtgagcgttaactacaacgcaatggtttacataacttcgtgggatgaattcgtggagcgatccgttcagttgttccgtgccgatcctgattctacgcggtatgtgatgaagtaccggcattgtgatggcaagttggtactcaaggtcactgataataggcagtgtctgaagtataagacagaccaagcacaagaagccaagaagatggaaaaactcaataatatattctttactttgatggctcggggaccagaagtggatccatcagaagtcactgggaaagaaccaatggatacacaaacgaccaagagaggaaggggaaggaagcaataactgatgtatctggctgacaaaatagtcttcatgaatcttggggaatcaataatgacgtgatatccccccaccccaccccccaaaaaaaaatcatactgtagtgtctttattgcatataaaaattgtttttgttttctgaattctcctttctcaaatattaatcttgggtatggttttacctacacct

SEQ ID NO: 114479 - DNA, 423 bp, Glycine max
  Clone ID: PAT_MRT3847_74383C.1
aaacccaaccccaatccggtttggcgcgcccaaaagaaaggggggcggggtgccttcccttcccttaaaaaaaaagaagggcccccccggttagaaataaaaaagcaaggagcccccccccgccgcgggggttgggaaccggttcccgggaggggaggcatggaaaacggacgggcccatggcctggccctttggcaagggaagggtccttccatttcaaggcccggccgaaccccaatcctaagttcccggggcggggatgggaaagcattttttttgtgttggggaaaccaaaatcaatggccggggcggtacatcaccacgacgggaaaaggaaaaccctggcccaacccaaattaattggggtggaggccctcctccttttgtggggtgggagaaaaaagaaaagggccggaccgattt

SEQ ID NO: 114480 - DNA, 1125 bp, Glycine max
  Clone ID: PAT_MRT3847_74384C.1
tagaaatggaagcggtgaagatggtaggtttgaggcgactgatacgacagcgttcaagtctcagagactccttagccgagaaggtccatagtccagttccctcgcagcatttggcacgcctcacccccaaacgcttcttcgatcttcatcagcttggaaataaggaagcaattgagaaggagcgcgctcgacttgcagatgaaatgactaggggatacttcgctgatatggctgagttcaaaaagcatgctggtaagattgctgtagctaataaattgataataccagcaatggtagccacaaagtttcctgattttgaagtcagcttcacagatggtaaaacaatgaagcttcctatccgtgtttctgatcgtgcagttgattctgataaatcgtctgtccccaaggcatctttggtttgtctttcatttcgagcaagctcccaggaaatgatcaattcttggagtgtgccttttactgaagcatttagaaaatcaaatgatgttcatttatatcaggtatcatttatagattcgtggcttttatgtcgggctcctataaaacgtttgcttctctggacaatgaagaaacctagtcatcatgaaagcaaggatacacttcagcagcagatagtgtattcatttggtgaccactattatttcagaaaagaactcaggatattgaatctccttacagggtatatctttctacttgataattttggtagagtaagatggcaaggctttggatcggcgacacaagatgaactatcttctcttctttcttgtacatcacttcttcttgatcagaaatgagatattttgggctatgatagacatggatgagattatgcagttttaactaataacacatttctggagttactattttgtggggactaaaaattgtaacccaaggaagaacccgagtgaggactcgtagaatattgtttccccccaagattttttggtatatttatcttttctttttaatcataaattgaaattcgttcaaataaaagcacatggaaagttacaaatttaaaaaaatagatttattcaagaaggaagatgataaattattaaatgtttcttaattgaaaaaaaaaaaaagggcgagcgcggc

SEQ ID NO: 114481 - DNA, 320 bp, Glycine max
  unsure (1)..(320): unsure at all n locations
  Clone ID: PAT_MRT3847_74385C.1
ttttttatcgctcatgtaagtgagtgaaactaacaaattttaaaatgtttaattcttttgggattatataaaactcatgtccacgtttttttaggtattattgctgccttttacattgaagaaacatataaatcgagcaaataaaatatttacttaaaatatttactaagttgtcattaattacatattagtgtaaaaaaaaaaaaaatactccttgccttatatatttaactggatttggaagttccttacatagttaattgagtttaacttgtttttaaagattttaaaataaagtattattntgatttataataatc

SEQ ID NO: 114482 - DNA, 428 bp, Glycine max
  Clone ID: PAT_MRT3847_74386C.1
aaatgatcaattcttggagtgtgccttttactgaagcatttagaaaatcaaatgatgttcatttatatcaggtatgatttatagattcgtggctttgatgtcgggctcctataaaacgtttgcttctctggacaatgaagaaacctagtcatcatgaaagcaaggatacacttcagcagcagatagtgtattcatttggtgaccactattatttcagaaaagaactcaggatattgaatctccttacagggttataagctttttcttattcaattcatttttaaccaatgaaattattggttatgaaaaatgctgttttttaacatttcaacctcacaggtatatctttctacttgataattttggtagagtaagatggcaaggctttggatcggcgacacaagatgaactatcttctcttctttctt

SEQ ID NO: 114483 - DNA, 385 bp, Glycine max
  unsure (1)..(385): unsure at all n locations
  Clone ID: PAT_MRT3847_74387C.1
gataaaaaaaaaaagaaccctatttaaaagcttgacacaaattgaaggttggaaaaaatggaaaaaaataaaaaagggaaaagggggcgaggaaaaaaaaaaaatacaatttttgaagggggagcataaaaaaaaattgaccaccaacatgagaaggcctcatagactcattgggacggttgccaatggttgcccaaaaaaaaaaacatctccaactccttttgcaaatgacaagttggaaacacaaagggcggaaccgttgggcaaaaaaaaaaatattggacgaaagggctggncaaccaaaaacaaacccttcacttgcctcttggttggcaagaaacaaacgtttttgaagctggtccttaaaggtttaaaaaaaaaagaa

SEQ ID NO: 114484 - DNA, 587 bp, Glycine max
  Clone ID: PAT_MRT3847_74388C.1
caagcatatctcatttgaatacattccttgtagtttatactgaaagatgggtttgaagatggcgttactgatcctaggcctttccctcatgctccttttggtctcctctgaggtggcatccacgaatacaaaagagggtaagctatacgtcattttataatgtctctagttaattatattcttatgattcttttacaataaaacatactaattaacaattctctttaaagttgttaaagaattagaaaaataaaataaaatgtaaaagaaggctacgatatacttttgttgtaatttctatagtactttcactgcaattttttattaaaaaaatactcattggtttctatattaatatccctgaaatatttgttaataaaatatttaaatttaaaaagtttataaaaaaaattaaaaaaatgtttacaaaaaaagaagtttctaattatattcttttttttctttttcatccctcaggccccaatagtcatctgagacaatttttacattataaataattgaatttgattttatttttttataaattgaaaaaatattaatggtacatacataataattacttgaga

SEQ ID NO: 114485 - DNA, 781 bp, Glycine max
  unsure (1)..(781): unsure at all n locations
  Clone ID: PAT_MRT3847_74389C.1
gcctgagtataagaaagcttgtgtagtagtatagactaagggcagctcctgaaatgtccaaagggaatggagatgatggcataatgtaatagacacatatataccaaggaagcaagacgttctgagctgcgtgggggatgacgtacgatttcattttatttttagtgagtggtataggacttaggagtaggaggcatgacatacatgaatatgctagtctatatttggactaatgtctaatagtggagctccataacagtatatgtctaccacttccagccagctcaaatctgaataatttaactctctccctcctgaatcaaccaaaatcatatatatcaatgctgtccttcaacaatattagcggctaataatgctctcattgttattctaatttatagagaggaaatttctccacttcaagcctaaccaacataaccacttttacatttttagaaaactaatttagttaccaaatttattgaaggagtagtgttactgttagctagatcaccaaattaaggactttaatttctctttttattattattgtttggatgtaaggttggtatagtagtaaaagggagagaggttatatgtttgaatctcccactaaacaaatgatattaataactaatatttattgataaaaaaataaaaattattatgaggatgtcaacttggaaaaaaaggagactagagtgcnattgaagtgtctnttacagagaaaaatatgcaaacgtaagaatggatgaanctggcatatagttttgcgtgggaa

SEQ ID NO: 114486 - DNA, 454 bp, Glycine max
  Clone ID: PAT_MRT3847_7438C.1
ggtagaggacgatttcctgatgaaggtgctggagggcatggcctttgctggctttgtgtcagagcgtggggtcccataccgccctacggacctgttcgatgagctggtggcccacgaggtggcaaggatgcgggcggatgagaaccacccccagcgtgtcctgcgtcacgtccaggaactggcagagcagctctacaagaacgagaacccgtacccagccgtggcgatgcacaaggtacagaggcccggtgagagcagccacctgcgacgggtgccccgacccttcccccggctggatgagggcaccgtgcagtggatcgtggaccaggctgcagccaagatgcagggtgcacccccagctgtgaaggccgagaggaggaccaccgtgccctcagggccccccatgactgccatactggagcggtgcagtgggctgcatgtcaacagcgcccgg

SEQ ID NO: 114487 - DNA, 184 bp, Glycine max
  Clone ID: PAT_MRT3847_74390C.1
actaaagcattcacatgcccttattgaatttatctatgtgaatacatgccaaatacatgcgatccataaccaggatgtggggaacctcgacaggagcatctttaggcagaggaaaagtatgttagaccctcacttttccacagatgtccaatagtggaaggaccctaaacaaataatatttaac

SEQ ID NO: 114488 - DNA, 266 bp, Glycine max
  unsure (1)..(266): unsure at all n locations
  Clone ID: PAT_MRT3847_74391C.1
ctttgttgcattccacacaacatactcacccaggngcgagnagagacgngngggtgttggtttgattctgnagntactcncnatgatctcagagtggaggtgaatgaagatgtgagatgtggatgtgatgtgagaaatattgaagggtaagatagatacctcgaaagtctcatgctccactaacgccgccgcccccgncttcctcctcgagaatcgcgacttcctcatgctcctcaccactccgtcgncgtcctcatcggctgcgt

SEQ ID NO: 114489 - DNA, 272 bp, Glycine max
  Clone ID: PAT_MRT3847_74392C.1
acgtgaatgtgtgatgatttattaatttctttctctgtgacttggcttgttgtcattctgaatgctgctgctaatacatgcgttgttggagttcaattggttgctttgctgcctctttttttgcacttactttttatacttatttccatcaacttgatttgtagttatctctttcagtttaattcccctcaatgcttcaattgtatttactgttagagtttaattcatattcactaactatgatgaaaatcttatcataaattatccattat

SEQ ID NO: 114490 - DNA, 193 bp, Glycine max
  Clone ID: PAT_MRT3847_74393C.1
ggagtttcacttgaagcacacacttgattacaaagccatgggtcgtactgtatccacacgacaagtgacccaggctagagtgaatcttttcgatgatcagaaccgtcacatcatgacgaatgtgaaaggacctgtgatacaaggagacattctcaccctactccagtctgaacaggaagcacgaacattgcgc

SEQ ID NO: 114491 - DNA, 470 bp, Glycine max
  Clone ID: PAT_MRT3847_74394C.1
aaagggggaaacacattctattctgagactctaaggaaccaccactcctttcaacccattcccacgacccttcaacgcatcttagagcataacaacatgacaacatcagactgcccatgccccaacctatatatgaccggcccatatcattatacaaaaggaacgaacacattccttggacaccaaacgacccacccaacatattgtttcatgagggtcaggatgagccattaacgaaatgtgctaccgccttgtaccccagactgccattcataaccaacgcgacagaccctctattggacgaaaaccccatttcacgcaaaagggcggagccattgacgaaatccagaacttcggtgggattatcaccacaagtggcaacgggcatgcgaacaggctcatggctaatccccatggccatcaatccgctcacaaagggaaccacagcagggacctcagctggtgacgaa

SEQ ID NO: 114492 - DNA, 357 bp, Glycine max
  Clone ID: PAT_MRT3847_74395C.1
gcaaactgttcgcaatgcttttgttgatttgataacatggtaattggctgaaactttgcttgaactactattatgtatatgatatgatatggttttgtttccaaatttgagttgtgaccagtaaattttgatggtgaatcaatgaatgtatttgatgccatgactgatgttatcctgtcccattaagatacagatgggattcaaaatacgtgtgttgtttggagatgcatgtgcttaattgtgcaatctgcatgcaaatttcagtgtttatggctatgcaatgcttgttatcgatctcataaaccaaatggcaatggaaacgtagtcttttcgtatgtctattacttgatttcaagt

SEQ ID NO: 114493 - DNA, 637 bp, Glycine max
  Clone ID: PAT_MRT3847_74396C.1
cccacgcgtccgcgcagaggaacgggatcgggtctcaataaaaagggtcacaacttgttgtttccagtgataatagaaatatcgaggcactgtttttgtattctagaagtagaaggagagagagccctagttcgcgttctcgtcacacacgaatgcttctttgaccatggcttccacagcctcttcgctcctccgagcttctaggtccaaactttcttcttcctcctccgcttctctatctagaaccttcgctcgctccgctcctcgtcgatcccccggctcctccgccgccgccacccgctccttcggctccgccgtcccgcgatggagccgcggcgtcgactggcgctctcctctcggcctccgccctcatattagagccgccgctcccctcatcgaacgcttccaccgcagaatcgccactagcgctactgagaatcctttcaagggaaacctcacgagtctccctaggcctggtggtggcgagtttggaaagttctacagccttccgtcgctcaacgatccgagaatcgataggttgccatactctatcagaattctccttgaatctgcaattcgtaattgtgacaatttccaagttaaaaaggaagatgttgagaagattattgacttggga

SEQ ID NO: 114494 - DNA, 127 bp, Glycine max
  Clone ID: PAT_MRT3847_74397C.1
tatggttgtattctttgttaatgctataggcactggaaaaagcccattggagaaccttttggaccatcttgataaccctgtgggtaacaatgcttgtgtctatgccactaaatttgacccaggatct

SEQ ID NO: 114495 - DNA, 641 bp, Glycine max
  Clone ID: PAT_MRT3847_74398C.1
gaagaagcatatccagcagattgtggtgaaatgtccgaaagcattaaacccttttgtttctttctttattaaaaatattttggatcatatctcgtttctttgaagtcaaattggaagtatatttagcaaaattctattctataaggatgtattagagaaaacttaaagctgctgtttcatttctactttttaggtaaaaggaaatcaacacacaatgtgagagacttcattgaggaggaagccgaagtatcttcagatggctatgtatctaatgatgaagatgatgaggaaggcagttcatttgacagtttcatagatgacaggaccaaccctacagcagccagtcagcctgaagctagtagaatggacatgatggcaatttacagctctgctggcgttctttgctcagtcaaacaccaagtaatggagggcttgatctttgtgccacctttactcctgaccgtgtgactatggcagccagtattagtgaaagtgaggattctacagggaagacagtggatcacttccacgcagagccaaccaaacagtcagcaaatcggactttggaatctgttagtatcaaccagataacctcagaagcagtggcttcaacttggtatcctatggggaactgggacaga

SEQ ID NO: 114496 - DNA, 465 bp, Glycine max
  Clone ID: PAT_MRT3847_74399C.1
aaccaagcttaacaccaccttagttaacacaagtggcactagaggtcaagcctaattttaagcaatctctcattaccataaacagaaaatatatatagttggtaaacaacattgaatataattcttagtagcttcatcgcttattttccttgaccaagtcggtttgcttgtcctccaacaattaacttgcagcaagtaaaaaagttgagttaggcaaatcactacaaatgcaacacaaatatgagcacgtgcgccatttaagtgaatgaaccagtaaaaactaacattgctgactcaatgtttctgagttggccaactcctgattacagaattcaaccaccaagttttatggttttactacttcagcaagatgagataaaccctttactttcaagtgtcaatgtggtttggaaattaagcacctaacatgcatacttgaaggattgacacaacagtgcagaacct

SEQ ID NO: 114497 - DNA, 441 bp, Glycine max
  Clone ID: PAT_MRT3847_7439C.1
ttcttttttctataaaacaatctattccaaatctgtatttaatcggggggcttcagtcatgatcaaatacattaacatttagaccatgactcaaggtaccagctccatataatcaaaccatacacaggattcactgttctagactgataaactacatatcccactatactttatctcagtgtagagacaactgaaattatatgattcggccatctatccctctatttatgacggatctaacgttccatagaaaactcaatagataatctaaagcaacgagaactgtgctgaagcctctcttgtctatataaaaaaaaatttcaatacctactctgatatgcacgagccatgaatctcattgcctgggtgataaggcacaacatgccgctagtgagcaactaaacggccatcagctggagctctgtattaattccccaatac

SEQ ID NO: 114498 - DNA, 515 bp, Glycine max
  Clone ID: PAT_MRT3847_743C.1
tgaaattttagttttagtgtttcatttttattactactattttgatcgaagattatgaagttaattaaattttaatccttgtgctattacgaatgagatggcattctcttaaaattagggataacaacaatattaatttagtatttttaagcatgattattatgcttattaaaaaaaacataattattatatctattttaacataataacaatgattaaaaataatttcataaatgtttatattttgatatgatttaaagaggcgtaatgagcacggtgcagagtcttattttctttcatctttcgtggtccttgtgtgtagtaaatacaaaatacgtgagaaaagggtgtgctttcgtgatggaaagtgccaaagtgggaccacgtgaggtaggacttgtagttctactgattcacgtcggtatcgccacaaacagtagactaactttttaaggatctactacctttaatcaagtggacccgagatcttaatttgtttttcagtctattttttg

SEQ ID NO: 114499 - DNA, 284 bp, Glycine max
  unsure (1)..(284): unsure at all n locations
  Clone ID: PAT_MRT3847_74400C.1
ancaaaanaacaacanacacagcaatatagcatcgcataancgttctcacttctcacttttttttttccctcttctccgttttcntgaatgtggagcgctacacgctaccggcaccncccantattnttccngnggaagangaaaacattgccattgccatgggtgcccctcttntcccttcctttaantccntgcngcancaacncccctcaacanttgactcttactttanctcttcaattngtcctactatntccttttgttcctaanatggactcttttc

SEQ ID NO: 114500 - DNA, 471 bp, Glycine max
  Clone ID: PAT_MRT3847_74401C.1
ggtgagttttataccattagacttaaggaaggaaaaaaggtacactcttatgtcttttccttgaattttctagctacctgttcatttattgaataatcttatactgcgggcatataagggatataattttgctcctggctgtgattgttattgggtatgtgacagtgatgatgctgatatattaaaatcgaatggtatgaactgaagcaagcgaaaattatttttaccaaaaatgaaaaatataatatggaataaattaaactgttaaagttgatgatagtaccatggagacacattgtgtttattggcccaagaaggctctacaagtttacacatggatgcctaaggccaacacttagcttaattgtaatttagatgaggcacaagtgagtggagggaaagtcagttacaaagatatacatatgatatcaggataattgtgggggaaggagtggacatgttttatcttaa

SEQ ID NO: 114501 - DNA, 287 bp, Glycine max
  unsure (1)..(287): unsure at all n locations
  Clone ID: PAT_MRT3847_74402C.1
ctgaaaatgcggaatcctctgcatgatntggaatttgtgttttctttcgtatgttgcgtttgtntaattcaataaagganattagacagnnncatacttcaacgagagggtcatgtctaatttccnttattganttananaaacgtannnacgaaagannattagacatgaggctcttgtngagtatgnnntgtctatttgaaaatnccacacctnttttanttgtcgtaatgatgtgtgaagtgtgtgtaatgntacacnacncccttgccncacaaagnncntnt

SEQ ID NO: 114502 - DNA, 290 bp, Glycine max
  unsure (1)..(290): unsure at all n locations
  Clone ID: PAT_MRT3847_74403C.1
tcggctcgnggtccttggggcctctgctgnggttcttatggcctctgttgggtgcgtcnctgaccttggctcttnctggcctttttttggtttgttttcttggggctgtgtgtcctattgtcntgcttgtctcctttcctttttatttttttccttnattaaccaaatccgtttgttagtgcttggccttctgttttcttttcttttttgctnnnnnagctgttttttcttcatctttcctcgntttnctgtnnctttgtttttttttnttttnntctttgctgttttga

SEQ ID NO: 114503 - DNA, 267 bp, Glycine max
  unsure (1)..(267): unsure at all n locations
  Clone ID: PAT_MRT3847_74404C.1
gattgggctgctgcggggtcgtcncctcctccatctgtgggctctgcgtgctccccgtgttacctctgttttgtgtggcctctccgggttggatgctgctggaggtcaagtctgctttgcgttgggctgttgcttggctgttccggtggatagcttggcgcaggggttcttgctgctgtcctcgccactattcatgctgctgtcacagcacacggctattctcctgctggcctatcctttcttgtctggctactggctgctgctctg

SEQ ID NO: 114504 - DNA, 314 bp, Glycine max
  Clone ID: PAT_MRT3847_74405C.1
gggaaacaaaccaggcttttattttcacaaaatggacctttttcgggggaaagggacctcccttttgcaagagtggataaaaaccaaaattccctgttggggattggcaaaaaaaatggaacccctttaaacaaaaaccctccccccctttacaaacaagtttggaagggaaaaaaaaaaaaccctgggaaagaaaaaaaaaaaaaaaaaaggggtttgcccaagttaaggggccaacatatgtggcgggacccaagggtttaccagttttggaaaaatctgttttgggcccagcaggagagtattttgcaaaa

SEQ ID NO: 114505 - DNA, 1239 bp, Glycine max
  Clone ID: PAT_MRT3847_74406C.1
accgaaccgcaatttccacccaggcgtattaattgttaaaggaagcgaaagaaagattgatcaaattatcgcagaggaattgaagatgggttggagagggatactgggttttgaatatggtatagttcaggccccattaggccctgatatctctgctcccccacttgttgctgcagttgccaatgctggtgctcttggacttcttagggcccctgattgggaatcgccggattacttgagggaactcataaagacgactaggaccttaactgataaacccttcggggttggcgtcgttctagcttttccttttgaggagaatttgaatgtcattttggaagaaaaagttgcagtcttgcaagtttattggggtgattgtacaagggaattggtgaataaggctcattccgctgggatcaaagttgttcctcaagttgggaatattgaaggtgcgaagcaggcaattgaagcaggtgccgatggaataattgtacaaggacttgaagccggtggtcatgtcattggtcaggatggtctaattacattggtgcccagagtggttgatcttgttggtgaccgagagataccagttattgcagctggaagaattgtggatgctcggggttatgttgctgctctagcacttggtgctcaaggcgtctgtctaggcactaggtttttggctactgaggaaagcaatgctcatcctacatacaaaaggaagttacttgaacttgatgaaactgcgtgcacggttgcccctgggagggcaagatggcctggcgcccctcagcgtgtcttgcagacacctttctataaggaatggagatcccttccgccacatgaaagtgaagccaacaagcctgtcattggccattcaacaattaatggcgtggataaagagatacggcgttttgcaggtaccgtcccaaacaagacaactactggagatcttgagagcatggtgatgtatgctggccaaggtgttggtctcatcaaggaaattctgcctgctggtgaagtggtaaagaggctagttgaaggggcacagcttataatgcagcaaaactttaaatagattgtcaaatctcaatagcaggcttacattcactagatttctagtggcctgaaataacaagagtgccagcttcaaatcaaaattcatttggagaaatatgtaatattcacagtgctacaggaaaaaaataatcaaatcttcttgaaacattgcttcccccc

SEQ ID NO: 114506 - DNA, 554 bp, Glycine max
  Clone ID: PAT_MRT3847_74407C.1
aaagggaaaaaaattccaaactaaccaacccctggggatcgacaacttttttttccattttaaaaaaaaaaacccctttcccccacccccccggggttttcccccccaaaatgggcccaaaaggggaacccagggaattcccccaaggcccctttgggaacttggggcccccccccaaaatttaaaaaaaaaaaaccaaaagatagaccaaccttgggactaaaactttttgggaaaacaaaatttgcccccaagggaaggaaaaaaggacggggggggggccccaaaattggaaaaaattggcccccaaaaaccccttcggggggataaatttggggaaccccccccagggggtttccgccccttcaaaggtactttgggaacccaaaaccggaaaaggaatttccccaaaggggtttttatttaaaaacggcacccgttttttaaatatggaaaccctttcccccaacaaaattcaacaaaaaatatttttttttttttacggaaacattttttttggaaaaaacggggggatcagaaaaaactcattttag

SEQ ID NO: 114507 - DNA, 759 bp, Glycine max
  Clone ID: PAT_MRT3847_74408C.1
gtcgtatgcttcgtccctctgccgtcgttgggtaagtgtatccgcgtcgaaaagcttgatgattttgttgaaccccagattttggcatggaaatagccttatcgcttcctcttcagcgttgccatgttcatgttgggacaagttttgggtcgacaaccccaacgttgtctgaaaagcgcagcatgttcattctcggtatgggattcttggggcaatcacttgcacgcaaactccacaaccaaggatgggtcgtgtctgggacttgcacaacccatgtggagaagaagcagctccaggacatggggtttcatgtccaccttttcgatgcaaaccaccccgagtgagtcaacttctaattttgccttcaagttttctttttttccatgacaaaaacacacattggtatgtgggtgctaattggattggatgcccggcgttgcgcgctatctggggcgctgcttcgggggccccgggacgtggcttcgccgcgtctctatggagtccgtggtggtggattgcttaaaaatgtatagttgataagagcatttcgtggtgaataatggtatctttgatgattgggtctttgttggagttaaataaggttgtgcgatccatgtagctgatctcatcccatgggataaggcttttgttgctgttgttgttttgcagtgtggatgtcctacaagtactgaaaaattacactcacattcttgtttctgtcccacctcttgtgggcattggagatccgacgcttcggca

SEQ ID NO: 114508 - DNA, 1622 bp, Glycine max
  Clone ID: PAT_MRT3847_74409C.1
cttttattgtatcacatggctcttgtcatcttccctgtataggcatgtttatttgatggtgcttgatggtgagaaatgtactacaaattagtttggagtttatataaaacatcagcgtgctcgagttgacatctatgcatccacttctcctttgaatgattactaggttatttctgacgagtattcgcatataaaacatgttgctgtatggctaaaaatttccttgaaaatggggcaatctaaaaaacaaggacatccactgtctctgtttttccgtgttgacgcggtaagtgaatgttcgagaaggtgggtttaagcgcacatcagaaacagacatctctcaaaaccagtgggcgtttcattgaatcttcttcatcactgccaaaaacgacaaaccaaaattttaaaacataaatctccaaccccattttctcacacacactctctttttctcttccaattacaacacaatcagtctgagattcgccaccgaaaaacctctcaccatggtttctcgccatttggtttcgctcttcctctgtttcctctgtttcgagatctctgtttcatcaattcgattgcccggtttggaccaagacgccaaggccacgcatggatcggtgcttaggttgaacagaggaggctcttcagtgaagtttgatcccacacgggtcactcagctctcgtggagtcccagggcttttctctacaagggctttttatccgatgaagaatgtgatcatttgataactctggccaaggacaagctggagaagtctatggtggcagataacgagtctggtaaaagcataatgagtgaagtcagaacgagttctgggatgtttctcaacaaggcacaggatgaaatagttgctggtattgaagccagaattgctgcatggacattccttcctatagagaatggtgagtcgatgcaaatattgcactatgagaatggtcagaagtacgaaccacattttgattacttccatgacaaagctaatcaagttatgggtggccatcggattgccactgtattgatgtatttgtctgatgttgagaagggcggggaaacaatttttcccaatgccaaggcaaagttgttgcagccaaaagatgagagctggtctgaatgtgctcacaaaggatatgcagtaaaacctcggaagggtgatgccttgttgttcttcagtctccatctggatgcaagtacagataataagagcttgcatggaagctgtccagtcattgagggagagaagtggtctgcaaccaagtggattcacgtcagtgactttcaaaaaccaatcaagcaagtggatagtggagactgtgttgatgagaatgagaattgccctaggtgggctaaagtaggtgaatgtgagaagaatccactttatatggttggtggtgaaggagtaaaaggaagctgtatgaagagttgcaatgtttgctcttcttagggcgtctattaccctttctttgctctgaaatgcatgtagagtcataatacgtcgtcaaatatattgtatataacattcatttttgttgaacttcaatatggaactctgccagtacattgcaaagctgttttttatttatttttaaatactgtttttttg

SEQ ID NO: 114509 - DNA, 401 bp, Glycine max
  Clone ID: PAT_MRT3847_7440C.1
aagtgcgtaaatatttaacgacactggctggggtggggaattgaagcgagtcagcgactaagttgacgttgacttgacgttgacgttgacgtttgagccagtcgagttgtgccctaattcagaaagaattgaattccgggaaggaagttctgaatttctcattgaaggaacgcaaaatcataaaatcaaatacagtaccaaaaaagaataaatttttggtttggtggaaagagaaagaaaagaagggatcatcatgaggagtgggagaaagtcgatccacgcaatcacgacatgggtgcggcggcaacccccaaaggtcaaggcttttctcgccgtcgtttccggcatggcggctctcgtccttctccgcttcatcgttcacgatcacgacaacctttttg

SEQ ID NO: 114510 - DNA, 193 bp, Glycine max
  Clone ID: PAT_MRT3847_74410C.1
cgtccggaagatggaaattgcacaagctagcaatacaccccaccatggtaactggagtgattcgttgtagtactcacaaataaatataataagagctatgtttgctgctagaatgatgtaaaaccaccacgtggggactgatttgtaccttctcataagtcttgtgtgtatgtcaatttttttactgtttcca

SEQ ID NO: 114511 - DNA, 345 bp, Glycine max
  Clone ID: PAT_MRT3847_74411C.1
ccggctggagacggctgcgagaagacgacagaagggtctctagtctccagtaagcttgaaattagttttccatctattcattttcaacaagggaacatttccccatacaaacaaagactctataaatgtataaatgtataatgtaccacatttcaagttcattaaaattttatgggctactcaaatggaatacatgtaagtagtaaaagacataaattaatcttataccagcatattcatgaaactgaggaatacatataacaaaatgtactttaattagcaagaaaataaactgcaatttcattcctgaagaactttttacctaacaacctaattaagagaaaa

SEQ ID NO: 114512 - DNA, 348 bp, Glycine max
  Clone ID: PAT_MRT3847_74412C.1
ttcttattggggatgcagcccacacattccaacgcctagcaggtcgcagaccttaattacgtttgggacactaaccttccacatccaaaccttgtgactttgggaggaatttcaggcaattcaataggtgatgttgttacatccgttttataccaagcgaacacatctccagttcctgaaaagcttaatgtatgattaagtccatgtccataatctaatccatagatcacatgcactttaaacatgtggctctcatcagggatgcatcccacacactcaaacctactactcgtcaaagatttcatttcggattcgtcaatggaatttcacttacccaaattcttgcaa

SEQ ID NO: 114513 - DNA, 1301 bp, Glycine max
  Clone ID: PAT_MRT3847_74413C.1
cgtacggattctcacaattcggggcacttttgcaacaaaaactaggcttctcatatctactaatcctttgcttagccactcttgtttcttcacacaggccttatacaactccaagtgtcacacgcttgactgattcttttcctcgtgtccaagttgatagtgctttttctaagacctttggggccaaaaatatccagtttcttagtaatgggtccacggtcacactggctcttgacaaaatctcaggctcaggcttggtatcacaaagcagatactcctatggattcttcagtgctgcaatcaaactaccttctggtttgtcacctggagttgttgttgcattttatttgtctaattcagataaatttcctcacaaccatgatgagatagacattgaactgcttggtcatgataagagaaatgactgggttattcaaacaaatatctatgccaatggaagtgtcagcacagggagagaagagaaattctatttctggttcgacccaacacagcagtaccattattacagcatcttgtggaacagttatcacacagtgttcttagtggacaatattcctgtgagagaattcatacacagcaacacatacccttctatttatccatcaaagccaatgtcagtgtatgccacaatatgggatggttcagaatgggctactcatggtggcaaataccctgttaactataagtatgcaccatttgttgtttcatttgcacaaatagaattgagtggctgcatttctgatcccacagcaccagtttcttcatgctctaaggccagttcttcaggcctagacccagttaatggaccagaatttactaagctatcacagcagcagatagcagctatggattgggcaagaaggaagctcatgttttactcttactgcaacgacagatccagattcaaagtcatgccaccagaatgccattgatttaaattaatttgagaaaaaatacgaaaagggaattcctgaaattgcatttattaattatcatgaaggaagcaatagtcatactttatataaattaataccacttttcgatttaatcccttcatggtaaagattttttagaaattctccttttcatgaatttttctgttgaatattaatctttactttttttaaagtatattttttctcaacagtggggaataattacaatgttgtaacttcaattctttggctcaataattgcacgaaagtgtcagaaagagcactggaacagaaaatggacaaaataatgcgttctaattagtactttagtctggtgtcttcgta

SEQ ID NO: 114514 - DNA, 259 bp, Glycine max
  Clone ID: PAT_MRT3847_74414C.1
tggaatttggtttgcaaaaagacagagggttaattgtggagtattttggaaggatgtcttaccttgctcataacctttagttgcttgattacaaagatctgttgaagggaaactactttcttgagtacgaatcttgatggtaaaggaaataactctcttttatggccgcacacttggtgagtgatatgatcttcattcttagcataattggtgaacgctctcactatttgatataagtcttctgagaaggatagaaact

SEQ ID NO: 114515 - DNA, 443 bp, Glycine max
  Clone ID: PAT_MRT3847_74415C.1
gagactcaaaagtgtttaattttgattctatttggatgcatgagctctacataccgtaactatatagtggctgtgtcccattgcatgggggagagcgtgaacatcaactgtatccgaacaccttgcttacactttggctgatatgggggctaaagatggcatatatgatgctgatgtagatggaccctgctgaccgactatggactctcctgaataccgactgacactaccgattccagacgaaaccaccttttttcctactgcaatcttggtagtcaaggcgatctcttctggatatactggacagggacgtgcaacaatgcgtggccgcatggttgctgcaggcattagtcagatctctgactactactgagtgaggagagctgcattacctcattattgacatgcctcctgtaactggagatatgctctcacattatgcc

SEQ ID NO: 114516 - DNA, 1080 bp, Glycine max
  Clone ID: PAT_MRT3847_74416C.1
attttcatgcactttttgtcaagagagaaaaaaatatggggaaaacactttggttctttttggttttcacatgccttttgattcctctagcagttgcagattggaacatactgaagctgcagacacaagatggattgaagatcagcctgaagaactattgtgaaagctggaggatgaatgtggagctgcacaacattagggacttccaagttgtgcctgaagagtgcactgaatacattggaaaatatgttaagtccacacagtacaaagtagactcacagagggcatctgaagagtgcttggtttaccttagcaccagctgtaatttgaagaaagatggattggatgcttggatttttgacattgatgataccctgctttcaactgttccttactacaagaataatctatatgggggaaagaaactgaatgtgacatctctagaggaatggatgcgcaaaggcaatgcacctgctcttgatcactcattgaacctatacaatgaacttaaatccaggggtgtgcaaatcattttggttacttcaaggaaggagcatctcagatcagccacaattgacaaccttgtcaaagttggttattatgggtggactaaaattgtctttagagatcctgctaatgaattggtgtcagtgcaaaagtacaagtctgatgtgagaaggcaaataataaatgagggttatcgcatttggggcattgttggggaccaatacagtagcattgaggggattccaaaccccagaagggcatttaaactcccaaatccgatgtactatgttgcctaatgaatctcattcactgtgattgcattatttctccctcattttcaacttatataaaagataatttgttgcaataagttaaacaagccaacctgtaatttgtaggtagaggtgaaaatacttgaaaagatttgtgcagtgcaaatttaccaactaatgctcaatacttcaatagcatcattaataatatttgtttatgaacaatctgtaacagtgaaaatgtttcaaaacctttcctcctttgcaagtccaattttaagaataaagataagatgtaact

SEQ ID NO: 114517 - DNA, 273 bp, Glycine max
  Clone ID: PAT_MRT3847_74417C.1
ggcgttctatatattactgaattgacaatgactcctgctcttgctttgctacctcttctattagccttcatgaagttagctgctactacagaatcaagctaagatacaggggcatatcggacaatgatcatgcacgatcaggaaatgccagcaggacttcaaggtcctgtgccatttcaatctgaaaataaccctaagactcaagagcagcttggtaaaggtgccaaaaaccattgtgaagagtctctagttaaaaatacacaagtcaatagt

SEQ ID NO: 114518 - DNA, 416 bp, Glycine max
  Clone ID: PAT_MRT3847_74418C.1
cgacggaagcgcggaacgcggctcgaggcctatagtatgcgaactaccaaggatctcgctacttatatatctatctaaaggcccatattacacacatacgcgggtgaagacgtatatttagggtcatggttattggacctagaagctgaacatgtctatgaacgctctatgtgttgcggcacccctccaaatggtgattggaaggcaaggacaggaaatgggggcgtggcatcagatgattgggcgtgcaatgagatctgtaagtcgggggagagaatcgagagatgtacacaaaacttgaggagtgggtgacggtgctgcttggaacgttgacctttaattgtgacactgggacatggagaatgttactacactactatcgcattaagaggaatggaatacatagggcgtgtatt

SEQ ID NO: 114519 - DNA, 158 bp, Glycine max
  Clone ID: PAT_MRT3847_74419C.1
cggtcttcttgggcaagagtgagtcatcctcgcatcacacttaaccctagctcctctaatttgaattgtcgagagtttaacaaagcgtttttattaagctggccattgatttgttggatgagaaatccgagaattttgttttgatgatgaatgtgtgt

SEQ ID NO: 114520 - DNA, 105 bp, Glycine max
  unsure (1)..(105): unsure at all n locations
  Clone ID: PAT_MRT3847_7441C.1
atatattaagatttaacacaagtctatatggtactcgtcnaatgaggaatatgagtttctgtggaaccaacataggtaaacttattgttccacagccccaaattt

SEQ ID NO: 114521 - DNA, 199 bp, Glycine max
  Clone ID: PAT_MRT3847_74420C.1
aggcaaaagggcgatttgtttgctcggggatggtgaagagatgacatggattcggggagccagtgtgtgaagaggcttagcaacaagctaagagtcgagcttgagaaaagtgttactacattggtgggcattgaatgtcccaaggatgaaaaacttcgtcgtgggcaaagtttttgataaacctaagacgcactgcttc

SEQ ID NO: 114522 - DNA, 216 bp, Glycine max
  Clone ID: PAT_MRT3847_74421C.1
acaaaaaccttaatatatttacacaagaaaataaatatacgggatagccaaaataatactctagaaatttaaaaaacccataaattctttccacccgttactctctccttctcgtgtttcccttttaatagggcgcccccccccttttggccctcttgcccccggttttttttccggccccgtcccttttggcttcccatttttccctttttgggg

SEQ ID NO: 114523 - DNA, 406 bp, Glycine max
  Clone ID: PAT_MRT3847_74422C.1
ggggtgatgatggacatcggcaatcttcaattgtgaattatttatcataaacagaatgctatgtttatgtaccatagacggcataacacccgcaggagtgaataatggctacctcatatatggcctgttcagaaaatctaaaattgtcttctaaggaatgttttgacaacactaattaaaaactaaatgcgtctacctaattgaatcactgactgtacattataatgcgagggaggatttgtctctcgttcttcgttgttataaagccataagagagcaatcgagccttttgatcatcacagtaagactgctcacgatgttataccaacgataggtgttctccctcgcgagggaaccccacttgcgtatgcaggtgcccatagaccagctcactttttatttcctt

SEQ ID NO: 114524 - DNA, 297 bp, Glycine max
  Clone ID: PAT_MRT3847_74423C.1
catacgtacacttaaaaccacacttaattagatatgtcaacattgcaacaacaccaaaaaaaattgcagaaatttacatttcatcatgtctaacaaacatattataatccttatattatattaaacctctaactacactccaccatctatccaatttaattattatgaaccacttttatataccttatgattaatcttattcacacactatcattatttcaacaccaattatatccttctttttttctttacttctccctcatactatgttattacactcctcttaccaattattat

SEQ ID NO: 114525 - DNA, 283 bp, Glycine max
  unsure (1)..(283): unsure at all n locations
  Clone ID: PAT_MRT3847_74424C.1
cggagnccagttatgatgttttctccactcttttcactttcttgtccttagtttctcaactaattcttatatgaattttgtnatataaatgttcaaatcacnattagtatgtgtaaggttanagaattatgtttganatatacatataacatatctatacttgtcaaataatggagttgcactgtggagtaaaatcaattaacttttcacgttgaaagtgaagcaactcatcatgggatttctacgttcttttatgtagtttaggtagccaatgtgcatccaa

SEQ ID NO: 114526 - DNA, 299 bp, Glycine max
  unsure (1)..(299): unsure at all n locations
  Clone ID: PAT_MRT3847_74425C.1
taaacactactataggaaagctgtaccctgcagtaccgaccggaattccggtcgaccaccgtcgcgatataagcttaaaattaaaagtctgattacctttggagcnannaaaaaaaaaaaaaaaaaaaaaaaaaaaaaaaaaaaaaaaaaaaaaaaaaaaaaaaaaaaaaaaaaaaaaaaagggggcggcgttaaaagaatccaactaagacgcgtcatgcaacgaatgctttttatagggcacctaaataaattactggccgcgttaacaacgtctaactgaaaaaccctgcgtaacc

SEQ ID NO: 114527 - DNA, 393 bp, Glycine max
  Clone ID: PAT_MRT3847_74426C.1
ccgtcgcgtggtggaggacgaggatcaggagaggcacttagcactgctggaacgacgttccaaacgctctaagatccgtgcacaaaaccacgaatcgtggtgcatactctcaagctggtgccatctaaaaagctccatagagtgccaactcggccgatgaccaatccatttcctgagaccgcttcaagctcaaagtggacattaagcaatgcgacggatctatctgcgatcgagaaaaactagtcgcagaaaaatgctagtccctagactgggacgacgtcagaagctgaatcaaaaccgtgtgcgacttaaaacactctctagacgaactcagtttccaacttcttccagaaaagaaattctcattcaaagataaagcccgcaccaccacca

SEQ ID NO: 114528 - DNA, 435 bp, Glycine max
  unsure (1)..(435): unsure at all n locations
  Clone ID: PAT_MRT3847_74427C.1
tatcggccgcttactccctttcttttttttttttttnntttgtctaaactttcttttaatttccacaatgtaacaaattgtcatatacagttacatagtggtctatatcctaatgctatactgatggcaggtaaattccaactttcaagttataaggttaagcccctacactataaataattaaggtatggtcctaccaatgtacttaacatatttttacactttaaaaatctcaccataagttcttataaataaaatataatcattttcattcaacataaatttttttcaacttacaattttcaacaaatattttttatctgaaattatctccttccccttcattttttttaaaaaccattttattcttctgtggcacattcttaaacttctttttttagttattatattgttgctttaataccctttcctttt

SEQ ID NO: 114529 - DNA, 305 bp, Glycine max
  Clone ID: PAT_MRT3847_74428C.1
ggcgcgtttttttttttttttttttttttttttttggcttcttctttgggtccttcgggtttcttttcttcacccatgcctgggacagtagacaatgccctctgcttcaaagattttagggggtaacacagatcttagggaggccaatttgaatgggccccttctgggggcttctcgcagccggacccttctgggggcttctcgcagccggacccttctggggggttctcgcaggcggacccttctggcgggttctcgcagccggacccttctgtgcggttgtcggagggggacccttctggggg

SEQ ID NO: 114530 - DNA, 522 bp, Glycine max
  Clone ID: PAT_MRT3847_74429C.1
ccacgcgtccgaaggagaagggccttacctctgcacttcttacttccctctgtgctctaacctaagttatcaaaccactctccctcttcacccttctgatctagctagctctacaacgcatatcaaatagtggaatggtgtcactagttgaacggttatgtccataccactgttaggcatagcctaagaggactatcactgcaatgctactaccatgaatgctccctcaaccaccctgattagtggatgcctgcattacccaaagctcacccatcacatctacccggagctatactgattgggcctctgatgacagctccgatccgaccttcacatatgagactaagagcggactcaacctctaagctactgagctcaaactggagcttaccgattctcagtctaccgaacgagattcagatctttgctcgagaagttctattcatcttgatgaagagccactgttacctttgcatcctgcatctgatgaaccccattcgctcgccgcggactgctgcctgg

SEQ ID NO: 114531 - DNA, 1433 bp, Glycine max
  Clone ID: PAT_MRT3847_7442C.1
tcattagctctaatttgacggcaatgctcttaatctataaaagatatatggtgtctaaatgttcagcatgaggtataggtaggcaaagaagagcaaaagaagaatcacattacctgtctctgaaatcagattcactttgttcttcatcaatggaaagagaacaactatccctgcgaagccggaagaaagctattgcttcacatgaatggtggcaagggagaaaggagttatacaaacaactgcttgctacaaaaaaaactaatgcttaaagccaaacccatacttgaagaaactataatgagactatatcgtgatttttctccaaactgcatgaaagtgacaaacttaggttgctctgtaggaccaaatgctcttctggtgatatcaaatattattgacattgtcaataccgcttgcactagcttgaatcgtgaaccaccaaaattccaattttatctcaatgatttatttggaaacggattcaataccatcttcaagtcacttccaaatttctatacaagattggtagaagataagggacacaagtttggtccatgctttgttaatgcaacccctggatccttctatgggaggctctttcccagtaattccataaacctatttcattcctccaacagtctacactggctttcccagggtttgattgaagaagaaaaattggactcctttaacataccagtgtatgaacctacagttgaaaaaattaggcatgtgattgaggaagaaggttcattctttgttcaacgatttgagattttaaccttgccttgggtttgaggcttaaaggatggtggttttgatttattctttgagggaaataaattagcaagagaaatggctaagaacgtaagagcaagcccgtccagagggtttgattgaagaagtaaaattggactcataaaacataccagtgtatgatactacagtaaaagaatttaggcatgtgattgaggaagaaggatcattctttgttcaacgatttgagattttaaccttgccttgggttgaaggcctaaatgaaggtggtgataattcatttcttgatggaaatataaaagccagataaatggccaagcacgtaagagcagcaatggagcctctcttgtccacaaagtttggtgaagaagttataaacgaagtattcatcatgtatcaaaagaaagttgtgcaattaatggaggtggagaaattggagtgtgctacttctatgatatccatgaccaaaaatgcttgaagaaatgtggctaaatagaatatcttctcagttaataatacccaattaagttagtttggttgttaaaaactgttttctattagtcagtcgggggttattagcttttcctgtatataaacattcatgtattgccacaacagtcctaataatgtaaaagtttgtttctctttcaaaacac

SEQ ID NO: 114532 - DNA, 992 bp, Glycine max
  Clone ID: PAT_MRT3847_74430C.1
gggaggccatggagcagctttacagtcttggagcattggatgaagagggccttttaactaaattagggaggaaaatggcagaatttcctttggatccaccgttgtctaagatgttgcttgccagcgtggaccttggatgcagtgatgagattttgaccataattgccatgatccagaccggaaatattttttacaggccaagggaaaagcaagcccaagccgatcagaagagggcaaagttttttcagccagagggtgaccatcttaccctacttgcagtttatgaggcctggaaagccaagaatttttctggaccctggtgttttgaaaacttcgttcaatcccgatcattgagaagagcacaggatgtcaggaaacaacttctcaccattatggataagtacaaattggatgttgtaagtgcgggaaaaaacttcaccaaagtcaggaaggctatcactgcagggttctttttccatgcttctagaaaggacccccaggaaggttacagaacccttgttgagaaccagcctgtgtatatccatccaagttcagctctgttccagagacaaccagactgggtcatctaccatgagcttgtgatgacaactaaggaatatatgcgtgaggtcactgtcatagaccccaaatggcttgttgaattggctccaagatacttcaaagtggcagatcctacaaagatgagcaagcgaaagcgtcaagagcgaattgaaccactttatgacagataccatgagccaaattcatggcgtttgagtaaacgtcgtgcataatatgtaattcatctatgttctctttatgcaatgtcttggatactgttatatgttgcatttagttttaaatgcagtttttgtccttatatgaggatttaaatggaaagttagacatatttttattttcattactaggaaagcttaaattatgatatacaactgtttttttaatattattgtagaaattggttcaaaccc

SEQ ID NO: 114533 - DNA, 383 bp, Glycine max
  Clone ID: PAT_MRT3847_74431C.1
gacaatcgtgcgcggactcgtgagcgctcccgtgggctacattaattattctggcacgatactcagggaagggctggaacgccccataatacttcacaagaagcttgaagactggcttcgagaacttgaatgctccttagttatacctgctcttaagctaatacagactggtatgccttctgaactagaatgtaccacatccggctgcatgtgctgcgtatagtagcatgatcatgtgttagcactgtatctatagatcatgtgacactgatacttagcaaatagctatccgacctgtgaatactataatgcgtcaaagatagcacatggattctgttttggttcactgaataaatttgaaggcttgtatgtcgtgggcggcc

SEQ ID NO: 114534 - DNA, 642 bp, Glycine max
  Clone ID: PAT_MRT3847_74432C.1
gtagaagtagaagcttcacttcactctgttcagttcttattgttgcatagataatttgtctctatttttgttattttctttctctctcctctttgtgcattttaatagcaactcttagtttccaatgtccaagatgttgggagtgtttgtgggacttttgctgttggtggggttggctgcctctgccaagtttgatgaactcttccagcccagttgggctatggaccatttcatccatgaaggagaacttctcaaactcaaacttgataactattctggtgctggatttggatctaagagcaaatatatgtttgggaaagtgaccatccagctcaagcttgtgggacgaaccaacgttgtccgaactgaacttgcaccagagccaccagctcatgtgggttagggctaaccatatggtttatggttattgcgccgacactgctaggttccccgttatacctgctgagtgatggaggctggagaaactagggcttgatgtcgttgattagggtttatgattatgctcagtaattttagttgtgtttgagtttgagtatctttatggttttgtggcaccgcggttcttgtttttgaccaatatatctgggttgtttataggccatttattgaaaggataatcag

SEQ ID NO: 114535 - DNA, 1696 bp, Glycine max
  Clone ID: PAT_MRT3847_74433C.1
aatgaccaaacaaggaaataaaagaattcacataaggctaagggcagatatgttagaacgtgaaacatgaagaacatgttatgttaattaatggtagttggtttctcttgaatggtgagggtgatgaacacactcagcaggtacaacggggaacctagcagtgtcggcgcaataatcatacagcatatggttagccctaacccacataagctggtggctctggtgcaagttcagttcagacaacgttggttggtcccaccagtacttgttgtcctcgctgctgctacatttcttagcgctatctgctgacgtcaccggcacggggcactcgcacgcgtcaatttggaagtccttgtaggtagcaacgaagggtgcgtggctccaatctgtcttcacacgaccaccctgcgttgcccaatcgtctgcgttccagatggagctgtacacgcccatggcttggtccttcgggaagggaatgcccttgtgttccaggttcgtgtgcacccttattggcgtctcatccaccaggaaaacaacttggcgctggttcaagatgttgggagtgtttgtgggacttttgctgttggtggggttggctgcctctgccaagtttgatgaactcttccagcccagttgggctatggaccatttcatccatgaaggagaacttctcaaactcaaacttgataactattctggtgctggatttggatctaagagcaaatatatgtttgggaaagtgaccatccagctcaagcttgtggagggtgactctgctggaactgtcactgctttctatatgtcatcagacggcccaactcacaacgaatttgatttcgagtttttgggcaacaccactggtgaaccttactcagtccaaaccaacgtgtatgtgaatggcgttggcaacagggagcaaagactcaacctctggttcgaccccaccaaggacttccacacctactccatcttctggaaccagcgccaagttgttttcctggtggatgagacgccaataagggtgcacacgaacctggaacacaagggcattcccttcccgaaggaccaagccatgggcgtgtacagctctatctggaacgcggacgattgggccacgcagggtggtcgtgtgaagacagattggagccacgcacccttcgttgccacctacaaggacttccaaatcgacgcgtgcgcgtgccccgtgccggtgacgtcagcagatagtgctaagaactgtagcagcagcgaggataagaagtattggtgggacgaaccaacgttgtccgaactgaacttgcaccagagccaccagctcatgtgggttagggctaaccatatggtttatgattattgcgccgacactgctaggttccccgttatacctgctgagtgtgttcaccaccgtcaccactgaaagggagaagagaagaggaagagaacgaactacttttgtttaacataacatgtgcttcatgtttcaccttgtaacatatttcgccttagctttatgtgaattcttttatttccttgtttaatcattagtaccatccaattttattctttttgttttttaatttggaccaagagagaaactagtgagattttctaagattaatagaccatcaattttaaaatatatcatgtgtaatttctaaaataaaccatcaaaacaaactcggattgggcaagatta

SEQ ID NO: 114536 - DNA, 255 bp, Glycine max
  Clone ID: PAT_MRT3847_74434C.1
cagaacaaattcgccttaaaaattttgggaccttcaagactcagcgaaaaaacatcaaaagatgtccctgaatccaaataattttgggggcccaaggaacaaggtgttccattctttcccccctgaactttgggaacccttccatgaatttcaatttcccaactccccatccgccgaaaactccgcaaccgtgaacactcctgtggaatggaaataaaacccaaaagcacaagtgttcaaagctgaaaatccaag

SEQ ID NO: 114537 - DNA, 527 bp, Glycine max
  Clone ID: PAT_MRT3847_74435C.1
acgcccacgcgtccgcccacgcgtccgattttccaatccaccttcccttctaacgataccaaaaatagcgttctggagtccaagatctcattcattgtcctttccttcccttcccttggcccaattgagaaatgaattccaacttcaatttcgatttcgatctcggcatcggatccaaccgtcccaaatctcttaacgaccagaaaaaccccaaaccaacttcctcctattcctctgcccaacccgcatggacccaccgacccgcccccactcagaccaccgccttgcccggtgggcccccctccatggtcggagacatcttcggcaagagttggggaacccctcaaccttcttccgcttccaaaaacatcgggatcggtaataagaaccctaaccttttcggagatttgggaaggtctgctctgggcctgggttccaagaccaacgttgctctcaaaaatgctcccgcgcccaataaaacaacaaccttttcaatgggaaacatgggtgattctttgcccaaaaca

SEQ ID NO: 114538 - DNA, 246 bp, Glycine max
  Clone ID: PAT_MRT3847_74436C.1
atttgcactaacctcccttctatggagcctcaggtaatgccatattttattttttcccctgtttctaccgagtagagacctttagaggcatcttccttggtttcttgtgttgtttatcaagcaaattaaatgtcatttgctcccatacgatcctctgattaacttttctgaagtattaaaagtagagacagctgtgattttagttttatcgggtcactcttgtctgcaataaaattcatttttctt

SEQ ID NO: 114539 - DNA, 2329 bp, Glycine max
  Clone ID: PAT_MRT3847_74437C.1
gaaaaagccgggcgtctcgtaacgtagggtcaggtggtatgttccggaagaatatattagatatggcacagcgagaagacttctgaaagggaccgtagcagatctcattcattcttttcttttctttccattcaatcacgccctctcttcccttcccttggcgcaatgaattccaacttcaatttcgatttcgatctcggcatcggatccaaccgtcccaaatcccttaacgaccagaaaaaccccaaaccaactccctattcttcctattccaccaccaccaccgcttcctattcctcctcccaacccaataaacaacctgcatggacccaccaaccctcccccactcagaccaccgccttgcccggtggccccccctccatggtcggagacatcttcggcaagagctggggaacccctcaaccttcttctgcttccaaaaacatcgggatcgtcaataagaaccctaaccttttcggagatttggtaagttctgctttgggccagggttccaagaccaacgttcctcttaaaaatgctcccactcccgcgcccaataaatccaccttttcaatgggaaatatggctgattctttgcccaaaactggttccacgccgcagagcagttctacttgggcatcgtcctctgggggttttaatgtgagtgccaataaaaccactctcaatcttgggggtccttcattgcgaaacatgggtactggaattggaaccaattctaataacaaggatccctttagttctttgtctggtattggatccaagcaatctgctactcttaattcagctcccaaaggaccaaaggttgatttgggggacgatggttttggtgattttcaaaatgcttccaaacccagctccactgcgtttccattcactgcttctcctggaattgatatcaattttactggatcaggtgatagtggtgatccaatggacatgtttttcacggcaacttcctcctcggcctctggtggaggtgctgctgcggcctctgatggatttggaacacaggatgattggggtttggattcggagtttggtgggggaggccatgatgtaggtggcaccactactgagcttgaggggctgcctcctcctccttccggggtgtcaggttccactgccaaaggcaaagggatggacaattacaagcaggggcagtttgccgatgctattaagtggctttcgtgggccgtcatccttctacagaaagctggggatagtgcggccactgtcgaggttttgtcgtgcagggcttcgtgttacaaagaagttggggagtataaaaaggcagttgcagattgtacaaaggttcttgaaaatgatgaaaccaatgtatctgtcctggtacagcgtgctctgttatatgagagtatggaaaagtacagacttggtgctgaagaccttaggactgtgctgaagattgatcccggtaatagaattgctagaagcactgttcaccggttggctaagatggctgattaggaattcttttgtcattttctttttcctttaacatgccatataggtttttacatcaccaacaacccccatttcctttggcctttatagttagggggtgatacataaggactgcttttgaatgttgtcacccttcatatgatattgtgatgtatggtttatttcattttggctatgtcttgaaattaaaattctcgttgccttctcccagatttgcccttaataggattgccatattctttttctatttgttatcttgtgtttggattgtttgcatattaagaaagacatttgttatttcctaaaattatgaatagagaatgcgttccggttactctatggaaagaaatttgatttacagaaaagacatcgcgattcacagaatatttgttcccacgtttccccgaatttatgtataggctcgggaaatttttgggcctaatttcgcgagccttaagaaatttctgtggaatatgaattaagtttatatattgttgcatgctttgtataaactaggcttgattgtatttttgttcccacatttcataatgtaaattgggagactttgaccagaaggtgcagttttttttttgatttcttttatttagagtcgattttagattattcctcaaaatgggataagtcttaataaatgttatggattttgaattagaagtcatatcaatgatttatggcttcaaagtggtataattttttttaatgttacgtttaaggttatcagttttttaattttttgccctttaaagataaaaaaaagcacttgccacttcaaaggtataagactaaaaaaaaaatacgcgtcgtt

SEQ ID NO: 114540 - DNA, 363 bp, Glycine max
  Clone ID: PAT_MRT3847_74438C.1
cctactcgtccgcccacgcgtccgatcactgatccgcattgacacacaaaggggtcttatttgaaaaacacttgggcgatggtgcaaatgttcgctaggttaattgactatgcagacatcaggctcactgagaaaacaatttttacttgcaaagactcggacatatcggatgttaattacacaataccaactcactttagaagatatctaccgaacttcattatgtggaatctgcaaaccttggtgaccgacattcttccatcttttctcactgttggaatcaaatataagtggaatttgtgtaacatccatatatccggctttattttacgacggcagatacaaattttggtcttaaacacg

SEQ ID NO: 114541 - DNA, 240 bp, Glycine max
  Clone ID: PAT_MRT3847_74439C.1
gtttatcggcagcaattctgcttttgtaatcagaatatgtaaagttaatttttacactcacgattacaaagattaacatattacttgtgtaatgatgctacaactaaacagatctatgatgttatatgccacaggggcgccccccaactacaaagcttttcctcccgaaactcaatttcggaccgttccctaagggccatccagctccccctaatctaagaccttctgaacttggcatac

SEQ ID NO: 114542 - DNA, 382 bp, Glycine max
  Clone ID: PAT_MRT3847_7443C.1
cggtgaatactctgcgaggattttgaaaaaaaaaggaaatatgttttggattttgagcgccgtactactagcaaccggattttattacgtgtgctacagggccttcgctgtattggaaaaagcttggcgttaagcaagaagactttcctaatgtgttatttactaattatttcggtatttttaaaaaacagccactggtaaaagtgatatctaacttatacacaaggtttccacaaacgagatacagtggcttctatcaattcaaccgaccagccctaattgtaacagatgtcgatttaatcaaacaaatgcttattaaagacttcgaaccatttaatgaacatcgcgctcttactagcgcagaaactgacccgttgtgggc

SEQ ID NO: 114543 - DNA, 290 bp, Glycine max
  Clone ID: PAT_MRT3847_74440C.1
cccaaaatggtcattttattaaataaggggcaacttcaggttacacaaccatatggttcttcccataactttcatatgaacctatactaaagcctacataattaagcatgctacacaagcgggaccatgaccttagtttccccctttttaatatttattttttaccccagactttattcaagagcccttgtacaagagccttaaaaaagcaatttttagccattcccttttcgggtcacgggggcctttattctaacactggtaacataaacattatgccccaacctcac

SEQ ID NO: 114544 - DNA, 322 bp, Glycine max
  Clone ID: PAT_MRT3847_74441C.1
ttcattcgtccgtgactgaccagccacagattacctcttctctattaatttaacgggcggaatgtttacgagctggcccaggctctgactatacataggataacatgaaaacgactggttggactgcagggatgactctttcctcaggggagagaagggctagatacttaacacaatctgcgttaacagatgagccagttgtatcgggcgaggggctgatcgataacctgacggagccagaggggacagaactagactgctcgtgggacatgccctatgagcacaagaagtcaatgtagaaatatcaggttgctgacattac

SEQ ID NO: 114545 - DNA, 809 bp, Glycine max
  Clone ID: PAT_MRT3847_74442C.1
gcacacatggggggcccccgctctgggtcatcatggggatggttttctttctcaaacttggtggatttggtcatggctgcgagcaaatcacagaaggggaatacaaatatttcctgtttcatgcactgagagatcgaagagaaggttttttttttcttctttctttctgaaactttagtggatttggtcatggagaaaagcaagtcattccctgaatactcctgctcctacactgaatttggcttcagtgaaaggtccaactcatataattttaatggtccaaaccagaagggaaatgggttttctgcatcaagtgatccagaaatcaagagaaagaagaggatcaaggcctacaatgtattgacagtggagggaaaacttaaaacaaatgtcagaaacagcttcaagtggatcaagaacaagttcagcgacattcgctacggtgtgtgaactaggatcaaccataagagttgcttgccttggggctagcatgtgttgttcagtaatatcaactttaaaggtaaggcctttataaaggaaaatattgcagtggtgtattgtgaggtaagatgttatgcataaaaaaatgatgagagtactagctgggttggaatatgtatatgctctgcaaacaagggtttcttggttggtttttggtaagagggagagcagcaaactagcatgctttgtatcaaacatgcaagaattcaaaaatgtttctgaaaattgtgattagtaataaactctaattcttatgtttatttcgttgcacttggaaaaaaaaaaaaaagaaaaaaaactcgaggggg

SEQ ID NO: 114546 - DNA, 541 bp, Glycine max
  Clone ID: PAT_MRT3847_74443C.1
aaaaggttcaaagccccaaagggaaaacccccaaaaaaggggggccaacctgggccaacccccaagaccagatgaacaaaaatttcttttccgggaaaaaaatcagggcccaaagcccaaaaagaccaaaattttttaaaggggaccccttccccaaaaaaaaggaaaacgggggggaaggcaaccctcccccaacgggggaaaaacaattttttttccccctccctttattggggaaagggttttacaaattaactttaaccccccaaaaaacaaggggcaaatccgggaaaaaaaaaaaaaaaaaaaaatttttccccaccccacccatttttaacaattccaaagggggggccacccaaaaaagccacaaaaggggggaaaaccccaaattttcttgggggggccaaaatttgtgggaaatccttcccaaaggcccccaacgggggaggggaaaccaggggggcccttttaaaaaaaaacattcgaaagggcgggaaaaatcccaccttgaaggggggggacaaggaaccccccaaaa

SEQ ID NO: 114547 - DNA, 679 bp, Glycine max
  Clone ID: PAT_MRT3847_74444C.1
tcaactttttgtttgggttttaagagcgtgcgaggagcaagagacagtgcggtttgaaaatcccattcggatgaccgaaacaacacaccagaaggtcgctggtcattcacaggttcgtgtcttgcgatattactctctttcccctttgattcatttcactacacccaaattgagtttacttctgttaaataaaaaaaaatcagagatatagtgagacttttgtgcaattcgagtgcttctctaatctcacatagaatctaaacgagatttaacgaggtttaggctctctattgaaggcaaaacaaattgatccattttaggttctgtaattgttattcctgcaccatctttttcactttatattttttacattatcttgaataaaacaactctcgcaatttttgcagctaagaagcatatacacttctaaccagtagttgagtcttcgacatgtatccatgttagatgcgcaaaggcttcaaaaacctttagttgtatttttataattttgttctttttacatttttaacatttatgttaggctctgcaaccacgactctggccgcaattttgaggtctcggcaactgcctttgtggtcatattggccgcattcatctgtaatttcccacaacatcaaggattgcaactaaaccacaatttaaaatctttgattatact

SEQ ID NO: 114548 - DNA, 443 bp, Glycine max
  Clone ID: PAT_MRT3847_74445C.1
agctcgtggtcaaggcaatatataagaaatgtacagttgatattctgagaagattatggcactgaagggcgtggagggtacttagaccattatggtatcataagatacattatgcctaatgatttacttctaactcaaggactctacgtaatggtaacgcgtgtctggttgagcgccgaagactggatggaatgaaggggctgggatcggcttgcgatgacagctagtgaaccacaggatcatggtatctgaaattgctaccagaccctggaagaggctgacgttagccatagtccagtactctctgaagaaagtgctttgtatgtatcgcagaacagtaggcttgcacatgatatacatagcgcgaattacgttcctttccccgttctacccaacaagcaccatttataccattgaggagtttacacatgttctgattgaag

SEQ ID NO: 114549 - DNA, 335 bp, Glycine max
  Clone ID: PAT_MRT3847_74446C.1
cgtctcgggggcgaccatgtcaatagaacgctcttacctgatcgtgatcttctgctccaacacccttatctcccggtttgacatcgccgactccgcgacgaaccccaacaagatgatcctgtgcgtctacgaccccatctccatcaccatactcttcggcgggatcgacctctgcgacggcacagacccaggcttatagcacccgaagaagaacaccaggctgatcagaggctgcatcctcagctacggccaggcgcttcaaagcgacgcagcctcacgcttgaagccgagcatggagagccagaacgggttgccactctaagaggatttgggaa

SEQ ID NO: 114550 - DNA, 280 bp, Glycine max
  unsure (1)..(280): unsure at all n locations
  Clone ID: PAT_MRT3847_74447C.1
ctctnttttctggtaattcatcaattgattcaaaatgcngagtctcaaacttgcaactagtngtatncctcttcaatcttcaatttctcacgctgttttcccctttcaacagatggggtngtggcaaattgggaanttcgaannagggcccaaggcaatcacaatggaaagggtccgtatgactggccangnngcnattcgnantnggngatttcggggttcgttgattacntaaatcnggncaaaacagggtgacatgttacnattgtgctganggtga

SEQ ID NO: 114551 - DNA, 1361 bp, Glycine max
  Clone ID: PAT_MRT3847_74448C.1
tacggctgcgaagaagacgacagaaggggaaccggctcgagagcaaagcaaaagtgttcccatcatttgctttcgcagaagagagagaaacaggctccccaggcgtcggaaagaaacagtgtttcatcatttgggtttcgcagaagagagagaaacccatttctagagagagaaactcgcagtcgcagacatgtcttccttcgatgccttcgccgacgacttgaacgtcaactcttcttccactcgccagcacgacgatgacgaggacaacttctctggctacggcggctactcctccttcaccggaggattctccgccgacggagatgtcgccgtcgatcactccgccgccgcgtcgccggagatctacggcttcactgattcgaatcccgcttactctcagtctcccttcgaatcggccaccgtagagaacgaaaacggaaacggatacggcgacggcgacggtgtttttgtctccgacggtccggtgcttcctccgccgacggagatggagccggaggaaggttacgctcttcgcgagtggcgccgtcaaaatgccattcagctagaggagaaggagaaaagggaaaaagaaatgagattgaagattattgaagaagctgaggagtataaggtggctttctatgagaagaggaagcttaatgttgagactaacaaggttcagaatagagaaagggagaagttattcgtggccaatcaagagaagtttcacaaagaggcagacaaagcttattggaaaaccattgcagagctcattcctcgtgaggttcccaacattgaaaagaaaagaggcaaaaaggatcaggacaagaagccatcaattacggtcatccaaggcccaaagcctggcaaacccacggatctgtctaggttgcggcaaatactgttaaagctgaagcatacaccaccagctcacatgattccccctcctccagcacctgctaaagacgccaaagatggtaaagatggaaaagaaacagcttctaaagcaaatggatctgcacctgcatcacaaccaaaggatgccaccaccaataacgctgccacagatttaccccagaaggaagctccaccagcccctgtggagcaatcttctacataattttgattttcatacttcagctctcacagtcattcttctgctatcccattttcccttgcagttctttatggatccttttgtcgtgctattagtttctatggcttttttggtttgcattttgttttcatcattgaggttttgtatcaattatatcctttattgactattatatgaccttggaaattcatatgttcatgggtttaatacatccttttaggcaaagtataaaaagggctgt

SEQ ID NO: 114552 - DNA, 1457 bp, Glycine max
  Clone ID: PAT_MRT3847_74449C.1
ttgacggctgcgagaagacgacagaaggggaaagcaaaagtgttcccatcatttgctttcgcagaagagagagaaacccatttctagagagagaaactcgcagtcgcagacatgtcttccttcgatgccttcgccgacgacttgaacgtcaactcttcttccactcaccaccacgacgaagacgaggacaacttctccggttacggcggctactcctccttcaccggaggattctccgccgacggcgatgtcgccgtcgaccactccgccgccgcgtcgccggagatctacggcttcactgatccgaatcccgcttactctcagtctcccttcgaatcggccaccgtagagaacggaaacgaaaacggaaacggctatggccaaggcgacggcgacggcgacggcgtttttatctccgatggtccggtgcttccgcctcctacggaaatggagcccgaggaaggttacgctcttcgcgagtggcgccgtcagaatgccattcagctagaggagaaggagaaaagggaaaaagaaatgagattgaagattattgaagaagctgaggagtataaggtggctttctatgagaagaggaagcttaatgttgagactaacaaggttcaaaatagagaaagagagaagttattcttggctaatcaagagaagtttcacaaagaggcagacaaagcttattggaaaacaattgcagagctcattcctcgtgaggttcccaacattgaaaagaaaagaagcaaaaaggatcaggacaagaagccatcaattacggtcatccaaggcccgaagcctggcaaacccacggatctctctaggttgcggcaaatactgttaaagctgaagcatacaccaccacctcacatgattcctccaccacctgctcctgctaaagacgccaaagacggtaaggacagtaaggatggaaaagagaaagcagcatcaaaagcaactgggtctgcagcagaaggtgcacctggttcacaaccaaaggatgccacctctaatggctcctcagaagaaccccagaaagaagctcctgccactgaagcagcctgctgcatggttatcatacttcagtccccctcaatctttcttctgtcccctttttgcagtctttaatgaatcccgtttctagcgcaggcaagttttacttgcatcatgacatcatctttcgcagatatatatatatatatatatatatgactgatccaattttggaagaggttagaatcaagatcgacacttctctcatggttcttaattttttgttgtgtttttttggcactgcctgcttattcttaacaatctagtgtggcaacgactacaagctccaaggatttggaaactgctttttgtggtgctgtggttgtattaaattaaattctactgcaaataatggtaaaacttccaatcaagcgcacgtttttatcattgtctaaaaa

SEQ ID NO: 114553 - DNA, 473 bp, Glycine max
  Clone ID: PAT_MRT3847_7444C.1
gtgtagcagtgccgcctgcttggggggggggggggggggggggggggggggggggggggggggggggggggggggggggggggggggggggccctaaccccaaatgggttaagcttcctaacccggggaacaataacaggggttaaaatgcctgggggtaggagtaaccggaataagggtgaaaaactgggaaataaccctaacaggggggaacgaaaacaattaaaaagcccgcaagacacaccaatgggggagctgagggtagctggggggttacctggccaaaatcgaaaccttttggggcaggccccctgcggccccccataggggtggggctgggggttgtaaaaccccttatggggatgagtaacgggctgcggccccaaagcccaaataatgtacccgtaaaagcccaaataggggccctagaaaaccgcccccgcaaagcacggcacgcatttcgacggggcgag

SEQ ID NO: 114554 - DNA, 469 bp, Glycine max
  Clone ID: PAT_MRT3847_74450C.1
gttttcttacttttcctatctcatttcttctctattctctcttcatgtcaaaatatttgtcaacagagtaccatgcatgttttcaccatctttgaatataagaaaattatatatttttgtgacttttgtttcctaaaagcacaaaaataataacaaagtaattaaaaaaacttataacatgtgaatgagataagggaaaattattagaatttttcttttttacctataaaaacacttaagaagaaacaataaaaaaagtaaataaaaataaagtagaagaagaaaaagacagttagaaaagtctataaaatatatgagatttttaacttaccttatatcgtataatttctgtctttagattaaagaatcttttatcaatacaacaccaaacatttttttacaatcctgaaatattaaaaaattatatattttcatgattttttttttcataaaggttaaaagatagaac

SEQ ID NO: 114555 - DNA, 1903 bp, Glycine max
  Clone ID: PAT_MRT3847_74451C.1
gcaaaacagtaatgtcaataaataccaactgttacatgatacaggaaggggtacctttatcttgaggtactgatatctcaattagcaaaaactaactataatcttttgaaagcagatttgaaacgtcacaaatcactaaactaaacacggttaggcttatgactcagtcttgcaaacacaacatctatgtagcatttctgtttactttcaaatatggcaaggctccaattacattgtcatagtcgctcctgctgaccgcatgcattttggaaagtcgggatttgcgcttggtattctttttaacgagcaaatgctgtttgccagctttcctacgcactattttgcctcgccccgtcaccctaaaccgctttgcaaatgccttgtgggttttcattttgtagcccttagcggatacaatggtgagacttttctcatagaaagccaccttatactcctcggcttcctcgataattttcagtctcgtcgcttccgctctattccgttcatagcgttccgcggaacagagaaaaagaaagtaccaatttctttagatagtcatggcttccaccttcgacgccttcaccgtcgacgacgaccacttcgccgcccccgccgccgccgacaccttctctggctaccccgacttctcctccttcccctccgacgacgtccccgtcgattacgccgacaccgcggcgtcgccggagatcttcggattcagcgatcccggtccagtttactcccagtctcccttcgagcaagtgcacgagaatgggaatggaaatggaaccgaaaacggctacggcgacggcgttttcgtctccgacggaccggtgcttccgccgccgggagaaatggagcctgaggaaggttacgttcttcgggagtggcgccgtcaaaatgtcatccagcttgaggagaaggagaaaagggaaaaagaaatgagactgaaaattatcgaggaagccgaggagtataaggtggctttctatgagaaaagaaagcttaatgttgagaccaacaaggttcaaaacaaagaaagggaaaagttatacttggccaatcaagagaaattccacaaagaggctgacaaaaattactggaaagccattggggagatcattcctcgtgaggttcccaacattgaaaagaaaagaggcaaaaaggatcaggacaagaagccatcaattacggtcatccaaggcccaaagcctggcaaacccacggatctgtctaggttgcggcaaatactgttaaagctgaagcatacaccaccacctcacatgattcctccaccaccggctcctgctaaagacgccaaagataataaggatggaaaagagaaagcagcatcaaaagcaactggatctgcagcagaaggtgcacctgattcacagccaaaggatgccacctctaatggcctcacagaagaaccccagaaagaagctcctgccactgaggagcagcctgctgcatgattttgtctatgatactttggttccccctcaatctttcttctgccacccctttctccaccctgcagtctttaatgaatctttttgccctgctattagtttctaatgcttatcggttgcattttattattattaactttaaggttttgtatgaattaaatccattattaacaattatgacgtggagattcaatgatcatgggtttaaatagtacatccttttagacagagtatatgttggaataattgctgtctggtggtgtcaaatagacaaatacaatgtttaatatttttcagttgtttaaatttccattgtatgtacctgattctggtttcgttatttgtagggtaaaatttaattttagccatgacttaatttagttttagttctttaaaaaaggttagcctttataaattttaatttgttt

SEQ ID NO: 114556 - DNA, 695 bp, Glycine max
  Clone ID: PAT_MRT3847_74452C.1
cgtcatagcttgctaatcaattgcaaagataaactggaagatggtaaacaaattgcaatacaataatgtcaataaataccaatgttacatgatacaggaaggtgtaccattatcttgaggtactgatatctcaattagcaaaaactaactgtaaacatttgaaagcagatttgagacgtcacaaatcactagactaaacccagctaggcttatgactcagtttttcaaacagaacatctatgtagcatttctgtttactttcagatatggcaaggctccaattacgttgtcatagtcgctcctgctgaccgcgtgcattttggagagtcgggatttgcgcttggtattcttcttgacgagcaaatgctgcttgccagctctcctacgcactattttgcctcgtccggtcaccctaaaccgctttgcagatgccttgtgggttttcattttgtagcccttagcggatacaatggtgagagggcgagggcgagggcttagagggaggggggaaagaagagagcagagcttttgctgaagaattggagtagagatgctagctgaggaactgagtttcagtgagttggcgttgctcaatacgggaaatcgaactgaagcgtaaggtaaaagtcccacggcaaaggacaccgaagccatcttcaggtaaggtaagctccacgcgtgggcgaacgcgtggg

SEQ ID NO: 114557 - DNA, 182 bp, Glycine max
  unsure (1)..(182): unsure at all n locations
  Clone ID: PAT_MRT3847_74453C.1
cccaactcaatttttctctcaaccggccccacttagcataaccccagcatggccacacgacatacaagatcagaaatnannattcatgggatngtgtttggggaaagactntatgccaagttgattgcgagatcttgtaaagtgtggggctggaagtgttgagatcgatcgatcacctatgc

SEQ ID NO: 114558 - DNA, 1600 bp, Glycine max
  Clone ID: PAT_MRT3847_74454C.1
ggaaaacaaattgcaaaacagtaatgtcaatagataccaactgttacatgatacaggaaggtgtaccattatcttgaggtactgatatctcaattagcaaaaactaactataatcatttgaaagcagatttgagacgtcacaaatcactagactaaacacggctaggcttatgactcagtcttgcaaacacaacatctatgtagcatttctgtttactttcagatatggcaaggctccaattacattgtcatagtcgctcctgctgaccgcatgcattttggagagtcgggatttgcgcttggtattcttcttaacgagcaaatgctgcttgccagctctcctacgcactatcttgcctcgccccgtcaccctaaaccgctttgcagatgccttgtgggttttcattttgtagcccttagcggatacaatggtgagagggcgaggccttagagcaaggggagaaggaacagtgcaaagcttttggtgaagaattggactggagatgttagctgaggagctgagtttcagtgagttggcgttgttcaatacgggaaatcgaactgaaccataagagacgcgggtatagcaagaagaagaagagcaaggtaataatcccacggcaaaggacaccgaagccatcttcaggtaaggtaaggcccgttgaagcaaaaaaattgtgctttatggataaagctgagtcaaagctcattcctcgtgaggttcccaacattgaaaagaaaaaaagcaaaaaggatcaggacaagaagccatcaatttcggtcatccaaggcccgaagcctggcaaacccacggatctgtataggttgcggcaaatactgttaaagctgaagcatacaccaccacctcacatgattcctccaccacctgctcctgctaaagacgccaaagacggtaaggacagtaaggatggaaaagagaaagcagcatcaaaagcaactgggtctgcagcagaaggtgcacctggttcacaaccaaaggatgccacctctaatggctcctcagaagaaccccagaaagaagctcctgccactgaggagcagcctgctgcatgattttgtctatcatacttcagttccccctcaatcttttttctgcctcccctttctccacctgcagtctttaatgaatctttttcccctggctattagtttctaatgcttattggttggcattttattaccaactttaaggttttgtatgaattaaatccattattaacaaattatgacgtggagattcaatgataatgggtttaaaaaactcttagaatagagtgaactcaacttcaaaagttaacccgggtcaccctaaaccgctttgtagatgccttgtgggttttcattttgtagcccttagcggatacaatggtgagagggcgagggcgagggcttagagggaggggggaaagaagagagcagagcttttgctgaagaattggagtagagatgctagctgaggaactgagtttcagtgagttggcgttgctcaatacgggaaatcgaactgaagcgtaaggtaaaagtcccacggcaaaggacaccgaagccatcttcaggtaaggtaagctcccttcaaccc

SEQ ID NO: 114559 - DNA, 122 bp, Glycine max
  Clone ID: PAT_MRT3847_74455C.1
ttaaccaacatattgtacatactgaggcacaagtccgactcgggctaaacaaatcgacaaaacttaaaatcctaaactaggtcttatctgaatagggggatgccttggcaacgacctggggt

SEQ ID NO: 114560 - DNA, 333 bp, Glycine max
  Clone ID: PAT_MRT3847_74456C.1
ccaattggaaacaataaaccttaattggggagggcgggcgaaaaaaaacccaattgcccttttcaagaaaataaggtctggatggggaaaaacatttttctaaaggcaaattttggacctaaaccaaaattaggccacctcggccttggaaccagtttggggaacctggaaaaggtaaccaggctttttttttttttgtttccagctcccccgcccctttttttcgggaaaacttgggccatccccttttttttttttttgcccccttagaaaaggcgattacctgatttgctaagggtggaaaaaaaaaaggggcccctgaaggtccccaag

SEQ ID NO: 114561 - DNA, 262 bp, Glycine max
  unsure (1)..(262): unsure at all n locations
  Clone ID: PAT_MRT3847_74457C.1
tagctcatgctttctncaaccttaaactaagtgcactgtgatgtgagtttccttgggtacatgcggaaattaacaccgagtctngcatgcctgagcatgagacacaggtgatttcttgcaacaatgaccaatatcctaggatatatttttacgngngggacannnannnnnctcgtggagngctaaacgccgagcggtaatcatccnaggctgaggcttttaacggtctgaaggatgtgcagaaggtggtggaaatcgggag

SEQ ID NO: 114562 - DNA, 542 bp, Glycine max
  Clone ID: PAT_MRT3847_74458C.1
ttaccgtgctacatgtgagtagtacctcctgctttgggggggggggggggaggggcaagtgtagagacaaactggtaggtaatgggcatagcactagttaaccacgggggtgcacatataactgttaagaggccataatgggccaccatacaaaagaaataaaaggaatagcgtcgccaaggaagaaaagcggatgcaacattagaaataactaaactgttaatgcttttgatattacttaccacgttaagaagaatgttaaggccaccataactttttattaagactggggttacgcggaatagtagaatcactaaattgtggtgggccgctggcataggcaccatatttcgagcgcgttcctgctgtagtaaaaccgggtgcgaaccgcgagagcgagttataagtaacctaaagcgcacgactgtgtcttggggcacgtgtccgtacggggtggttaaagtcaccaccactaccgtctgggcgcactgggggaatcgtgatggtactattttgctgcataataaacgacatacacgttc

SEQ ID NO: 114563 - DNA, 935 bp, Glycine max
  unsure (1)..(935): unsure at all n locations
  Clone ID: PAT_MRT3847_74459C.1
tcgtgcaccccccggcgcccaggctgttcccattttgcggcagccatcgctgtgccccgagtcatctagggcaggccttccgcggtctgtggtcgtggctcatgccttcctctgcgtgcgtaacagctcccacatgagtgaagctcaacgaagtgctctaaatgcattgctcttcagaactggtgatcagtctagagacatagtacttggccttgccacaaacaggcctgctgctcctgataccgaagcccctcagccccctgttcgtgacatgcttttcccgcggcctcctggcgctgggcgtccgatggtggcgaagctctttgcgagcaagggtttggattatgccatgatgactggaggagatgttgcacctctgggcgcacaggctgttaccaaaattcatgatatatttgattggtccaagaaatcaagaaaaggcctattgctttttattgatgaggcagatgctttcctttgcgagtaagttctggagcgtttaaaatacattttgaagactgcttctataaaatataactatttaaattactactacgtagcagggtagccaaaattttgtttttgtagtttatctaacatgtgagaaatgtaactgttgtattacaagttaagacagtctacgtataacatctttatacttttacacaaatcctaacggtttatatttgatttatattgtgtttttaataaattttgatatttagaatcacgaagtgtctttaacttcacatattcggagattaaatacatagatgaatcaacaacactatggattttgcatctattagttttaccttattgtctgtaacttgaaaagactgcaaattttaccgtgtatattgcagaaacgattggcgtgataagttggatattaatgatatctcttttatagcaanttttcagtgatcattttt

SEQ ID NO: 114564 - DNA, 368 bp, Glycine max
  Clone ID: PAT_MRT3847_7445C.1
atcacttgtctgaccaatgccgtattctgtcttctctcttctcgctacatactcttccgggccaaaaccaaactctttttctttacacgctcctccaaacccctcacactccaattctcacacctcaactacttcgtcattgtattcctagactaaccatctcaccggtatacccttgaaactttcgtggaccatactttcgaattggctcaacaagaagaagaacagatcctatctgaaacccaaacctaccttgaaagttcagagcccaaccgcgaaaactcctgacatgagagcttcactcaaccgccacaagaggtcaagctcttcgctgagaacttgccttactacgttgatagccagaaatt

SEQ ID NO: 114565 - DNA, 451 bp, Glycine max
  unsure (1)..(451): unsure at all n locations
  Clone ID: PAT_MRT3847_74460C.1
cttttttttttttttttttttttttttttttttttttttttttttttttttttttttttttttttttttttttttttttttttttttttttaaaaaaaaagggggctaaaattttaagaacagaggcagttattaaggggattgggggggagggaaatccctgttttttgggttaggattttgggcagggccttttggggcacagttaaagattttaaaacaaatcttgcattggtgaaatgcaaaaaaataaggcacctttataaaaggttttacccaaaaaaatgggtataaaaaatggggttcaggaaagggaaacatttggggggcaaaaatgcaaatgctataattgggctggaaaaagtttctttgggccgcaaagctggttttgggtnntaccaaaactaaaatctcaacacacaagaaagctcatttatcccgacatgaacat

SEQ ID NO: 114566 - DNA, 364 bp, Glycine max
  Clone ID: PAT_MRT3847_74461C.1
ccaagccccagtcaaccaacacaccactctcactgctcttgatcgatctttcaagtcttcagggtattatgatggcaaatacattcatacttacctcagactcagtcaccgaaggacaggctgacaagctctgcgacgaaatctccgacgctgtcctcaatcgcttggcgtgaacaggacccagacagcaaggttgccagcgagacatgcaccaagaccaacttggtcatggacatcggagagatcatgaccaaggccaacgttgactacgagaagatcgtgcgtgacacctgcaggatcatcggcttcatcacaaacgatgtgggacttgatgctgacaactgcaaggtccctgtgtacattg

SEQ ID NO: 114567 - DNA, 349 bp, Glycine max
  Clone ID: PAT_MRT3847_74462C.1
ggggggggaaaaaagggttttttaaaaggcccccttcaaaaccccaaaaaaaaaaaaaatttgggtcccccaaaaaggggattttttacccgggcaattaaccccccaaaaaccttttttttggaccaaaagggaaatacccccaatttaaaaaacctttcccgggaaaattggaagggggccaaaacgattttttaaaagccccccccccaggcctcatggaaaaaaacggggaatcttaagaaaaacccaaggggtttttcccccaaaggggaaaccctttcccagaaccctttattaaaagttcaaaaagccccttccaattgtaaaaacggaaaaaggggggatt

SEQ ID NO: 114568 - DNA, 162 bp, Glycine max
  Clone ID: PAT_MRT3847_74463C.1
ggctcgagcttatcttgcaacagaccaatctgcactttgattctatgattcattatcagtttgggggtctcgctaaatctgaaattttttctaaaaaaaaacttttggggattcgatttattctggctgggcttgactgaaattgtgcctatcacaatctct

SEQ ID NO: 114569 - DNA, 479 bp, Glycine max
  Clone ID: PAT_MRT3847_74464C.1
gcccgacgtcgcatgcttcttccgattgacatgcatactctaagcttattttatgtctctgattatgttaatgtactatgagcattttatcaagcataggagatgcacattcatacttacctcatctataaccattatatcatgcacttattattgattactcttattaatttaatttcttattatacttttatatatttatttctttcatatttactctataaacttttgtgataattttatcatttatttttttatcatttcttttttcttttttatatattttttctttctatttttttttttttttttttatttctctatttttcttttaattttttttctttatttttttatatttttttttttttctctttttttttttttattatttcttattttattatttttttttttttttccatttataattttattatttatatatattatttttattttatatttatatttttttt

SEQ ID NO: 114570 - DNA, 244 bp, Glycine max
  Clone ID: PAT_MRT3847_74465C.1
accctataacctaatcattgagcacgactgaaaccccaataagaccatctaagtacccgaagggtacaattacgaactttacatccggaacgacattaacaggatcttgggtcccaaggcctactgcatttcttttaaagattctgcttgaaactgctttgggtacatggtgtctaaaaacaagtacatctacgccattgacaaggactgcttcgatgctaaaaatccttatggaaaggacatc

SEQ ID NO: 114571 - DNA, 275 bp, Glycine max
  Clone ID: PAT_MRT3847_74466C.1
ataatatgttattttttctttaataaataaagaaaaaaggggatctgttggtttttaattacacttgcaccatctatttaacaatgtcctgttcatgttcattgcaaaatcaacaaggatcataccctacaacctcttttgtatttcctaaaaacaatcagagaaaaaggataacactttatcatttatttaacttctctatgactcaaagttctgcttaatcaagcaagtcctatgaaaaaattccttcttattccaaaccttactcctattaa

SEQ ID NO: 114572 - DNA, 481 bp, Glycine max
  Clone ID: PAT_MRT3847_74467C.1
gtcataggaataatcttttttgtagtataatattgatgaatcctattcaatgactgactggcccattatcacctcttgcatgtcctcttctagtataagtagtgtagaagtcagagaaaactcaagaaataagaaaaaggaaaagagattttttctggccaacttttctgtagagtacatctgagtatttataagctcaagtgttataaggacagctggcatagactagcctaactgcctaagctacccaaggatgcagttgagaactgcacctttagacaatatacttttacaagtagtaattaagaaaggtttgggatcaaccattgtcatcattcagtgtcaattttaaatatatattgcaaatatggctctattcactgtactttggatcattgcagaattagtactttacaaatatgagctcttcactgataatcatatgttttaggatcataaaaaccttttgaattgtttcttt

SEQ ID NO: 114573 - DNA, 243 bp, Glycine max
  Clone ID: PAT_MRT3847_74468C.1
aactgagcgattcggctgagaaagcgctgagaatcttggagagcctctcaggggagatcagattcataactctcccaaccttttccacatgaatgttaatccgtcaatctacctctgtattacgaccgccttgaatgagaatgaggtaaagctactgaaacaaagaactcgtgatctgtatcaagtaaatatgatccttgacaatttgcctgttatgaggtttgccaatcaaaatgggattaa

SEQ ID NO: 114574 - DNA, 1736 bp, Glycine max
  Clone ID: PAT_MRT3847_74469C.1
aattcggctcgagaccgaacgcgatgaaattcatgtttgtgaatgctgataatgaccatctgttattgcataactcatattttatgggccgatgtgtgtgcaatgcaaccaaatgaaagtgtcatgtgaatgtgacgattaataccgagcaaatcaaattatttatgatttctggagtgcgaaaactggaccattgatgtgtgtctctcggaagctgccaagttcaaattatttatgtcatacgggctatcggcatagtagctggtgttttagtggttgttcttctggtgctggttctcatgaggaggatgggatggttaggaggcaaagatccagtgtataaagagctcatgggcgtagatctgcagacgggattatttacactaagacaaatcaaagcagcgaccaaaaactttgatggctcctgtaaaattagcgaaggtggctttggttgtgtatacaagggccaacaatcagatggtacaatgatagcagtaaagcagctttcttcaaaatctaaacaaggaaatcgtgagtttgtgaatgagatgggactgatatctggacttcaacatcccaatcttgttaagctttatggatgttgtgtggagggcaaccagctaatactgatatatgagtacatggaaaacaattgtctatctcgcattctttttggcagggatccaaacaaaacaaaacttgactggccaacaaggaagaaaatttgtcttggtatagctaaagctttggcttatcttcatgaagagtccagaataaaaatcatacatagggatgttaaggcaagtaatgtattgctcgacaaggattttaatgctaaagtctcagattttggtttggcaaaacttattgaagatgagaaaacccacattagcactcgagttgcaggaaccattggttacatggctcctgagtatgcaatgcgtggctatctaactgacaaagcagatgtttatagctttggggtggttgcactggaaactgtcagtggaaagagcaatacaaatttcaggccaaacgaggattttgtttaccttcttgattgggcatatgttttgcaagagagagggagtcttctggagctggttgatccaaatttgggttcagaatatttaactgaggaggccatggtggtgctaaatgtggctctcttatgtactaatgcatctcctacacttagaccaacaatgtcccaagtagtgagcatgcttgaaggttggactgatattcaagatctactttctgatccaggatattcagctattagctcaagttccaaacataagagtataagaagtcacttctggcagactccaagcggaacacatagcatatcaatacctagtatttatactgattcctctggctcacatgttgaaacagaaaaaaactatcatcctgtaaccgttaattcagatggatcagacaagtcaaattagtttcttaatgccacatacttaatacaaaactcgtggtgtattcaatgcaagaaaagagaaaaaaaaattaaaattaatagctatgtaaagagttttatcttgttgctcattcgcccaaaatttggggtgccatcatttgaagctatggttatgtacctattcccatcacactggggtgccttaatttagggttagttacaatttacgttgacatgtgagattgctaacattacagtctctaatacattatctattgcttaaatttatcagaagcttcga

SEQ ID NO: 114575 - DNA, 542 bp, Glycine max
  unsure (1)..(542): unsure at all n locations
  Clone ID: PAT_MRT3847_7446C.1
gactcaaaactcaaggttcataaattcttaaagtgaagaatacaattatgcctctgaggggaaaattaaagactcctattgcttggccccctgccatgaatggaatgaacacaaaaaaaaacgcccctttttgcaaaaagatggttattcaaagcatacttatgatatgataacctagggcttaacaaacaaaacaagagtttctattctcttaatgggcaatgggaaaaatttcatgtattctttggcactcgactgatttggtgcttccagccccactattaacctcaatcaaaatcttctgaagaaaatgatgaaagatggctggatttgaaaactcctttgtttattttgttccccttgttcccatgcttttcttccttgaggaagagacttccaaggggctgctcttgctcaggggagaaatctgagatatccatgggcccacctggatcattgggctggcaacttccaccaaccttgattganttgttgatggcttggaagttgctgttaacataggtgctcaaggccccaggctc

SEQ ID NO: 114576 - DNA, 398 bp, Glycine max
  Clone ID: PAT_MRT3847_74470C.1
cgtcctttttttttataaaatatatgatgctaaaagcaatgttggaacattctatacatcaactattacaatttttgtcagaaattaagatagttgcttcctaagccacttctccggtgacacatttgtgtctgttcttcagatcactcgctgcggagattcaaattgccaattgtcacacaacagccttgccttatgatcccagcaacttcttccatcttgcatatgctaaaataagcaagaaaagtaatacgcaagccgcagacgtggtccaaacgaagggccaaaatactccatcaatgttatataagttacaaggaatgttcataccaaatgcaccagcaatcaaagtttcaatagcaatagcaaatgatgcaataggcaacgtcaactgcagc

SEQ ID NO: 114577 - DNA, 578 bp, Glycine max
  Clone ID: PAT_MRT3847_74471C.1
cccacgctttcgttttgagattggtggcaaggttgtttctcaggtgggatttcaagaatcagccatcccaattggccaaaaccctgagaaattcagacccaaaaaagctgctgttttgatctgcctattcgaaggggatgatggggatctaagggtcattctcaccaagcgctcttccaagctttctactcactcgggtgaagtggcattgcctggtgggaaaactgaggagggggataaggatgatggggatactgcaaaaagagaggcaaaggaagaaattgggttggacccggaacttgtcaatgttgttactgtacttgaaccattcttgtctaagcacctcctaagggtagttccagtcattggcatacttcatgacaagaaagcattcaaacctgttctgaatccagctgaagtggaagcagtatttgatgcacctttggaaatgtttctcaaggatgaaaatcggagacaggatgagagggagtggatgggagagaagtatttgttgcatttcttttgactaatgatatcgggcctaaaaaaatacattatatggggtttaaactgctggg

SEQ ID NO: 114578 - DNA, 1522 bp, Glycine max
  Clone ID: PAT_MRT3847_74472C.1
tacggctgcgagaagacgacagaagggggagaacattaccaacgacaagatccttattaccgagagcatcttcttccatcaccaaattcatggattcttcctccaacgccagcagcattggaggatctcagaggctctttgcgttagcacagcaccttcgccagtacaaggcaccgtctttccccgaagatattgtggaacaaagcattgaagagattggtggcaaggttgtttctcaggtgggatttcaagaatcagccatcccaattggccaaaaccctgagaaattcagacccaaaaaagctgctgttttgatctgcctattcgaaggggatgatggggatctaagggtcattctcaccaagcgctcttccaagctttctactcactcgggtgaagtggcattgcctggtgggaaaactgaggagggggataaggatgatggggatactgcaaaaagagaggcaaaggaagaaattgggttggacccggaacttgtcaatgttgttactgtacttgaaccattcttgtctatgatgatgatttgatggttgatcggctcgagcggctcgagagaaagggaaatttcactacagtactttaacctatctggttgatgcagcacctccttagagtagttccagtcattggcatacttcatgacaagaaagcattcaaacctgttctaaatccagctgaagtggaagcagtatttgatgcacctttggaaatgtttctcaaggataaaaatcggaggcaggatgagagggagtggatgggagagaagtacttgttgcatttctttgactatgatatcgggcataaaaaatacatcatatggggtttaactgctgggatcttgattagggctgcatcagttgtgtaccaacggcagccagcttttgtggagcagaaccctaaattcaagcttccacaggatgtatccaaggacactacaataccttgagttcattgtttattgtattttgtccttgatacttgtccttaatcgtgcaaaaaaactcgtagcagccagagttctagaattcatagcaagtgtttatatttactgagaaaggaagagggtactatcccatcacttggaattcatattcctacctattgaatgccatcccaaagtttagagagttgcagacattgaatcactcaaaatagaagtatttgctgacaagcaagtagtaacttgaataccgctgagtgttagaagggctactggaataaagtagttcattttgttacttttagttgaacagaattgtcttcctgcaattcttgttatcttatgatgccgttggcaaagtttatatatgatgttgttggcaaagtatcttatatagagatgcttcttgatatgatatgtaccataaaatggtgcaaaggaaacattcagtgtgacaggcgtgggattcatttaagcaagtatatgcaaaaatatcttcaggtaattaaaaatggtgtgtataatatatttagatgagtggacaaatcatttcataatttc

SEQ ID NO: 114579 - DNA, 459 bp, Glycine max
  Clone ID: PAT_MRT3847_74473C.1
gtaggttttgaggaccctcatgtattacttactgtcggacgatggactctcatttgtggagggttttccttaaggaacttaccatacaatcatagaggattcatctgaccctattggtcctgctcaagagctgtctgaaaaactctttattcgtccaattcaaatgctttcccacaagaagattgtttgtaactaaacagaaagtatatagtcttatatgcacatcattgaggacattgtgtctaattgtctctaaatattcaaatgttcatttcaactattcatgaaccacagtttctacatattactaatggaataaacgctttattacatttcttaactgatgatactctttttgttttcacaccttctagagaatactttaaacgacgaatttattgaacaatcaaaactttcgaaattttacaattcttaaaaacatacaccaatttttttttt

SEQ ID NO: 114580 - DNA, 522 bp, Glycine max
  unsure (1)..(522): unsure at all n locations
  Clone ID: PAT_MRT3847_74474C.1
atctantnnnaaatggtttgaaggtgacagttgtttcttagttnttanttcntgtacgtttgtgattagaggaggagatagaaaagttgtacatcttttgttgagtgtgatcttggtttcttacnngacgngatatggtggggtaaggaaaggctgctcattgctttccctctcctgcgtgcctcccaatgacctctttcgctcaacaccttctccctcccctctccgtcgccgtttggtgaagcccatgtccgccgtcctcntctggtgttccttgtggaggcgccgtggngcctccggcggcgggggtggggggctaccggcccttccgccctcccccggggccgctgccctgggggtgggggnnccctctgcgttgggcgggcgtgtctggctgtgtggtccgccggctgggcctgtgtggcggggtcggcgccggtgttgggttccgtgggggggggggggggtttgggtggtggcgggggtggggggggttgcgctgggggtgtggggggggggggg

SEQ ID NO: 114581 - DNA, 1083 bp, Glycine max
  unsure (1)..(1083): unsure at all n locations
  Clone ID: PAT_MRT3847_74476C.1
nnnnnnnnnnnnnngtgtttttttgagtctagatcattgttcgccaatgctgatatagatcaagcaattgttgtacactgtatacatttcacataacacattccattctattcacagcagttctctcagcaactcattccaaatatcaggcaccccagggaggcaccaatggctgcaatcagaggaatggccttttcctggtttctgcttctcatcttggcttattacccttctggatcctctagagcggccgcttttttttttttttttttttttttaggattaataagtaaaataaataagatcaaccaacccaatcacaatcaacgttcaaatgcaacaaaatccaaatccattctcaaaataaaattttgtcggctttaacaaaaaaataatatatctcattcttaaaaaaacagaagaaaaaggaagtgaaagctcagcgcttcttagacacaccaacagttttacccctacgaccagtggtcttggtatgctggccacgtacacgaagaccccagtagtgtctcaaacctcgatggttcctgattttcttaagtctctccaagtcatccctcaacttcatatccagtgcatttgacaccacctgagaatacttgccatccttgtagtccttctttctgttcaaaaaccagtccggaatcttgaattgccgggggttggcaaccacagtcatcacactatccaactcagcagcactcagttcaccagctcttttgttcatgtcaacatcagccttcttgcagcaaatgttagcaaatcgcctcccaatacctttgattgaggtaagagcgaacattatcttctgcttcccatctacgttcgtgttcaaaacacgaagtatgtgctggaaatcctcgtttgccaccagcgacatattgaacgtagggatgcacgattccgggaagtgatgcggctcagagtagatgaacacggttcctaggctcccctcccccccttctctcgtcttctcgcagccgtaaaannctaaactgaattttgtnnttgttatattngcatcaaagattgaaattgtccaagcccatttaacgacggnataca

SEQ ID NO: 114582 - DNA, 793 bp, Glycine max
  Clone ID: PAT_MRT3847_74477C.1
tccaaccccaaggtggagattggtgaggttctcaaggtctgcactaatcatcaacatgaagttcaccattttttctcggctcgagttcaactctgtctccttcagacttcttgggtttatgtgatgatggctctcaatatctcttctcctgctgaagtcaagtccatttttttcgctgattacttcaagtctaactgcatcactgcaaagttcacaggtggttttgcttttaagagaaaagagcgtggagctgcatctggagggcgaagttgttgctcagtgctggcaccaccaccaccggcctgcccgggacgaggcccacgcgtccgcccacgcgtccgtacggatgcgagaagacgacagaagggggggagtactggttcaattggaactcagacactagatattgtggcagagaatccagataagtttaaagttgtggcacttgcagctggttcaaatgttactcttcttgcagaccaggtaaaaagatttaagcctcaacttgttgctgttagaaatgagtccctaattgctgaacttgaagaggccttgcatgatgttgaagaaaaacctgagatcatccctggagagcagggaatcgttgaggttgctcgtcacccagatgcagttagtgtagtcacaggaatagtaggctgtgcaggactgaagccaacagttgcagcgatagagcagggaaagacatagctttggccaacaaagagacattgattgtggaggtccttttgtttttcctcttgctcagaagcataatgtaaaaatacttccagct

SEQ ID NO: 114583 - DNA, 347 bp, Glycine max
  Clone ID: PAT_MRT3847_74478C.1
gatcctaaatttttttaattggtttttcattggccactggttcgttctttttttttccgccacacctaactgcagggcacctggatttgacttttcccccccttttattttctgttgctaattctcagctcttctccacacggttcatgctttccttccttcgcctttcgtgacgtgcaatccatgttgttcacctttcttctaggttcttcattatgagagtgaagaagggagtgacgtcgtgctgatgtgtatagcttgaaacttattcaataaagcagttgataaaaatgacttttgggccattggattggtatagtcgcccaattgcaaatggagtatggaca

SEQ ID NO: 114584 - DNA, 221 bp, Glycine max
  Clone ID: PAT_MRT3847_74479C.1
cggggcgcgttcaagaatggttaaaaaaaatgtgcttgtcaagaataattcgttttaaaagaatgaatgcggaccggcaaaggggcccattaacattcacgggtgggtcaatttcacttatcccccttccccagagggtgcctttggacttcaccccgaacccctccccgaaatgatccataaatggggtttggtggcggaaacattttgggatggggggg

SEQ ID NO: 114585 - DNA, 450 bp, Glycine max
  Clone ID: PAT_MRT3847_7447C.1
gccgcgccgtaagctggaattggctcggaaaaacacctggctacattgtgtctcttctaacacaacctgtggagggagaaggcgaaaaatcgctggttttaaccatggatagatttgagcaccgtgggtttctaattcactttggtgataaaggatctgaaagaaattcttttaatcaatcttctcccttttttgcaaactcaaaccctgatatgcctgctgttcctgttcctgctgctcaaaatcatgaatggcttttacaaaatataacttctgctttggattatatttctgaacgaactttttttaaagagaatgggccacatagtgcctctgatcaagatgttgctatggctgatgcatgcactgcctcacataacaaagggtctacaagtgctataaatgcgagtttcatttaaaggatctccaaatcttcatatgtgaaacatg

SEQ ID NO: 114586 - DNA, 540 bp, Glycine max
  Clone ID: PAT_MRT3847_74480C.1
gggaggggaaaaaattagctgaaaaggcccttttttttggggggtttatgggtaaaacaattaaaatttaaaaaattacacccaagggcggcagaataggacccaatttcacctccctaaaaaaaaggggggaaaactttcctgggtgggcccccccctttcccctggaaaaattttgcagggggggggggcccaaacttataaaaaaaaatttggggggtttaaggggttggtaagcccccaaaaaaaaattgaatttggggaaattgggaaaacttaaaaaaaaagcttttggggtggccctttgggggaaaacctaatttatgctccaaaacagccagttggggaaaaaccccacaccatttaaaaggggataccaagcccatgcagaaaccctgtttaagggaacccacgggttgaaaaaaaaaagtttcaaattaccttaaccaaaaaaaacccgaagttccagggaaaaaaagggtttaaaagcaggacgtgggggggaagaaacacccgggattcccatatttttggcaagcc

SEQ ID NO: 114587 - DNA, 527 bp, Glycine max
  Clone ID: PAT_MRT3847_74481C.1
gacaggaattctaatatcctgaactatacacatgtaccttgagagggttaccaacactgcttccactgtgttttaagtaacaatgggcttaccaagcttgtttcgtctaaaactccaatctgccgattattattttgtgctttacctctctgctcatctttgtacttacaaaccatttttctattgctgtagcaatttaatgcttttcatcctaaaccttgggtgaaaattccctccacctaataatgattgactcttacctcacttttctttggtttaacaaaaaattcaatatgagctattctaacttgagtgctgatatccaacactattcagcatatgggtgtgacaccaaccgttccttaattgaaacccaatgctggacttttaccattctactcttcctcatgcataagtcacttcctttactaactgtaaaaacactgctacgcctataacaagttgtggctcttatgaaccaaatatttttctcttaagaaaccgtatcacggattaaatttttactt

SEQ ID NO: 114588 - DNA, 598 bp, Glycine max
  Clone ID: PAT_MRT3847_74482C.1
atttggtgatttgccttgaaggcaccacttgtagagagcaattccttttgaggttcagtgccctctttgccgagctaaccgataggattgtcccggtcgccatcaacacgaagcaaagcgtgttctatgggacatcggttcgcggccacaagctgttggacccttattttgtgttcatgaatcccatgccaacttatgagatcactttcttgaaccagttgccaacagaactcacctgcatgggaggcaaatctgccatcgaagtcgccaattatattcagagggttcttgcagggactctcgggtttgagtgcaccaatttgactaggaaggacaagtatgccatacttgcaggaacagatggaactgttccatctatgaagagtgcttgaaattggagagcgacaaagtaaaatcaatcccttcttttgtttctctctattggtcacgttgttttccaaaacgcttagaagtattagagtaataaaaactgattgtttttattccccataaaaataacagtttattatattgttattatgataaatacaaattatagtttctgttgtttggcccaaaaaaaaaaaaaaagggcggc

SEQ ID NO: 114589 - DNA, 492 bp, Glycine max
  Clone ID: PAT_MRT3847_74483C.1
ccttcgcgtccgtgtttttcaggttgggactcgttgcgaccatcaaggtatgtcttgttcttgctcttatgtcctgttcctgtttaggacagttttgttttctttagcttctccttttgtttttgggttattattactactactactggacaaggttcttaaaactgcgtatatgtttgtgtctaatgtgtataacgattgttgagtgacgtttgaaccttgcgtgcaaggcttgctgaagttgtgttatgagccatttgggtgtgcagattgattacttagcgtattcaatgggggtttaatttatgggagcttgtgtcttgtaagtgtttgttgaactaaaggttgttttcataagatttgctgtgaagtttagtgaaataagcaggaaagagataatgggagagtcgtgaaactgcttgtattagtatccgctgcatatgattgttgtgattagcattaaggtttggatcttaaatggaaagtttactg

SEQ ID NO: 114590 - DNA, 321 bp, Glycine max
  Clone ID: PAT_MRT3847_74484C.1
gactctgactgcgcgtggagggccctttttctttttttttaattaagcgttgctcctgaaatttccaagagctgtgatcgtacaacctcgaagaaggactgatggtagattgcatccaccgcagctccaacaaactgtccaacccagtttattcatatggaccacccaggcctttcgtcaattgtttgaagatcacagctggttacgaacttcttgcagggttaatagcacgattccagctgacaccgatcagaatccaagtgacccatgaagacggctaacccaatgggcagtgcctctaacccaggagcatgaaattcc

SEQ ID NO: 114591 - DNA, 240 bp, Glycine max
  unsure (1)..(240): unsure at all n locations
  Clone ID: PAT_MRT3847_74485C.1
ggctagaggaacgcgagtacacgtcattattcaacttggtgctctgtctttcaagcgctggatggatctcgagtcaaccacatattattacaccctaggtatgacccaggcggttcggcgtctggtgagatgaagaaccctggaattaaggacgggcctganactagggtcgtacaacctgaggatatcgtgaggagagatcgagctgctcgtaattatggtcatagtggtgctgtgggt

SEQ ID NO: 114592 - DNA, 190 bp, Glycine max
  Clone ID: PAT_MRT3847_74486C.1
tacagctgtgagaagaccacagaagggagtacaagcagcccctgccttaatggcataacataacacacttttttcactcttatgcttatgagtctgcaaccttgatgctatatgcgaggatcagatgtaagatcgaaaatggttggaccggaatcggaaattacccttgctaagaattgcaaactgcagc

SEQ ID NO: 114593 - DNA, 364 bp, Glycine max
  Clone ID: PAT_MRT3847_74487C.1
gttctcgtctttcgggcaccatttctcagagcattttgctgcaaactgtttggaatcaaatggcaacagtgaggacaccattgatattttgattctagcaagcagagctttttgcaaattttctatagaccttctcggtggaggaattttagtggacaaaactggagattgttcacacttatacaaaattctcatactagtaacttgttgagagttgttgcttggatgaaaggctgtttaatggctaagattgtgatgtttgtgaattgcaatatacaaaatgagtgattgggccctataggttcaagtatttttaacaaacagcaatcagttcatattattttgatgcacgtaagtggacaaa

SEQ ID NO: 114594 - DNA, 511 bp, Glycine max
  Clone ID: PAT_MRT3847_74489C.1
ccaaaaaaaaaaagttcattattggattgctcagatacaggaccttgtcctgttcttcataggagttagattagataaagagccaaatcaagtaacaaccaccagatatataaccccgccttaaacataagaaatatggcaacgcacaaaacctgagaaaccttggattgcacacattaatctgccactgtcatctctaaacctccaacaaataaaaagttaataaataagtaatatagtatgcaatcatctttcagaaacggggagggcagagctgacatctaaactacagacttgggtggaatttcaagaagcatcatcgtcaaaaagaactctgtaaaaccgttttctttcttcagggtcaaacaacctacccaccttaccatctccaccaccaccaccatcatcatcatcatcaacaacttggcgacttctccttctaccccttgcaccatcatccacactaaccaaaggaacccctttcttcctcctcgttgcctgagcaccgcac

SEQ ID NO: 114595 - DNA, 366 bp, Glycine max
  Clone ID: PAT_MRT3847_7448C.1
tgactgcacacgcacgcatgcttgaattctgtagatctaccgcgctcgccctttttttttttttttaaattttccaaccaatggaagaactttattttctgtagaggaaacattctgatggccttgttgcctgcctggtcacttatttgttatgacaatagagaccttgctactatcatgacccgactaaattagagactctttggacaaatttaacaatactagataaagtcctaaacctgacgatccatggcaacagtgtcttgtccaagtctctacaacctcccctaccgattgggttcctttctatgtctaaattgcaccatgtacgggtgtattaaacagccccacgtttctgctggagca

SEQ ID NO: 114596 - DNA, 400 bp, Glycine max
  Clone ID: PAT_MRT3847_74490C.1
cccacgcgtccgcccacgcgtccggccaatgcaatggaaccaacaattgtgctaactcaagaagacgaaagaggcctattgcaaagaaacgactataactgaaatccccctttcctgcaactctttctgcgatatcccttaatataccctcaacttctccttcttgagttagcaaatgcaatggaaccaacaattttggaaaagctctgtgcggttttgaatgtcgacaaacgaagtgtggatcgggacttggatgtctatcgtaacttgcttactaagttggtccaagctaaagagcttctaaaggaatatgctgacagggagaagaagaaaagagaacaaagggctgaaccacaaacgtctaatgaggccattacacaacaacagcacttttctagcc

SEQ ID NO: 114597 - DNA, 543 bp, Glycine max
  Clone ID: PAT_MRT3847_74491C.1
ccacgcgtccggtttggctggagagaagggctggagttccaaacgaatgaggattagctggctattggggcctgtgtcaatcttttaacgcatgcaaataggtactgatgctgcgcttgatgcacctgggtagattctcatgaagaggcctcttatctggaatgcccgatttaaagtatgctcatgaatgacaagattgctcttgagaaaaaagctcaccttaaagcccatgctactaaaagaggtgaaagtatgaagcatcatgataccactatccatctgtgtggctataaaacatgggtcaccttaccaaatactaatacattggtaccacctgacccataatatgaactagctaattctctaatcactggagcactcaatgatccttctaatgattagactaacttactgtaactatctccatctcctattgaagagctcatatatgtcaagagaggtattcgtgagaaacaggttgcactacaggttaaagtcaatattactgttccctacaaacagcatgaacctatacctacgtta

SEQ ID NO: 114598 - DNA, 355 bp, Glycine max
  Clone ID: PAT_MRT3847_74492C.1
tcgcccactcgttcggaaaacttcaacttgtagctgcatctggttacactgaagaaaaaaggagacaagacgctttttttttttctttctttctttagcttaactctgggttcatgggttgcttctttatgtgacctttatagatcaaagctgagagccctccacgtaatgtgtttcaaccgtgaacttggatcccctgaccatttaaaggaccttaaggattcgaaatttgtgaaattcagttcaaatggatatgtttatcatgcactaaaataaagttaaccggctgtgatttatgaagttcacaagaaaacttgacgattcggaactttccaaccattgtttttaaaagtta

SEQ ID NO: 114599 - DNA, 428 bp, Glycine max
  Clone ID: PAT_MRT3847_74493C.1
ctaaaaatccctttgtattaatgtggggtgataaatcaacagtacaccgaatatatgtccaaatgtgaacgactaaaaaaataaagcaataaactaattctggttctaaacttattaataatatactgaatcaagggtcgataaacaataataaaattaattcaaggaattaaatgaaaacaacaactatattgatcaactaaatctaccatatgaaaatatcattgtttacttgaaaagagccaaagatatcttcaccttaataattgcttactgagaagaatattcacaatcttcctaaacccacggaaatgctacgaaaacgcttgggccaacacaatgatagtgtcaaaccaatagctatgcggggtgttccattcgatattccattcctcggctgcagatgaacattgctaatgacctatttg

SEQ ID NO: 114600 - DNA, 269 bp, Glycine max
  unsure (1)..(269): unsure at all n locations
  Clone ID: PAT_MRT3847_74494C.1
ctcgggcaacgttcagcgctagctatcatacagtcncgatggaccgcacgaagcagacggcgaggaagtccagtggcggcaacgcgccaaggaagcagctggccaccaaggcggcgcgcaagtctgccccggcgaccggcggagtgaagaagccccaccgtttccgccccggaacgtcgcgctccgggagatccgcaagtaccagaagagcacggagctgctgatccgcaagctgccgttccagcgcctggtgcgtgagatcgcccagg

SEQ ID NO: 114601 - DNA, 1184 bp, Glycine max
  unsure (1)..(1184): unsure at all n locations
  Clone ID: PAT_MRT3847_74495C.1
agagaatgctggtaggtttgcatctatggttgctgtgttttgtgagcgacttgggtggcatgatcttgaaggcttagttgctaagtttcaaaaccgtgtatcatttggagttagagcagagattgtagaacttaccactattccctatgttaaaggttctcgagccagatcactctataaagctggtttacgtacaccccatgcaattgctgaggcatccattcctgagatagtaaaagcactttttgaatcttcatcatgggccacagaaggttctgcacaaaggggatttcaatttggtatagcaaaaaagataaagaatggtgcccgcaagattgtttttgataaagctgaggaggcaagtaacgctgctttctcagcctttaaatcacttgggttcaatgtcccacagtttgatcctcaaatattatctactgctgctcgtgattctatcaggctaggaactggaagtacctctggaagtgacacaactgatactagtcatagttttgttaatgcagattgcattgataatactaataaatttactttagataaagaaaaagaagacttaataaaattatctgttaacggtactgtggcttctgtagaaggaaaatcaagaagcaggatgatatgtagcttgtccagtgttccagttgcaggacctaaaatggatgaactcaataggacttctgactataccaaaaatgcagacatgaccattctctctgttcaattgcagaaaccaaatgataaatctggtgtacatgatgggtgcgatgctcattgtacagaggaagcgcataagaatggaaatttggctagtggtaatgctggtagttccagccagaaaggtcccattaatgcagttagtagtcctggtgggcttgattcatttttggatctatgggactctatgccagagttctattttgatatccattatattaaacgattggaattgcactctactgctccctttgaaatacatggcatagctgtttgttgggaaaactcttctgtgtactacattaatcttcccagagaatattctgttgtctgacagtataaaagatgggctgtttatcctttgagtgcatgcagtcataagaaagaaagtttcatcttctaattctaagncagatctagagattgctagatctagatggaacagaattagt

SEQ ID NO: 114602 - DNA, 240 bp, Glycine max
  Clone ID: PAT_MRT3847_74496C.1
aacaaacctagctattcattaattattaactcataatgggagggggaagaatacaaaccttttctgtgaaccagctcaaggagcttgcaccccaattcattcctccagccaatgaaagggccgagaacaccaaagccataaaaagggtcattgggcctttcatcttaatggcttaatcacattatcttttggtgaaaggaataacttaaacttgttcttaatggggattttttggcataa

SEQ ID NO: 114603 - DNA, 336 bp, Glycine max
  Clone ID: PAT_MRT3847_74497C.1
gccagagtaccatttgtggacaaagagtttatcagagttgcagggaacattgatcctgaggggaaaatgataaataaggacgaaggtcgaatcgagatatggacactgcagatgacctttgatgatgaagatcatccttatatggctaagcacatcttatataatcataacgaacaatccagtgatggagtaggctatggatagattgatggccttaaagcttatgatgaacaacatgcaactgacagatttatgctgaatactggccacactatcacctgtaacacttacaccgccaatgaactataccactacagaatgatatcagagagggtc

SEQ ID NO: 114604 - DNA, 786 bp, Glycine max
  unsure (1)..(786): unsure at all n locations
  Clone ID: PAT_MRT3847_74498C.1
attcgagctctgtacccggggatcctctagagtcgacctgcagacttttgtacaagctcatcaatgtatatcatagtttttgaaatcggtaatgaaccaatgcaaaaaatggtttaaacccgtatttctttaggagatattaggtgaattggatgattaaggaaaaatggaaggaaaaaatatcacaagtttaattcctgctaataaaattaatattttaacaactaacatttgctcatataaaaaaccccaatattttttaaaatttaatctaaagcatttttaagttaactaaaaacatatttaataagaattaaaatagttgtaaattattttattaattattattaattactcttataaaacatataatttaatcattatatcaatttgcaattttttatatcttgatttcacataatcttatattaacttcttgttttcttttttattctagatgtaaacttgttataaagtgattttactgggttttgaccagttttgattcttcgccaattccttgaacgattttgtagtttatttatatcaaacactaaatcaattcatcagttttctgggtcaaaccaacaaatttgatctggcatcttataacacaattgtttatggaaaacacatctaatgtgattaaacaaggacatcacgcaacttggcagttaccacttctttgcctttgctccaatatttttatttaaaagttatcttaaaattaaagttcaaaaattaaatggagtttaatttatgtatngcttcgggtatttttattta

SEQ ID NO: 114605 - DNA, 511 bp, Glycine max
  unsure (1)..(511): unsure at all n locations
  Clone ID: PAT_MRT3847_74499C.1
ggctcgagctgaggatcaaaatgatgcttctaatgcatctgccaggaaaatcaaaagagagtacaaggaaccatgggattatgaaaactcttactatccgactactcttccttggaggaagccaaattctggagatccagaaattcttgatgagaaagaatttggtgaagctgctactagtgtggagtatgatgagaatactgttaattctgctgcagaactcgagatcttgattcctactcctctgcctatggacaagcagagtaataaggggaaggagaaaattggtacatcaacagtatcgggagaggccacaaagtcaaagaatgccttggaagagttgccaaggggatatatgggcaaaatggctggtgtacaagagtggagcaatcaaactaaaattaggagaaactctgctcgacgtgtctccaggttcanattgtcgatgtgttcaagatgttatggctgtgaacactgcacagaaacagtgttgcaatcttggcgagattag

SEQ ID NO: 114606 - DNA, 371 bp, Glycine max
  unsure (1)..(371): unsure at all n locations
  Clone ID: PAT_MRT3847_7449C.1
gaaaaaggcgggcccccaaaaaannngcgacaaacanncagagcagcaccagccccnagcaagcgagggcgccanaacaaacggccgggggcacaggcaacgacgacgcgagaaggcagaaggccccagagagcacaaatttnggttggttggnaccagaggtggggccaccaccagacaacnnggaagcaaaaaacccccaaancacggggggggcggggggcgaaaaattcatgcaacccggggggggcagagaacccaacgcgcacccaggcgggaagagnacgcgccaagggcacggggncagagaggaagcaacgngnccccggcgaaggggggagcagagaagcaaccaagaggcgcggggcggc

SEQ ID NO: 114607 - DNA, 534 bp, Glycine max
  Clone ID: PAT_MRT3847_744C.1
ggccccacaaaaaaccgcgaaaaaaaaacgggggggcaaatggccctcgccccccaggggggaaaaacaaaacacccaaggggggggagctcgggcccccgggggcgaaaaaaaaaaaaccccgaatggggggaggctatccaacagggggggggtttttaaaccccggggggggggggatcactccccgaccctaaaaaaaacgggccggggggacaaaaaaaggacggggggtattacggccaccccaaaaaggggcaaaaaacttacctttggggaaaccctccccgtcctttgggggtaaatagaccccaaacccccttgggggcggagaaagccggcaaaccccccaaaaaaaaaaacccccgggggttgaatggaaagaacccggccccccccgaaaaacatttgatcaaggggggaaaaaggttttgaaaaaaaaaaaaaaccaaggcgggaaccgagaaagaaggggatcctatacatctcttgggtaaagaaaaacaggaagtgggagaatgacaaaaggggggg

SEQ ID NO: 114608 - DNA, 1280 bp, Glycine max
  Clone ID: PAT_MRT3847_74500C.1
agggttcgacgttcagtggtagagttcccgagcaacgaaagctaggtcacgggttcgaaaccttttttcgtgaaaataggtgttttttttagttcgtcgttttgctcttcgtgttgttgaagtgcaacgccatggatccagatcagggcacttcaaaagcccggaagcccaagttcaaacccaggaatctcaaagcagtccgagctcccaaaaccgaagcggatgataagcgaaacgaagatagcgaagtgcctcgagctctctcgcgtcgacgacatgaaaatcctgcaaaacgcgagcctaaagtcgaaagaaaatctagcgtggaagttgcatttagtcttggaagttcatcatcacattccctcaggacatatggcacaagcaaatctatagatagtggcacaagcagtggttcaccatctaaatattttgccaatgaacaaattcgttcaattgctactgaggatcaaaatgatgcttctaatgcatctgccaggaaaatcaaaagagagtacaaggaaccatgggattatgaaaactcttactatccgactactcttcctttgaggaagccaaattctggagatccagaaattcttgatgagaaagaatttggtgaagctgctactagtgcggagtatgatgagaatactgttaattctgctgcagaactcgagatcttggagagtgaggaacaaaggatgtttttctttcagattcctactcctctgcctatggacaagcagagtaataaggggaaggagaaaattggtacatcaacagtatcgggagaggccacaaagtcaaagaatgccttggaagagttgccgaggggatatatgggcaaaatgctggtgtacaagagtggagcaatcaaactaaaattaggagaaactctgctcgacgtgtctccaggttcaaattgtcgatgtgttcaagatgttatggctgtgaacactgcacagaaacagtgttgcaatcttggcgagattagcaaaagggttgttgtggttcccgatcttgattcaattgaactgtaaaacactctagacaaatatgactaatgcaccacatacagggatagtacagtaccttgttggcttatgtgaatatatgtgactaaaaagacacggacaattggcaagtgccaattggatactagacctagcatttgatattaatgaaatatcaagtggatgattgaactcatttttttgttattgttttcttttatccgtagaaaccaaatcaggtaacaagagatttacaacaaaacc

SEQ ID NO: 114609 - DNA, 217 bp, Glycine max
  Clone ID: PAT_MRT3847_74501C.1
gcggacaagatgacaacacgctacaagaagaaccggaggacgaggggcctcgacatcactgagggcagcggaatccaattgcacaggaagcaccctatacgacacactaacaccggaagcatgcaccaccacaggatcctcttagacaaataccaccctgagttcttctgtcttgtacgaatgcactatattcacaagcttcttatcatatcactac

SEQ ID NO: 114610 - DNA, 1276 bp, Glycine max
  unsure (1)..(1276): unsure at all n locations
  Clone ID: PAT_MRT3847_74502C.1
tgaatattcaagacactattaatattcaatcgagtgaaggagtacacaaacaacgattccaacaaagcaagttgttttttttttagagaagagaagcaataaatcaatcaatcaaatcattcttacattgttgttacgatggaatcaccgttcagaccagagattctgaagggaaaggttgctctaatcaccggtggagcctccggaatcggattcgaaatttccacccaattcggtaaacatggagcctctgttgcgctcatgggtcgccgcaagcaagtccttcagtccgctgtctccgttctccaatccctcgtcattcccgctgttgggtttgagggggatgtacggaagcaagaggatgccgcaagggtggtggaatccacgttcaagcattttggaaggattgatatactcgtcaatgctgcagctgggaactttctcgtttctgcagaggatttgtcctcaaatggctttcgaacagttctggacatcgattctgttggcacattcacaatgtgccatgaagcactaaaatatctcaagaaagggggagaaggaaggagcaactcttctagtgggggatcaataataaacattagtgctaccttgcattacacagcttcttggtatcaaattcacgtgtctgcagcaaaggcagctgttgatgccactacaagaaacttggcactagaatggggaacagactatgatattagagtcaatgggattgcaccaggtccaataagtggcactcctggcatgagtaaactggctcctgatgaaataagtagcaaagccagagattacatgccgctgtataaacttggggagaagtgggatattgccatggctgcacttttcctagtatcagatgcaggaaaattcattaatggcgacattatgattgttgacggaggactttggctgagtcggcctcgccatttagcaaaagaggctgtgaagcaggtatctcgatcagtagaaaacagatccagaaatgcatctgtcagtgttccaaaaagcaagctgtgaaccagcagattcaggtgttagctcctctacacagccaggaatcaatttatagtttgtagaatactatggatttgggagatatgatctgttacttttaaattattaaatagttgaactttctcaaactataaaatataaataaggttgtttaaaaaaaaaaaaaaaaaaaaaaaaaaaaagcggcggccctttagaggactcncaagncttacgtacggnncgtgcatgcganncgtcatag

SEQ ID NO: 114611 - DNA, 306 bp, Glycine max
  Clone ID: PAT_MRT3847_74503C.1
taggcagatcggcgcatgctggacatcaatctctttcgacgtgcttgcacatcattgtggactcaagggtacctttgacactcccgcctgaccgaagcggcggtgactcggcgaggtgctcattgaacaggacacacgtgtccacttgtcttggagggcactctcggaaatgcctttgaacacaccttaggatgctagagaactacatatcctgccatgcgaggctgctctcagcgaactgtattagaggtgcttgcgagtcgatgccccggtggcgcatctccaaccagaggcataactagctct

SEQ ID NO: 114612 - DNA, 1116 bp, Glycine max
  Clone ID: PAT_MRT3847_74504C.1
tacggctttgttgcgcgcccctcccgttgttcgtaggcaacttcaacctcaccaaaggaactaagaatttcattgaggctagagaaagtggtgatcaatatgtcaaagaatccaaaagttttctttgatattctaattggaaagatgaaagctggacgagtagtgatggagttgtttgccgatgcaaccccaaaaacagctgaaaacttcagggctctctgcactggggaaaaggggattggacgatctgggaaacctttacactacaaaggttctgtatttcatcgtattattccagaatttatgtgtcagggaggagatttcacaagagggaatgggaccgggggtgagtcaatctacggttccaaatttgaagatgagaatttcaatttgaggcataccggtcctggtattctctccatggcaaatgctggagctcatactaatggttctcagttcttcatatgtactacaaagacaccatggcttgatgggaaacatgttgtgtttggaaaagttgttgatggatacagcgttgtgcaggagatggagaaagtgggttcaggaagtggcaggacatctgaaccggtagtaatagaagattgtggccagattgtagagaagtgagtcttgatacaacgatgtttcgagacatgtttgttgctattcaatgcaaatcactagtattataataagtgatttgtgtaactaggagtcaattgtccagtattaatgtaactctcaaatttgtactcctaaatctgcttttacatttgttccaactaaaaatgcgtagctgtctgtagttggtcagagattacgttgatagaattgtggaagcaataggctcgaatatctgtagttgattggtaaattagaatgaataaggatgaagcactacatatttgcaattaaaaaaaaaaaaaaaaaaaagaaagaaatttaaaagaaaaaaaaaaaaaaaaaataaaaaaaagaaaattagataaaaaaaagaaagatgaaaaaaaaaatttaaaataggtttcattgtagtctttaccttcaatttttttatttttttttggtgaattttatccttataaattaatttgacgcattttagtttgcaacacc

SEQ ID NO: 114613 - DNA, 1370 bp, Glycine max
  Clone ID: PAT_MRT3847_74505C.1
tggcatttggcaaaactgcgaagaagagcagaagaaataccggagaaaagagagttgttgagcagaagagtgttgtgttgtgcattcgcggaagaagaaggagcagatgggtaatccacggaaaccgagtaccgccgacgagcttcacacggcggcaaggtccggtgatctcatcgccgttaactcaattttggcttcaaatcctttggccgttaattccagagataagcattccagaacacctctgcatttagctgcattttctgggcaagcagaggtagtcacttatctctgcaagcagaaggctgatgttggtgcttctgcaatggatgacatggctgcaatacactttgcttcacagaagggacatttagaagttgtccgcgctctactttcagctggggcctctctcaaagccaccacccgcaaaggcatgacttcattacactatgctgttcaaggttcccatatggaactcgtcaagtacttggccaagaaaggggcaaaccttggtgccaagacaaaggcaggaaagacccctttggatcttgctaccaatgaagaaatccgctcctttctggaggaatatgagaagtcagcaaagaatggagaattgggaaagaaagacaaagataaagctgaagaatctgatccaaagacatccacattgggatctgaaggtgatttgagttctgaacctgctgcagctgctattgatgaagaagacaatgtgggagagaagaggaagaagggtaatgaagatggcacaagagaagaagagtcatcacaaccaaaaaaggctagagttaacttaagtcatctccaaagttccgacgatacccaagaagaagaaaacctgtagtttggtattttcatagtagaactaaaattttgttattgtaatgtagtatgtaattgtatctgatttggaatccctttgttgggttagttggctggactatctgttgactgttaagtaacgaccgattctggattaatacaattttctctttctttgaagttggatcgctagggaatattgttgggaggttggtgaggtccaaacatcgaaggcgtgtctcttgctcagtggctattgattcccacaacatcgaacccatcaaacttaaagagaatgcatgcacatacaattgagaggttttggtcttagcagtaaccagtttcttgtgtgccttttcaattcattctgctggcttttagatttcccgtgatacaggtaaaatggtgaaagaaatactattatagagttaatattgtagaggttttacaagtataatttttggagacatgagaaatgaaaattagttataatgtaatggtataattctatttccccttcttcctaaaaa

SEQ ID NO: 114614 - DNA, 737 bp, Glycine max
  unsure (1)..(737): unsure at all n locations
  Clone ID: PAT_MRT3847_74506C.1
tgtgcttgtgccattaattacttgtgagtgtatccaaaacacaaagagcaatatgttaagatccggagactaccgcacccacgtttcagaagttgagagggagtctagtaccgttgaataccctaatgctcacgtttccctcaacaagaaggttgtttacgaggaaagtgagatagagggttcccaccaccaccaccaccacctcttccataggcaccaccacccagagactcgtgagagtgttaaggtggtagagtatgagcaagttcctgagaggcgcgtcgctgaagttgtctacgaagagaacaggacagtgtggccttgaatggcttactagctagggttgaacttcttatggtgtttggctactttgctaagcaggccacctagtatatcaaaattaatcaccagtgtgcttatattaaataaattcctgcttagttagccattatgttataatcatacatatatcatttcaataaagccagttaccatgcatatgctatcgcatgcgatgatttgttgttttttcaaactttaccaccagttgtgaggaaccaagaatcaatcaatcaagactcaagtgtaacctaaatggtatatatatgtgtatatataaaagtttttattgatttctcaaaaaannnnnannnnnnnnnnnnnnnnnnnnnnnnnnnnnnnnnnnnnnnnnnnnnnnnnnnnnnnnnnnnnnnnnnnnnnnnnnnnnnnnnnnnnnn

SEQ ID NO: 114615 - DNA, 370 bp, Glycine max
  Clone ID: PAT_MRT3847_74507C.1
ctcactcgtgctgatacatacacctggctacagacacttgtgtggccattgctatagcgtgaatgacagtcataaatgccagcgcatgctaagtgagtggcgtagaataagtctaagagtaccaagctacaacgtaggacataaggcttactaacgctctgactcctactggtatacacttagacatgccattagagctactgacattgaaagtgctgaagcgaattctgctctgtgctatctatagcacaacttgtgaggcatcttatcgaataagatcgggatctcgaacaacataggcttttcccactacgctgtgttccaacagaacgggacttgtagcagaggacatccatggtgaatttatata

SEQ ID NO: 114616 - DNA, 391 bp, Glycine max
  Clone ID: PAT_MRT3847_74508C.1
aaattcaacaaaccaggccatttcatggacaaagattttaagaaacttctaatttccttacctgagcttaagtttaaaataccatactaatagactctttccttggcattttaaattaccagccttattagaccgcaaaattgtcttatgcgggaaaagaaagggttcctttagcgaacaaagggcccacccgtttaacctggtccattattctgggcaagaatgggtgaaaaaccgcttcccccaatcttaaaattatgattattggtccaattaaaccaaccgaatgggcaccaaaaagaaaatggatttctccctccctgggtccgaagggtggtctttttggccctggaacctacaatggtgccactggtggtggtggtggtggcct

SEQ ID NO: 114617 - DNA, 370 bp, Glycine max
  Clone ID: PAT_MRT3847_74509C.1
gctcactagctggcggccgggctgccgccctttttttatttttttaagacaatttatataaacataaaaagacagtcgagacacactcgcaatttctaggtattcacccttagtgtataagtacctatagtgaccctcgctaggccaaaacatatcgtattatatactacccacctactattcaaagaacatcggggtaatccttatcttcatactcacaagaaagcaaactatgggagctgcgagacatcgctgagaacggccttgtgaagattgcgactgtcgactgaatcaaccatgcgctgcgggaatcaagtatagactgttggcggacctttatgtaccgccataagcaatgtgagggcgatta

SEQ ID NO: 114618 - DNA, 187 bp, Glycine max
  Clone ID: PAT_MRT3847_7450C.1
tgagttttgtttataaaacacaattgctgggggaggcgtttttgatatcactaccattgcttaaactgcaaattttgatctggagaagaattaatagattacccattcaataacttgttgtagttgggaattggagcgtccatcttgtcaacatactggtggcgatgaggaagccttgaactaccag

SEQ ID NO: 114619 - DNA, 420 bp, Glycine max
  unsure (1)..(420): unsure at all n locations
  Clone ID: PAT_MRT3847_74510C.1
gccccccaggagccgccccccctnnttttttttttttttttttttttttttttcnaaaaaaaaaatccccttcctttagaagaagtttttttcaaaaaaatacacctttaaacaaacactaatataccaaaccaacttgttttttaatattttaaaaattttacttttacacttatatacatgaccaacgctccttacacgtatgcttttgggctactctaacccaaaaaaaaatttacacatccatctaaaaccacccttgaaaatgcattagtgaacttttacattatcaacccggtttttaaactctgttcataacccaaaattaaacactaattcctttttttgatagatgtaataaaccataattattgtcttctcaagctgacacacaaacactctttcatataggccttaaaa

SEQ ID NO: 114620 - DNA, 212 bp, Glycine max
  Clone ID: PAT_MRT3847_74511C.1
aacaccattgtcgatatagttaaagagacaaaccataagagccccatcagatctagaaaagaagggcacacattatatacgaggaggggcacgcatagcgcacacgcctgaagttagttgaccgaactgaactcaagggcatggtagatacaatactgtaaggtttgctgcgatcaaggacaaatggacggccctttagcatagaaccacca

SEQ ID NO: 114621 - DNA, 706 bp, Glycine max
  unsure (1)..(706): unsure at all n locations
  Clone ID: PAT_MRT3847_74512C.1
cccacgcgtccgtacggctgcgagaagacgacagaaggggacactctgcaataatctctcttctcttcttcagtctctcaactactgcctaaccaaaccttccatttccgcaggcagtttcttaaatttggagtctgatgtctccgccactgctggttactgaagaagacgaaggacagagcaatgcctcgatggtagcatctgcatcttcaccctcctcggagtgtttcaccctaaatgaggctagattgaaagaacgcaattacctgggattgtcagattgctcttcggtggacagttctattgtcccgagtttgtctgatgagaaaaaggagaatctgaatttgaaggctactgagttgaggcttggacttcctggatcccagtcacctgaaagggatccggatcttttctcgttgagctcaacgaaactcgatgagaagccactgttctctttgcttcctacaaaggatggaatctgctcactgtcccaaaaaactgtggtctcaggcaacaaaagaggttntgctgacacaattgacccagagtttcctggcaatgcagggataaacatgatgctatcacctaaaccttctggagttaagcctaccacagtgaaagaaataccaagcaaggtattacaagaacatnncttctgcagcaaatggaanctggtcataaccatacgggagcttctatcagtagc

SEQ ID NO: 114622 - DNA, 242 bp, Glycine max
  Clone ID: PAT_MRT3847_74513C.1
caccctgaaggaagggaagagttggaagttgttgaatcttttgctggtagattgtgtgttgagaattggatctgctgcaagctccagatgttaaaccggccatgtgctccaataccaattttcttattcaaaagataatgtaaattaataccttctctgatttcttggttacaattcattaacgttcctagtccttataaaacaataaattctattttgccagatttaaaaaaaaaaaaaaa

SEQ ID NO: 114623 - DNA, 290 bp, Glycine max
  Clone ID: PAT_MRT3847_74514C.1
tttttgttcagtctttgggactctcttcttaagtgcatactcaatataactttcaaaccaaccgaatcctctaatcctctattgactctgagagtgatatcattgttgcattatctgctatcaataaccgtttatgccggcaaagcctagaaagtgtcattgaaggcgtgttgttctgcaaacatatccagaagagacatcgccgtatgcacatccagctcaagacggaacttgggaccatcatagtagtgacagattggcctgaaggaatcttgctacaatggttcaca

SEQ ID NO: 114624 - DNA, 917 bp, Glycine max
  Clone ID: PAT_MRT3847_74515C.1
cccgggtcgcacccacgcccgtccgtacggctgcgagaagacgacagaaggggtgacaatctttcttagctagatcgccatttttgcttacaattttcctgctacttctcttctttaactgttttctgttttgtttttgagattgccattttcttctacttttttacaacaatgaaggagagtaccatgggaaaccctttgcgccttcaatctgtgaaccatatctccctcatatgcagatcagtggaacaatcaatggatttctaccagaacgttctgggattttaccccatcaggaggcctggctctttagattttgatggggcatggctattcggctacggaattggaattcatttgctagaagcagagaaccctgaaaatttgccaaagaagaaggaaatcaatcccaaggataatcatatatctttccagtgtgagagcatggagccagtggagaagaagctgaaagaaatggaaatcgattatgtgcgagcaactgtagaggaaggtagaatccaagtggatcaactgtttttccacgaccctgatgatttcatgatcgagatatgcaactgtgattcccttagtaggtgaggtggcaagatcatgttctcttgtgaatcttgagaagatgcagaatcagcagcagatacagaaaatgctccaacaactttgatgagctttgtgttatgtggtgaagatcttgagagcatcctcatgatcacgaggacttattacattttttttttaatgtggtcgagttgtaaatgtatcattttgttccctttgtttagttttgtatgttatataatataataataaacaatttgccaaatagatcagtagcggcgtagagcttttgcaaaaaaaaaaaaaaaaaaaaaaaaaaaaaagcggccgcttagaggagccaa

SEQ ID NO: 114625 - DNA, 390 bp, Glycine max
  unsure (1)..(390): unsure at all n locations
  Clone ID: PAT_MRT3847_74516C.1
aagccaaatggaagattcttcagctataatccagcaacaaagaagacaaccctgcttgcccaagacctctactttgccaatggggttgcagtttcagcagatcaacaatttgtggtcttctgtgaatctgtcttgtaagttatttactagcttaaagtaccttcaaatttaatagttttaaatgcagttttaattgctttatttttatatttgttcaactttggtcctcatacttttaattgagttattttaatcctttaattntattatatattaaatgggcttcctacaagagttataaaattaacttagtaattgaagagagaatgcatgagacaaatcgtgtcttgggaattttcctgattaataaactaacaactaacattaatc

SEQ ID NO: 114626 - DNA, 509 bp, Glycine max
  unsure (1)..(509): unsure at all n locations
  Clone ID: PAT_MRT3847_74517C.1
ttgttcgagnnnggggaagggnnncagattcagtatcttggtgcactaatcagagttctcgagatgacaggannactagctgttgaaataaacagcttgggtcctccctttggagattaatggggtctataaagcaacatctgacaaagaaaatggaagtggtttctagaaagaaaacggaggttgtttctagtcatcaggcgtgatataannnnnggtcaaatgatcttacagcaatggggtctacacccattcaagtcaaccgaatatttgatataaggccttgctgaattgattttctataagtggatgctgaaagaggcaacacctacctgcatacaagttttgcgtacnngcgagctgtactcaaatgatattgaatatccatctgattttggtactacaaagaacaggtttattactcggtaagaaacagttcccacanaacaaaagctccaccanncgacaagatacaacggtatgnngttatgatacaacaggtgaaaatg

SEQ ID NO: 114627 - DNA, 295 bp, Glycine max
  Clone ID: PAT_MRT3847_74518C.1
aaaaaaacggcttttattttttttaaaaaaaaagctttaattttacctctcccccctcaaaagccacaaaagggaaaataaaccccttttttaaaaaggcgaatcaaatcgggggcaacaaaaacccctaatcgaaccccgggaaacaaaacgaatcaagagctggggaacttggggacggccttggtcccttcaaaaacagggggttgggcccaccccccaggggggaccaaaccccccgccgtttggatccccctggaagaaaggggaggctttttgttatacctagccaatc

SEQ ID NO: 114628 - DNA, 324 bp, Glycine max
  Clone ID: PAT_MRT3847_74519C.1
ctcgatctttaagtaaaattctcggttttgagggtagtcagataactctctacacaatggttttaaataatagtgaggaggcaaaactcaagagccaagaggccagaagagacatgtgttcctgacctgcactgcactactaactacaatcctgataaacagcaccaccctgccttacttacttctagaaaagaaaaggaagacagtgataacaaaagcattaccctcatcaaggttccggtgagatgacctattcatttacacacccacattcgaacctctcccgacacgcttgctcatgttcaacacaacacactacctctg

SEQ ID NO: 114629 - DNA, 1075 bp, Glycine max
  unsure (1)..(1075): unsure at all n locations
  Clone ID: PAT_MRT3847_7451C.1
tctgctgcgagaagacnacanaanggggggattggactagcagcaccatcgcgatctattcctcccggtacctgtattgtatcagaaggaacgtgatatcatgatgctgtaaagagagagagatatgagataattcacaattcctcctttatcttgtttcatagcagtgaagaaaaaaacagagaaagcatgggcgtggacttctacaagattcttcaggtagatagaagcgccaaagatgaggatctcaagaaagcatatcgaaggctagccatgaagtggcaccctgataagaaccctaacaacaagagagaggctgaagctaaattcaagcaaatctctgaagcttatgatgttttgagtgatccacagaagcgaggagtgtatgatcagtatggtgaggaggggctgaatggggtgccgatgggcgcaggtggttttcctggtggtggcggcggcggcagcagcggtgacggtggagcgacgtcattccggttcaaccccagaagtgcagatgatatattttcggagtttttcgggttttcgagaccctttggtggtggaatgccggacatgggtggccgagctggtggctctggattttccaggggtggaccgtttggtgaggatatctttgctcaatttagaagtgcagctggggagggctctggacatatgccaaggaaaggtgcagccattgagagaccattgccttgtagcttggaggatttgtataaaggaactaccaagaaaatgaagatttcaagggatgttagtgatgccagtgggagacccaaaacagtagacgaaatccttacaattgtgttagagctgtggaggtaagttgttagacatatcttttactgtggctgtagaaaacgccatccaattagggaaccccaaccagatgatgatgaccacccacaacaacaactctctgtaatataatataatgtaattcaacctcatgatcaccttcttccaactttagtttttgtatttacagtttttcactatctatgatcaagaaagataacaaaaataattaaatgtcttttactggaattttaccttg

SEQ ID NO: 114630 - DNA, 442 bp, Glycine max
  Clone ID: PAT_MRT3847_74520C.1
ccacaagtgaattattgataaaaaggaaattctgaatgattttatccattagactttgaaacagttaattgatattgaatgctttggttcattgtcttattttatccttcagtgtaattgactgggcttgggtgatgatgtttgcaatgactgttgtacattgacagatcttggttggtttcttatggcttagagttttgtatttacttgtagagtcttttgatgtcattcatgtaatgcttacaatcacaaacttatttgaatttcaaatctatttggttaacagaaacactcctagataagagctgctacaaatgcagatgattagtgacagatatttcctaaaatcttttagttgagaccgcatgatgatggtttgcatatatatttatttcaagaaactctttcaatatggatctattttctattctctgatctttta

SEQ ID NO: 114631 - DNA, 297 bp, Glycine max
  Clone ID: PAT_MRT3847_74521C.1
cagaaataagtttcgactactagctcacattaaggatcatatcctaatgagttcagttgtatattcttgatgtgtggtctccaaaaatatggtgtgagaatacagttcatcacgttgagggcctttttctctagtgttagttttatttgtcagggaagtgatatcaattatacatccaaggagacacatcagaagtttccagaataactaccaaatagttacaagttgacttacacatgtccttccttggcatgtaaactgctaacgtgtgtcagtgtgatgatgcgtgtgatcatt

SEQ ID NO: 114632 - DNA, 326 bp, Glycine max
  Clone ID: PAT_MRT3847_74522C.1
gacacgcgagcatgcatgcacgccgactctagcggatcctctcgggtgaagtgcaattgcacatgctctagaaatagcggatgcaaaaatggacatgtgtgaatcggaagaatgggttaacattactaagcctattcgcaatccaaaagaaatgaaatcggcaaaactaccagaatatcaattccacattgaaaagacataaggaggtaaacatgaacatatatgaactggaagaattacgcatacttattacatctatccggaaaccaaaggaaaggaagaacggaaatcctcgacgaataacaagttcacattatgaagaaata

SEQ ID NO: 114633 - DNA, 418 bp, Glycine max
  Clone ID: PAT_MRT3847_74523C.1
ttccgaagtctttcgttcatgttattgttataacataacatgcactaattgtttgtggttaccactgtttgaaaaagaaaagttgaagaagatttgtgtgatctgtctttgatgttacttttcctcttcaacttggcttctgtgtcactcactgtgtgatgcctttggcgtctctcttcataacaagtaagcagtccacatacgcattctcctcatcgtaatgtatgtcataactgatcaacaaacaaggctacgttgaccaagccacccacaaactcctttaaattctggcccaaacccttaagttcctccactctccaatccatcactttcttcttttcctcctcgtgctcacaaagcacctacaaaatcacgctgcttaattattccttcgactaccatcataccttctcaacgg

SEQ ID NO: 114634 - DNA, 574 bp, Glycine max
  Clone ID: PAT_MRT3847_74524C.1
gggaaataaacaaggttcggggtttttttttcatcatcacccaggaccacattttctacagattttgaaaggaaggggggggggcctttcaaattttttaaaaaagggaaataaaagggggggggcccaagcaagacaaaaaaatgattcaggaccaaacatccaaaaaatcttacggccaaaaattgggggggcccctttcactgatagaaaaaccaaatggggggccccctttcctttttgaaaaaaaaaacccaatagggtttcccttcagctggggaggaacaattccaaaatcattgaaaggaaaagctttttttaaaacaacggtttttggagcaaaagcctggatcttatccaaatttaatatctcaggaacaggtaggggaaaggggaccttgttaaaaaaaatttctttgggggtggccaatgcctttgcaagggggaaaggccccttcacatatgggggccattttcaaattggataaaacataacgtctgccaattcatgcacagaaaagatctttggcccccccagttaataaatttttcccatgctggggccatcatcctt

SEQ ID NO: 114635 - DNA, 160 bp, Glycine max
  unsure (1)..(160): unsure at all n locations
  Clone ID: PAT_MRT3847_74525C.1
agtctgcatagcaacnccgtnacgtaangctacgcgagattccgggctccgacggngcgancacccctcacnnangaacactctcgancgannantcncgantnttgcgttcangcacntcttgtctgcggtnactgtnccancaccanagcntgcnnga

SEQ ID NO: 114636 - DNA, 224 bp, Glycine max
  Clone ID: PAT_MRT3847_74526C.1
acacctcagacatcctatcactcatccctctatatctctcgctcacttaatatacctataacggcggatttatttaccaaccggtacttgctctacatccatattcttctataacgtgtcgtattatatcttcgcttattaatatcaatacttaccatcctgtcttatattctatatccactcacaattccacacatcatactacaccgaatcataaagttcaa

SEQ ID NO: 114637 - DNA, 283 bp, Glycine max
  unsure (1)..(283): unsure at all n locations
  Clone ID: PAT_MRT3847_74527C.1
cttttgagcaaggncgctttcgaggcattattactactggtgccgctgagtcaagctgcaacagcagcgggggtcgcaagagaaaggttctgatggcgctgagaaggttattgttgccgttaaggcatcacaggaaattccaaagactgctcttgtttggtctctcagtcatgttgttcaacctggggattgcactacactactagtggttgcaccttcacaaagttcaggcagaagattatggggttttccgagatttgctggtgattgtgccagtggtatt

SEQ ID NO: 114638 - DNA, 229 bp, Glycine max
  Clone ID: PAT_MRT3847_74528C.1
atcttattcttggtactgttcgggttatttgtttgacgtttgttctaatatacggggcgaattgtatgactcgcagatggacactcgacttagcggcgcaagaatgtttgctcatattactgggaggcaatatgaatattaatgtgcttagcgatgccacacacgtaggtgttgttcgatagctctgattgtattacattgctctcgatgctttgattgagttgtacgg

SEQ ID NO: 114639 - DNA, 322 bp, Glycine max
  Clone ID: PAT_MRT3847_74529C.1
aaaaaacactggtatggttgaaaagctgataactttgggcaacagacaataaaagagctactgtctttttcatgaaaagaaatagtttggagccagcatatgtagaagattctacccagatccattatatgaattagaaagaatcaacatgaatttctggccttgacttggattacaaatgcagatagagtgattttctatcttataaatgggacaacatattggaagcggatagttggtaccttgccttttgacatgcaaaaccgagcagagagttggaatacttcctggaagtggcgttgtgcgattcacaacaaaccat

SEQ ID NO: 114640 - DNA, 177 bp, Glycine max
  Clone ID: PAT_MRT3847_7452C.1
cttccacaatatcggaataccatacatgtaaaacaactgatttgggcatttttcacaaaaccaaacaggcccccaacgtatagcattggcccaatttgttttttgaccaaaccctaatgtccaaggatgtctcctcccccccagcaatgactatctttttgaagtaatcggccccgg

SEQ ID NO: 114641 - DNA, 527 bp, Glycine max
  Clone ID: PAT_MRT3847_74530C.1
cccacgcgtccggcttgttgcggggcttctaggagtagagtctggacaagatgcagtttggagagaattgctgtatgaacgtaaagaacagttggtgccaccatatggcgtggccgtggaagagttcacaaaccgcatttctatacttaggagcaagttaggaaatagaggtttgaaagatgaaggcattgttgtgcctacagggctgggtgccgagggcaaagttagaggtaacattcttgctggtgacgtaaactcattggcatattcaaggactccagaagaaatattgaggatagtatatggaattggtgatgaacatgttcgtggtggcttctatcctaaaggagcaagtggtcacatagctcaatcttacttaaagtaaactacatttattttggacttttatagattatatcacttgtctttaatccattgctaatttccttgttgtaattaaatattgttgatgggattagaccttgaaaaaacccttgataacatgcatataatatataatgcgagat

SEQ ID NO: 114642 - DNA, 178 bp, Glycine max
  Clone ID: PAT_MRT3847_74531C.1
ctccatatctagaaatgttacttcttccatggcacatgaaggctggctccatgtgtgaatttgccacgaaggagtgaactgcaggcctacgatcttccgggattgattctacggtatagtcccgagctcaggtaccgaatatcgctctgagctgactcatgatcaggaattccgtgag

SEQ ID NO: 114643 - DNA, 739 bp, Glycine max
  unsure (1)..(739): unsure at all n locations
  Clone ID: PAT_MRT3847_74532C.1
tcgagaattctcattgnnctgacacagcacacatnnaggagaanncatatatattctcattccnncaaaaattataacnntatatttggagatacgcgaatagagcttaaaaatcgagatgcgagcgagtttnntgaaatttgcaagaaaaaacttcaagtgtttctttagatgaganntagatagataccacnnactctacagaaagaaantgaacattgttgagaatttctattttattcgtacctcannatttgaagtganggttgtcagtanntcttttcttagaaatttaattatatgttaaatactgttatctcattagggatannaactaagagaagagagatcgctcggatnntgaggaacttggtaaaagtctatcagaaaagcagggattctgtttcatgccttagagaaagatctttcaaactcccgattggagcttgcagagagagagaagagaattaatgacattctgcataatgaggctaacctaaaacttgattcggagaagcataggaaactgatggctcagtttaagcagaggattgatgttttgtcaagggaaaaagaagacctaggaaaagagaaccagcaactttctaggcaattagatgcaattaaacaagggaaaaggtcaacaagtgatacaactggtgaacaagcgatgaaggaggaaaaggacacgagaatacaccctctggagccacatntggagagnctgagagatgaaaaa

SEQ ID NO: 114644 - DNA, 683 bp, Glycine max
  unsure (1)..(683): unsure at all n locations
  Clone ID: PAT_MRT3847_74533C.1
ttagannnacaaatcaagaattaacatttgaaaaacagaataacgttacagaatggaaggggaaataaatatattcctatgtgttatacatattgatcaaatgcaaaactcatgtacattgtagactttgcaaaaaggaagggactacacctaatgtcaccgaggtccagaaagctcaatggcttcaataataaaggaaggttcttcatgagcatcaccataattttgtgagaaactgcaagttatttcatcatataggttagtccccccttgtgactcctctggcctcactgactgccctaccagaccttctagaatctttaaagcttctgacatcttcggccgcaaagtgggatgcgactgagtacattgtaaagacaactccactgctttctctaaccctactggatcaaaacatcccctaagatccctgtcaactagcacttccagccgcttctcctcaaacaaggttctaacccaatcaaggatcattcccttttggacctgaccatttccagcatccagtgctttgtgtcctgttatgagctccaaaagtaatatgccaaatccaaaaacatctgttttttcnnnnnnntgtnnnnttgnnnnntattctggggcaatgtgccctacagtaccccgcactnnagtagttacatgtgaatccctttgatctannnnnt

SEQ ID NO: 114645 - DNA, 340 bp, Glycine max
  Clone ID: PAT_MRT3847_74534C.1
gatactacttcaataatcattaatatattttattacataaatatcattcaattgtttatatagtggaacttgtaaggacaaatctaaaactaaacaaaaaagtaagaaataaatattatattgaggtacttatttatttaacatttatctatatttttttccaataaaattttggcaaaaggagggacatgcagaaaaaattgacgcggcctgctgtttcatggataaaccgaatttggcaaaggaatcagcagcagcattgtacggtatgtaaaacaagtatgaactatttgtagcagaagttagagctttcaacttttgagagagtgggaaacaatgc

SEQ ID NO: 114646 - DNA, 729 bp, Glycine max
  Clone ID: PAT_MRT3847_74535C.1
ggctcgagattggattatacatatctatttgacctaaaatcagctttatataagcttgatgatccatctggcctaatatcagctttacatgagcttgatgaaaaggaatgggaccatgtggaaattacatacggaggtatcatagagacctcactgcttaaagcaaccggaatccatgtattcagacaggatgatattcgatatgatgatccctatggcaagagaaaattagagcatgatctcaacagttctgaatcacaatcactcattaaaaagcctaggttgttttgcaggttatcgaggtgggttggccctgaaagaattataaatattctggggaatgctgcagatggagctttatttactaatgccgagaggagatttaggcatatttctatggactcttgttggcgatgcggcctgttggaggagacatgtctgcatgcccttcgagattgtccagcggtggctgaattttggagaagtgtgttacctaagaaattagcaccaaagttttttaatggtgatgtgacagtgtggctggaaagaaatttatctttttcagaggcaggttttttttggccagctttttttgggattgcagtggaactgttgtggcaattccgcaaccactatgtgttctataaaaatgacactgtaggtcttagagatatgagatatattgtctttaagcggtatgaagattatatgagagcccatgcttctcac

SEQ ID NO: 114647 - DNA, 4464 bp, Glycine max
  Clone ID: PAT_MRT3847_74536C.1
tcgctcggaaaactatatagaatgaaattttcaaggccaattttttcatacagtttgattgcactggaatggctccggtatccttcaaattgtttaccgtctaattttaattcgaacaaacttgtcgtgtgcaagttacctgacggttgctttacgtcaattggattccatggctcacagaagaagttcaggaatataaaggttttgaagtttgacaagtgcaaatttttatcacagatacctgacgtatctcatctcccaagtttggaggaactttcattcgaacgatgtgacaatttaattacagttcacgactcaattggttttctgaataaacttaaaatattgagtgccaaaggttgcagcaagctgaggacatttccacctctcaacttgacctctcttgaaaaccttcaagtttcggatttcccaattggactagagtcacgagtgctagatgtaaggagacttttggatgctggatctgatgatggtgtccacatgatagggattcatggaatgggcgggctaggaaaatcaacacttgctcgagctgtctacaatgaattgataattgctgagaagtttgatggtttttgctttcttgcaaatgtgagggaaaagtcagacaaaaaagacgggttagaacacctccaaagaatccttctttcagaaatactcggagagaagaacatcagcttaacaagtacgcaacaaggaatttcaatcatacagtctaggctcaagggaaagaaggttctcttgattctagatgatgttaacacacatgggcaattacaagcaattggaagacgtgattggtttggtcccggcagcaaaatcatcatcacaactcgggacgaacaattgctagcatatcatgaagttaatgaaacatatgagatgaaggaattgaatcagaaagacgctcttcagttgcttacatggaacgcttttaagaaggaaaaagctgatccaacttacgtggaggtcttgcatcgtgtaatagcatatgcttctggtcttccattggcgttggaagtaataagttcccacctggttggaaaaagtataaaaagaattgccagtttccatttcaaaatcttgttggactccaaagtttaatcctgcaagattgtgaaaattttttgttaccaagtaacattattgccatgatgcctaaactgtcttctttgtgggctgaaagttgcgaggggttgcaatgggtgaaatcagaagagcgtgaagaaaaagtgggctcaatagtatgttcaaatgtagatgactccagtttcgatggttgcaacctgtatgatgattttttttcaacaggtttcgtgcagcttgatcatgtgaaaactttaagcctaagggacaataatttcacattccttcctgaaagcctcaaagaattgcaatttttaacaaaacttgatgtgagtggttgcttgcatcttcaggaaattagaggggttccaccaaacttaaaagaattcacggcaagagaatgtatatccttgtcttcctcgagtttaagcatgttgttaaatcaggaattgcatgaggctggagaaactatgtttcagtttccaggagcaactattccagagtggttcaatcaccaaagcagggaaccttcaatttctttctggtttcgtaatgaattccctgacaatgttctttgtcttcttctagacgtgtggcacatatgtatcaagctcaaggtgttcatcaatggcaaacgtcataaaattgctctgagattggaactgccaagtaagaaaggcgaaattgaatcatacatatctatttgacctaaaatcatcttttgatatgcttggtgatctatctgaactgattgctggtttacatatctaagcgaaaaggaatggaaccatgtggaaattacatacggaggtctgatagagacctcactgcttaaagcaaccggaatccatgtattcagacaggatgatattcgatatgatgatccctatggcaagagaaaattagagcatgatctcaacagttttgaatcacaaccactaattaaaaaccctaggttgttttgcaggttatcgaggtgggttggccctgaaagaattataaatcttctggggaatgctgcagatggagctttatttactaatcccctgaggagatataggcatacttctatggactcctcttgtccgcgatgccccgagttggaggagacatgtctgcatgctcttcgtgattgtccaaaggtggctgcattttggagaagtgtgttacctaagaaattagcaccaaagttttttaatggtgatgtggcagtgtggctggaaacaaatttatctttttcagaggcggcttttttttggccaactttttttgggattgcagtggaactgttgtgggaatcccgcaacgaccttgtgttctataaagatggcacttgggactatttagatcttagtgatatcacagatattgtctttaatcgctataaagattgtatgagagcccatgcttctcacattttgatgccgaggaatctcttgaagtggaggaggcctttgcccctttcacatgggcattggttgttgaggctaaatgtgagtggtgcctatgatcgctcttcagatactgctgcatgcggaggtatattcagagacaacaatgatagattcgtgcttgggttttcggttaagcttggggaatgtttgtcaaatgatgagggtgaaatatggggtatttatcatggtatgaagattgcaaggaggtatgatatatggggtttatatcgtgatattctaaggcagcatagcattccaataagtgctaagattgcaaggcagcatgattttggtaaaataatagtggaatcgggctctgagaaagctattgggtttgtgttagatggatgccctacatctacatcgctggagcattgtttcccactgtgtgatgagttgaaagctctaacctctgctacaaatcacttatacttcgataacgattatgctgctgattcctttgccaaattcggtttatccatgaaacggcagcctgtgaaaatttttcgtgtttgtccccctttttgccaaccttatatttcagaatacagataaatgttaaataaataagtacctcaatataatattcatttcttacttttttgtttagttttagatttgtccttacaggttctactgtataaacaattgaattatatttatgtaatttacttgttgtatagtttatatagatattatttttatttctcttgataaagattagcatttttggattagacatgtctgcatgctcttcgtgattgtccagaggtggctgaattttggagaagtgtgatacctaagaaattagcaccaaagttttttaatggtgatgtcgtgacagtgtggctggaaagaacttgatcttttccagagggcagccttttcttggccgccttgtttcccgctcgctctggagctgttggcgctatcccgcaacgcacttatgttcttcctagatgacccgcggtgggcggatttagatcttactgaaatcatagatagtgtctctaagcgttatcaagattatatgagagcccgtgcttctcacaatttgatgacgaggaatctcttgaagtggaggctgcgcaactattttaaggattggttgttgagcctaaatgtgagtggtgcctatgatccctcttcaggtactgctgcatgcggaggtatattcagtgacatccttcgtagattcgtgcttgggttttcggttgagcttggggaatgtttgtcaattgatgaggctgagatgctgggtatgtggcaggttcagtcccgcgccaggtggtatgatatttggggtttatatcgtcatattctaaggcagaataacattccaggaagtcttgggattgcaaggcagcatggttttggtgaaattagagtggaatcgggctctgagaaagctattgggtttgtgctagatggatgccctacatctacatctacatctacatctacaaggcagcattgtttcccactctctcaagagttgaaagctctaacctctgctacaaatagttcatacttgttttacataccgtacaatgctgctgctgattcctttgccaaattcggtttatccatgaaacagcaggccgcgtcaattttttctgcatgtccctccttttgccaaaattttattggaaaaaagagatacatgttacatgttacgtaaagagtgaataggaatttagtccctgagattgtaaccactttgcatattagtccctgacttaaattttaattcataatagtccataactttacctccgttatgcaaataagtccttgctgttaaaatctaatttcctccgttcagtcaacatgtctatttggcaaagtgtaagcatcctaatgtggcaggtttgaggtccaaggtcagctaatattatgtggc

SEQ ID NO: 114648 - DNA, 323 bp, Glycine max
  Clone ID: PAT_MRT3847_74537C.1
ggcccctggtatcaggtatttaccttaaaaacccatggttaattaaaggtgaatggtgccattattatttgtgccaattattttggcccaaaataccttatttttcttcttcaattaagtggacctttactttccttatttctatgggggaaaaaaattattaccgttttattttttttaaaaatttggcttggtctttggcccttccttggaggccaaggcttaggccattctcacttgggttatttaggggggagggatataaatatcggtacttgataccagttctgaaaaataagtcttcctgtttattggcttacaaa

SEQ ID NO: 114649 - DNA, 362 bp, Glycine max
  Clone ID: PAT_MRT3847_74538C.1
cagctacctccctccaacagggcaaggttcttctctgcctcgacgacggcggtgtccatgccgagcaggagcctcagcttctcggtactaccgagaacgagctgggcatccgcaaatggatcgaggagcagggtcacactctcgtcaccacctcggacaaggagggccccaactccaagtttgagaaggagctcgaggatgctgaggtcatcattaccactcccttccaccccggctacctcaccaaggagcgcctggccaaggcgaagaacttgaagctttgcgtcactgccggtattggttccgatcacgttgatctcgacgctgccaacaagaccaacggtggtttgaccgtcgctgag

SEQ ID NO: 114650 - DNA, 410 bp, Glycine max
  unsure (1)..(410): unsure at all n locations
  Clone ID: PAT_MRT3847_74539C.1
ccgggaaaaaacttccccgattatcatttctttcaatcgattggccccaaggagatagaaagacagacccccaaaccacccgacacctaaaattactgaacttaatcataacccctaattttgttcatccagctttagtttttccggtttccattgacatcgcccccacgaaagtagggggaaccaccggcaccgtaaccacaatttttgtcaccaccataaccccccccttcatagcctccaccaagagggttttatccccttttacaacaaccaccgtttcccccggggttgccgggggactgaacttttatcaaagttattgtccccccggaaaggttttgaccgttaatcccttcgatcgcatcctttattgaattttccgaggcaaagggaaaanatccaaatcc

SEQ ID NO: 114651 - DNA, 658 bp, Glycine max
  Clone ID: PAT_MRT3847_7453C.1
tacggagacgacagaaggacggaagaggggatagcgatagcaatagcatcgacatctattcctcccggtacctgtatagtatcagaaggaacgtgatatgatgattatgtagagagagagactcagtgaagaaagaaagatatgagataattccttctttatcttttttcatagcagtgaagaaaaaactgagaaagcatgggcgtggactactacaagattcttcaggtagatagaagtgccaaagatgaggatctcaagaaagcatatcgaaggctagccatgaagtggcaccctgataagaaccctaacaacaagaaagaggctgaagctaaattcaagcaaatctccgaagcttatgatgttttgagtgatccacagaagcgaggaatttatgatcagtatggtgaggaggggttgaatggggtgccgccaggcgcaggtggttttcctggtggtggcgacggtgggccgacgtcattccggttcaaccccagaagtgcagatgatatattttccgagtttttcgggttttcgagaccctttggtggtggaatgggggacatgggtggccgagctggtggctctggattttccaggggtggcccgtttggtgaagatatctttgctcaatttaagagtgcagctggagagagct

SEQ ID NO: 114652 - DNA, 342 bp, Glycine max
  Clone ID: PAT_MRT3847_74540C.1
ccctctgtctataccctgcggatagggttctgtctgtcactcactctctttctttctacggacttccctcttgtctcatttccctcctatgtcgatctgaacactaatcaaccatggaaagacctcggtatggaggacctcatgggccctaccgaggcggaggaggtggtcgcggacgacaaggaggtcatacccacggggaaactggtgaagaaggccgcccaaggagagcacatcaacaccacaggggtactggacgaggagctgaattcagacggcctggctctggacgtggcaactggagtacacagaatgatcacatcgctgtggacactgaggaag

SEQ ID NO: 114653 - DNA, 906 bp, Glycine max
  Clone ID: PAT_MRT3847_74541C.1
gagagtgtttttggtcaaggttttgtgagcacaggaggacttgaaacaaccaaggaattcgtggcaaagttgggactaaaacctggccagaaagtactggatgttggttgtggtactgggggaggtgacatttacatggcagaaaattttgatgttgaggttgttggcattgacctctccataaacataatttctcttgccattgaacgtgctattggactcaaatgctgtgtagaatttgagtgtgccgattgcactaaaaaaacatttcctgtgaatacatttgatgtaatctattcccgtgacacattgttacacatcaaagataagccatcactattcagatcattttacaaatggttgaagcgtggaggtacacttctgattactgattactgcaaaagtgaaggaagtctatcattaggatatgctgagtatataaagaaagggggatattatattcatgacatgaaaacatattgtcggatgctcgagaatgctggatttgatgatgttgttgccgaggatcgaactaatttgttcatgaaaacactacaacaggagttaaatgcccttcacagcaagaaggatgatttcattgatgacttctcggaggaagactacaatgaaattactgaaagatggaaggccaagcagatgcggggggcagatggtgaacaaatatggagcttgttcattgccaagaaagaataatgcttcttattatatgccttactatgcctctatattttgttcagtgtgaacagttttccaaatgatagtttggataagtattttgtttctatttatatcttctgagaaaaatctttgtgcgttctagcttaagattttcgaaacttctatgcatcctcttctatttgaatgtgatgtttgctaattatggtt

SEQ ID NO: 114654 - DNA, 491 bp, Glycine max
  Clone ID: PAT_MRT3847_74542C.1
ctcgggttttgattctcgttgcaatggcggatggtggtacgttgggattggagggtgtgagattagcctcttcatcaatactttcaactctaacaatgaaatcttccttcgcgaacttatcaacaatgaaatcttcatttcatttcattgcatgcttatagtcatcgtgggatgtgtgtgtgttttagatttggtgaaggaggcattgcagaaaggtgttggcttctactccactttcttggttgctgacaagcttatcgtcaccacttagcacaacaaccatgacgaaaaactcagaaggggaaccaaaatcaccctcttcctcaaggacgatcagttggagtacttggaagagacgaggatcaaggatcttgtgaagaaacactcccaattcattacccatcccatttacctgtggactgagaagacaacagagaaggaaattagtgatgatgagcctaagaaggaaggaaatgttgaggatgatgatg

SEQ ID NO: 114655 - DNA, 317 bp, Glycine max
  unsure (1)..(317): unsure at all n locations
  Clone ID: PAT_MRT3847_74543C.1
anctcgnacacacgcncggaanncggctngtgacgctgtangcannccnccncccncgccacngagnangnnagcnagncnactgnacanannaccanacanncnngcagcaatangcagcncgnancantttcaccaganaccattaanaggagnannncaagangccatcngnaacaggctngctcataacancggaactgtntcanggngangaaaangaggnngcnattggccctnaagaggaccganntctantgnagcaaaaacgcatggcngtaaagnngagcagcanagacaatncaggangcgatggc

SEQ ID NO: 114656 - DNA, 396 bp, Glycine max
  unsure (1)..(396): unsure at all n locations
  Clone ID: PAT_MRT3847_74544C.1
aagcgggaacgccgagacgcccgggggcaccggaccggaaacgccggaccgacccacgttttcgagttaacacagacgccgaaggacgcaggaaaggggagagggaacaaacccaggaccccccgncaccggagaaaggngacaaccagaaacaaaacgcgagcaaacgggaccaaaccaggaaccgcaagcacacgacagaagggcaccacaccacagagcaagacgcaacaaacagcggggaaacaaaggggaacagcgaggacaccaacagaagccgacncagaaagcggagcagacgccaaaaggcaacggaccaggcncggaggaggaagaaaacaggacaaaacacgggaaaggaacacacaaacccaaagggccccaaaaagaaaaccg

SEQ ID NO: 114657 - DNA, 767 bp, Glycine max
  Clone ID: PAT_MRT3847_74545C.1
ccctaattaactggcgggctgtgtcgctgtggaggtcgagcttgtgaaacaccagttccggttagtccagctgtcttctccggccgtggttagcttgatgcttggctacgtttaggaaactgtatttggaaaaaaggagatctaactgcagcaaagaactgcctcagtcttgcattagacaagaatcatttccagaatatgtgacatagtgctgccacaggcattgacctgcacagatgcatactttggtcagcaaggactacccgcttgttgataaattcaagaaaatgccacttcctttaggacatacaaactaaagtgaactaagcacattttgtctggggaaaacttaagcaaggaacttcatgttcgaaggttgaccctgctaccctggatttgaatatgctggtggaggaacactggagtgttgtctctgttgggaccacttcgaatcatatctaaagtatcttgatgaattatgtagcgcctgttatgcttggagttgtttattgttatgtggtttctcatggaggtgctgagacaggttctctgtcattgcagagatagattttccaatcgttagtcaaggaaaaaaaagactaaagaaaaagattcataatgaataatgatgtgtattaaataatactaaataggtcttatccaaaactcaagtctgaataggatccataaatcaaatattgagattttcatccattggagttggatgaaaggctaattaattatacaattcattgagttcaacacct

SEQ ID NO: 114658 - DNA, 239 bp, Glycine max
  Clone ID: PAT_MRT3847_74546C.1
acgcctacaaccactcatacgtacatttgctaaatgacgatatatgggtggtcttcagataccatgtccataccatactataccattcaattatactgttgtcagagcgttatctctgtattatcttgtcctctgtctagaactatcttgcaatcaacgttcctttatttacctctcaactatatttatactactaatatatttattcaattaatatataattaaaatcctcacattat

SEQ ID NO: 114659 - DNA, 274 bp, Glycine max
  Clone ID: PAT_MRT3847_74547C.1
attgcaaacaagcttttgtggctatagagaagggtccccctcccggctagattacgtcatctcgtgggtcttctcggcaacatcatcagaagtcttctcggcaacatcccaatgttggaaggaatcaccctgtgaatccaggaagaactgttgcagtttctcaaaatttacaatccagcggtcctataggcatatcttcttttgataacacaaatttccagtttggtcctcactccaaaatggctggctttgttaaaaaagatggatcatcttc

SEQ ID NO: 114660 - DNA, 280 bp, Glycine max
  Clone ID: PAT_MRT3847_74548C.1
tttttgggctaccacgccaggaacaacgagtccaaccagtttggcaacaactaatgttggctgccacggacgaccgaacatcgaccccatgctcaacgcgtgcacgaccagggacccgatcccaaacccttccaggcccatggatactcaattcatgatgaatcctgccatgtggaatccagccctgaacaaccccgttggcttctttccccctgagctgtcgaccgtgatgccgacaaccttcacggatagtccgagacccccgaccgaggcgcagtca

SEQ ID NO: 114661 - DNA, 2855 bp, Glycine max
  Clone ID: PAT_MRT3847_74549C.1
ccacgcgtccggtggatgtgagactcctataaagtcctgccacaacaaaagattggggaaaaaaacagaataggctctgtaactaacgtggtgaggccaggaaggaagtgtgtgtttgttttcctcactcaaaacgcgcgttaggagtcccgttcaacgcaatttctgttagaaaaagctttggtgttgaacgtcgtggttagctccaaagcctaaccaatctgtagcagctcaattatcccttcacgatccgacgaaaaaagccgactcacacacataacttgtttttctggcttctcaagatacggcgtttactttttcagatccgacgaaaaaccgttttgggaaattaacaagatcagtgaaagttgttgagtgagatgattacattcatggacacaaaggagaaatcaaaagaggtggagaggtgtttggatcctcagctatggcatgcatgtgcaggtggtatggtacaaatgccaacagtgaactctaaggtttattacttccctcaaggtcatgctgagcatgcatgtggaccagttaacttcaggacttgtcctaaggttccaccttttgttccatgtagagtgactgctgtcaaatacagggctgatcctgagaccgatgaagtctatgccaaactcaagctcattcctctgaatgccaatgatgttgattatgatcgtgatgttgttggtggggctgaaactcaggacaagcctgcttcatttgcaaaaaccttgacccaatctgatgccaacaatggtgggggattttctgttcctaggtattgtgcagagacaattttccctcgtttggactactcagttgaccctcccgttcaaaacatccttgccaaggatgttcatggagaaacatggaaattcagacacatttataggggcacgccaaggcgacatttgttgactactgggtggagtacttttgtgaatcacaagaagcttgttgctggggactcaattgtgtttttgagggcagaaaatggggatttgtgtgttgggattcgacgagcgaagaagggaatttgtggtggacttgagacttcctcagggtggaatcctgcaggaggaaattgtcatattccttatggtggattttctccctttttgagggaggatgataatagaatcttgagaaatggcaatagcaatggattgaaccctagtgtaagtatgatgggaaagggaaaagtgaggccagaagcaattattgaagctgcaaatcttgcagccaataagaaaccctttgaggttgtttactaccctcgggcaagtactcccgagttttgtgtgaaggcctcactagttgaagcagcaatgcagactaggtggtattctggaataaggttcaagatggcctttgaaacggaagactcctcgcgaataagttggtttatgggaactatatcttcggttcaggttgctgatcccctaaactggcctaactcaccttggaggcttctccaggttacatgggatgaaccagatttcccccttgatggccagattcctttgccgacacttcccaacaaccttctaggtcccaacaacaccaaccaatttggttgtctactcgaaagtactcctgccgaatcggctcgagccaggcatgctcattatggtctatccttatcggatctccacctcagtaaattgcaatcaggtctatcttcggctggtttcccgcctcttgatcacactgctacgccaatgaaggtctcaaataacaagacattgcaaaagcctagcatcagtgagaacgtctcttgcttactatctatgacaaattctactcggtcttcaaagaaattggatgctgggaagacaccttcgctcatgctttttggccaaaaaattctcactgagcaacagatctctccgagcagctctgttgatacactctccccagttcttaccagaaattgttcgacagatggaaatgtcaataaagtgactaatttttttgatggttttggatcagctcttcatcagcaaggtctacacgaacactcctcttgtgagcaggtcccagtggtgtaaggataatccccaagaaactgaggctggtttggagattggtcactgtaaagtttttatggagtctgaagatgtgggtcggactatggacctctcgttgcttccgacttatgatgaattccatagaaagttggcagacatgtttggcatagaaaaatctgaaatgttaagtagggtgctttactgcgattcagttggggctatcaaacacattggtgatgagccattcagtgacttcacaagaacagccaaaaggttgactattctaatggattctggcagcaacaatgtaggagtgtagtggggcagaataaactattcttttaattgtacagatagttcacgaagtctcattttctaacctttccctcttcctggtgcaatggaaggagacaacctaatttattttttgaatatcaaactctacataaatgtttctattccatctcaaaggggatttttggatttttgaattttggttagagtgatcataacttgtgtttccctttttctttttgtttttttctgtcaactatctctttatctttgcctacttgagtttccttttaaaattttgttggggaaaaaggtggaggacaaagagagaagtttgaaatcctataaatatgattggtttgtaagcaggtaaaaatgtatttgatctgaatactagttgaaacaaaaggagagtcattcttgcttttatgtattcacttgttcaaagattgtaccattttcttcttgttgttgccttataaattatttgctattacaatttaatcttgcattgaatgc

SEQ ID NO: 114662 - DNA, 276 bp, Glycine max
  Clone ID: PAT_MRT3847_7454C.1
ggtctagatgacgatacaacgggactacgggaaacagacatctcaattgatacagattccatctgatggtaatcaatacactaccataacgtctaacagttcccgagcttcgacatcctcttatggcaatacgaattctcctatatccacagatgtggatgtcaaccaattgccagatgagattggattatgggtacaattcaaactcaactcttaccagcactgcatgtcagagtgtagtcaatgagacactatctgtgatccccattacatata

SEQ ID NO: 114663 - DNA, 513 bp, Glycine max
  Clone ID: PAT_MRT3847_74550C.1
acagtgcataaaatgcagtattacgtagagaagctttttcagtatatcataacgattatttacacaaagaataaagcaagtaaagatgagatccatatattggactgttaaaaaataagggggaaaaaaagaagaaaaaacaggacactgtctctcaaacaaattacaagcacacatttctataccttcccaaagaactagggttaccacaaaaaagtaggctaagtttttatagcaaaagttgcaaccaattcagctcccatttcctttccttttccatctttagtatccaaataattccacatcatatatggttgatgccgtaagagacaaaaaccacacccctattggcgcatttcctttgaagtcacatagtttctgctttctgttgcatttgaattggcaagggcatcttgtgcaaattcccagtttccactcctttcccaactcgagtgcctagcatcagatcgaattgtgggagctcgatgatctgaggacaaaattgagtcaggc

SEQ ID NO: 114664 - DNA, 490 bp, Glycine max
  Clone ID: PAT_MRT3847_74551C.1
aaaatgaatttatttcagtgaagggtgacattaatattagggaagacagaatgacgagaaccaccgaacattaccatatatgatgaaggatatagaatgacaacaatcttaagagatgcaatgtaagatgacgggcccacttgcatttgccttactccaacagttgtgaagcatttgttagagattatgagcttacagccattcctcggctccacattttttagactgtcagccaattctgggtagagctggaacacatgcacatgcaccagtcgtaaggcagtcattgaccaaagttcttctggaagctttgacaatttatcacaggatttaatgaccagatgtcgaagtcgaggcattgcacctatctctaatctccattgtacgacaggcatattcttcatatgaagcacttgaagctgcgggaacttttccatcccaatatcaagaacctttaaccacgtaacactggaatattcatcaaaatcaa

SEQ ID NO: 114665 - DNA, 592 bp, Glycine max
  Clone ID: PAT_MRT3847_74552C.1
gggcaagggccctttattatacaaaataattaaccagtaacatttacccccatatatatgtatatgggggccccaaaaaaaaggattagtaggccaaaaatattaaaactaggccttcttaaggctctaaaaaacaaaccagttcggtttaaacccattcatccaaaattttccgttcaatcatataggcttgaaacaaaaaatccccattgctggagggatggggaaaattgcacacttacctcggcatagcgagaagaatttgattcagttgagcagttcaaaccagctaacagcaacacattttcaatttctttcaccacatcattcattggaggcctgtcaggacgggaatcttcaacacacttcattgcaagatccacaaacatctccaaacccttcaatggtgaccctaaaccaaggggggggcccaaaatcttctcaaaaccataaaaatctttaggcttataaatttctttcctaaccaccttcacaaaatacttccctcgttcaattggcctttttgcagttatcaactccaacattaacactccatagctataaacatcactcttctccggcaattgcggac

SEQ ID NO: 114666 - DNA, 247 bp, Glycine max
  Clone ID: PAT_MRT3847_74553C.1
atatagggggcactcatgggagatgatatatatagtgatgtcgcaatattgccagcccacaggtggctcgggatcataaaacctatatgtagtaccaacatttattatacgaccacgcgggaagagctactaacatatcaaaattgacttgccgccctaattatttcacagaaagccttcttaattatgcacctttcgagctacaatgaattttaataagagatcaggatccccagtgtctataggg

SEQ ID NO: 114667 - DNA, 142 bp, Glycine max
  Clone ID: PAT_MRT3847_74554C.1
agttttctctctcacaaacacactccacttctcttctcgccgtctatctcacacactgcctcgcatggccgaatagcacagaaccctaccctgccaggaaggcccaacccccttcatataacttccccctcttttctccata

SEQ ID NO: 114668 - DNA, 181 bp, Glycine max
  Clone ID: PAT_MRT3847_74555C.1
gaccaacgtcccactgaccaactcggagaagctcagtggcgacgaaagaaacgataccatggaaaaaattaaagacgctagagaacactggggattctccgagcatgggaatcaaggcattcctaatgacatactggacactgtggacaggttgaccaaagagcactacaggaaatgcatg

SEQ ID NO: 114669 - DNA, 372 bp, Glycine max
  Clone ID: PAT_MRT3847_74556C.1
cctcggaaacgggggtggccataactttgattggggttaaacaaaggaaattttttgggattttactgcctcccgttttgggtttccttgggataaataaaggcgggtttttgttccaggggcccataaaaaaaatgtaaaaaacctttcacaaaattttaaataggtttttttttttcaaaaagggttttaaggggccatagttgcatccctgctccgggtaaacagccaaagggggaaggcaaactcacccagaccattctggtgggggtgggtctggggggtccctgcatttttttttttttttaacgaagataaaacatttcctcatgaaggggggaaacagtttcctgcaacttttttagctcgggc

SEQ ID NO: 114670 - DNA, 422 bp, Glycine max
  Clone ID: PAT_MRT3847_74557C.1
agatcaccgagctggccggctgcgaccgcctgaccatctcgcccgccctcctggaggagctgaccaagtccacggacaagctggccaagaagctggaccccgagacagctgccaaggcatactcgggcgagaagctgtcctacgacgagaaggacttccgtctgagcatgaacgaggacgccatggccacggatttgctggccgagggcatccgcggcttcagcgccgacatcgtcaagctcgagcagatcctcaaggccaagctcagcgcttaagcgagcgtacgcgagtaagttaccgaccgagtctctgcacagatgcaagggggcgcccgccacgtcattgccaaccgcgagcgacaccgcattggcccctttggcggtgggaacgcgctgatgtagtagcgcgtctcgaggttatag

SEQ ID NO: 114671 - DNA, 252 bp, Glycine max
  unsure (1)..(252): unsure at all n locations
  Clone ID: PAT_MRT3847_74558C.1
nactnnnactnnanantnntgantncggttcgngcnngnanaaaganaacnaaaaccctagccaagacaaccatcatggccacctctgctattcagcaatcagcattcactggtcaaactgtctgaagcagtcaatgattcgtccgcaaacgtgggcggaaaggcgacnacatggcgacgnaggtgtctnngattggaatcacatactccatcatatcactatgtatnttattatcngngcantatatntgn

SEQ ID NO: 114672 - DNA, 1509 bp, Glycine max
  Clone ID: PAT_MRT3847_74559C.1
caccaatgaggatgttacaattggagcttggatgcttccatgaacgtaccctccaccttcaccaccaccacacccaacctcgtggtgtgtccccttccctgagccatgccttcttcccccaagtcctacgccatctcctacgcgcgccagcccacgcgcagatccaccctctaccttttcctctccgccctcctcctcctcttcctctttggaatcgtcgccttcctcgcccagattcgcggcagccgctgcgtcaacgcgcacccccggtcggtacgcgtcgtttgggaacactccgctggcgctggcaccgttgccggcgatgggggcaggcataaggtgatggggtttgtgggcattcaaaccggattcggatccgctgggcggagagtgtccttgaggaagacgtggttcccctctgatcgccaaggacttcaacgcttggaagaagctactgggttggcttttaggtttatcattggtagaacaagtgacagagcaaagatgtcagcgcttcagaaggaagtagcagaatatgatgatttcattttgttggatatccaagaggagtacagtaagctcccatacaaaacgttagctttcttcaaagctgcttatgcactttttgatgctgaattttatgtcaaagctgatgacgacatatatttaaggccagatcgtctatcattactactggccaaagagcgatctcatcctcagacatatataggatgtatgaaaaagggacctgttttcactgatccaaaactcaaatggtatgagccattgtcacatttgcttggaaagatccgatgttgtccaaagcttgtttccggatgttcagcaatgaggatgttactattggagcttggatgcttgcaatgaatgtcaaccatgagaataatcatgaactttgtgctacagtctattgcactgcatctattgcagtgtgggatattccaaagtgttcaggcctatgtaatccagaaaagaaaatgttggaactccatcaaaaggaagcctgctctaagagcccaactctggaatcagatgatgaatagaatttgtgggtataatataaagcaaagtaagctcagaaggtagtgtgaaggaattgctgctcttgttattgattactgccacgatatgctaccacttccattcttttgatctttctaattctcctttcttccagttattagaagagagggtgactgtgttttatttccttagttttcattcccctatacttggagaggtttgcattggccgatatgaggaacgttctttagggaaggcttttatatactacatgagagaatagatcaagagatcattgttaatttactaatttcctgattttaatgtcagtctttcttggggttatacatattctgattcttgtacttcaaaaatgggagtttgaatgattgtgtaaaaaaacatgtgtcatattttacttcaaggtttatcggtccatctttatattttaaaaaaaaaaaaaactcg

SEQ ID NO: 114673 - DNA, 365 bp, Glycine max
  Clone ID: PAT_MRT3847_7455C.1
ggctcgaggaatcctttgcctctgaaattgaacaaattcacatcccactttgttctttagctttatttttctaatttttttggctagagcgcatatttaaaaacgaaaaaaaaaattggttatttggttccagttcgttctttacatttgagtatctaaatatgtgaattgcttcagtacttttttaaaaggaatacatttcaaaaaattaaaaaggttaatttctgcattttatgtcctagtgtttataccctttgtgagtccaaatttgagtgattacccttcatgtattggtgtttatatggttacggtttaattggctctttacatatgtgtttctaaattagtgattaaaacgcttcagt

SEQ ID NO: 114674 - DNA, 1057 bp, Glycine max
  Clone ID: PAT_MRT3847_74560C.1
ccttcgcggtctctgacgcgggggaacgaaccctccaccttgaccatcaccaccgccaccacacccaacctcgtggtgtgccccattccgtgagccatgccttcttcccccaagtcctacgccatctcctacgcgcgccagcccacgcgcagatccaccctctacctcctcctctccgccctcttcctcttcggaatcgttgctttcctcggccagattcgtggcagccgctgcgtcaacgcgcacccccgatcggtgcgcatcgtttgggaacactccgccggcaacggtgccgccggtagtggggtcggcgacggagacaggcataaggtgatggggtttgtgggcattcaaaccgggttcacgtcggcggggaggagagagtccttgaggaagacgtggttccacgcgtccggccaaggacttcaacgcttggaagaagctactgggttggcctttaggtttatcattggtagaacaagtgacagagcaaagatgtcagcgcttcagaaggaagtagcagaatatgatgatttcattttgttggatatccaagaggagtacagtaagctcccatacaaaacgttagctttcttcaaagctgcttatgcactttttgatgctgaattttatgtcaaagctgatgacgacatatatttaaggccagatcgtctatcattactactggccaaagagcgatctcatcctcagacatatataggatgtatgaaaaagggacctgttttcactgatccaaaactcaaatggtatgagccattgtcacatttgcttggaaaggagtattttcttcatgcttatggtcctatatatgttctttctgccgatgttgtccaaagcttggttgctcttaggaatgacagtttccggatgttcagcaatgaggatgttactattggagcttggatgcttgcaatgaatgtcaaccatgagaataatcatgaactttgtgctacagattgtacagccacatctattgcagtgtgggatattccaaagtgttcaggcctatgtaatccagaaaagaaaatgttggaac

SEQ ID NO: 114675 - DNA, 200 bp, Glycine max
  Clone ID: PAT_MRT3847_74561C.1
ccaggattttgccttcctcctttggcttcttaggccccaaatgtgcactttgggactgtgcaaagcctgcgcaaggggtggactggtgcccaaactatttgagtagcttttatgctggcctagcttttaatggaagggcaccccgcatgggccctgttttacgaactgggggcatttggttgaaaggaaaattacttttt

SEQ ID NO: 114676 - DNA, 760 bp, Glycine max
  unsure (1)..(760): unsure at all n locations
  Clone ID: PAT_MRT3847_74562C.1
cacgcgtccgctctcttctttctcctccttttcctctccataacctctactatggcgaaagtcatcggagcccttgaaggtgaaaaactatctctggcaccaacatagttggggttagaggtgtaagcgtacaccaacaagggcccttggtagatctagacatggagaaagtgaaatcaaaagcaaacgaagggtgacaagaaatcaaaaaaggaaaaatggatcttcaacctcacacaaccactcgttctcccgaccagctgttgcagtaagatgcaccactgctttaataaatagagacgatcaaaccaccttcttcttcacgaatttccgagagacccataaagccaaagatatgtggaacatctttcatttgcatggcaaaatcatggaagtctacattccaacaaagatggatagaagaggcgaaatattcagattttctaggttcgagtcgatagcagaccctcaaattctatccttgaagttggacaaaattttcataggaaactagaagcttgtggtcaacactccaaaatatgaaaacaagaaacaaccaaacatctaaatttaaccaaagaggaagattcttaagttccctgaaaaacaacaaggggtcacgcatcttacatttggtgttgcaagaaaactncctcagggctgaaaaaggtaatccccaaaaaacgccacccaaagtgataggctttcccttagcctttgaatcagatnatgagtagctaagaagactttatcgatccta

SEQ ID NO: 114677 - DNA, 356 bp, Glycine max
  Clone ID: PAT_MRT3847_74563C.1
ctgtgtgcactctctctctgtctacaacaagaatgcatctatccatttcagcccatcagcatggcgaacgagaagaaccacttggacaacacgaacatgatgccatgcaatgcagacgaggctcacttgcgaggagtccagaagcgcccctggggccgatatgccgacgagatccgtgaccctggaaagaagacccgcgtctggctcggcaccttcgacaccgacgaggatgccagaccgcgcctacgacgtcaccgtcagaaacttccgtggccccatgagtcaaaaccaacttccccttactgcccgacaacaacatcaacgttaacctcaacatgaagagcaacaacgtttac

SEQ ID NO: 114678 - DNA, 277 bp, Glycine max
  Clone ID: PAT_MRT3847_74564C.1
gatattttcttcctttttgatggctctattttttaacggaagatatcgtaaccacttgggtttaaaaagaggtaaagagactcatctcccaaatctagatgcttaatatgttccaagcactttctttcttacaagcatacaattctaacactatttacctacctataattctctaatctattattattacctctatcatcactcttcccatacaaacaccttaacctcctgacattcttcctcaaactttatccactaatggttaataactctatta

SEQ ID NO: 114679 - DNA, 614 bp, Glycine max
  Clone ID: PAT_MRT3847_74565C.1
ttttccattcagcgattccaatcttgcaatctatgtcgatactccatgtcaacctgctccggacgtcctactgctgactttcgttcagaatgctcagagatcgccgtctaccggggctaccacagtcgagcctatctatcgtcatctctacctactcaccctctgccagtccttgacttccccatggtcgccgaatggtgatccttcctgcggctcgatgtgagcaccccctatcagagcgacaacatcaccacatggatcgcttaacactctcacacaggtcgtccctcaactatgtcagttcatgatgctgcatcccggaatcattactgtgatcagctgtagagcacctgatctacgagcatgaaacgagtgaggtcgcatctggggtggctatgctgtgagaacactcagtggtgcggtgacattatatcgattgtcagattctctggcggtgaaagaaccatgtactcggcctcgataatgtagtttctctttgacaccaactgatgtctactccacataattcaaggtgcgcatgaacatcccgatcactacttgggcgtctcatagactgtgtacgagaacactgatggcttatgagattcccacta

SEQ ID NO: 114680 - DNA, 553 bp, Glycine max
  Clone ID: PAT_MRT3847_74566C.1
aaagaacaaatttaagatgaaccagaatatacccattatctataagtaggtccgaatatcgtttatgttcaacattcgtaccgatataacatgttacaagtaaatattttatagtgataaatatcatcctcaaaacttacatgttgaataaatgtatttaagaggatgaccaatcacaacatatgcctcaaaaaatgttcagctacaaggcagaatttgaattcatacttcgacaaactgttccgaagacattgtcaacagagacttaaatgatacagatgattaatacaatacaaactaatagccctcgaacagttcaatgcctgatcccagcataacttaagtcctctgtccagcctcaagttgtcctgaacattttcacccggcttaggtaggtacctttcaacaagctcagcgagtgcctctatcatccttgtcactagtttgtggagtgtactggctggtcgacgatggcgagtaaccaggttgacttggtgagtaacccgtactgggactaaattggggcgaactggggctatagtctgggctcaca

SEQ ID NO: 114681 - DNA, 2952 bp, Glycine max
  Clone ID: PAT_MRT3847_74567C.1
caacactttccactatgctggtgtcagtgcaaagaatgttactcttggtgttcctaggttaagggaaatcattaatgtggcaaagagaattaaaacgccttctctgtctgtgtacttgagatcagatgttggtaagactaaagagagagccaagagtgtgcagtgtgctttagaatataccactctcaggagtgtgactcaagctacagaggtgtggtatgatccagatccgatgagtacaataattgaagaggacgctgattttgtgaagtcctactatgaaatgcctgatgaagaagttgctcttgaaaaaatttcaccttggttgcttcgcatagagctgaatcgtgaaatgatggtggataagaagttgagtatggctgacattgcagagaagattaaccttgaatttgaggatgatttgacttgtatatttaatgatgacaatgctgaaaaacttattcttcgtatccgtattatgaatgatgaagcacccaagggtgagattcaggatgagtctgctgaagatgatgttttcttaaagaaaatagaaagcaacatgctgactgaaatgaccttacgaggtatcccagacatcaataaggttttcataaaaaatactaaagttcagaagtttgatggtccggaagcttttacgacccacgcgtccgggatgcttgatactgaaggtgtcaaccttctagctgtgatgtgccatgaagatgttgacgtgaccaggaccacgagcaaccacttgattgaagtcattgaagttcttggtatcgaggcagttcggcgagctcttctggatgaattgcgtgttgtcatttcttttgatggttcttatgtcaattacagacatttggctattctttgtgataccatgacttatcgagggcatttgatggcaattacacgtcatggtatcaaccgaaatgatactgggccaatgatgagatgctcatttgaagaaacagttgatattctgcttgatgccgcagtatatgctgagactgattacttgaggggagtcactgaaaacataatgttaggtcaacttgcccccattggcactggcgaatgtgccttgtatcttaatgatgaaatgctgaaaaatgccattgagctccaattgcctagttatatggatggtcttgattttggtatgactcctgcccgttccccaatatctggaactccatatcatgaaggcttgatgtctcccagttatttgttgagcccaaatttacggctctctccaactagcgatgcacagttttcaccttatgttggtgggatggcattttctcctacttcatctcctggttacagcccatcatccccaggctatagtccctcatcacccgggtacagtcccacttgacccggatacagccccacgtcacccgggtacagccccacttcacctggttacaatccacagtcagcaaagtatagtccttcgttagcatattctccagcagtccgagattgtctccatcaagtccatatagtcccacatcaccgaactatagccctaggtctccgggatatagtcctacaagtccagcttattctcctaccagtccaacatactgtgccagcagcccttataattctggtgtgagcccagactatagcccaagttcgccccaatttagtcccagtacgggttactcaccaagtcaacctggttactcaccatcttcaaccagccagtacactccacaaactagtgacaaggatgatggaggcactcgctgaggacaacttgaggctggacagaggacttatgctatgctgggatcagacattgagctgttcgagggctattagtttgcattgtattaatcatctgtatcatttgagtctctgttgacaatgtctttctcccacatcacccagctacagtcctacatcacccagctacagccctacatcacccagctacagccccacctctcccagctacagccccacttcaccagcttacagccccacttcaccagcttacagccccacatctccttcctatagtccgacttctccttcttatagtccaacttcaccttcctacagccctacatcaccctcttacagtccaacatctccatcatatagtcctacatcacctgcttacagccccacatcgcctggatacagcccaacctcaccctcatatagcccaacctcgccatcgtatagccctacttcccctagttacaatccacagtcagcaaagtatagtccttcgttagcatattctccaagcagtccgagattgtctccatcaagtccatatagtcccacatcaccgaactatagcccaacgtcgccatcatattccccaacatctccatcttattctccatcaagcccaacatacagtcccagcagcccttataattctggtgtgagcccagactatagcccaagttcgccccaatttagtcccagtacgggttactcaccaagtcaacctggttactcaccatcttcaaccagccagtacactccacaaactagtgacaaggatgatggaggcactcgctgaggacaacttgaggctggacagaggacttatgctatgctgggatcagacattgagctgttcgagggctattagtttgcattgtattaatcatctgtatcatttgagtctctgttgacaatgtcttcggaacagtttgtcgaagtatgaattcaaattctgctttgtagctgaacattttttgaggcatgtgttgtgattggtcatcctcttaaatacatttattcaacatgtgcatgtaaagttttgaggatgatattgatcactataaaaatatacatttgtaatatgttacatcggttcgaatgttgaacataaacgataaacggacctacttatagataatgggtatattctggttcatcttaaatttgttctttaaatatattttttgtttatat

SEQ ID NO: 114682 - DNA, 971 bp, Glycine max
  Clone ID: PAT_MRT3847_74568C.1
ttttgatggtcttgattttggtatgactcctgcgggctccccaatatctggaactgcatatcatgaaggcctgatgtctcccagttatttgttgagccccaatttacgggtggctccaactactgatgcacagttttcaccttatgttggtgggatggcattttctcctacttcatctcctggttacaggccatcatccccaggctatagtccctgatcacccgggtacagccccacttcacctgggtacagccccacttcacctaggtacaagtcagcaaagtatagttagcaaagtgagatcatcaagtccgtcccacctctccgacttatagtcctacgtctccatcatatacccctacaagtccagcttattcgccatcaagcccaacatacagtccagcagcccttataggtgtgagcccagacagcccaagttcgccccaatttagtcccagtacgggttactcaccaagtcaacctggttactcaccatcttcaaccagccagtacactccacaaactagtgacaaggatgatggaggcactcgctgaggacaacttgaggctggacagaggacttatgctatgctgggatcagacattgagctgttcgagggctattagtttgcattgtattaatcatctgtatcatttgagtctctgttgacaatgtcttcggaacagtttgtcgaagtatgaattcaaattctgctttgtacttgaaccttttttgaggcatgtgttgtgattggtcatcctcttaaatacatttattcaacatgtgcatgtaaagttttgaggatgatattgatcactataaaaatatacatttgtaatatgttacatcggttcgaatgttgaacataaacgatatccggacctacttataatataaggggtatacacaggttcatcttacaggcccacatcacccagctacagtgccacatcacccagctacaggccta

SEQ ID NO: 114683 - DNA, 927 bp, Glycine max
  Clone ID: PAT_MRT3847_74569C.1
catattcaccaacatctccatcttattctccatcaagcccaacatacagtcccagcagcccgtagaattctggtgtgagcccagactatagccccagttcgccccaatttagtcccagtacgggttactcaccaagtcaacctggttactcgccatcgtcgaccagccagtacactccacaaactagtgacaaggatgatagaggcactcgctgaggtaaactaacagctctgctgaagcgcaaattcatgacttaaaagtttttatcttattggatggagcatttacgatgtaaatagtgaagaatttcttccctggagaaatgttgactgtaaaaaattcctgattctcctccatcttctcctattggttttaaattgtgaaatgagggtctatttggccaaagttctggtagtggccggaaactatcagatttctagaaatccctatattttaatgaaaatttgctgttacttttgggtggggggttgaagaggatttagattttgggctagaaaacttgggatgactgtaaacaagtgatatgcatttggcattttccttaatgtattgtgcatgtgataacattcttttgaatttaagcttgttgaaaggtacctacctaagccgggtgaaaatgttcaggacaacttgaggctggacagaggacttaagttatgctgggatcaggcattgaactgttcgagggctattagtttgtattgtattaatcatctgtatcatttaagtctctgttgacaatgtcttcggaacagtttgtcgaagtatgaattcccattctgccttgtagctgaacattttttgaggcatatgttgtgattggtcatcctcttaaatacatttattcaacatgtaaagttttgaggatgatatttatcactataaaatatttacttgtaacatgtt

SEQ ID NO: 114684 - DNA, 1077 bp, Glycine max
  Clone ID: PAT_MRT3847_7456C.1
tgtacatctgcgaggaaaaaatgaagaaaagaagaaaagaactccttcaaacttaaaaacccttttcacacttctctctcactcgcatcacacacaaacaaacactcccattttctctctttctctttctctccgacctagcgagaccgagcgatccgatcctaaccccgcgatgctccgccgcgcaaccacctccctcatctccggcgcctcccgccgccgcctctccaccgacgtgccggcgacgccggcggcggattccgtcttcgcggaggcgtggaagaaagtgagccccaacatcgacccgccgaagacgccgctggcgtacatgaagccccgaccacccactccttcgactctcccctccaaactcaccgtcaacttcgtcttgccctacgcttctcaattggccgcaaaagaggttgatatggtcattgtaccagcaacaactgggcagatgggtgttctcccaggacatgtagcaacaattgcagagttgaaacctggtgtcctatctgtacatgaagggaacgatgtgaccaagtactttgtcagcagtggctttgcattcatccatgcaaactctgtggctgatataatagctgttgaggccgtgccggtagaccgaattgatgtgaatctagtccagaagggtctccaagagttcactcagaaactgaactcagccacaactgatttggagaaagctgaagctcagattggggttgatgtccatagcgctctcaactctgctctttcaggctaataataagtactgtagtgttgagtcttgccttctgtatttgtttatttccccccactatgtggcattgatttgtctcggtgtaatcaaagttgctaaaagaacattttcaccctgaatttctatgttgaaagtggacttgataaaataatatttcaacagcttccatctagctcaaggatgttgggcaagaccttgaaattagaaacaaaagtttcatttttgttttggattattgtatggcaaatactggtaacaaataaaaaaaagaccataattttgattctattgttctggattaaaaaaaaaaaaaa

SEQ ID NO: 114685 - DNA, 454 bp, Glycine max
  Clone ID: PAT_MRT3847_74570C.1
tagtgcctagtttcgtagtaaaatcaaagttccggttccctccgcagagactggacgatctcgcgagccatgaatgctagacggttagtatagatcactagtttgaatcagactttgaaatttattatctcaaggaggattcgttaaaacgcgatgatcggtatttaattcgtctctgctaggctaggcaatatttgttttgtaattccagatctacggatacggcgtggttatacgatttttggatttcaatctgatggtgaattgattagtgtaattgattcgtgaatcttagtttcggagctgcgatttaatttgttgtgtgttggatttgctcaataggagtgaaattgtggggaaggaagtagctggactggtgaagtatagatagactgatagagactttagcttcttgttcttgtcaaattccacaattcggtgctcctagcatcgt

SEQ ID NO: 114686 - DNA, 489 bp, Glycine max
  unsure (1)..(489): unsure at all n locations
  Clone ID: PAT_MRT3847_74571C.1
agggagggcaattttagtgacaggtggattatccaacgtggcattaaaggatgacgtggcatgacacatggacgtgcctcttaaaagatgccacgtcatttgatgatagcaaaacgagtaaataagcaatatatgcctggattttgtacccctattgcatattagtccctaacttaatgaaaaattcaaaatagtccttatcttttgcataagtgttgcaaaatagtccctaacttaaaagatgccagaaatcgtgcttaaagtgtccatgcattgcgaaggttgtgccttgcacaatttctagcggcacaggttcctccttggattccttgtcatcttttgattcctctgattttttctcttcttctttcttttcttcttcctctgcttttttctcctccactttgttttcctctggttttttctcttccttctcagntcacttcatggcaagaggggggctttcagtctcgtgaaattgaaattaaa

SEQ ID NO: 114687 - DNA, 211 bp, Glycine max
  unsure (1)..(211): unsure at all n locations
  Clone ID: PAT_MRT3847_74572C.1
gggtttggggtttaatattatattttttttngggctttatcaaaaaaaattattgggcaccaatagggttatttaatattcaaatcaaatgtcttcattacaatccatagttattttgcaaatcaggtgggccctttgattgatgaatgaaaaatcccgggggtaaaggtgtttaacggtttaaatatgtattatgtaccccattgtaaaa

SEQ ID NO: 114688 - DNA, 442 bp, Glycine max
  Clone ID: PAT_MRT3847_74573C.1
ctcacgcgtccgctcaatcctctgttactcgcaaaacatacacctcttctctatgctccggggggctctctctctcgctcactctgcaactaacaaggcaatcgcaaaccaagacaccgttgtcagagaaatcaagcccaagatcaggacaatcatgcctgctggagggcctgatgatgaggacaataggtggacaccgctgttgaagccactgctgaaagagagctgctatgttcaatgcaagtcgcatgctgattctcacaacatcgaatgcaacatgtatagcttggactgtatgaacggtcctctctgctctctctgcctcgaccaccacacagatcaccgtgcaatccagattaagaggtactcataccatgatgcgatcatggactatgagattcacaaggcgttggacatcactggcgttcaaacctacattatg

SEQ ID NO: 114689 - DNA, 204 bp, Glycine max
  Clone ID: PAT_MRT3847_74574C.1
gacgcagaagaagcatcttaaggttccgaatgatcatcctgacgacggtgggattcagcgacgtactacgttgtctagtacaaaggatagggttgctggtgagggtgtagtgaagccttctgctactgttgaacaaagtgggaatgttggtagtggtaatgttggtgtgaatgctggtgctgctgctgctgccaagcgtttcaa

SEQ ID NO: 114690 - DNA, 167 bp, Glycine max
  Clone ID: PAT_MRT3847_74575C.1
gaaaaagcaaaagggtctgttaatgatgtctgtttacatctcaagaggattttatggacatacacaattatcccaaaaaaatagatcccttgacttatatgaggcaacaccatatacagaaaaacaaaggaaaacaagaccctccacacgctttaacaatcatgaat

SEQ ID NO: 114691 - DNA, 505 bp, Glycine max
  Clone ID: PAT_MRT3847_74576C.1
gcgagattgcagcagcagcagcagcagcagcagctagcttctaaaagaatgaagttagaagtggaggtaatctccaaggaaatgatcaaaccctcttctccaacccaggaccatcttcgtcactatccactctcttttctcgatcaagtctctcccatggtgtataaccctatggttctcttttactcttgctacggtatcactcaaactcaattcaccatttccgaaaagctgaagaaatctttgtctgatgttttaacccatttctaccctcttgccgggcgagtcaatgggaacagtactttcatagactgcaacgacgagggtatcccctacttagaagcaaaagtgaagtgcaaagttgtcgacgttattcacaaaccagttccaggagaactcaaccatttggttccatttctactagatgatatcaccaatatcacatttggtgttcagcttaatgtttttgattgcggcggtattgcaatcggagcttgcctttctc

SEQ ID NO: 114692 - DNA, 402 bp, Glycine max
  Clone ID: PAT_MRT3847_74577C.1
tccggaatttccgggtcgacccacgcgtccgcccacgcgtccggaagcatccggactctctcgctcgagggtagggcagggcagggcagggcaggcggcgatccgaatccaatcgccggagggaggaagccaccggtggccgcagtgagggcggcggaggtagaggcaaagggatgacgcgcgggaagcagaagatcgacgcgcagcggcgtaacgcggagcgaaaccagaaatccaaggggtctcagctcgaggcccgcgccgtcggcctcaagatcgtctgctccatctgcaaggtacaattggcaaatgaaaaacagctgaccgatcactatggatcaaagcatccaaaggagaaacctccgagcacatcgagcaccgaataaccatggctggtcgtga

SEQ ID NO: 114693 - DNA, 526 bp, Glycine max
  Clone ID: PAT_MRT3847_74578C.1
gatatttacaccgagccgcggctgggaatgggcggcgactgatagggagctgacaggacaggagacaccgtttgatgacgcgtgaaatgaagggtaggagagctgatgctacagagaaaactagaacgaaccttatgatgtaaactatggcatgaacggaactgctacagaccttgcgtaggaatatccgccatggctgaattaagtggttagactgtaaaagatgaccgttctaccactgaggaaatgctatactgcgactctctcatccatcccgaggagactgtggatacaggaaagacccttgcacaactaagtggtgatacaatgaacgactactaccctatggatcatgtttgacgatgagaaaagacatctgtcaaaatgtgatgttgaattcctaaacaaggttaatgttgtcgacgacaaatatagcacgctttctgacaaaacactgactaatggtaaacgcacagagctatatgaacgtgaagcattttatgctgctgactgaactgatgcttgt

SEQ ID NO: 114694 - DNA, 1110 bp, Glycine max
  unsure (1)..(1110): unsure at all n locations
  Clone ID: PAT_MRT3847_74579C.1
ccacgcgtcgggtggtgggtgggggagagagagagagagagatgtcgagattgcgaagactgatccaagcttcagttgatgctactaagaaagttatatccggtaatcttgatgatttgatgccaccaccggagagacccatcttcagcttcaattccaagcaagagttaagcaagtggcatttgtattctgattctgaatttggaggtttgtcctctgcctctctgcagataactgagtcggaaaatggagcaacttctggaatcttctccgggaacctttctctggatgtctctgagggctctaaatggaacatcactcggagtggcttctgtggaatgcgctcaaaaaagtttgatggctttattgatttggattcatatgatactattgctatgaaacttaaaggagatggaagatgttatatatctacgatctacacagagaattgggtcaattcacctggacagatggaagataattcatggcaagcttttgtttatgtgcctgaaggcaactggtacattaccaagattcctctagctcgatatttacctacttggagagggaatgttatagatgcacaaatcgaaatgaatccatcccgtgttttgggcatgtctctatctgtcaatgctgagggtggtgtcccaggtgctagatctggaccaggtgatttcagagttgaacttgattggatcaaagccatgagaacagaatgaagtatagattactcataaaaatcaagaatttttctcttcttttagggtgcccttttttttgtaataataatgtatcattttatggttcataatggaaaatatatttggtagttattccagcaccagtactcttccggtattattgagtggtatggtaggtgcaataatggaagcactttcggaaacaaaattcattgttttcatcatgctcatagcagaaaaatcaatactgattgtcaccttgaaaatattgcagacataatgggattgtcggtcatcaattaagtgaggtgaatttgatagaaagnnngcattaccactaaccatgtaataggggcaaatatcattatcacttatcagtttgtcttgtacccataccnnaatanag

SEQ ID NO: 114695 - DNA, 308 bp, Glycine max
  unsure (1)..(308): unsure at all n locations
  Clone ID: PAT_MRT3847_7457C.1
tttttgttatggtttnttaatccagggggggacaaaccaacaggtttttggattcatgaaaaagagaacattcaagttgttcactaatccttatacatcaaacattggttttaactaggggtgccaaatgggaagtttttttaaaacccaaccttcatttaaaaaaaaaaaacaatttcaaaggaaaggaccaccccaccttcaagttgggtttttttacacactcctgtgtgctttattctctgccgaattcttaagccaaagggggaaaaggggggtttctttaaccctagggaggggattttaaa

SEQ ID NO: 114696 - DNA, 229 bp, Glycine max
  Clone ID: PAT_MRT3847_74580C.1
ggcagcatgcaagtgagtgagtgagttgctttgtctcattcagtcagcgacgtctccatcgatctcgacgtagtgatggaacccctacactttcattttcttgagcccttttttctcttcaatcctagatacagtgtcaggtgtaatgcaggcgtagttggtttctttttgcctctgttactcgatagatctgacgtatgcggggataccgagtaacaactggattttg

SEQ ID NO: 114697 - DNA, 437 bp, Glycine max
  Clone ID: PAT_MRT3847_74581C.1
cccgggtcgacccacgcgtccgatcttatcttatgcactatgcaccacttcaattgaattttgctagtgatgatttttttgagttgtggagcttatatatgttatgtaacctttctgtttcttagttgattattattactactacgcgcaggttgagattctacaaacatgatgcactctgtaaagggtgggtgggggagaacgtttgcgcttgctaaccacaatgattccgaagggagaaagactcggattcgccgctcaaagcaggaaagaaaggcaatggtggaatcctttataaagaagtaccaagagttgaacaatggaaactttccatcacttaatcttacgcataaagaagttggtggctctttctacacagtacgggagattgtacgtgatgtaattcaagaaaatagagtgttaggtcctgctaagtt

SEQ ID NO: 114698 - DNA, 438 bp, Glycine max
  unsure (1)..(438): unsure at all n locations
  Clone ID: PAT_MRT3847_74582C.1
catcctgcggccagtggcacttttttcactcttatgcttctagggctcaagtactgctcttgccagtttcagggcaatctgcaaaaatttcagatggggcttcagctgctggaagatcggatatatagggcatctttgggttggttttcttttgagccagaatggtatgacacaaactatacaaactttgctcagtgtgaggctcaatctgtttctctatttgttcaataccttacaaatatgaaaggagatactgtccaagttggttcaaaaggaaatggacaagaaaatgggaatcctttggctgatgtgagtgatcaccatcatcctgtttggggtcaaatggagaactatgctgcangaagagaaaaacggaggcagctacttttaatgctttgccagcatgaggctgataggcttgatgtttgggcacagccg

SEQ ID NO: 114699 - DNA, 202 bp, Glycine max
  Clone ID: PAT_MRT3847_74584C.1
caaaaatggaaataacatatgatttacatattaggtggggagttttgatgggggaggattccacaccaaatcccgtgtttacatataattacaaaaacttgaacacgtggttcataaaatcaatgctacaattaacggtgattctactagctaacattcatttggtttgaacactaaacatctaacgcaacaaattatgtga

SEQ ID NO: 114700 - DNA, 409 bp, Glycine max
  Clone ID: PAT_MRT3847_74585C.1
acccggaaaagggggggttttttaacctaaagttccaaaaaaaccgggaggaaaaaaaaaaccagggggtttgaaaaccacccttggaaaatgggccccgggaaaacccaagcaggacccccattcccatattttttccggaaaaaaaaaggctaaaaaccatggggaacaaattttccccaaggggtagggaaaaagttccccgccttaaaaaacgggggggggcgaaacctgggtttttttttaaaaaaaagagaaaagggggggtttactttggtttatccccaagcggggacagggaaaaaaaaaatgggttttgaaaaaattttgcccctgccaaaccctctaataaattgcccaaaagcgggggggaagtttgacatttcccaaaacaaaaaaagggggggtt

SEQ ID NO: 114701 - DNA, 329 bp, Glycine max
  Clone ID: PAT_MRT3847_74586C.1
gcgactacgcgtacatcgacacctgccgttctagatcgtgcgcgctcactctcgaggatccaacgctgacgggacgctctgcatagtcgacgcgcgtgtgctacttatattcagctggaccctacacatttaactaacactggtgcctcgggtaaacaactggcgtgactgcagaaaactctggcggtacccaacttaattgtcttgcagtacatgcatctttaagcagccctcgtcataacgaagaggcaaccaccgatcggcctttataacaaatgggaagcctccatggtcaatgggacacgccctgaagaactgcataaatctcg

SEQ ID NO: 114702 - DNA, 428 bp, Glycine max
  Clone ID: PAT_MRT3847_74587C.1
cccgcgtccgccccgcgtccgcccacgcgtccgcccacgcgtccggtttttgaccaaatatctggttgtttatagttgatttagtgaaatgataatcagtaattggagtaaaaaaaaaaaaaaaaaaaaaaaaaaaaaaaaaaaaaaaaaaaaaaaaaaaaaaaaaaaaaaaaaaaaaaaaaaaaaaaaaaaaaaaaaaaaaaaaaaaaggcaggcctcttaaaaaaaacaaacctaaaaaaaagcgtcaataaaaaagaaaaaacattttcaataagggggcccaactttaaaaaactgacccactttttaaaaccctgccggaccggaaaaaccttgttttaacccaactaaaaatccttgcagcaaacccccttttaaaaaattgccgaaaaaaaaaaaatgcccaaaccaaacccactttccaa

SEQ ID NO: 114703 - DNA, 1319 bp, Glycine max
  Clone ID: PAT_MRT3847_74588C.1
tttttttaaattttacaacagaaaaatatgactcttattacttaaaaagagagtcaaacatcatagtatcccaaattcaccttcagggatcaaaataaaaactcaaccattgacaattttgaagcactaggccagggaacttgcactctcagcattttatcctcataatcaaattttacaactaccccatctagtttgcaactaactggtttctctgatgcaaacaccttcatctccccacaacccctaaccccaattttgaccacatctatgtggttgtcaaactccatggactgaatggcaccaccagtgttaagcatgttcactaatccaattggagcaaattgaattaacttttttgacagcacaatcactggagacactgtcaatagctcaaaagtaaatggctcaagtgaaacttccaatttctctgatgccttcatgagctttagtttgtggtccttgaacaaatatacagcaaacacattcatcccttttatgcatattgggcttttcccattgctccattcaatgtcttgaggactcgctaagcatgtcacagtttgtgaaaattcagaggcactcttgtttctcctagttacgggacaccacccacctccttggcaattaaatagacccaaaacacctgtatatttgttgagattccaaattttgagcattgtcttcccatcatgcaaggggtcttcaaacaaacagtctcgtgtggggagtgcatagtgttgacaacgcaaaatcgtcccatcaggcaaagcgaggctcttgagcaacttgaagttgtgctttccaacacaatcactaacgtaaactggtccaccagagatggccctagaggctgcatggaattcggcacaagggtgagtggactggaacatgtcccaatccggctgaataaaattccccatccacaagctgttgtaggcacagtgcaccatgtgacacccttggagccaatacgtgccatttggatctccagagggatcagtgcaccaaaaatcatctcctacgcgcccaagggctatggcttcggtaccaaggagaaagaagtcattacaatgctccatgctcgcaatgaccccattgcctttgaaatgcttcttcaccgaagcagtgagcgctttgtaataagctttggctagctcaatacggtggccgtgttcctcggatagcatctcgagcaagtgtataacgtcaaccttaacaccgtcaatacccgcagattccaaacgggagtggagcccctcgtacaaaaggtgagccaggtgtggtggcaccagtccaactccgttactgacgatctt

SEQ ID NO: 114704 - DNA, 656 bp, Glycine max
  unsure (1)..(656): unsure at all n locations
  Clone ID: PAT_MRT3847_74589C.1
gtccaacctcagtgataatatagaacatgagctatgtttgacaaccccacactcctactttctctcaaaattttgataagaaagtcttgaccttgaagagagagagagggagaaagaacctactattcttcttcttcttcttcctgcatagctaattaatttccatggaggacttcaacaactacaacaaatcaaggtctcatggaaataatgggcaaatgatgcagcagatggagaggtactatggaggagcaccaccacaaccaacaaggccttatgatctcaggtcatacagtgtttcttcatatacacaagctcctaataattacaacaacaaggacttgaagatgatgaagaaaggaaaaagcatgtcatcaaggacttcttctatttccaagtcttggagctttgttactgatcctgagattcaaaggaagaagagggttgctagctataaaatgtattctgtggaaggaaaagtcaaaggctcctttaggaagagctttaggtgggttaaggataggtactgccaagtggtttatggctggtggtgattaattacccctttgtattaatttcctgtttacatatatatgattttgagtttttttctgttcatgattagtagaattatgagttatgatgannncagttaa

SEQ ID NO: 114705 - DNA, 216 bp, Glycine max
  unsure (1)..(216): unsure at all n locations
  Clone ID: PAT_MRT3847_7458C.1
gacccacgcgnggcgancattttatagggaggagnnnaacattattctctcaagaaaataatagattacactgaatgcttacttactcctttgtgcagcacaaacataagtgtaaatcttcgtttgatgagtttccactgcaaagctatatgcatctttatgtgatcattggatttttaaactctgttgttgcaactatgggggggaaaaatatca

SEQ ID NO: 114706 - DNA, 149 bp, Glycine max
  Clone ID: PAT_MRT3847_74590C.1
gattgctggctggtaaagaatctctaaactgatttccgcacttagtcacttgctttcttcacaattcactccagatttttattttcgtgttgatcttcttgttactctgatgttccataaagataaactcaagtttctttgatgatgat

SEQ ID NO: 114707 - DNA, 262 bp, Glycine max
  Clone ID: PAT_MRT3847_74591C.1
ttacgttatctcagaattcggctggagcgccttccctaaaaattaagtactcactaactattccttgcgttaccaatcatgttcaaatacaccaaccaagagggctctatcagcggggatggagctacatacatattaatgatatacaaagtatcggctttcatgcttccagacttgaaagtgcacaaccttctaaacaatgttcaattaaatatacttcgaaatcatcgctcacttcttgatatgcaactattgaaaatca

SEQ ID NO: 114708 - DNA, 432 bp, Glycine max
  Clone ID: PAT_MRT3847_74592C.1
gcttgttgtacctccctttttcacatctgcgatcaaaattcgaaattaattaaatctttccaaattgaagcataaataactgctaaataattaattctaagttaattttagaccgattttccactattaattcactattatttagcagttatcaggttggcatattcctaacattcttctctataatctcaacaaaagagcaaaatcaataagcattcgagagcaactctctttaaacactagcgttgtttctttctctaataatctatgtttctgtaatgataaaaatgcaaaaaataggcgtaaacgacaaacaaaacgaatgctgacctttggtaacctcgttgccgctgcgaactgacagtgaaagcgagacaaatagtgagagcgagagtgacaccgccaatgagagtgccaacgatgaggagtttc

SEQ ID NO: 114709 - DNA, 452 bp, Glycine max
  Clone ID: PAT_MRT3847_74593C.1
taaaagtggtgagttgctgagaatatactgcacagattcacagtagagttatataatgcagaatctagatgaatctcctctacttctctttttgcttagtttcatgtttcacttctttgatgtatccacctacctgtctcttccccattgcttctcaagatatgcatttatcttctgttaaacgatatgaacttctgggtattagaacttggacccttccagatttatgacatgccatctagctagtttgaatttgtgatatcaaaagtgaatttagtagtgccacatttctgctaaacagagtaactgatgaatttgggtaaatcactaaatccccagagagatatattcttattatctaatatgcttattcgttattgcctaatcaatttggagacaaatagatttttgttgaaaagataaaattctagaacctttcagctaggggaatt

SEQ ID NO: 114710 - DNA, 362 bp, Glycine max
  unsure (1)..(362): unsure at all n locations
  Clone ID: PAT_MRT3847_74594C.1
ggtggaaaataaaataataccttttgaaacatatatttngttctacctaggatgaattantcaatgtttggggatattatggaagatatcatatacatggttagaccatagcctcccatcagttccatcttatgtatgcagtactaatacacatccccacaattacctccgcacaaaattgatagtcctctaaacactttggggggaggggaggggtggggtctcaantttgttcttgccctttgngctctggtttgggcgcggtgggggggggcttactgcggtggctggtcttgggtgggttagtgccgtgcgggctgtcgtgtgcctgttggcgtttttggcgtccgcttgtgcttggg

SEQ ID NO: 114711 - DNA, 1170 bp, Glycine max
  Clone ID: PAT_MRT3847_74595C.1
caacagattgggaaagatatacaaaaggggatccacgtgtgttgggctatttgaccagttgaaaccgcggaatatacacaaaagcccctgttgttggagcaaaccttttcggaaaagtagaacagggaatacctgaagactaccctacgaatcctgctgttattgctgatctgggtggtgacaatgtggaaaattgtgctgttcgaaggtgcttatctttttgaaagtatatgaattaaggataaatggagctctgccacagactctagaaagcagagaaaacgatgatgggcttacatggttgtactctcaaactcgcttcagttcccaatttctcttctccaactttccttttcaaaactccaaccctccgttttcagaaatctccattgtcacgccccatcagagctctatcttcctccgccctcgtccaaacatctactaccaaggccactgaagaccaaggtgtgaagcctcaatggaaggccacgatagacttcaagtggataaaggataacaaggaagctgttgctgccaacttaaagaaccgcaactctgatgctgatttgaacctcgtgctccacctttatgacaaaatgttcactcttcagaaggaagttgagagggttcgtggtgaaagaaatgcagtggctaacaagatgaaagggaaactagaacagtctgagcgtcaaagattgattgaggaaggtaagaatttgaaggagggacttgctgctttggaagaagacttggcgaagcttaatgatgagcttcaacaggaagcgcagtgtataccaaacatgactcatccagatgttccaataggaggggaggattgttccaccataaggaagatggttggtagctctcccaaatttagctttcctgtcaaggatcatctccaactaggaaaggagcttgatctatttgattttgatgcagctgcagaggtcagtgggtcaaagttctactacctgaaaaatgaagcagttttgttagagatggctcttgtaaattggacactctctgaagtgatgaagagaggctttactccattaacaacacctgaacttgtgcgatcctctgtggttgaaaaatgtggattccaacctcgtgcaaataatacccagatttattccatcgctgacagtgaccaatgcctcattggca

SEQ ID NO: 114712 - DNA, 541 bp, Glycine max
  unsure (1)..(541): unsure at all n locations
  Clone ID: PAT_MRT3847_74596C.1
aataatacagatagatcactaaaataatgaactatcaatcaaaatttgtattgaaaatttttcagcaaattacaaacaaatatcttcggcaccctcactcctcaagccccagacagactagaggttctgaaggtaaataaatgaatgagctgcgactctcaagatgaacctttattgaccggaattttctatctattgaccagatttttctatcactctatattcacaccctttaccattagtgacagcatacaaatatttacaccagaaagcttttaagagaaggaagtgggtgcatgccaaaaggttggatgggaaagtaaactttcagccagccggaatgaccgtgagatataacgtaaggtctggagaaaaacaagtcacagatacaaagaatttgcaaacataantacctcgtcgaaggctttcacttgcagctgcaaatttcttctccaagtcagcctctccaactgcattagcagcagcacgcaactgattcaaaactcgtcaagccttctagcactccgaaatatactcccct

SEQ ID NO: 114713 - DNA, 358 bp, Glycine max
  Clone ID: PAT_MRT3847_74597C.1
gacactcgtacagacagtcgcacatttacattttgcaaatctcaactctggcaagggctacgatcaatttgctgaggggactggacttaccaacgcctattcatgtctacacttgaagaaactatcttatctgaaatccacaaatgcatctctacttaaatctattctcccggctctgtatttctaccttcaatctgatataactagactctctatgagagcttatctatcctattctcatatatgaccccactttgtatatgttgaattaaactgttatgcatctttacgtagagtgtctcagacataattcttgtggaatctggtgatggtatcatcgtatcaatagatttttact

SEQ ID NO: 114714 - DNA, 202 bp, Glycine max
  Clone ID: PAT_MRT3847_74598C.1
tctctccctaaccttaaccttggtactggtgctactgaccagcaaggcgaactcagcggaaactgcgtctttcagctggaacaacggagtgccgaagcaaccaaacatgatcctgcagggagacgctattgggacctcctcggtaaagttacaactcaagtagggtgacgaaaacagaacccaggaaccctcgtctcttggt

SEQ ID NO: 114715 - DNA, 911 bp, Glycine max
  Clone ID: PAT_MRT3847_74599C.1
actaattcagataggtatgcaggagatgatatgcacccaaaggagaaaaggcgaacacctgcttggtgtgacaggattttgtggtacggagaaggtctccatcaattatcttacgtccgtggagaatcaaggttttcagaccacaggccggtttatggcatattttgggctgaggttgagtcaagtcatggaagactgaagaagagtatgagctgttctcggaacagaattgaggtggaggaactcttgccatattcccatggatatactgaactaagttttttctaatggaaggagaggacgctatgggatttcagcacctggtcaacaagagggagtcacctcgctttgaagaattttatccatggagactgatagagacaacccatttcccacataccgaaaaagccatactatgccatgcctaacacatgatcagtacacaagttcctcatcatcatctcgttagcaactgtgcaagtgtgcattgtttgatagccaattaacaaacactcaactttacaatgtctcaaaactccgtacttcattggcagtcttgcacaatcattaggaggaggcggaaggagaccatttttttatttaattaatcattctttaattgtttttggagaatattcatgatgactgaatgaagctgaaaagatcgtcaaaataattattagggtactaactttttttgtttttaagtgcagagaaaatgagaattttgatgtatactccacttattgattgctacagtgatgaaaaagaaattgtacaaaaaacaaaatcttgttaattaatgatagaattccagagcctccactccttagtttctgactctgttcacatgattgatgattttattgataaaggtgtctttgatatcaaataattctcctttcctgctg

SEQ ID NO: 114716 - DNA, 351 bp, Glycine max
  unsure (1)..(351): unsure at all n locations
  Clone ID: PAT_MRT3847_7459C.1
tttatttttnnnntctttgctaatgttacattttttttttttttttgatgatctgagttacatgcaagttttggctgtatagaagtaaaatgaaatataatggactgggggagttaccacactacaggggctagcttctactctggaaaggtctgactaactatgcgagccaattattgctaaagcaagcgctgataatctgaaggggcgcgaaaaaaagataagatctatttgaagcaaccaaggctgagcgcaagtctaaacttgctctaaagaaattgacaataaccactctatgagttataaagtgcgttgggcctcaactcttttggtctcaggagtaaaactacg

SEQ ID NO: 114717 - DNA, 1183 bp, Glycine max
  Clone ID: PAT_MRT3847_745C.1
gtggcatcgcttcgctccctacccttgggctagggttttacgtttggctctgcgtcttctcggaaagcaaactagggtttgtttgtgtggcagaaggaggaatgggaaggtatcgtagccggagcagaagctatagcccccggcggcgaagcagaagcccaccggcaccgcgcggacggaagcgctatgtcgacgatcgctacggtgacagcaggtcttacagagaccgccgctcacctcttccttccggcttgcttgttcgcaatctcccccttgatgccaggcctgaggatcttaggatcccatttgagcgctatggtcctgtgaaggatgtttatctacctaaaaattactacactggtgagcctcgaggctttggatttgtgaaatatcggtatggtgaagatgcagctgaggcaaagcaacatctcaatcatactatcattggtggacgtgaaataaggattgtttttgctgaggaaaataggaaaacttctcaagaaatgcgtgttaatactcgaggaagtggtcgacatggaggtggtagaaggaggaatcgtactagatccccacgaccccgatcctattctcggtctccatcaccagctagggatgattcaagggatggcaggggtagggatgattattattctcctgagcgatcaagatcttattctaggtctctctctcccagtggtgggaaggactacaagaagtcccctcgtctcagggagaatggtcggagtcctaatgacaagaaggatcagacaccccgcagatccgagagtcctagggacaatgattgcagtccttcaaggtctcattcacggtgatacattccacgctgatttgcgagcaagcagagattggaaggtggtcaattcggtttttcctgtgaccacacactgtatctaaaactttgacattttgaaagatacaaaaatgtagctaagccaagtctgtgatgtttatattagtattcggtaggtgacaacccatcagaaggtagtttgacttgtgtcattttggatgactttttcatcagtttacaaatttttggatacttgttcatgaatcatgtctttataacatgtttggtccatctttatagcttaaacgctacttcaaagttaaagtttaaagggagagttttaaaattaaaatagaaagtatttcttaattc

SEQ ID NO: 114718 - DNA, 269 bp, Glycine max
  Clone ID: PAT_MRT3847_74600C.1
accagattacatcgtgttttggtggaacaacacctagataagtatgacacatgttttaccaatcaaaataagttggtttcatcattgatttttcatctatacataatcctagttgaagtgccacgtcttataacgttattgtacattctctcactagaagatgaaaaatgtgtttcaggtctccattttttcaacgagtccgattacaaaatggtgatcaatcttgaagtatttgagctttgctacttgagcaaagctagcttcctcta

SEQ ID NO: 114719 - DNA, 605 bp, Glycine max
  unsure (1)..(605): unsure at all n locations
  Clone ID: PAT_MRT3847_74601C.1
ggagcttgaggatgaggctctccgcccacccgatctttccaatctccagaggagaatcaaagagagtatgtttgctctactattgactgttgtcataaacgttctttgagctattctgtaaaagttgttgtaattgttctaaatgtgtttctctagttgttcgggttctttcaaattttaaggctttgaggcaagatgggtcaacaagaaaggagtatgttgaacagcttaagaaagatttatgtacgtactatggctacaatgagtttctaattggtgctctagtggaggttggtatgattatattattactgctaacattttgaacttcaatttcttcccaattgctattgccctatgtgtccattttttttaccttgctatggcaggacatggaaagggatttgtgtttcattattgtgtaatgagggtttgcatgaatactttgtatcttgttgtctcagatgtttccagttgttgaactcatggaactgattgaagcctttgaaaagccacgccctatgtgtctaaggactaatacattgaagggtgcatgtcccttttctgtcattttggggtaataaggtagtatgaaantattcatg

SEQ ID NO: 114720 - DNA, 313 bp, Glycine max
  Clone ID: PAT_MRT3847_74602C.1
catgtggtaattgattttgcgcatcatttgatttgaagattaaggctgtgtccgagtgcatccgaccacttttcattgctgtttgaatgtacattttccaatggttttgattgcctttgttgtatatacatttattggaaacatatgtgtgcatgcactgaggtaatcaaatgccaatttttgctaatcaaaaaaaaaaaaaaaaaaaaaaaaaaaaaaaaaaaaaaaaaaaaaaaaaaaaaaaaaaaaaaaaaaaaaaaaaaaaacccaaaaaaaaaaaaaaaaaaaaaaaaaaaaaaaaaaaaaaaaaaaa

SEQ ID NO: 114721 - DNA, 399 bp, Glycine max
  unsure (1)..(399): unsure at all n locations
  Clone ID: PAT_MRT3847_74603C.1
natttctttgcttatctgcgctcctttccgtgctgtaaaacataatcagattgttctttggaacagtgaagtaggtaataataatttaccatgacagttaaaatatgctatgcacttaaaaattttcagaggccctggttgacaagaaatagggcttcgtttggaaaaaaaaaaaaaaaaaaaaaaaaaagaggaggagaaaaaaaaaaaaaaaaaaaaaaaaaaacaaaaaaaaaaagagaaaaagaaaaaaaaaaaaaaatgggggcggcccccaacatgggctcttatgaccccggaaataatttccggaccgttgcccaggagccttcattttttccgactgagcattgcactacaaatttacaacaaggattgttcaaatgctcccctgtgtgg

SEQ ID NO: 114722 - DNA, 157 bp, Glycine max
  Clone ID: PAT_MRT3847_74604C.1
cgagcaagctgcattctacagataatgcctgccactggggattgagatcatctgaagatgaactcaacaggtttatatatagaactctataccgcttacctactcagatcaagcctatatcttaaggaaatctgatcctccaaccaaatgcactggt

SEQ ID NO: 114723 - DNA, 115 bp, Glycine max
  Clone ID: PAT_MRT3847_74605C.1
aaacagggaacataaaggtgataactcaagcgaccaaaacaattttcaacatacatgttcctgaaatggaggaacattttgcacaaacattaatgatgatgaacaatacctggaa

SEQ ID NO: 114724 - DNA, 250 bp, Glycine max
  unsure (1)..(250): unsure at all n locations
  Clone ID: PAT_MRT3847_74606C.1
gatggacataaattaaaagcaccaaatgctgttaattaatttatttataattaaagatttattnaaaaaaacaaaaaaaaaaaaatgttgtaggggggtaagagttattatagnaaagagtaaagtgaatactaattgaaaaaaccgccctcataatcgaaaacaaagaaccatacccgacctaattcccacacaaaatctactaagaaaacaccccccaaaagaaagaccaaaagcccgtattaacaaa

SEQ ID NO: 114725 - DNA, 426 bp, Glycine max
  Clone ID: PAT_MRT3847_74607C.1
attctctttgcgcagttccctacctctcctttcaagatgcagatcttcgtcaagaccgtgaccggaaagaccatcacccttgaggtggaaagctctgacaccatcgacaacgtcaaggccaagatccaagacaaggaaggaattcccccggatcagcaacgtcttattttcgccggaaagcaacttgaggaccggcgtacccttggcgactaccacattcagaaggaatcaacccttcaccttggccttcggcttcgtggtggcattcaaatcttcgtcaagaattttaatggcgaaaccattacccttgaaggctaaaggtctgacaccattggacaacgtcaaggccaagatccaggacaaggaaggaatccccccagaccagcaacgtctaatcttcgccggaaagcaacttgaggacgggcg

SEQ ID NO: 114726 - DNA, 402 bp, Glycine max
  Clone ID: PAT_MRT3847_74608C.1
gcaatgtgtaagcaatttcagtattttcaatcttcagtccttgatatcccaactcccttgcttgttgcagagacaccagagtgtgatcagggtgaattcttgctccaaaaagagtttcttacaaattacaagaatatgtgctcttatccaacaagggcatctgaaactttgacccatgaatttcctgttaagttcatgaacatcttggatcctttaagaaatgacaacaacctaggtcgtagtgtgagcatagccagtctacatcgattaagatttgcttttgcctacagcgctcaaaagcttaagcaaatcttcacacttcctggagaaaacatgggtgcagcactagagaagtttttcttcagcactttggaaaggaatggaaaaggagaaagggcagat

SEQ ID NO: 114727 - DNA, 320 bp, Glycine max
  Clone ID: PAT_MRT3847_74609C.1
cgtcgagctcaccaatcggtcagaactatcaagttaaatggagacctctcatggtttttcaatcttgatggaagccgcgaactggccctcacccggaatggagggcacataggataccggacagcagactctcgaagcatggacaggcataccgcctaagacttggcccattcttgagagcccccgtcctacctcactggcaagttcccaggtgactacaagatggtacactgctgggattttggccgacccagaaaccttattcagaaaccgcgagctcaaagggatccactccaggtgggccatgctaggggccttgg

SEQ ID NO: 114728 - DNA, 351 bp, Glycine max
  Clone ID: PAT_MRT3847_7460C.1
caaaaatgaagcggtttatcccaaaaacctaatttttacaggtgcttaatacccagggaaattttcatttcagggaaagataaaaacttgtcccaaaataaaaaattttggggggggtctttatttggcctttcaggcagaacaccacttttgggttgcctctggtgcctccggaaccaaaatttgaatgtgttctaatattctttgtttaacacctacggcaagattgtccctgggaagaaccatttcctggggttcatgaaatgccccccaagggataatgctacaataacaaactacatgaatgggcattaaaaagctctctttggggggttcaaagtttttggcact

SEQ ID NO: 114729 - DNA, 470 bp, Glycine max
  Clone ID: PAT_MRT3847_74610C.1
actgagcatcgtctagctatctcgatcgaactgtccaaggatcctgtcaccttagtgcctcaaacgttaaccgcgtatctaaaattagtagtagaatcttaaatttaatttaatttaatataatataatattattgttgagtatagaagaataattggaattggaattggaaattttttaaggggtagcgtgatccagtttcgcaggtccagttttaataaaaaacgaaattgtcgagggcggaggggtcgtccagttccggcccaatgtgtaccatgtcctcgctgtctaggctacttataacccgtataatgttacaattgctttgaatcgccccgggaagtgtggctcccgttgaggaatcgatcgcgtcagttgcaacagtgttcgtagccctaattgaatttatgatgtgccggttcgcgtcctttcgtgttagcgtccggcaagaattcccggtatttcccaca

SEQ ID NO: 114730 - DNA, 247 bp, Glycine max
  Clone ID: PAT_MRT3847_74611C.1
gggttgcactgggggaaccgaaaaaacgttccttaacggtattacaccaacaaggggttggattaaaaaaaatcataccgtggctttacttttcaaaggccggcccaaaaaaagggttgttgaaacccgtggcccaatataataccacccttaaaggttccacaaaaagggttaattttttacccctttgttttactttaaaaatctttttgaaatctcccctcttgtgccaaaaaaaaataccttc

SEQ ID NO: 114731 - DNA, 3245 bp, Glycine max
  unsure (1)..(3245): unsure at all n locations
  Clone ID: PAT_MRT3847_74612C.1
gaagngggcaccagttcaattatatccatccttatcgctttgattagttgatttttaaatttttgacgacctcaatcataagaagaatcaattcttgtagctttgattcgttttcttttaattagatttgcaaacactactgaaaccgaaaccctaaacccttgtgaataagacgaatttgttctttcctttgattagataagaaagagttagatttagattcagttcgtttacgcttttatttgttgtcttctaattagatttgggagtataagtgaaaccctaggtcttatgggaagttagtgaattttgttgaagaagaagaagaaaatgtctgtggaaaggtcgtttgaggcatgggaagaggtgcagcgtcacgggcaggacctggctgaccggcttgcccagggtttcagcggtttgattcatacgcatatgagccctccgcagttcgcgtggccgaaccctccgacatcgaagctcttcgatctggagttcccttcgcagagctttgggaagagggatttcgctttggcgacccaggagtatgggattaatggcgtgtccgccattttcaatattgggaaccggatcgggcaggccggggcggatttcggtgccagcttgaacgggctggttcagcggctttagcggtcggtggtttgattcatacgcataggagccctccacagttcgcggagggtggccctccgacatcgaagctgtccgatctggagttcccttcgcggtgctttgggaagagggatttcgctttggcgacccaggagtatgggattaatggcgtgtccgccattttcaatattgggaaccggatcggtcatgccggtgcggatttcggtgccagcttgaacgggctggttcagcagtttttccggtcgttgccggtgccggtgccattcaagcacgaggagagttctgtgagggtggagggtggcgaataggtgaggcagaccagtgacatcttatcaaagagcgtctcagtactctcgttaactctattctattgcttctcttcttacacaaattccattcctagagagagagagaagcaacaacatcataatcggaatttgattgaattcgatttgggtgatgagcgcgtgaaaaaagaagaagaggaagaagatggcagggaagaaaggggtggcggcagaagacgcaataagggccattggtttaggttacgatctcacaaacgatctcaagctcaaattctgcaagaaccactccagattgatcgctatcgacgatgacaaccttcgaactgtcgaactccctcctcgtatttctatccctaatgtccccaaatccatcaagtgcgataaaggtgaccgcatgagattgtgctccgatgtcctctcttttcagcagatgtgtgagcagttcaactaagacttgtcactgtctggtaagattccaatgggctatttcaaccctgcatttgggtttataggagtttggcaaaaagatgctgccaataccaagacccttgcttttgatggtgtatccatcacactctacgaaattgcatttggggaaacccatgtagttctgcatgatcaagtcaaacaagctgttccttcgtcctgggatccagctgcattgaccagattcattgagaactatggaactcatgttatagttggggtgaaaatgggaggaactgatataatctatgcaaagcaacagtactcatctactgtcccacctgctgaagtacagaaaaaattaaaggacatggcagaagaatacttcatggacaaggcagaactgtataacagtattggtgggaggtttaatgcaaaggaaaagtttatgaaggacaatgtgctgattttcatggatattcatgcccgttgctactatgaagcagaggcgaagggtatcaaattcatgtgcaggactaaaggtggaaatgggaatctattcctttgggatcctttgttgtcccaaactggtctgactctgcctgataggatataaatgtcatttgtatctagtatatccctacttgtttgaataaatgggagtggatatttaactcatgccatgaatctctatttaagctataaaccaggaattgaagaactgcatcaatttttggagttccagcttccaaggcaatgggcccctgtatttggtgagcttgcccttggtcctgaaaggaagccacaaaatactgcttctttacagttcagtttcatgggtcccaagctctatgtaaacacaacaccggttgatgtgggaaagaagcccgtgacaggccttcgattgtatttggaaggaaagagaagcaactgcttggcaatccatttacagcacctctcttccctgcccaaaactttccaactccaggatgagcctaacgggaatgcgtctaatgactcttcagaacgcaagtactatgagaaggtccagtggaagagtttctctcacgtttgcacagctcctgttgattcagatgatgacaatgctgtcgtgactggtgctcactttgaagttggagatactggccttaagaaagttctattcctaagacttcatttctgtaaagttgttggtgcaacccgtgtgaaagtacccgaatgggagggttctcctggcttgacccagaaatctggaataatctcaacattgatcagcactaccttctcaggtccacaaaagccaccaccaccacggccatctgatgtaaacatcaactctgctttataccctggggggcctcctgtgcctactcagtcacccaaacttctaaggtttgttgacacaactgaaatgacaagaggacctcaagattctcctggctactgggttgtgtctggggcaaggcttttggtggagaaggctaaaatatcacttaaagtaaaatattctcttttgactgtgatacctgatgaagagggggcaagtttttgaaattatcaaatgagggtcgttggaagataatctcatcaggtaaagttcaatgagataggcgtgtgtatatataatattctctgattctgatctctttgtacatttgccattaccattatttgtgtatacctgcactgcggacacttttggggaattccttattgtagttttggaaaaggcttgtgtagtcatgcccgttacatttttttactgtatgtttgaatgttctcttatgttagtgaccacttctatgcagtagttccatttaaattttactctcaagacaatgagagaatattcatttt

SEQ ID NO: 114732 - DNA, 287 bp, Glycine max
  unsure (1)..(287): unsure at all n locations
  Clone ID: PAT_MRT3847_74613C.1
catccataatatctantccatgtaatggagactttgcggttntctcgaacactgagagaacaaatgcacccatcgataatccangttatatgggagnncaangaacacatagcagatgggttgacgcatntgatttacntatctagagagangaggccanaacagcctcatcattacaaagccggngccatnaatgtgttgacaagagtctccggattgataaccaatnctcacctttangctgaacntggantgnggcangcntgtngataatccacanntgttca

SEQ ID NO: 114733 - DNA, 597 bp, Glycine max
  Clone ID: PAT_MRT3847_74614C.1
gacgacagagagagaaaaatggaagaagacctggacggcgtcgctccgtgctcctccctcgccgtcgaggctatgattcgtgtcggagcggccggtgcaatctggggcttgtgtgctggtccttacgacgctcgtcaacagggtcttagaggctctgctaaagcttcttttgtggcaaagtcggttggcaggtttgggactcgatgcgggtttgtagctggcgttttcagtattacgcgatgcggggttcagaggtaccgagggcggaatgattgggtcaatggtttgattgggggtgctgtagcaggtgcagctgctgctgctgctgctgggacacgaagttggtcacaggtgatagggatggccggtttggtttctgttttctgtgctgcagctgactattccagaacatcttaaaatacatctgtgtttagtgtaatcttaattttggttttatttgtactttgtccaatttaattcctccttgtactctgatagaaaattcgtgcagtttgaaaaattcaataaatttgttatttagatcggagctaatgtctacaaaaaaatatatgaaaaaaaccctcacatttttttgcc

SEQ ID NO: 114734 - DNA, 372 bp, Glycine max
  Clone ID: PAT_MRT3847_74615C.1
tggaacttgacatagtaccatttgattcatgttccaaagagtaccaaaatctttatgaagagtggttcaattatgcagatgcagatggggatggtcgttttacgggaaatgaagccatcaaattctttgccatgtcaaacttatctcgacaagaacttaagcaggtatgggccattgcagattcaaaacgagaaggatatcttggtttcaaagaatttgtcattgctatgcagcttgtttctttaggacaatgtggatactcaataacacacgatttgctaactagtgatgctatgagacatgcaaaaccacccacaatggatggtttggatgtattgcttacaaagaaaaaacgtaaacaaaaagataaag

SEQ ID NO: 114735 - DNA, 456 bp, Glycine max
  Clone ID: PAT_MRT3847_74616C.1
tcgatctatcgcgtagccaatgtaccagatgccgtacaccggtgcaaggtgatgtaatgaaaaagacttgcaatgaaaagcctgagctggtggtgtaggttatgcggttgagtagttaggggatgaggtttaagagtaactctaataatcggtgtattttaatttccaagtgctgatccttactgtccacataattggttattcatctcacaagtgcgtgtttgtagaattgttcgttagctcaactctcgcaactgtgatcatctcaatttagttagttgttatctctggtaacatatctcttgctaacgggttagtagccgttttaatcattgtagtggcaatagtgttatcaattaaatttgcgttcattacgcccgtgttcataatcgtcgatttgattatttttctatttgtagttctgattgttgtcgtcctaatcaacgtattactatt

SEQ ID NO: 114736 - DNA, 600 bp, Glycine max
  unsure (1)..(600): unsure at all n locations
  Clone ID: PAT_MRT3847_74617C.1
ttccaacccgcacacagttcaagagtttcaatgcctcgagttatgaagataatcttgatctttgtggacagccacttgagaaattttgtattgctgggagacctacacaattaccgaatgttgaagctcaagcagccgtattttcactttttattcttgaatttttcattatcatggcttgtgattttgctgtaagcttttgggtggtgtttggctcaaatttattcaagctttcgtagagacttttttatttcaagttcttgaacaatctatcacacaatatttatgtcaaggtagcaatatttgctaataaaatatcaaaggtgcatggctgaagcttaaccagtaccttgaagacactagccctcttggatcggaaaactccaatgtctaagcttgttaatgcttggaaaaggcaattagttggaagttatgattgctttagattttttcactgtcaattgagatacttataccatgttttgataatttgaaaaagactagtttaattagtgttgtgctattgaaatgaaatataactcatcatgtattatatcaataaaaaaaaaaaaaangggcggccgctcgcggatctagaac

SEQ ID NO: 114737 - DNA, 573 bp, Glycine max
  Clone ID: PAT_MRT3847_74618C.1
ctctcaaccccttgtctctctcaaaacctacttggccgctgcacatccactctctcttgctgtctcgctgaagacaaaggctcgctcacgtgagcagttctgttcagatccacataggcaaagcaaaccaaatcaagcatcatgttccttccttatctctgtctctgcatttccctccctaaaaccctaattctacatatggaaaggaaatccatcaatcaagtatggagtccgaactcaaagaccttaattcaaagccaccgaactataatgacaacgccaacagcgttttcgacgaccatcttctgctgaagttggagcctccggcctctgccgatagcattgctgagatggagaagaagtatgccgccgtgatgtgtacgacaccatgggatgcaacgagtttccgaaaaaggagaagctctagctcagcttttcattggtcactctcctccccattcgattcgttctcaccatcaccatattgctcttctattacttaatttggaggatttgcactgctttctctgcttcgacccgcgaggaagaacagaaagattacgctcacatagt

SEQ ID NO: 114738 - DNA, 474 bp, Glycine max
  Clone ID: PAT_MRT3847_74619C.1
aagctcgaaattcgctcgagtatagcttcctcttctttcatcacagtttgaaaaaagaaaaaccagaaaagaattccaaggtttctattttttgaggcaacaatgggtttgacggtgtcacggctattgaagattgttttatgcaaggaaagaaatgaggattctgatggtgggtcttgatgctgctgggaaaacaacaatactctacaaactgaaacttggagaaatcgtcactacaatacccacaataggcttcaatgtggagactgttgagtacaaaaatgtcagcttcaccgtctgggatgttggaggacaggacaagattcgaccattgtggagacactacttccagaatacacaaggtcttatctttgtggtagataggaacgatagggaaagaattttagaagccagggatgagttacatagaatggtgagtgaggatgaacttcgtgacgctacagtattggtatt

SEQ ID NO: 114739 - DNA, 394 bp, Glycine max
  Clone ID: PAT_MRT3847_7461C.1
gggggggggaacattttgattttaaaaccgggcaaaaacaaaataaataaattaaggggcctccaaaacaaccttttaaactttttttttttcaccccccccactttaaaaaaaactttgcctttttaaaaaaaaacaaaagggggcaaaggggggacccggagggcttgaaaaacctccggaaacccccccaaaaaaaattggaaaaacccaaaaacgggggaattcccaacaaaccctaagaaaacagggcccaagagtttgcaagggccaccccagggggggggaaaaaaaaaaacccacaaccgggaaatttcttggggggctttaaaaagggcctccccttggcccatggaggggaaaacaagggggtgggaaccggaaaacccctttt

SEQ ID NO: 114740 - DNA, 472 bp, Glycine max
  Clone ID: PAT_MRT3847_74620C.1
ctcatgtaccatatgcttcgggctccactgaacttcacttagcttttgcctatcaatctcttttgattcctcgctctctactcgtttatgctccttgcattgtttctcagacacatcttttaagcttcctgattggtcagccttaggtactttcttttcagtttttccatgcaagtggaccattcttgctttctcactcttttcaagctcaaagatttcggccatttcctcattcttcacatgctctctctgcctgcattcctcgttagatgatttagatttcctaatgttttttccctgttcacaagccccatttcctgctttcgatttcttcttgctttcctccagctgataaccttctacaacttctttaacattcctgtattcttcttaatgttaaatgtttctcgctttttcttgccacacttaatgggtctggtatcttgaccaaactcttagtattactatggtt

SEQ ID NO: 114741 - DNA, 187 bp, Glycine max
  Clone ID: PAT_MRT3847_74621C.1
gggtggcggtgaaacaaaaaaggagaacatatgctcccgtccggtgatggatcgttactactctcgcatcaccctggacttccacacaaacaaaaagcttgtcgaagaagtggccatcatccctaacaggaggctgggtaacaatatcgcgggtcgcttcccgcatctgatcaagcgcatccataag

SEQ ID NO: 114742 - DNA, 238 bp, Glycine max
  Clone ID: PAT_MRT3847_74622C.1
tgtgagatttgccacatgttgatgagggaaccatgcatggaatgaaaagtcatgattgtcatatattcatagagtgtttacttcctattgcttttagctcattgccgccacatgtcttaaatccacttaatgaaataagtcatttcttcaaagatttgtgttctacatctttgatgaaggatgacttgagtagaatggaacaaaatattcatttattttgtgcaatttggcgggaata

SEQ ID NO: 114743 - DNA, 361 bp, Glycine max
  Clone ID: PAT_MRT3847_74623C.1
cccactcgtccgcccacgcgtccggatagatcaatgtttgtttttttttaactatctatgtactacaatacactgactccaaagggtgaagataatctaccatggaaccaacttccgttgctcttgccatggaatggagcattcaactcgaaatgggtctgcggtctaccaaacctggtgttcctgtcaaagccatatcagaaatggagcctcgccttcagcgatggagtagagagcctgaatttggcattgctccctatgccatgtttggtcttgttccaggtgaagataaggtatttgccaataccattctcttgcgccttgctgatgcttttaggggaggtgacataagagaccaaaa

SEQ ID NO: 114744 - DNA, 135 bp, Glycine max
  Clone ID: PAT_MRT3847_74624C.1
attcgttctcgcacttcgttgactcaggtcctggatccccggtgactctgctcgattgtatcgtcctatgaggcagaatggatcttgaagggcatagttaggtaccatcgatagcgggaggttggtacatgtagc

SEQ ID NO: 114745 - DNA, 400 bp, Glycine max
  Clone ID: PAT_MRT3847_74625C.1
gtagcacaaacatactcccgcgaacaccagggtgaaagtgatctttttgatcatctatttgagctgttaaactcttccatccataatgacgaaagtttcccaaaggagttagcatcctgcacaggagctctgcagacgtctgttagtcaacacatggctaaggaagaggagcaggtatttccactgcttcttgagaagttctctcttgaggaacaggcatctttagtttggcagtttctctgcagtattcctgtgaatatgatgacagaatttcttccatggctttcaacatctatatcacctgatgaatcgcaggatttgcggaagtgcttaagcaagatagtgccagaggaaaagcttcttcaaaaggttgttttcacctggatggaagggggaagta

SEQ ID NO: 114746 - DNA, 423 bp, Glycine max
  Clone ID: PAT_MRT3847_74626C.1
gggggcaagggccataaaaataataaaaatacccaaaaaaaaatgaaacgggggagtaacaaagctgggggaaacccacctcccgaaccttctaaaaacaggggacaaagcaaacatgtgggataccttgggggcaaaaaatttgttcccttttaagccaacaaaaaaaattgcccctcaactaacaaaacctaatacccccaaattaaaatggcccttaggggaataaaattctcataaaaacttttttgccctggcccttttttttttatttgcttttaaaatttaaggtatggggggaaagggccccacttggccattaaaactttaaaaaaccccccaaaggggatctggccattacccgaaaaattgggcccaaggattattttattcacccccttgggcggaaattttttcccaaaa

SEQ ID NO: 114747 - DNA, 1407 bp, Glycine max
  Clone ID: PAT_MRT3847_74627C.1
attgcgacgtttttatgggtaccacgcgtttgtaagaaaggtaagaagtactcaaaaacctaattcggtgcatccggtgagaacacgagaatctccgattcgcgatgtatcagtggaggaagttcgagttcttcgaggagaagtacggcgcgaagtgcgcggttcccgagaacgacgaagacgacgggcgtcgtcgcggcggagaggaagatcgagtgctgctcgagtggtaggggcaaacttgtcaccggcttcgacgacggcgtcgtttgcttcttcgatcggggcctcaagttcaactactctttccagcctcactcttcttccgttctttttcttcagcaactcaagcaacgcaactttctggtaacaattggggaggatgaacagcttactccccagcaatcagctttgtgcctcaaggtttttgaccttgacaagatgcaatcggagagttcgagcacgacaagtcctgattgcgttgggatattgcgaatattcactaatcagtttcctgaggcaaagattacatcatttttggttttagaagaagtgccacctatactactcatagctattggcttggacagtggttctatttactgcatcaaaggagacattgcacgggagcgtatcactcgtttcaagcttcaggtggaaaacaaccattcggacaaaactctttctgctgtaactggacttgggtttagggtggatggtcaatctctacagttatttgttgtgactccaagttcagtgagcttgttttcattgcatgatcaaccgccgagaaggcagacccttgatcagattggatctggtgtgaacagtgttgcaatgagtgatcgctctgagttggtaattggtcgaccagaggcagtatatttttatgaagttgatgggcgtggtccttgttgggcttttgagggagagaagaaattgcttggatggttccgtggataccttttgtgtgttattgcagatcaaagaacaggaaagcatactttcaacatctatgacctgaagaatcgattaatagcccacagtgcattggttaaagaagtttcttatatgctttatgaatggggtaacatcatactcgtaatgaatgattaatcagctttatgtattggagaaaaggatatggaaagtaagttagacatgttattcaagaaaaacctatttactgtagcaattaatcttgtccagactcagcaagcagatgcagcagctacagctgaagtgctaatgaaatatggggatcatctgtatagcaagcaagactatgatgaagcaatggctcagtacatacatactattggtcacctggaaccttcttatgttatacagaagtttgttgatgctcagaagatctacactctcacaaactacttagacacgctacat

SEQ ID NO: 114748 - DNA, 529 bp, Glycine max
  unsure (1)..(529): unsure at all n locations
  Clone ID: PAT_MRT3847_74628C.1
tttgggttttttggatgaagtcgtattaaaggattctgattataatgaagttgatagagctgaatgtcaatttgctactacggcaaccgttcttgacaacgacacacatggtatgccttttcaaccaccagaggccagtataaatagtttctttgattctatcgaaagcatatggaataaaatatggagaagcttaacagaatttatcactggaaaaacttgtaggtattatcttcaactatacttttcatttgcaagttataaaatttaaattccaacatttaaaatatagaaaatatgattttcttgaaattttgtatattttattcatggggaatattgagttgctttgatcagtatatgaatatatatttctttatcaacaccacccatatgttttgaaattctacttatcaaacacggatgagtagcactggcttctgtgaacaattggaatgcattntacttttcatgaaggcaatcattcgaatattctgtcattaataacataaaggattaaaactaggat

SEQ ID NO: 114749 - DNA, 349 bp, Glycine max
  Clone ID: PAT_MRT3847_74629C.1
ggtaaaacaaaagtttaagattttttttttcttttcttttcttagtttgcgatcttctaattttcaacgctctccactttctctattctttgatgggtcatctccaattacggtttttgtctttggtctttgcttcatttcctgttctgaattctaggttattatactctccaattgttgtattttcaagaaaaaaaatggcataatcatccaaagaaagaaagcatgctgctttggagaacttattcatgtttgtgttctttctttaaagtttgttaaatttaatgcagaacaagaatccatgttattttttatgcagagaacaagaatctatgtatttgaattcaaa

SEQ ID NO: 114750 - DNA, 329 bp, Glycine max
  Clone ID: PAT_MRT3847_7462C.1
gggaaaaacccctcttttattcaacaaggggtttttttcccaaaaaagggcccttctttttaaaaccctaaagcaatgcttatttaatggcccccaaccctccctgttcataaaatccaaaccttttttaacattcgttggtggggggacaatttctttttaaaatccccccacccttaattaataaattttataagtttctaaatgatggccccccccatcaaacaaaaaaccacttctttaaccccaaggccagggggggggtggaatcatcatcattgaaaactttccaagcaatggcccgctcataaaacaccgggcgatttata

SEQ ID NO: 114751 - DNA, 203 bp, Glycine max
  Clone ID: PAT_MRT3847_74630C.1
gttctcgcagaaattggagagggagggagctggtgccaggggctgagaaaggttatcgctcgtgattgtgacagaggttctaatgagttttttttttttttttttgtcttgtcccttttccttatactgatatattgtggttctgcttataatgctttcagagggtaattcaggtgttgccatagcccataggtgattattag

SEQ ID NO: 114752 - DNA, 250 bp, Glycine max
  Clone ID: PAT_MRT3847_74631C.1
gattgtgagacagattggtgaagcattgagggccaagttggatcctttgggtagactggtgtctcttgagatgggaaaaattctcccagatggaattggggaagttcaggaaattattgatatgtgtgattattgtgttgggctaagcatacatttgaatggctcttatttctcatcataacgctcagatcatttgatgtacgttgtatggaacccactaggaatacttggtgaaattactgtatataat

SEQ ID NO: 114753 - DNA, 802 bp, Glycine max
  Clone ID: PAT_MRT3847_74632C.1
cccacgcgtccgcccacgcgtccggagactggttccaagcacatcatttattattattcttctatatagttttatataagaaagagggtatcaaagccatatcatatcagaaaacacaaaggaataatatattgcgggggtgtttgtttctcatatggggtctcgctctgcttctccatagggattacatttattaccattcttttgttagctatcactaccatacggaatgttggtcaccctcatacactccctaaggtagcagcatttaattaacactactactactactttgatcactactgctcagctttcatcatggaaaggctccaaggacccctcaattcctgtttctttggagaccctttggaagtgaattgtttggaccaagttctggtggatgaagaaagcctgagactagaagaggaagagcagtttctgatatcaagcttagaggacaacatgccgttccttcagatgcttcagagtgtggaatccccacagtttttccctttgaaagagccaaactttcaaacacttctgaggctgcagcacatgaagaagccatgggagggaatagcctacattccaagaatggaagcacaagtgcaagcagcattggagctagagagttgtgtgacacatgacatgttggagatgcagtcaccagtgaagtcagaaagcaatgaactccaacacccactttcaatttcatgttttgagaaagtgaactatgagtgcaaccaggaaccacagaaagtttcacaaacatgccccaaatctcagccagcagcaacaatgg

SEQ ID NO: 114754 - DNA, 766 bp, Glycine max
  Clone ID: PAT_MRT3847_74633C.1
actgcattgattcatgcagtgcaagtcatgactttcctcaagacattgattctgaagacccttcgagaaagagatgaatcaattgccaaggcaagacagctgtcatcactcttagattctccctcttgcaaaggtgattcccatcctttggaagttaataacaaggaggaatcttgtgaagaggaaactgaagagacctgtagcacaaagccacctgtgaaaagcaagttctcaaggacttctaccttgggaagaatagaatggtgtattgaagagaaactttggagatctgaggaaaagggaaatggagttggggaattggaatctgtttcggatagtagctcaccttcaaggtatgagaatggtccattagagaataggtatagaggtatatatgacagtgaacattgggtgaaattgagaaatggagtgcgcaggctgtgcagacaccctgtatttcaattgagcaagcccactaagaagcgtgcaagtcttggtattgtaaatactagggaaggaggtggagaggcttgggcctaaaacaactactgcatgcatgaatgcatgctttagttttatatatggcttgtatgattgaaatgtatagatgcttgcttgagattgtatgaagcatagctttagttgtaattgatgcttggtctcttagtagaatacaagttctgagaggtttcaaggagtttatagttccaatgactagtcctataaaagattttgttggatcaagtatttagtattttaccactat

SEQ ID NO: 114755 - DNA, 485 bp, Glycine max
  Clone ID: PAT_MRT3847_74634C.1
cgcttgctgcattactcttgctggattatgggtttatagctgctaattcttaaatatttgcagtacagaaaatatcagagttgacaacgaactctccacacagtcctccactaccaaattcctctcacatacgtggcatggcaaactttgaagagtttgggtttcattttggttcttttgcctcggtccaatgccagtccatattcatttgcctgatagcctccacagttgataggtcctcacgatcactcgtctctcgatacaccaatgtgaccaattcaagtccattagtcacaacactaacaaacaggaaaaattacacgagacaacaaaagtaactgagaagaacaatcgcacttctcaatactctttttgcaaccaaccccaaaaaatgaaagcttaatcattcgttatttattatacgtgatgaagctttcaagtggcaggtgaaacaagaacaaattcaatcaaggatcttcctcgat

SEQ ID NO: 114756 - DNA, 165 bp, Glycine max
  Clone ID: PAT_MRT3847_74635C.1
ccaccccccctcaaattattaaaacctgtgtttttattacatttatttattcttctccaaaaattgaacacaccttttaaaattatgtatacattctttaaggttttactgaaaaccatccagggcttactgtaaaataatccacccagcgctataaaataaaat

SEQ ID NO: 114757 - DNA, 232 bp, Glycine max
  Clone ID: PAT_MRT3847_74636C.1
acgggcgacattgttgctatttctctcttaaacttgaaaccttcgctaaagttatctccttctacaggctctgggtgtatcaccaaacgagctacccatggggccgcgttacatggatctcccacctcggtctcagggggtgccacattctcatcctctttcgggtctcgttttgaagacaccatcacgaagaccgtaaatgagaactcactggacacgcattccataacct

SEQ ID NO: 114758 - DNA, 219 bp, Glycine max
  Clone ID: PAT_MRT3847_74637C.1
ttgagggatggagcaaatgagggaggttgagagctgaaaatacaaagacactattgcctgtggaactattagctacactgcctatggaatactcgcaaacgacagacatgcttgccatgaccctacaccagcaactgaaggtacttaggatgaatcgctaagcaatgggacagccggagctatggaccgaaatgtttatggctatttcaccctagcaaa

SEQ ID NO: 114759 - DNA, 873 bp, Glycine max
  unsure (1)..(873): unsure at all n locations
  Clone ID: PAT_MRT3847_74638C.1
atcagctacatggatatgaagccttacatcacagaattgactggactcattgctcatgaattagatgttaatagttcacaggttcacttaatgaattttctttctcttggaaatggttctctctctaaatgggtcataacaccgaggccatatgctgatttcttttctaatgctactgcaatgagtatgatgccgnggctttctgaacatcgtatgcaacttcctaactcagttggaagttataagttagttgattggaatgccgagcctccattgaaacggacttggtggcagcaatattatttggttgtggctttagctgttttgcttacattcgttctaggaatatcaaccttaggaatattcttaatttggaaaaaaagacagcaagctgagcactcatacaagcccacgcgtccggctgttcaagagcaggaacttcagccattatgagcttcgtttgtactactctactgcttaatggtttgatgattagtgtggctggcatattcgagtccatcaatgcaagagcaatatacacaatcatatagacatacaaccgatcaagattttggtttctaagaaatcgagttgtttgtcatgatataatgaaaccctcatagatgtatataaagaattctttagaagttgtatcatttgcaaacgcaattttgttttgtggttattgcaatatagcagtgaaccaaaaggggggtagctttaggttgaactaaaatttcgtatagggtaatgtttatatttttatttagttattgcttttcacttggtttattttcttatttttctgttcacgttttttctaacttgagagtgttattattgtatgtggttcaatgaaattaatccttactc

SEQ ID NO: 114760 - DNA, 677 bp, Glycine max
  Clone ID: PAT_MRT3847_74639C.1
ataatcttctttgggtggcccaacttaaagttgtgaaagccaactattgtaccagacaatttccacctaacaccaagaatttcaagagaaccctctgccctgggagtaactgatagttgaatcatggttgtttcaccacctcctagtaagaaatcaacatcagacaccataaatgaggaactgtcagagctcatattcccaaagtggtcaacctcattatctttctccacacttgactcattctcatctgatctaacatcatcagtactggcagaatacttgcatacaagtgtaacaccagatatgggaattgagatttgtagaggatttttaaattcgatattcaccgtcacagcttcgcctacaacacaaacattggattgactgtgcttctttgggataagctttgattgcaactccaaccaatttgtcttggcagcagagaatgatggtagcatttcctcctccaaagaacgccacaagccttctctagtattagcagctgaaggtgttccaaaagttcggtaatcttcgaagatgaccttgagtgaagagatgttgattacaggcaattgaagttttgttacctcaaacatccgtccagttttctccacaatttgaagaaagtcgcccaggaataattcctgtgttgtcttggactggtgactacaggccag

SEQ ID NO: 114761 - DNA, 599 bp, Glycine max
  Clone ID: PAT_MRT3847_7463C.1
caaagtcccttcatttattgatttcacaaaatcaaatctcgcagtaccaacaatactgccacccctaaagcactgacaactcttcttcttcacacttctctttcagatctacacaacacacaccaaaaaataaataaaatgcaactccaactcacactctccagtctcttcctctcccttttgttaacaataacattaacatctccaaccttggcagcacaaagcaagccgcaggatctggtccggtcctcgtgcgtgcacgcgcggtacccgcgtctgtgcctgcacaccctctccaactatccgggctccgccaacacgccattagacgtggcccggacagcgctgaaggtgagcctagcgcacacacgccgggcctccaagttcctgcacgcgctttctcatgacgattcaatcatcatgagaaagcgtgagcgctccgcgctgcgagactgcacggagcagatctcggactctattgatcagcttcggcggagtctcgacgagctgcagcatctccgctcggagacattccggtggcagatgagcaacgccctgacgtgggtcagcgccgccctcaccgatggcgacacctgcct

SEQ ID NO: 114762 - DNA, 317 bp, Glycine max
  Clone ID: PAT_MRT3847_74640C.1
tctcattgtattgattgatatgcaaaagattcaaatcttacattaagcttaagggttgtttgggtaagcttcattagaagtatttctaattgatagagcctattctagagccgatacgtaattaacaactagcaagcattcctaatgagcatactaaccgactaatacaaccatcataactagtcgtatcgatcactatttattgttaaaattaacacacttatcggatgagaatgtacaactatttagaataatttatttagaacaggtcgataagcacagaatgtatcctctatctggtggcagacattaccata

SEQ ID NO: 114763 - DNA, 351 bp, Glycine max
  Clone ID: PAT_MRT3847_74641C.1
aaagtaaaactgatttctgattaactaagagtgtgaaattgattgcatagtcattaaactcctaatccatccaacttaatttcgctttacattaccaaaacctgcaaacacataaacctattggaattaaccaacatattgcatgtgtagcaatggaaacagtatccggtttaagacattagtcttcggtctaagccacggagtggttttgacctgtcgtcggaactggaccggtctagaagggacttgagcgagctctgaaggaagcggatggatgcaatgctgtgttctttgacagcagcgacgatgagaacgttgggagttcttcctgccagaggtgccatttgagct

SEQ ID NO: 114764 - DNA, 237 bp, Glycine max
  Clone ID: PAT_MRT3847_74642C.1
gagttggtcaccgatcagagctgattgtcgtgtcggtgatcagtcatcggagaggctatcgaaaatcgtgttccgatgactataaaagctgttaaaggcagtaacgtttccttgtgatgcaactgtacatgacagtaaggatggctgttcattggctggtgatagtgaatatgtgggaagtacagagccattatgaacgatcgcagattgcttttaggaccgtgtaagattcacagg

SEQ ID NO: 114765 - DNA, 1746 bp, Glycine max
  Clone ID: PAT_MRT3847_74643C.1
ggctcgagctttccttaactcaacccaacacaacacaacataaattaaataaataaataaaattaaactaagctaaattcctttctctctctttctttctcttcgagggtttgggtttctcttcctccctggaagaaaaagaagagtcaccgctacgacgccgttcgtgcttttttgaggtgccacagtcatgtttgggcgtggtggaccaaggaggagtgacaactccaaatattatgatattctcggggtttccaaaaatgccagtgaagatgaaatcaagaaggcctatagaaaggctgctatgaagaaccatccagataagggaggagatcctgaaaagttcaaggagttaggtcaagcatatgaagttttaagtgatcctgagaagaaagacctgtatgaccagtatggtgaagatgcccttaaagaaggaatggggggaggaggctcgtttcataatccatttgatatatttgaatcattttttggtggagcaagctttggtggtggtggtagttcccgaggtagaagacagaagcatggtgaagatgtggtgcattctttaaaggtttccttggaggacgtctataacggcacaacaaagaaactatctctttctagaaacgtattctgctcaaaatgtaaagggaaaggttcaaaaagtggaacagctggtaggtgttttggatgccaaggcactggtatgaaaattacaagaaggcagattggactaggcatgattcaacaaatgcaacatgtctgtcctgactgcagaggatctggtgaggtcattaacgagagagataaatgtcctcagtgcaaaggaaacaaaatttcccaggaaaagaaggtgctggaagtgcatgttgagaagggtatgcagcagggtcagaagattgtttttgaaggacaagctgatgaagctcctgacacaatcacaggagatattgtttttgtattgcaagtaaaggatcacccaaggttcagaagggaacaagatgacctctttattgatcaaaatctcagcttaactgaggcactctgtggctttcagtttgccgtcaaacatcttgatggtaggcaactattgatcaaatcaaatcctggggaagtcatcaagccaggtcaatataaagcattaaatgatgagggaatgccacaacacaataggccattcatgaagggtcgcctttacatccaatttaatgttgatttccccgactcagggtttctttcccctgaccaatgccagttattggaaaaggtgttgcctcagaagagcagcaagcacgtctcagatatggagctggatgattgtgaggagaccactttgcatgatgtcaactttaaggaggagatgagacgaaagcagcaacagcaacaccgcgaggcatacgacgaagatgatgatgagccatctggtcaccgagtgcaatgtgctcaacagtagtgcaatttatggtagtagaggttctataatttctgcttggtttatcttttgtttggataatgcagttataactgcgtgataaatttacctttaggttttggctggtaatgttatttagtttacagttcttggcagatttcaagtatatgaaaattgaatgctttggtataaggcgcgcaataatgattgcatatcccagttgcatgcctcctgcactactatttggttcttaaacttttggggtaaatccttcaaaatatattctcaaattaaattcattttattggaggaat

SEQ ID NO: 114766 - DNA, 1945 bp, Glycine max
  Clone ID: PAT_MRT3847_74644C.1
ggctcgagctttccatatcaaccccatacgaacaacatatttcataattaaaataaataaataaaattaaactaagctaaattcctttctctctctttctttctcttcgagggtttgggtttctcttcctccctggaagagaaagaagagtcaccgctaaaacccctttcgtgttttttttctctttcctgaatcaaacacaacaacacaacacaggataagtgaattaacttcaaaactatctaaattcctctctctcgctctttctcttcgagggtttgggtttctcttcctcccttggagaaaaagaagagccaccgctgcgacgccgttcgtgcatttttgaggtgccgctgtcatgtttgggcgtggtggaccaaggaggagtgataactccaaatattatgatattctcgggatttccaaaaatgccagtgaagatgaaatcaagaaggcctatagaaaggcggctatgaagaaccatccagataagggaggagatcctgaaaagtttaaggagttaggtcaagcatatgaagttttaagtgatcctgagaagaaagaactgtatgaccagtatggtgaagatgcccttaaagaagggatggggggaggaggctcgtttcataatccatttgatatatttgaatcattttttggaggagcaagctttggtggtggtggtagttcccgaggtagaagacagaagcatggtgaagatgtggtgcattctttaaaggtttccttggaggacgtttataatggcacaacaaagaaactatctctttctagaaacatattatgcccaaaatgtaaagggaaaggttcaaaaagtggaactgctggtaggtgttttggatgcaaaggcactggtatgaaaattacaagaaggcagattggactaggcatgattcaacaaatgcaacatgtctgtcctgactgcagaggatctggtgaggtcattaacgagagagataaatgtcctctgtgcaaaggaaacaaggtttcccaggaaaagaaggtgctggaagtgcatgttgagaagggcatgcagcagggtcagaagattgtttttgaaggacaagctgatgaagctcctgacacaatcacaggagacattgtttttgtattgcaagtaaaggatcacccaaagttcagaagggagcaggatgacctctatattgatcacaatctcagcttaaccgaggcactctgtggcttccagtttgctgtcaaacatcttgatggtaggcaactattgatcaaatcaaaccctggggaagtcatcaaaccaggtcaatataaagcaataaatgatgagggaatgccacaacacaataggccattcatgaagggtcgcctttacatccagtttaatgttgatttcccagactcagggtttctttcccctgaccaatgccagttactggaaaaggtgttacctcaaaagagcagcaagcatgtgtcagacatggagctggatgattgtgaggagaccactttgcatgatgtcaactttaaggaggagatgagacgaaagcagcaacagcaatatcgcgaggcatatgatgaagatgatgatgagccatctggtcaacgagtgcaatgtgctcaacagtagtgcaatttatggtagtagaggttctataatttctgcatggtttttatcttttgtttgcataatgcagttataactgcgtgataaatttaccctttaggttttggctggtaacgttatttagtcttggcagatttctaaagtctgttttttgttgtaatatatgaaaattaaatgttttggtacaaggcgcgcaataacgattgcatatcccagtttcatacctcctgtactatttggttcttagctttggggtaaacgtaaatccttcaaaaaatattctcaaaaaaaaaaaaaaaaaaaaaaaaaaaaaaaaaaaaaaaaaaa

SEQ ID NO: 114767 - DNA, 464 bp, Glycine max
  Clone ID: PAT_MRT3847_74645C.1
tacggctgcgagaagacgacagaagggcggtgttatctcctttaacacattgcattgcacttgatcttgggagcaagagctaatcaaattgtgctcacagtcttcctttgtatttgaacccattccctttcacctataacagtcatttttcatcttctaaagctagatcacgaccttgctacactaaaagtctaaaccaacaacaatataatacaaaaaaacacaataccacttgagtcagttaggattatgaattgaagacaaagtaagagagcatcaattgtaaacccatgtcacacgaacaaaattataacaggttaactttccataattttttgattgacaagctgaggagagtctgtttacaggtcgcattcccaagacagaaaaacatgaaagaacaactaaaaacaaacttaatcttattgaactccttagggtgttgagtcaaggacaacattact

SEQ ID NO: 114768 - DNA, 191 bp, Glycine max
  Clone ID: PAT_MRT3847_74646C.1
ttataacccaagtgggggcaccaaggtgatggaacaaaactttggattaattaggttgggttggtggctgcaccatgctggcctgcccgctccaagttgagagttgaaccatggggtctgagcgaaggcacaggtttcctggtaaaaaaaaaaaaaaaaaaaaaaaaaaaaaaaaaaaaaaaaaaaaaaaa

SEQ ID NO: 114769 - DNA, 326 bp, Glycine max
  Clone ID: PAT_MRT3847_74647C.1
actcgtcttaacacaacatatctacttaccgagccggcccttttttagcggccccgttttatacactccgcggccacctatatctatgccgaccattaagttgtgaaaaaggtgaacgaggctctgcatagatgcgagtacatcctcaataatctaggtttgatctctcccaatttgaccaaataagatactaacaccacaaatctcaaattcattctgtttctattatatttaaccgagctcacagaaataatatctcaagatgacatacatacatattctaactacttaaaagcaaaacattactgattgtatctcattttgtg

SEQ ID NO: 114770 - DNA, 146 bp, Glycine max
  unsure (1)..(146): unsure at all n locations
  Clone ID: PAT_MRT3847_74648C.1
gagatagcgtctcttnatctagaccggttcgtantctaangtagtccgtagaattgngcgcgcngttgcaccttanaattgcgttgaggcggaaattgacagtntccgctaatcncntcttgtctcnacgttgtnntcactncagg

SEQ ID NO: 114771 - DNA, 236 bp, Glycine max
  Clone ID: PAT_MRT3847_74649C.1
ccggaacggaagggccgacccacgcgaccggccacacgtgctctcacgcgtccgcagaagtttcggctacaggtagagaagatgaagttaaatccagggtgtgttgagcagacgccggacgaacccaaaggctcattttacggcaccattgatcgtgcagtgggagcttatgagcgcccctttgtcagcggagatggggacttagtacaacatgtgggcgaaaccactaccgaggg

SEQ ID NO: 114772 - DNA, 482 bp, Glycine max
  Clone ID: PAT_MRT3847_7464C.1
ataaattttatatggctttatagtcatcaaatttaatcaaaattgtttattaaatccctttaattacaacatgtttatcattatttgtttgcttcgttacaactcgtccaattgtataaacattcgattcgtattcttgaagtaattttttgactcttatttcattatcagatgaaactactaacaccattccaattccacaattaaatgttcggaataattcatctgatggtatatttccattttctttcaaccatttaaatacttttggtaattcccaaacgcttgaatctatgacaactccaagatttttaggcaaaattctcggtatgttatctataaaccctccacccgtaatatgtgccattgcctttacaagtctctccttaacaacaggtagcaattgtttaacataaatttttgttggtgtgagaaggctttcgcccaatgaaattgttggatcccatggacacgatgattta

SEQ ID NO: 114773 - DNA, 336 bp, Glycine max
  Clone ID: PAT_MRT3847_74650C.1
gcgagctcaccgggcggtttttttaaggaaaacacacactttacacattacactaactgctataagaactgcgacatatggcatcctgcttgcacaaaagcgatgactatgtaatttaatccaaacccgtgtgctgatgcatggagctcgacatttatgaagcgtaccggatttcattgcgatatcatatgtgtcactggatggactgccaccccaatgcaggatgttcaggctacaactgattggtttattccctctcaagaatgtgttcccaggacctattgtgctgtgaatccacaaaatccttttgtgataaacagggggatgggaaaactg

SEQ ID NO: 114774 - DNA, 520 bp, Glycine max
  Clone ID: PAT_MRT3847_74651C.1
gccacgcatgccaaaagaacagagaaaagggaagcaaatgaaaccaccgctaccacttttatcattgctccggcatttcctgctcgtatcaccaccaccattggaagcaaaagagaggctctgctgaaaagggtctgtgtggaaaccttcgacatgatgatgacaagagtggatgggtcccatgaaagtgttaactacgtgggacttggaacaaacaatggcaaagcataagaaagaaaagaaagtctgacacaaacaggctccacttgcacactcctctattattgagggactcacttctcaaactcagatactcatatgatagtggtcgtataggtcaatggaagaacaaagggaaggatctaaataacacattaaggataagtgcagaagcgaaaagagaaagacatgtgactgaaaaaagatgtatgccggaggggcttaaggtttgtacgggaaagagtcaaatgttgcaaactttcttaatgatctctaacggcctaggattatttgggtcata

SEQ ID NO: 114775 - DNA, 749 bp, Glycine max
  Clone ID: PAT_MRT3847_74652C.1
aaagtgaatgaatttttttataaaaaaaatgcaaaataaaaaattataagttatatagaattaggaactaaagtaaataatggctacattcttaggaaccggggtacaggtttacttgaaagaaatgggagaaattttattacaccaattgtcatatcttagttctactcattcaataaataaaatgggtgacgatttacttctctcatcaggtacaaaaatgagttaaataagtacagtctgagtatgtgcagcagagataaccaataagttttactagcaaagaattcaaactgcgctaaaacttaatattaactaggaagatcatgcaaataactgagatgtcgtcaacaaattagcctatatatttgaggacctgagccaaagaaaaaaaacactgatgtcataagatgattctcagctagcgaacatgttttctgattgagaatttcagagccacatttatatggctttggtgcttctctcacccaaaactgaatccagtaagcaacagttggaagcaacagttgattatgtacatgaatctgaagaatgcaaatccattattgtcagatgaaccatcaaaaatgaacttgatgtcatctttccccaccgtcatcttcttgatcctcaaactgattttcttctttaatgttcacttctgcatcaccttcgtgattttcagcattttgtttaaagaataactcggatacagaatcatcctcgtcgacatcctcttcattttcctt

SEQ ID NO: 114776 - DNA, 235 bp, Glycine max
  Clone ID: PAT_MRT3847_74653C.1
gttgccacacatgttcatttatttgccttcacgctgaaacaagctacaacaacacctgtttcaaaccatatccaaaggaaacaactcccagtttaaaagaacaacaacaacacctgtttggtttggtgggtgggcttcaagttttgattttgttcacctttttctgggtttgattggcaaggtagagacaagggacaaggtagggctgattggtggaaaggttatggctttttgg

SEQ ID NO: 114777 - DNA, 609 bp, Glycine max
  Clone ID: PAT_MRT3847_74654C.1
tttccttccctcttaattattttttttagagtacaattgtatatgcactaaaaagaatcacaactccacaattaggaaggcaagatcagaagcaagctcaaatggcataggaagaataagtagtgtggttattcctcaagtatattagattgctttgtgaaattattcagctaggctgctaaggagccttctgaaaacacgagaaacagattatgaatcatcctgttaaatcatgaatatattttggcaacttgtcactgcaccagcaatgctattattgctatagtagtttttaaaggaatacatgatatcatggagtgccccgtaacttgcaatgcaagtgatacctgccaatttgaatgtgttccgttctcacagtgaagggcatcttgctgctgggtcttccacatgcatcatttggatgcttctattctagtctttggcagtccgaaatcagatctttcttcacaaggatgacctcggcagagaatgaaattcttcgtactcaagatcagacacctctctgctgccgcctccgctgggtgcaaccactttgctttcagcatttgtggtgcctttgctaacatgttccttgactgtatcagtagc

SEQ ID NO: 114778 - DNA, 253 bp, Glycine max
  unsure (1)..(253): unsure at all n locations
  Clone ID: PAT_MRT3847_74655C.1
caacaacttctgctanttcctactccaaccgcacttctgctccgnaattatcatgggcaaggtcaanatcggaatcaacggatttggaagnattngccgttnggtanccagagtggctctgcanngagncgatgttgaactcgttgccgttaacgaccctttcatcatcaccgattacatgacatacatgtttaaatacgacagtnttcntggacactggaagtntcacgatgtcaccgttaaggncgagnag

SEQ ID NO: 114779 - DNA, 417 bp, Glycine max
  unsure (1)..(417): unsure at all n locations
  Clone ID: PAT_MRT3847_74656C.1
cccacgcgtccggcaacagaagctcagccagattcgggttaacactgacagcaccgagagggcaaccagctcgattttctgccttatacctgcgacggttgccaacagatcttatgttcgtaacacagatcctacaagtacgacgcgtgcctgaaatgcgaccacaacagcgtacaggatggtgattgcgaagcatgatccatgtccatcgataccaccggacatgtgtgacacgaccaggaggcaatcttgcagaatcacctcaagtctcggaagtgagaccctaccaagaagcngaaaccaatttgtcccgtcaagcggttcaaggaggatttgacggttttcaacaccattacatgtaaaacttgccacattaatgtgagcctcaggcatcgttttcatgatgatcatgcctgt

SEQ ID NO: 114780 - DNA, 368 bp, Glycine max
  Clone ID: PAT_MRT3847_74657C.1
ttgattgaatcatttatatatataaaagatattttcttgtaaatatcatgcaccctgtctctgactctgttgcatatttttatctatttcgctgaacatgaagactacgttcttagttgtaaagggttatctagtgtggaaataatgatcagtgacataagacttgcaagttgcaatagaagatgggggggtttgtttttgaaatgcaatataaattccaagcttaccactgctcaagagtgaagttagacccttccatgtgaaggctgagcgtatcactgctggccaaaatggagcaacaaagcgagaccaatcttctgacttgatgtcctgaagtgacagggattggagcaacttaacataatcag

SEQ ID NO: 114781 - DNA, 345 bp, Glycine max
  Clone ID: PAT_MRT3847_74658C.1
tttttctttttgaattccatccttcccttttaagataaaaaaaaaaaaaaaaaaaaaaaaaaaaaaaaaaaaaaaaaaaaggtgaaaaaaaaaaaaaaaaaaaaaaaaaaaaaaaaaaaaaaaaaaaaaacctcgagggggggcccgaaaccaaattcgccaaaaagaaaaccaaataacgcgcgatcattggccgccttttaaaaatgccggaatgggaaaaacccgggagtaaccaaattaaaacgccttgaaccaaatccccctttcccaagttgggaaaaaaaaaaaaaagccccaaccaatcgcccttccaaaaatttgggaagcctaaatggaaaatgg

SEQ ID NO: 114782 - DNA, 450 bp, Glycine max
  Clone ID: PAT_MRT3847_74659C.1
gatcctcctttttacaccacaacgttttatgtttgatcttctttctatcacaacgccctcctaaaacccaaagaagggatgaataatttttacgcgacccggtttttaaaaaccgttggggagaaaaggtatttaaatgcgtgcctaaaaagacgaaggccctatttttgggccacagaaaaaaactttttttggggggaaaattttaccccctcctgaactcctcgggttcaaatcccctcccccaagggcaaaaaaaagctcggcctccagggggccctcgcggaaaaatttttaaccttctgaggttacaaattctttcttaaaagtaaattttttttataaaaaccccacgctttaaaaatagtaaaaaagttcccaaaacttggttgaattttggcccaggccggggtgctataaaaaaacttgatcacccctccccctgttttg

SEQ ID NO: 114783 - DNA, 535 bp, Glycine max
  Clone ID: PAT_MRT3847_7465C.1
cttttttttttttttttttttttttttttttttttttttttttttttttttttttttttttttttttttttttttttttaaaaaaacggaaaataaaatatcaatagtaaaaggggaaaatggggcctcatcccaaaatataacattaaaaaacccaaatggaagggggtcccaaacaaaatttaagaaaagggagggggcggacaaaaaaactaaaattcacttttgcaaaacaaagggtacccaaaagtctattttttccaaattaaaagaccgactaaaaacttgtggcggtatccaaaagggcttttccaggttcacaatgggccaagggcccatggcccccaaaaagctttgcattcaccccatggggcacaattttgttttttgacttgaacttgaaaaaaacaaaacggctaaacttggggaacccccatttccggcaaacaaaaatcttttgacaaccagggaacttgaacttggcccgggaaaaaaccccctaaacaaaagggctgttgctgcccttgcaggggac

SEQ ID NO: 114784 - DNA, 345 bp, Glycine max
  unsure (1)..(345): unsure at all n locations
  Clone ID: PAT_MRT3847_74660C.1
ttggcttcnctggccgcccacgcgaccggaaaaacaggattctaattgaaagcagacaacgcacggaagcccaaagagangagcgcggcacaaaaccaccgggagcacaaacccacggccggaancacaccgacagcgacacaaaacccagggcccccaaacgcgcaaccgaggcggacacaccngacaacacacacaagnagggccaacccacgccacccacaaaacacacgaccgcacaaacaagccacccgaacaaagccaanagcagaaacagcgcgaagcgaaaaaagacccacacaggcacccacgctcaaccacaagggcaacgagaacgagccagaa

SEQ ID NO: 114785 - DNA, 405 bp, Glycine max
  Clone ID: PAT_MRT3847_74661C.1
gggttggaaaaaattacctggacatttttattggattccacttttccttttttggttttgtgaccaccgtattaccggatgcagaactgtcatgccgggaaaaggatcagagacaaatcaagggaaactgggaggaaaaaattttccttttttatttgaacctccaaggtctggggctctttgaaaattctgcaattagcctcctgtaacaatcaaggctagcaagaaatgcttgggggcccctttagaaacccctctaactttctggggcaaagaaaccccattttgactttgggaccgtgcccttatggctttcatatcaatatgaaggcgagttccctcgaccctagtaagcgatttcgtaagcttcttgggcacatcaattcctaatggtgcattcaaaac

SEQ ID NO: 114786 - DNA, 555 bp, Glycine max
  Clone ID: PAT_MRT3847_74662C.1
cagaaattttgcagtctgtccaattttttaaattcttactcaaccctacataactagcttgtgaggtgaggactgcccaagctttataagctctatttaagccatatctctagtcaatgtgggaccaaaccaccacccttgaggctgcaattatggcagccccaaagaagccgcaactaaggcagttgtccaacacccttcgtgctcagtgctataagtatggagcgtgtggcaaatgcaggtggcccaacaatggatcttggataggctttgataccaagttgaaaggaaaagaactgtatattaattttgtattgcattctctaattctcacttttatagggtaaacaactatgactataaaaggaaataaataaatactgtacaagagaatgttttacattggttctgcatatcatccatatatagagactattgatagacttgatgtctagacttactgtacaatctcttgctaattggttctgaacaacaatgatatttcttttcaagctcaaattttgttgctatctaactcattaatgttaattggtg

SEQ ID NO: 114787 - DNA, 272 bp, Glycine max
  Clone ID: PAT_MRT3847_74663C.1
tggttgctagcgtcgacaacggcgacggccacgggtgctcttaagcgaccacggacgcgtggtcaaccagcgcaaccgctgcctattgagcaacctcggacgaccggccgtgctggataaggtcaccctaacacgccccgtaaccgcaagagagctcagcacagaaggctgcatgatcgccaccgctgccagtacgcgggtccagatctggagctcgccggagtatccgtggccggagaatcccttggagactgcggggaccacactggact

SEQ ID NO: 114788 - DNA, 252 bp, Glycine max
  Clone ID: PAT_MRT3847_74664C.1
agggttccccctgctatggccctacccaatggagatgatatgcaacatgacaggattttaaattgcttcagttcaaacaaaatgtttgatagtgataaccgtgcccttaaacaagatacttatctcgtggatgaacatattgaggaagaagctgatggaacttcaaactaccctaagaactatcatcttgttcgtgagactgcagcaatggcagcacttcttctccaaagacaggccattgcctcaatgcaa

SEQ ID NO: 114789 - DNA, 296 bp, Glycine max
  Clone ID: PAT_MRT3847_74665C.1
gcgaatacgacagaacggcttagtgatctattttatatatttatatatacatatctcagaggaaaggatattgacggagctgttttccaaaacaatgttactacccattcaccatcgatattacacatccccatctcacacataataatcatgtttcaaccatatattttaccttgaacggacaccagacaatgcatgcttgcttgactctacatcgagtccctgtcctgcgctattttaccttactctctggctttccatcaccaagcacattctttcccctttttcttccctat

SEQ ID NO: 114790 - DNA, 165 bp, Glycine max
  Clone ID: PAT_MRT3847_74666C.1
acaagaagaagcgaaacgcgcaaattgagagaagatgagtagtgacggctccaagtactgctccatcatctagatgtgtgaaatccctgaactcacgttagagatcccttcgcagtacatcgttaggagcaaagatgctgtatcaaatgtgattgccgcaatgac

SEQ ID NO: 114791 - DNA, 376 bp, Glycine max
  Clone ID: PAT_MRT3847_74667C.1
aaaaaataattttttttttaaaaaaggattattaggcccccccaaaagggagtgtttggatctctctttctgggcgatctctcccaaaaattttcccatgacctagtatgaatatcattccccggtattgaattaagtttttccaccctacccaacccccatgctgttcaacacgcgagttgctaatgacatctttcttgcatacccacaccgttacgtttcagaacagacactgaaatggctcacttgcactcaaaatgatcctattgtattaccgttcataaacatcttggctgaacagactgcttttgcgaaccgagcatcgtgatctactggaacgggccgcaactgggcccctgattggagccacgcccat

SEQ ID NO: 114792 - DNA, 907 bp, Glycine max
  Clone ID: PAT_MRT3847_74668C.1
gagacctaacctataaagataaccagtggcaaaaagccgtttgattttattcagaagctatcaaacggcgtggtgactttgcagccatagtatggttgcatggctcaaacctatctaggacttggaagtgatcttcaagctgtggaagattgtacaaaagcaattagtcttgacaaaaaggtaactttcttcatggaacgttatgcttatgaggctatatattttgacatcatacccagaaaaaaatatttgttctttgtaataacataaacaatgtgaaggcctattttcgtaaaggtacagctaaaaaaatgctaggttactacaaggaagcaattgatgattttaaacatgcccttgtacttgagccaaccaacaaaagggcagcttcagctgctgaaaggttgaggaagctattccagtagatacataattgttgcacgagatatcctatataatggctgcaaaatgctattcgttggtgctggtgacctatacacactcagacgattaatgagtttctagttacaataattacttacgtaagagtaatccgacatgtgatttctgcagaatgataatgattcttttgtacttggaggcaatggcaatttttagacgtgggaagcatgtattgtaccaacctttcttcaggttttctgtgacaaaagttaattgttattgccagaatgagtcccaattttgcttgaggtaaatatattcggattgtaatgtcagtcaagtgaggcggttctttatgactatagctcggtattcaactgtttttcttttaaagtagattgtacttcacagttttataatctgtgcctagtggaagtacttcatttgttaatgcttaaagtcaagtgaggcgcatgctcatgactttagctgtgcattttttttt

SEQ ID NO: 114793 - DNA, 661 bp, Glycine max
  Clone ID: PAT_MRT3847_74669C.1
ggctcgaggagttgcccaagtgggaagaagatcccaatttttactctaagcctagatataagcaaatagttaaagaccttgcagacaaatatcatactgagaacttgctgcttgtcacacacggggaaggtgttggggtggctctttcttcattcaaaaaggatgttacagtgtacgaagttgattactgtggatacgtccaacttagacgcccaattttcaagaaagaccagtcatttactgcaggagaatctgaagttcttaatcacaatggtcaaactggcgtaaatttcatcccaaattaatggccatcttcatgtcttaggcctgattctcactactactctactctggctacttcatatttgagtcctccaaagtccaaatgactcctctattgtgaatgcttgattgagtaggaaaatttaaacaccattattcttcaatcataggatatttgattttccttgattaaatagtaaacataggaggaaaataaatagtactatagctttattcttctgcttaattcagaataagttaaaagatacattactctatgcatttactgaaattttggtatatgatagaactcaatggtgaagaatgatctgtgtaggcaattctacttatgagaaaaggcttggtttgttattgttat

SEQ ID NO: 114794 - DNA, 589 bp, Glycine max
  Clone ID: PAT_MRT3847_7466C.1
gttttaatccccttagtgttgtgttgagatggcacagctggcaggtgcggatgagatagagtctctgagaaatgagttagcagagataggaaggaacataaggtcctcatttagaagtcatgcctctagtttccagagagtttcaagcatcaatcctgtgcaacaagaagttgataacgacgccggagaagcgttacaatgggctgaaattcagaggctacccacctttgagagaattacttcagctttgtttgatgtttatgatggcatggaaacaggttgttgatgtcagaaagcttggagctcaagaacggcacacgttcatagagaagcttattaaacacattgagaatgataaccttcgattgctgcagaaattcaggaaaagaattgacaaagttggtattaatttgcccacagtggaactgaggtaccaaaatctgtctgtggaagctgagtgtaaaatagtccaaggcaagcccatacctacactgtggaataccctaaaagaatggatctttgacaccactaaattgtcagttctgaaatctcaaaattccaagataagcatcatcaaaaatgacaatgg

SEQ ID NO: 114795 - DNA, 405 bp, Glycine max
  Clone ID: PAT_MRT3847_74670C.1
cggaaatgaaagtatgaaatagcataacaacaggtcagggagcgggttttcttcttccaccccttctaatttctctcttctctgaagctatcaggttttctatctatccatctcttgcctgccgctatttatttacgcctctttaattgtccgttctacaaacagatgctaattaattccctgtcacagctattgttgttttttgaaattgttgtttgcaattctgattaatatggtattggtatctctagagattggttattgctctcatcatatagctttactccatttggattctgtttaaggtttatttgttcgacaaccgtgggtttgacgctaatgtttgcactcatttgtcgatgcctatgatcggaagatttggattcctctaatctaatctaatct

SEQ ID NO: 114796 - DNA, 1573 bp, Glycine max
  Clone ID: PAT_MRT3847_74671C.1
agcatgtgcaacaatataaggttagaccaaaaagacataggattaataagtaaaataaataagatcaaccaacccaatcaaaatcaacgttcgaatgcaacaaaatccaaatccgttctcaataaaattttgtcgactttaacaaaacaaaaatatatctccttcaaaaaacggggaaaaaagaaaggaagtgagagctcagcgcttcttggacacaccaacagttttacccctacgaccagtggtcttggtatgctggccacgtacacgaagaccccagtagtgtctcaaaccacgatggttcctgattttcttgagtctctcgagatcatccctgagcttcatatcaagagcattagacacaacttgagagtatttgccatccttgtaatccttctttctgttcaaaaaccagtttgggatcttgaactgcctagggttcgccaccacagtcatcacactgtccaactcagcagcagtcaactcaccagcccttttgttcatgtcaacatcagccttcttgcaagcgatgttggcgaatctccttccaatacccttgatggaggtcattgcgaacattatcttctgcttcccatccacgttggtgttcagcacacgcagaatgtgctggaaatcctcgttcgccaccagagacattttctgacgaggaagtgttgttgttggagggttacgccgccgacgatgctgttgtagctggctgattgaggatctgaaactctaatatagtgcgactgcgctagggttaacaaaattatatctccttcaaaaaacggggaaaaagaaaggaagtgagagctcagcgcttattggacacatcaacagttttacccctacgaccagtggtcttggtatgctggccacgtacacgaagaccccagtagtgtctcaaaccacgatggttcctgattttcttgagtctctcgagatcatccctgagcttcatatcaagagcattagactcaacttgagagtatttgccatccttgtaatccttctttctgttcaaagggttcgccaccacagtcatcacactgtccaactcagcagcactcaactcaccagcccttttgttcatgtcaacatcagccttcttgcaagcgatgttggcgaatctccttccaatacccttgatggaggtcattgcgaacattatcttcggctaaccagtttgggatcttgaactgcatatcccatccacgttggtgttcagcacacgcagaatgtgctggaaatcctcgttcgccaccagagacattttctgacgaggaagtgtgttgtggagggtacgcgccttcttgcaagcgatgttggcgaatctccttccaatacccttgatggaggtcacagcgaacattatcttctgcttcccatccacgttggtgttcagcacacgcagaatgtgctggaaatcctcgttcgccaccagagacatttttcgccgcggaagtgttgttgtcggagagtgactgtcgccgccgatgctgttggtgctggccgattgaggatctgaaattctagggtttgggattgagttgataatatatccccttct

SEQ ID NO: 114797 - DNA, 1194 bp, Glycine max
  unsure (1)..(1194): unsure at all n locations
  Clone ID: PAT_MRT3847_74672C.1
cggctcgagggggcctcaaaccacggtggtttctgatctgtggtagtctctctaagtcatccctgagcttcatatcaagagcattagacacaacctgagagtactttccatccttgtaatccttcttcctgttcaaaaaccaccgtggtttgaggcactactggggccttcgtgtccgtggtcagcacaccaagactactggccgcaggggaaagactgttggggtctctaagaagcgttaagctattatgttttggcttggatattagattttgtttaggaggcatgtttgaagtacactacatgttttgcatcataccaactttgtatccgttgttaaatggcttgacaatttcaattttgtttgttatttgcatctgagattccgattagttaaatgatgttggttttcttagttgtagagaaccttgaatagtatttttgaaattacgaattcagtttgatcccggaagaaaaaaatcggctcgaggaaatctgaacaaattataatgcagccatattcagttggctgctacagctttgcctataacaggaactcaagcagcacccaagaaagttacaaaggatgaactaggtaatgtagcaggaattgcagcaactgcaacagctagtggggggaaatttgacaagaaattggcaggtgaaaagcctcagaaacatgaaggaaaatatcggaagtttctgccagtagtggaaggaaccgggataggatcactggagagggagcaaactgagaaaatattgaacaagatcatctccaagaattctcataacatactgaacgttgaaaaggctgtcacaatgcacaatgtgaagaaagagaagaaacgaatgagcgagaaagggaaggctttagcttcagcaactgacaagatattgaaaactcaaaaaaagtcttttaaaaagggagattccaataaaggcaaggccaaaggaaaataatttatattttacaaaaaaagttttgtggggttcttggacactctatntactggtttcatgttttgtagacgataatttcattttattatgtatcaattcgtcatccattttttattctgccactctttctatattttaattccaccctctattaaattgacaactctttctttttgagtaaacaactaccttttgttttataggcccgccatcagggcatatttccttccg

SEQ ID NO: 114798 - DNA, 1021 bp, Glycine max
  Clone ID: PAT_MRT3847_74673C.1
gtcgttgttttctatataaaagggactcgatcccaaaaccctaggtttcagatccttaatcggccaggaccaaacagcatccgcggcagcgacggtgaccctccaacaacaacacttccgctgcgaaaaatgtctctggtggcgaacgaggatttccagcacattctgcgtgtgctgaacaccaacgtggatgggaagcagaagataatgttcgcaatgacctccatcaagggtattggaaggagattcgccaacatcgcttgcaagaaggctgatgttgacatgaacaaaagggctggtgagttgactgctgctgagttggatagtgtgatgactgtggtggcgaaccctaggcagttcaagatcccagactggtttttgaacagaaagaaggattacaaggatggcaaatactctcaagttgtgtctaatgctcttgatatgaagctcagggatgatcttgagagactcaagaaaatcagaaacccccgtggtttgaggcattactggggccttcgtgtccgtggtcagcacaccaagactactggccgtaggggaaagactgttggtgtctctaagaagcgttaagctattatgtttggcttggagattagattttgttgagaaggaaagtttgaagtacactagacatgttttgcatcataccaactttgtatccgtcgttaaatggcttgacaatttcaattttgtttgttatttgcatcaagattcagtttagttaaatgatgtgttggttttcttagttgtagagaaccctgaatagtattattgaaatattacgaattcagtttgatcctggaagggaaatctcgccttttccaatactatattagtaaataaattaggagacaaattgaatttggatgtggtttagtccgtagtttttacattcggaaatgctgttgcttgatcacggtagatgttgaaaaactatatcccaactctaatggctagagaaatgttaaatgttagcaatgctttttttttttctattttagtt

SEQ ID NO: 114799 - DNA, 3608 bp, Glycine max
  Clone ID: PAT_MRT3847_74674C.1
agctccatacccttttcaaatttgtgagcatccttgataagcttggctgtgatgagaatgtaaggtgcagatcttgccacaaagaaggtgacccaattcagaaaccactctaacctaacaagaatgctctttgcatcccgaacaccggccattcgtctgacttttctcacatgaagaaagatggaatgcagctcacagataagagtgagaataaggtagttgatggtaacatttcgatacaaagcaagagtgaagcaaataagtagaaccagatgatgcacaaggatagatgggatccaaccattatataatcggtaacgaagcatatcccactgatcatatgcaaagtaaccacatgaaaagctcaacgcttcaaatgcccaatgaccaagcatcttcgaccaactgtgagtggtcagacattccacttggcccattacttaaccttacaactctctgaacaagatgaagatcactgaggaggaggtgaggagagagtgaatatcccgctaataatatgttaaggtgtttcccttccaggatcaaactgaattcgaaatatttcaataataacttataatcaagaagagatgcaattaataagaaatagacaagaacaagcaagccaaaccaattcattttacttatttctctaatttcttcattctcctcaaaaacattacgacgctttgaacccgatattgaccttgtacgttgttatagtttggtaaagatggaggtggagggagcgaaacgcttcttggatacaccaaaacttttacccctacgacgagtggtattgctatgctggctcacgtacacgaagatcccagtacgtgtctcacaccatcgatggtttgtgattttcttgagtctctccagatcttccctctgcttcatatacaatagcattagtcacaacttgcagagtatttgccatccttgtaatccttctttctgctcaaaaaccagtatgggatcttgaactgcctagggttcgccaccacagtcatcacactgtccaactcagcagcagtcaactcggaccagccccattttgtttacatgtcaacatcagcccttcttgcaagcgatgttggcgaatctccttccaatacccatgatggaggtcatagcgaacattaaattctgcctcccatccacgttggtgttcagcacacgcagaatgtgctggaaatcctcgttcgccaccggagacattttctgacgaggaattgttgttgttggaggcttccggcaacaaactgaattcgtaatttcaaaaatactattcaaggttctctacaactaagaaaaccaacatcatttaactaatctgaatctcagatgcaaataacaaacaaaattgaaattgtcaagccatttaacgacggatacaaagttggtatgatgcaaaacatgtagtgtacttcaaacatgcctcctaaacaaaatctaatctccaagccaaaacataatagcttaacgcttcttagagaccccaacagtctttcccctgcggccagtagtcttggtgtgctgaccacggacacgaaggccccagtagtgcctcaaaccacggtggtttctgatcttctttagtctctctaaatcatccctgagcttcatatcaagagcattagacacaacctgagagtactttccatccttgtaatccttcttcctgttcaaaaaccaatccgggatcttgaattgcctagggttcgccaccacagtcatcacactatccaactctgcagcactcaactcaccagcccttttgttcatgtcaacatcggccttcttgcaagcgatgttggcgaatctccttccaatacccttgatggaggtcatagcgaacattatcttctgcttcccatccacgttggtgttcagcacacgcagaatgtgctggaaatcctcgttcgccaccagagacatttttcgccgcggaagtgttgttgtcggagagtgactgtcgccgccgatgctgttggtgctggccgattgagggtctcggattcccagccttcttgcaagcgatgttggcgaatctccttccaatacccttgatggaggtcattgcgaacattatcttctgcttcccctgtcgtctggtgtcagccgcacattgaagggtctacccacgcgcgtaattcggctcgagggaaaccctagattgcagaggaaacggtgcaaaataagcccaacaacaaaagacaactaacgaggaaacaacgttactttcttcattatcgtgcaacatagcacaaaacccttaagccgttaagcaccttcaacgccgccgtagtttgttattggtttggtttgatggagatggagggtgagaaacagcacaagtttgatgtggacctcggcaacctcatggctttcgattcctatcacaccttcccttctcaaccatctctttccagggaggacctcatcaaacagtgtttactgaaaggcactcacttggttcaagctatcgcagatgccctctttatcttaccatcgaccgaagatttggatggaccccttgtcaccttgcctcccccactcactaaattgcctagagaaaaacatctgccaaaaccaaagcctcctactaaatgggaagcttttgccaaaaagaaaggcatacagaaacggaagaaagacaaaattgtatatgacgagcagtctggaacctggaaacgcagacatgggtatgatcgtgcaaatgatgaagatgctattcctatcattgaggcaaaaccaactgatgatccagaagaggatccttttgccaaaagaaaagaaaataagaagaatagaattgaaaaacaggagaaaaatcgattacagaacttgaaagaagctgcaaaatttggtgctttaccaagccatattcagttggctgctacagctttgcctataacaggaactcaagcagcacccaagaaagttacaaaggatgaactaggtaatgtagcaggaattgcagcaactgcaacagctagtggggggaaatttgacaagaaattggcaggtgaaaagcctcagaaacatgaaggaaaatatcggaagtttctgccagtagtggaaggaaccgggataggatcactggagagggagcaaactgagaaaatattgaacaagatcatctccaagaattctcataacatactgaacgttgaaaaggctgtcacaatgcacaatgtgaagaaagagaagaaacgaaggagcgagaaagggaaggctttagcttcagctactgacaagaaattgaaaactcagaaaaagtcttttaaaaagggaagctccaagaaaggcaaggcgaaaggaaaatagtttagattttataagaaaaagttttgtagagttcttggaaactctgtttactggtttcaatttttgtagacgataatttcatgtatcaatcgccatcccttttttatttaccaaaaaacgcctgtagacgataacttcattttatcatgcatcaatcgtcacccagttttatttgtcatctatatataggtaatgcagctgtactaattaacgatttttttttgagcaaaaaacttcttttggtttacagcacgcagcaggcatattcactccga

SEQ ID NO: 114800 - DNA, 631 bp, Glycine max
  Clone ID: PAT_MRT3847_74675C.1
gacaataataaaatgttgggtttgtaaccaaacagagaatctctgaaatggtccaaatgaccacacaccacttctctatttgtccgccaccacttcctcgatcaccagtgccactcctcctcctctctgcgctcccaacgctgcaataacacgctcactctctttcttcattcttctcttccctttcgcgccaactctgatcggtgttccttccctccttctgcctcctcctcccgcctcagatgcagactctccctcccttctcttgcatcagaggctccccatggattttcctcccgccctcaatctccttaccgaattcggttgcggcttcgtccttctccgctccctctcccgcatcttcaatcttctaggcctctttctgatgctcacattctgcttcaaggttatgtgcttcggttggaactccaagaacgcccttcgcttcctctgcgactccggcggcgtccccagaatccgcttctgcctcgacaaagtcgttttggaaaaagtctccaaagcgaagaccaaacctttgaaaaaaccacgccaccccacttcgagctcttccttacggaggcgccccggtgggtccggtgagagagggaacgcagcttccgatgatgggtcg

SEQ ID NO: 114801 - DNA, 457 bp, Glycine max
  unsure (1)..(457): unsure at all n locations
  Clone ID: PAT_MRT3847_74676C.1
cagggctgagggagggggcggggacaaatggctcaggtggactccgggctggagctgtcctgggggagcttgtttgcggcagcggctgctgctgccactgctgtgctgggggcccggtcgccaggcaaaaagccctcccacgtttgaggggagtcatgagccgtttcctgaatgtgttaagaagttggctggttatggtgtccatcatagccatggggaacacgctgcagagcttccgagaccacacttttctctatgaaaagctctacactggcaagccaaaccttgtgaatggcctccaagctcggacctttgggatctggacgctgctctcatcagtgattcgctgcctctgtgccattgacattcacaacaagacgctctatcacatcacactctggaccttnctccttgccctggggcatttcctctctgagttgtttgtctatggaactgc

SEQ ID NO: 114802 - DNA, 796 bp, Glycine max
  Clone ID: PAT_MRT3847_74677C.1
gccaacttgttggtcagagctgtaaatcaagtttgactagctctaaattcaagtttggtggttccaaacaagctctaagtctgctgacttttgtgataactgcttcaaaagccatatatatgatgatttctaattagttgaccgtgtaaaatgtcttatgccgagagtgttttaaaatcatactccttttttgtgtattagattagttatttacattttattggttatattattaatttggttcttatacttgttatcgcttttctgttttgaccttttgtgtaaaaaggattttttttttggatacagtactttaggtgctgtttgtgctgttctccaattagaattggagaactacctcagtaatccacataataaaggtttgtgttaaagaattatacctaccaagctaaaacataaaattctgattggagaacagcaaaaacaacactcaaggtgtaagttttagaccttgatcgaacaaatttgacgtgttttggtctctgtctctattgtcagttgtcttctagtaattctgttaactttgacagctgtaatactgctacaaattttttccgagggcgtaaaattgtcaaaactttttcttccggcataaaattgctggaaaaatttctactgtggaagaatcaattttttttgtggtaggcttaactgcaacatcataagccacactagtaatgatgttaacgacaaggaccaaaacatagtaataatgttaacgacaaggacccaaacaaattaagtttgcttgacttgggaataccacttacaattt

SEQ ID NO: 114803 - DNA, 305 bp, Glycine max
  Clone ID: PAT_MRT3847_74678C.1
atgatatcaaataaccctcaactagatagagagagagagagaagtggatgatggagagagaggaatagatagaggtggttggtgtgagagcactgcaccgtggtatgatcataactaatgacgatgagcagctagatgtatacagactgtgaaatcaaaccatgaacattacaaaagaacatcaattgaacaatctgttgatatactggcaaagtttcttgatgcttcctacagtcacgtttatcaaagcggacatatcatactgcaaggattgatgaacaccctatttcataagaatgaacaga

SEQ ID NO: 114804 - DNA, 371 bp, Glycine max
  Clone ID: PAT_MRT3847_74679C.1
caaaaaaaccaaggtttccataacccatacacaacctttttcactggggctttccgtgccggcaaccctggacccctttgcccaggccgacggggaccttacccgttgggtcccaggaaatgcgggcttaagccacggccggcccgcaaggggggctggggaggccagcggtttgggccgggaccgctggctggccttcgacccggtgggattcgatcatcccccccacgatcaaatcccggggggccccccccgaaagctgcccggaaacggcgccagggacaacaatcgggcaaaggggttgcttggacaaatccccgtgcaagcagccgatcataaggttggcccccaaaccggcttttttgaccccc

SEQ ID NO: 114805 - DNA, 238 bp, Glycine max
  Clone ID: PAT_MRT3847_7467C.1
atattattttgggttagcttgacaaattcatgttttattattataccgcacaactagaattgtcttggttcaaggactgattaataatcccattcaattttttgtcatccgcaacaattcggtaaaacgtagggataaggaatatgtagaaaacatttgaaccaacccttggccaggtaagttggcaccaaaccaacaagggaaccaacccattattaccaattcaaaagggtaaaaa

SEQ ID NO: 114806 - DNA, 516 bp, Glycine max
  Clone ID: PAT_MRT3847_74680C.1
ggttatactttcactttgttttttttttaaaacctttttttttttttacctttaaaacaaaaaaaggggaacccaacccccctttcatttaataaaaaaccctgtatttttcgccccattggaaaaaacaaaactaacattccctgtttttggcttcctaacggaaaattaaatttcccataagggggggaaaaaagaaaaaaaatgcaaatttttccccccacacggaaaaaaatagcggggaaaagaggatatttttgcaaaaaaaaaaacactgaatccccccacaaggcaaaaaaaatcgggggcaaaaaatttttgtgggacaacaaaaaacccccggggggcgaggaaaaaaccaaaaaaacaccacactccttgctctgtggggaaaatggcaaagccaacactgtcactatccttataacagagaaccaaaatgcttgagattctgacaaaaaaggggctaagacacctttaactgctgaaaaaaaaaaccctttgaggccttgggtg

SEQ ID NO: 114807 - DNA, 240 bp, Glycine max
  unsure (1)..(240): unsure at all n locations
  Clone ID: PAT_MRT3847_74681C.1
ggggttggttttttttatattaataaacatgtattcaatttctatcggaaaaataaaacaaagctgtctcttgattttttaaaaaggcaaatgtgaagaacaccctatgctgtctacgggagaaatcctaaaagacattttatcacctcctcnttgaaacggggtcttaatttacggggaaatagtctggtgacaaactaatcaagaagggggaccctcacccaacttaactcagagatc

SEQ ID NO: 114808 - DNA, 184 bp, Glycine max
  unsure (1)..(184): unsure at all n locations
  Clone ID: PAT_MRT3847_74682C.1
ctgaaactgttggcagtttacatagagataaatcttgcattatactgcaaactacacngggaaacctataatgtatattccctcgaaagatggctttctggttcatcatcaatgcacttactcataaacgctctatagatgcccctcttattgttagtaagaacacgataaatttcactgtcat

SEQ ID NO: 114809 - DNA, 247 bp, Glycine max
  Clone ID: PAT_MRT3847_74683C.1
aacctactttgcccctctcacgctttacttgtcgcgtatcaaacgatgttcaatggggctgttgcagatggacccacaacctgctgagaagcatgatatctggcctgtgctctctactccactgctactacttatctagttttcatgaaaaatcacacgtaagatggtggatcaattgccacacatgcacattatcagtcgcagaatcttcagacgtgttgtagcaacagtttattttaaacaccct

SEQ ID NO: 114810 - DNA, 216 bp, Glycine max
  Clone ID: PAT_MRT3847_74684C.1
gatcatgcctgcttcattgtcctggtcttatgccaattacgataaggggatacagctactcttgatcggtcacagctatgttgtatatagctgcctcctaatgcgcttctacaatgggactattaccactagtatcattacacctataggcatcgaacccttatattgaaccatagagctttatggcaaacggatcatgctgtacatctgggaaac

SEQ ID NO: 114811 - DNA, 587 bp, Glycine max
  unsure (1)..(587): unsure at all n locations
  Clone ID: PAT_MRT3847_74685C.1
gagaacagaaaaataaattgaagattgagagaagatacaaaaccggagggaggggggcgtgacgaaggaacaagttgaattatccttgaaggccaaactgaacccttctcaccttgaagtggttgatatatctggagggtgcggtgcaagttttgtggtagagattgtatccgaacagtttgaaggcaaaaggctacttgagaggcatcgaatggtgaatgctgccttagaggaggaaatgaaacaaattcatgctctctctattaagaaagctgttaccccagagcagtggaaacaacagcaagaatccaaccaatcaaatcctgctgcctagagcatatgttttagttataaaataagaaatccatacagtgtgttgctgactgttgacattgtttgtggattctagttctatgtagttttatcgacactcaaatttacaattgtactactaaattttagtttacaaaatctggcttcccgtaagttattttaatatgtgaccctctttaggtaggagttttctactaaattttgtttacaaaatttctggttaagatgtgnaccctctttaggtaggaacttcc

SEQ ID NO: 114812 - DNA, 427 bp, Glycine max
  Clone ID: PAT_MRT3847_74686C.1
gtcaattatgtcagattggaagaccaaatgcatgtcacgaaatggaggtctatgtatcaatcattgaataatgttggactgtgtatttaaactttgaagtttaatttcctgaactcctatcgaattatttgctaatgaaagtattgaaataagagcaaatataaagctagcaattaataaagtaaagtaaaataagatttttgaagttaaatcttttctttaaatactaaagtgaaaagtttcagtgattttcatgtgcatgtacttatggtattttattaaatgttaatttttttataagaaaagaatcattttaaaaataatagtcaaataaaaatgcattgcgtgtggatatgtatcaattttcactcctatcattttgcgtctgctgatgaaacacacccattgagtcacccactaatatgtc

SEQ ID NO: 114813 - DNA, 877 bp, Glycine max
  Clone ID: PAT_MRT3847_74687C.1
cccacgcgtccgtacggctgcgagaagacgacagaaggggcttttttatcagcgtctcgataacgcaaaatcaaagatagatatagggatagggataggaggcggaaagttgaaaagggtggtgacaatgagagggattgccacatgcgtcatgattcggaggaagaggatcacagggagctggcctctagaccacacgaatatattccgttaatgaaaaagcggtagccgctagagcaggagattgaagggcgaaaaagaagactgagagaagagagatgggcgtgacgaaggaagaagttgaatcatccttgaaggccaaactgaacccttctcatcttgaagtggttgatacatctggagggtgcggtgcaagttttgtggtggagattgtatcagaacaatttgaaggcaaaaggctacttgagaggcatcgaatggtgaatgctgccttagaggaggaaatgaaacaaatccatgctctctctattaagaaagctgttaccccagaccagtggaaacaacagcaagaatccaaccaatcaaatcctgctgcctaaagcatatgtttcagttataaaataagaaatccatgcagtgtattgctgactgttgatattctttgtggattctagttctatgtagttttatcgatactcaatttataattgtactactaaattttgtttacaaaatttctggtttaagatgtgaccctctttaggtaggaacttccaaaaaaaaaaaaaaaaaaaaaaaaaaaaaaaaaaaaaaaaaaaaaaaaaaaaaaaaaaaaaaaaaaaaaaaaaaaaaagggggcgggccgttttaaaggatccaagtttacgtacccgtgcatgcaacgtaaaagtttttt

SEQ ID NO: 114814 - DNA, 448 bp, Glycine max
  Clone ID: PAT_MRT3847_74688C.1
ttttttgacagagggcaattttacagcaagtgttgatttgcagcgcactcatcgtattaatggaatgattaaaatggtggccacagttggtattcctgataatacaggtatatcatcgacctgtgctatgaatagttcttttagggggcgtgccaattgtgatatttacaccatctgctctcaatactgtgaattatggattcctgcttacacaatagcaatgactatgtcatttaatccaaaccccagttctaatacatggagtttaaaattttttaagcttaccagatttcattagaatatcatttgtgtcactgtatgaactaccaccccaatgcataatattcaagttacaattaatgattttattttctctcaacactgtattgcctaaacctattataatgtaaatgcacagcatccttttatattatatagatggggtaag

SEQ ID NO: 114815 - DNA, 329 bp, Glycine max
  unsure (1)..(329): unsure at all n locations
  Clone ID: PAT_MRT3847_74689C.1
ntnagccangtgtgcgnanncncgngcattcgnctcnnncctngaacncngatngnaantngnnngnnnntcannnnnggnnntgcttntcnnngnnangnggtaccnccggggncgnacatgnngnngcgannancnntctancngangatccnctcaancttgtgtcnngtggnnagccccanangacnnttgtnnacantcaanatgcanttncagcnntnntnctgatnatacnnaacnctgcacagggccagtggacacatgtngaatnnnngnagcccaaanngtaagggnactnagaggngcntncnnaaannangangaag

SEQ ID NO: 114816 - DNA, 389 bp, Glycine max
  Clone ID: PAT_MRT3847_7468C.1
ggctcgaggccagtgggggcaaaggaatggaggaattggaatgagttcgctgatgaggtggtaaaaagggatgagataggagatgcaattggtgttttgatgggtggggaagagcctataccaatgaggagactagcgctggcacctattgtggctgctacaaaagctattcacgttggggggtcttcttactgccttctgcttgagctgatcccacagttgctgtcactccttctgcagaaggcccacctctgacgtgcggccacctcttgctgattattgcgatctattcccgacctagctctgcgatgctcaatgagtgacctgcctcattctataatagcgcgaactattattgtattgctacgtagacatcgtactactcatga

SEQ ID NO: 114817 - DNA, 533 bp, Glycine max
  Clone ID: PAT_MRT3847_74690C.1
gcggcgctcaggcggcgttcgggaacgggacttatccttctctcaaaggatcttctaatctaaatgtgtctaggtcatttgcttgttgtttctttgttgaggatttgagtgtatgaatatttggcagagcaaaaaatgaagcgcacctgcaaaagatattccaacgttcaagtgagggggttcggttattaatgatacataataagtaggtgagaatgaatctgtcttcttacctgtgttcattcctctttataataacttgttggacctgaggtttttaggtctatcacatcacaattatcaatgtttaagtatccctaattgagtgattactcttaagtagatttaatgatgataatcacaactaaataatacttgttgcttgtgcgtgttgaaggctgtactattcgagacatatgtgaatatgtgattgaaggatgtgttcggtttgagtgtgtcaaatatttttttttggtccgagagtatactttttccaatgtaataataataataataataatttttgtgtttgg

SEQ ID NO: 114818 - DNA, 203 bp, Glycine max
  Clone ID: PAT_MRT3847_74691C.1
caaatcaacactcactgacatttgcaaggaagagggggagagaaagtgagggggggaaaggttatgctggtggtggtggtggcggtggcggcatgttttgtggattctaaaatctccaacactcactccctcttgctctctctatacaaatccaaacgtcgtgatcatgaattcgatccgcaaatttggctaatcaagtgcct

SEQ ID NO: 114819 - DNA, 509 bp, Glycine max
  unsure (1)..(509): unsure at all n locations
  Clone ID: PAT_MRT3847_74692C.1
ggttctagcttttgcaacagaaaatanggagcatccatagcctcttgttttgggctgtaattgaatctgtagcattgcggtatttaagatccggacggcaatttgtttgcataggctcttggcatgattaatgttttttttccttctttgatgagtcgtgtgcttgtgccaagttcaaatggtgagcaacgaggagcttggtttaaaggtttgactagttaattgatgtgttcaaattcctgaaaatgttatctcactcacgattaagaactatacatggattttcacctgttcaattttttacccttcattagtcatacactgatgttgcttggaaagattgtcgattgaagttttacaatcaactattcctttgcatagatgatgttcaaatgtaatacgaattatactttcctgtaaatatatgcaattcacatgtcatttgtcctactttgtaaccttaagatgttatcagttttttatcaacaaattttaattgttaatttatt

SEQ ID NO: 114820 - DNA, 458 bp, Glycine max
  Clone ID: PAT_MRT3847_74693C.1
aaaatatgaaacttaaacatttccaacaacaaaatttcatatttgaagcaataaaattctaatgcgggcaacccgcggaccccgtgggccaaacccacatagtctatggattaagccggatggacaaaaaaatatgacataaccatggatcgtttaaaaaaattgatctgttacccgcgcggactgtgagccccacgggctagttcaagaacctaagtctgtttacccacccctacacttaattacctctcattctatcatacactataattgtattaaagtctctccagtcacatacaaaacctaccaaatttgtaatggccttgtgctctttatcactgatgaatctctagaaccacttggactactttcacttctattcattttgattagggtttggaggcttattctcaaaatctgaatcaatatcacgtaattttggaagtttctttattgac

SEQ ID NO: 114821 - DNA, 469 bp, Glycine max
  Clone ID: PAT_MRT3847_74694C.1
aaatgcaactcccactcatgtctagccatagcacttcaatcaaagaagatcatgaaacataattactgagcagttttgggaatgaagaaccatgagtgaagatttttctaataagaaatcttgtaacatgtagacataaaatgttctggttctggtttgcgtgtggtgtaaaagttgtctacttgtggtaagtcataagtatcataatcagtatgtcaatgcagatcttgatgctgagtatcaatagtatcagtttagttaatttgatttaaaatcaattttaccattgctggttgtgtttaattatccagtaattaggcccttttatttgactttctggcttactatatggttgtctacttgtggcaagtcataagtatcataatcagaatgttctggtttgtatattctgtacttgaaatggaatcagaaatgaaattgatattgtactctttgcaagttgcaactc

SEQ ID NO: 114822 - DNA, 455 bp, Glycine max
  Clone ID: PAT_MRT3847_74695C.1
gttaactgttaagcgtaaaggatagacaaaataagcatgcttttccttgatttgatttgttgttaatgttaagcgtgtaagaatagatggatgtagttaacaagttacgcttatcatggtgtaattgctaggattgacgtcactctcagttaatggagctaaagccccagtggccaatgttttattgtttcctttttgtgttggtagacttttctatcatgagtttgaaccattcaaatgagatacaaacctttgatattttatcttaaaacacgttttgccttgattggtgggagatttttggagaaaaaatagataactcgtaatgctgcaatggaatatcaagcatggatgatggatagtatgtctctgtcaatggacgtatatataaaccaacacagcaccaaccacttgcctgcaacttttgagtcataactaacatgacaatggatact

SEQ ID NO: 114823 - DNA, 266 bp, Glycine max
  Clone ID: PAT_MRT3847_74696C.1
ggaagaaagagagagaaagagaggagggagttttggttggttgtttttcttgtgtgagaaagaaaaaagaaaaaaaaaaaaccttcctgtagctaaacaacaaaaaccaagtcttcattggcaacaagaagattattattttgatatgatttgtttatttgccacccaatgattgactttgcctagctgctgctacgagagaagatattggtggtggtgctagcaatagcaagttcaaacctctttcaagtaatttataagttgag

SEQ ID NO: 114824 - DNA, 176 bp, Glycine max
  Clone ID: PAT_MRT3847_74697C.1
gtgacattgaacatgagtaggattaatattatatgcatttaattatgatgactagtaaattgtaataatcaattccctaaaatctgctaagaaagggtacttttaattggcattggccatattgtacaatagaattaaaattttatcacaggctttggaatttgggttgacgtgta

SEQ ID NO: 114825 - DNA, 272 bp, Glycine max
  unsure (1)..(272): unsure at all n locations
  Clone ID: PAT_MRT3847_74698C.1
tttgttntaattttcttcgcttaagcgctgtagtaggtggtgttggttgtttggtgcatntgatttngatttggaattggaagaatgtggaaggttntgcgantcgcggcggcnagatcncggcngtantcgacggcgnttcccggtccangcnangttcacaagcgtggcacngatatcctccacgacccntggttcaacaaggatactgggtnncctgtanctganaggggncgatnggngctncngggctctgcttnntcctcttgtca

SEQ ID NO: 114826 - DNA, 266 bp, Glycine max
  Clone ID: PAT_MRT3847_74699C.1
ctctttttttggggtccattctcaatctggttaatatatttttgtgcaggtgaagatcaagagatggtgttgttatgcttccttccttcaaccacaaaccctctatgcctctaccacccattcttgtccctgtctctttctatccccctgcctctatgacctcctcaatctaatcaccaccagcatcatcatcatgagctgctccaatgtatatgaccttcaatcactcagatcctcaccattaacccgagggcgtggaccccatt

SEQ ID NO: 114827 - DNA, 1241 bp, Glycine max
  Clone ID: PAT_MRT3847_7469C.1
cacgggcccgaaaaaagccttatcaaataaagtgtgtgcagagagagaactgaagaagaagaagaagaagaagaaggatcttcggtatctcagccagtactttcaatttgcataagaatctgcatctgggaaacctcagacacacactcacagtgacaagaataagaaaatggtaacagaagaggttgttggaggagattctggagattcacatcaccaccaccgtaactctgacatagaactcattgccactgctgaaagggcacctttacctcacagtggaccactgaacaaaagaagaagttccaagttgagcaacgcttcttctgcttctgcttctgcttctgcttccatctctgccccagaggaacaacaagatgaaggagactacgttgaggtcaccatggacatccaaggtggctctgtggcacttcacagcgtcaaaaccgttaacaatgaccaaggagaagacgagaaactcattcttctcggcaaaggtatggagaagaaaaggtccttcggtgcctccgttgtgagaagtgcttccattcggatcaacaagtgtctcaggagctgaagcgcttggcttccttgtcgaagcaaactgcacctgctgcgagagttcactatgacaggaacaaatctgcggcttatcatgctctccaaaagggactcaagtttatcagatcaggcaattgatgctgatgctttggcgcaggttttagttattttctgggggttttcccatgctattaaaaaaaaaaaacaccttctggacatgaactggacatgaagaatctgcacaataacaactaggtggtgatatcagctggtgcttaacaaagatttctacatcgatcgtaaaaggaatgtcgtagaacacgtgataaactacatcggtcttaaaatgatcgtcgtagaacacatgagaaacaaagttgtgcttaagccaacaacgatgtagaaagcagtgctttctacattggtgttgttgtaggcacgacttcctttgtgacgtgtttctaagacggtccttttacgaccgatgtagaaacatccaccgtctacaacgacattagatttaaagacacacgtccaccgtcgtagaaatgccaattccaccgatgtagaacgctatttttctagcagtgtctttatctttctgcatcttttattttaaatttcttatctctttcttgtaaattggatttgctttaatctaaatataacaaagttctcgt

SEQ ID NO: 114828 - DNA, 263 bp, Glycine max
  unsure (1)..(263): unsure at all n locations
  Clone ID: PAT_MRT3847_746C.1
ggctcgtcactccttnctcttagccctccnnctcttcgccgccgtnnncacngccgcgatggcggtngntgcgttccgacgccgacgacatcctgatccgtcaggtngtgccanatnttngcgaagcgaatgaggaggacaanctnctgaacgncgagcancattcgngacttcaaggncaanttcgccaagacntacgccaccaaggaggancacgatcatcgcttaggcgtnttcaagtcaacctcggcagagccagntgc

SEQ ID NO: 114829 - DNA, 712 bp, Glycine max
  unsure (1)..(712): unsure at all n locations
  Clone ID: PAT_MRT3847_74700C.1
taagctttggattcacactagaggcggccgccacccacacacccccccccaacacacggttctacaaacttaagtcttttcaaaataggattaacctctactaataggagtgctatttaaaaactttcgttcgtttaaatagtttagtaatattttttcttttttcagtatcaagtctttttcttatatcatattatatatcataattatatttttttcaattttttctcttggtgttaaaaaacatttggttgtccagatattcttttcatagagttcactgataatatattattttaacttttgtcatctaattaccaatagttacttacggtaattttgttgaattttatactactttaaaaattatatcgattatagtgtaaaaaaatacttatagtgtatacaaatcaaactctatttgaaaattgttaactttattagataaatttattaataaatttacttttcggaggactaatttgtagacatatactttntgggagtcactaccaaaaaaatacttttagcgattaaaagggaaataagatgttactttaatttaattatcagattatatattaactctttttaatatgatatggacaacgtaatatttatttcgaaaaagtaagggatgtgtgcatattttattgacttgattcattcatttacatgtgtacaaaagatgtatacaataatacgtgtatgg

SEQ ID NO: 114830 - DNA, 615 bp, Glycine max
  Clone ID: PAT_MRT3847_74701C.1
tagcctgaacttattatggatccgttaatctacaaatggaagacatttgttggtatacaaaagaatgagacattcattacatgattatacaaaattgttctttcattacaaaagaataagtaattccttacatgattatacaaaatatgttctttcattagcaagtgtcaaatataaccattagacttgatcagccaaaatgatgaccaaaaaaaaggtttctttcatcgtacctatatgttccgggtctactttttccgccacgaacaaaagagaggggcaccggtttgacattgaagttctcatactcgtatctcaaatcgcactcatctgcaatgaaccaactagtacttaaactgttaaatggttgatgatcgcgtactcgtatacatatacatgtgttcaaagcagaaatcaaccagcctgaagctgtaaaaactctggccctctagatgcaaaatgtgcctgcataaacttcaaatgacagtggtgctagaacgagctaccctttgagcttcttccaagtccctcaaaaaccttttagaattaagaacagaagagccgccaagaataaaacgaatgccggtattgctagcattttgtaaagcaacagac

SEQ ID NO: 114831 - DNA, 169 bp, Glycine max
  Clone ID: PAT_MRT3847_74702C.1
cggctcgggctatagccgaatctgatcgagcctgggtgcgataagagtgctgatggtgactcgacagaggatcaaacgacaactgtgactcccccggccccactggttggttttcacttactccccggcgtacactacagtgtctatatgcaaaatctcgctcgttttc

SEQ ID NO: 114832 - DNA, 327 bp, Glycine max
  Clone ID: PAT_MRT3847_74703C.1
agaaaaaaacgaactcattatataagggcgttgttcgaatctcattgtttgttaatgatttgcaagtaccagttttttttgagccaactcaccaaaacttttggtccgaaaaaataaaatttttttaatggcttgattctgacttaagaaattttggtggtgcattatggggtttttttgacggaaacatgagcatcaccaggggtagcaactcaatcctgaaaacgctgaggttgaaaaatcccaagcttgtactgttagagtgttgttccaatgctagggacctcaaaatcatccatgcccacatgctaagaacccacctttttt

SEQ ID NO: 114833 - DNA, 421 bp, Glycine max
  Clone ID: PAT_MRT3847_74704C.1
ggcccttaaaacccaagcttaaccaaacgggaaaaaaggccgggttaaaaaaccccggcttttttttaccaataaaaaaacaacctttagaaaacaaaaccccaaaaagcaaaaggggcccaaaaaaaaaaaaaaaaccccccggaccccaaaggtttaaaatagcccccctttaatccccaaggtttaatttgcccccaaaatttcccgggcttggtttaaagaactttttggatttgctttcccaaagggtcaaaacaatccccacccattggggggggaaagccacacccgaaccgagccttccgaaaggggggcaagaacccatttttgggaatttcaaagattcccccaattttaacaaaagggggccccaaccaaggggtgggacccccacatttggcaagaagttcccggaaac

SEQ ID NO: 114834 - DNA, 703 bp, Glycine max
  Clone ID: PAT_MRT3847_74705C.1
gcgcccacgcgtccgcccacgcgtccgcaaaatgtgggtaaaaccacattctccttcaccgacttgcccaagctgccggtgtacacaatccaccgttgatcccccttccggtgatggtccttcttcctccataacaatacacttaacaggactgatgaaagagattataactttggattgcgaggtttttgcggggaaacatactttgccaaccatgtagcagatcaagtagtagaagaggagggtcacttggctttgggcgaggagcatatcttgaactggatcgacatggaggagcacgcttgcagtcgttgttgaaggagcagatttgtatcgcggtgtttgctgatttgcatttggattggcttcaggtgaggaacagatctggatatggatcgatcgatgatcatgtgtttcttgcaaataaaattgttctgaagctatttgaaaactgttttttatttttatttttaatgatttccagggtcttgatgcctgttttgaagattttgtaaggttcataattccaacctttgccttcaactataaaggcaatgttaatttgttatataagctatgccccttggtgcgagagtcctgtgagtgtggctgtcagaaggtccatcatatgtgaaaatgggattggattttgtttattaggtggtgtgccaaagagatgcttaagggtatcgtgttatttttt

SEQ ID NO: 114835 - DNA, 163 bp, Glycine max
  Clone ID: PAT_MRT3847_74706C.1
ttatgacgcaggtaaattggagaaagaaggcgtcacatcccaagatgaagggctggcagactatgaaagtactgattttcttgatgaatctgaatctcacaaaaatggtagcaaaaccagtcagactccactctgggatcaagatgaggaaatggatccaaat

SEQ ID NO: 114836 - DNA, 125 bp, Glycine max
  Clone ID: PAT_MRT3847_74707C.1
tttttattccaaaatcatacttaattttcaatggaaatttaaaattcacatactgctcccacaattgtctatacattctgtgggcagtatccacacgcacacttataaatattcgaatacatgtg

SEQ ID NO: 114837 - DNA, 464 bp, Glycine max
  Clone ID: PAT_MRT3847_74708C.1
cgagaagacgacagaagggctatctcattttttttttacaaaagtcatgtctatctcatctttaccaaacaactttagaatattattttcttctatgtctcatctatttttcttaaaccaaacaacaaaatattttactttatttctctttgttagaattatctttttctattttcatttattatatttctatcttctaaatctaacacagacataaatttaaattaaagtaataaacatatcataatttcaggatttgttttcataccttgttaattatagatacttaaatgacaacaagtcacaaattcatgaactaaactcatcattcactaaaaaaaaacaatacaactcgggggccagttggtaatgggcacattaatctctggtgtggtccacagaccaaacaagttttaactacataaaaattattttgataaaaacgactatggaaaatacaattt

SEQ ID NO: 114838 - DNA, 457 bp, Glycine max
  Clone ID: PAT_MRT3847_74709C.1
gagggagagactgatgcattggaagagtgttcagaatggttgaaagcacatggggccagcggaattactgataacaatggagatatgctgctagatacaaaagtttcatcatctaatctgtttgtgccagagccagaggatgctgttgcccacggagatgccaatcttgctggtgatgactttttagcacgagcacctttatagccaagtttgttgtttttgaagcgcatagtgagatgtcattcaggaaagtagcagaaaatatgccgcagccttcatgtgcttatattgcaagcaggctagaaaaaggctgtgatggtgattagtaaactggaatatacaatattgaaaggaaaaaaaaagccgcctaacgttctctaatgaaacggggcttataaaaacattgggtgcttgcttgctagcttacaccattctttcctggggaaggacaggacta

SEQ ID NO: 114839 - DNA, 998 bp, Glycine max
  unsure (1)..(998): unsure at all n locations
  Clone ID: PAT_MRT3847_7470C.1
taattcttaaaatgctttnnnnttnnnncgttttccgacaaaaaagattaataataaggttaatttcataaattaaaatatattttttttcatctatttgccggccttagtttgtatgaaaacctagaatgacactttgggacaagggagaaaaaagcatgacttgaaaaaatagttttgttgtcgttcctgagcacaaaaggagccaattcaaccaataaagcgaaaccctttttaatttgtgcatcccaatattcacttctcaaatacctttggctgctgctgactttatttcccaaagggtttaaggaagtagaaatcagtagaagaacaaataagaaagaactcaccaggtacgactataacaagggacggaaagagaaacataccagtaggcacaatccaactcagcaaactaaaacggtatttcctacttgagctaatcctgcaaccacaggaattaaaggaaggaagcaagataaatagaagataaaagncnnccaattgcatttgcatcaacaaattctacgcactagtaagagacactaatcaaaattccccccaggctaggaaatgatactctcacatcttgatacaccatgttttctaccattggacacactggacttaaaaatattcaagtagtctataaccacagtttcttttatttactagattgacaaaataaacgtcaatttttccacttatatagtatatatttcactgaatagcacgaaactaatcagccttaataattgtaaaattgaacttcccaattacaaaccccttcacttcaaatattagtatattaacaatttcatagtttgggccatatttagcattgttaataaatgggataaacgacaccaagcataagtaatttttatttaaggcataatttcatagatctaaaagagcagtctatgcttgacacacgcaactaatctcactaaaggaaatagctttaaattcaccaccatgcagttaaagaaattcta

SEQ ID NO: 114840 - DNA, 632 bp, Glycine max
  Clone ID: PAT_MRT3847_74710C.1
tttgtctaaagcacatgatattcccatgcgaaaatgagctacacgtgtaagaaatagaaatttaaggggcttttattactatcttcggaactaaattacattacatctatagtcctgtccttccccaggaaagaatggtgtaagcaaccaaccaaaacaaagtttataagccccgtattcattagaacgttaggcggcttgattttttttttttttttcctttccatattgtatattccagtccaaggtttgagaccaagttataggtcaccatcacagccctttttctagccagcttgcaatataagcacatcaaggctgcatattttctgctactttcctgaatgacatctcactatgtgcttcaaaaacaataaagttggctataaaggcgctcttgctaaaaagtcatcaacagcaagattggcatctccgtgggcaacagcatcctctggctctggcacaaacagattagatgatgaaacttttgtatctagcagcatatctccgttgttatcagtaattatgctggccccatgtgctttcaaccattctgaacactcttccaatgcatctgtctctctctcatcgctcactccatttgtggccacgccagttgaaaacccaagaac

SEQ ID NO: 114841 - DNA, 243 bp, Glycine max
  Clone ID: PAT_MRT3847_74711C.1
atcaccactctgtgtaatgtaagcatgtctttgaagtcagcttgtttctatctacttttaaatttttagtaaattgagattgagggtgagggctgacacaacatcaagatttttatttttaaacatctatccttcctacactccattttggtaggagcttcgtgcagagttgcccatataaccatattataatcttctcttgttctttaaatcaaaggtggatacccctttactcatacacct

SEQ ID NO: 114842 - DNA, 1644 bp, Glycine max
  Clone ID: PAT_MRT3847_74712C.1
agaaatagaaatttaaggggcttttattactatcttaagaactaaattacattacatctatagtcctgtccttccccaggaaagaatggtgtaagctagcaagcaagcacccaatgtttttataagccccgtttcattagagaacgttaggcggctttttttttcaatattgtatattccagtttactaatcaccatcacagcctttttctagcctgcttgcaatataagcacatgaaggctgcggcatattttctgctactttcctgaatgacatctcactatgcgcttcaaaaacaacaaacttggctataaaggtgctcgtgctaaaaagtcatcaacagcaagattggcatctccgtgggcaacagcatcctctggctctggcacaaacagattagatgatgaaacctgcaaaattaaacatttctcattaaataaccgcgccacaacccattaaccaggttaagaatacactagtaactagggaattctagatttgtacgggttaactaacggttaaccaattcaaaatatggcagaaggaaatgcagtgattcaaggcagcacaatcgtaaatgctcctcaagatgagggatgattcaacaaatcaaaatgctcgatgcttgagaacaaaaattcttgactagattagcgcctacaggacagtgaatacaaaggatagagatcaaacacacttttgtatctagcagcatatctccattgttatcagtaattatgctggccccatgtgctttcaaccattctgaacactcttccaatgcatcagtctctccctcatcacttgctccatttgtggccatgccagttgaaaacccaagaacccgagaaatgtatgaaacaggtagagttgggcgatatgaccggcacatgcagttcgcagccttataacgcatcttttcagcataaagatccataaggcaggtgtttaagttaggagctgttttgtacagtctaaagaatgcaatataatttcctgaagttacagcagcacgaacggcaagggcatgttttacagcttcatccttctttgcttcgtgagataaccttgccattgatgatacaagatctctgttattatttgaatgcattatgacacaaagcaagttgtaagcggcaaattccatatcagacccctcaatgccttcggcataaagagtttgcaactgagattggcactgattatactcaaacaggtccccaaattccagtgccaatcgggcatgtgtttcatacaccctcaacttctgaagagtgattcattgctagttccaaaacaagcaaaccaaagctagtccggacgcgtgggctcctgaagcattgtttcaagagttatcaacttctctgtacttgataactcttgaaaaattgcttcaggagttatcaagtacagagaagttggaaaatatatatgggattagagggatattcagttgatacaaactaccaccccaaaaccccttcccagtagatgttattatgttctatcagaaaccaattctgatatgcaggacacgataaaataaataaaatagaagttgggaacaacgtgctttcactaaaatagctctttactttaacatggatatataaatttataattcaatgaggtccctgaacattt

SEQ ID NO: 114843 - DNA, 554 bp, Glycine max
  Clone ID: PAT_MRT3847_74713C.1
tcgcgtacgcgtgggctggccttcgtgtcatgtatcctgtaaagcgcacatactggtttgacatttataagaacattgataaaatccctttagtgaattgtcctgttcttgtgattcatggaacggctgatgatgtagtggattgctcccatggtaagcaactttgggaaaattgtaaacaaaagtacgagcccttatggattaaaggaggaaatcactgtgatttggagctttaccctcaatatataaagcacctcaagaaattcatcacggtcattgagaagtcaccacatcaaaaaactggatctgatcgtattcctgatcaacttgacaaacctaggaacagcatagattttcgagagaaatccagacccagcatggatcaaagggagaatttgagagtattgatcagaaagaaaagcctagtgcaagcacagaccataaagagaagtcaagagccagcgtagacaggagagataaatcaaggaagagtatagatcgccctgagaagtcatataatggatcagatatacccgaaaaagctagaaatagca

SEQ ID NO: 114844 - DNA, 441 bp, Glycine max
  Clone ID: PAT_MRT3847_74714C.1
tatccttattatttaccagggaaaaaaaagataagaggttacacgtccatttaatattgacacgaaaagcatgtgcgtgcccttcctctgccttgaaaccagttaattcagggacaaacttgtttcaagtgaggaaaatccagccgagataaattaaaatgccatgccaccatggcccacaagtttatatacgggactttaaacatttataaatccatctttcagattttcagttaaaacagtgacaccattgtggggaccgttacggcaccattgagcttctacgaggtgaaaccttgagaggccgaaaatgcgttcatatgggtaggaaaaaaacatgatgggggtgatgataatgatgttgatgacattaatggtgacagcgatggagaccgtgacggaaatgtcgccgtttacaacgcggggaaaggagctttccct

SEQ ID NO: 114845 - DNA, 484 bp, Glycine max
  Clone ID: PAT_MRT3847_74715C.1
gacgttgttaggactgtatgcatctccttgacccttctagaacccctctctccgcacacttccgcatttctctacccaaacgacaccattttgcctcttgctcgctggttgcactgctagagccacctcctttcttctttatcagtcatgttcctacgaggccgctacactccttcatttttgtctttcacttcctcaatcttctcctgtcttttttctttgtttcctcttatctttctctttcttcctttatttcactttttagttggacattttctcgaacagtttttattcaagctttagattttgatttttttttattttttttagtggagataggtaaacacaagatgtacaggttcttaaggattgttcgatttgcgttccttgcaggtagttttggacacttattggacccaatggatgtggaaaatctaccctcttgaagtggagataggcaaacacaggatgtaccgattcttta

SEQ ID NO: 114846 - DNA, 825 bp, Glycine max
  unsure (1)..(825): unsure at all n locations
  Clone ID: PAT_MRT3847_74716C.1
ctgnnntnnnntgaggctaaagcccaaggaaacggattacatcagaacattacgaggaaattgaatacnnacacatcagaatcaagcaactgacttaaccaagctggttattgctccaaaatcacatactcctcctccatagcacaagcataattggccaaagcatctgcacatccattagcttctctgtaaatatgacaaagatagcattctatcttctaccaataagccaacaaatagtattaataagactccacccagatgctgatccctgtttagagattttgatgctaacaactactaccagagaatctatatttacttccaaatttttatcccccttgtcccaagctaaggataaacccaagtaagctccctataattcagccacaaaagctgatgtatttcccagcttttaaacaaaactagccgcccatctgccatgacaatcccttagtaatcctccacaagctgccatatcattatcactatgcatggactcatgtattcagtcttataacaccttcatctggaggcttctacctaattagaatttgctcatttcttctatggatatggtggtttgaacttagaggcaacatctttatagaccttacattgggaaccaatgaactcccaacacttaaaaggcctaacaaagtcagtattacgaacatattgatttcgccacaaccataataataacaagtcgtagcccaaagactagaccaattggtgttatctaaagcactcatagaattacaaaaattgaaattgacttctaagggagggtttaatcaaatgtaaccaaacctggctagccaa

SEQ ID NO: 114847 - DNA, 214 bp, Glycine max
  Clone ID: PAT_MRT3847_74717C.1
tgactagttgagtgtcactgctgacgagagaaccacgcaggacgtgaggcactgaagaagcacaagtggtgctacatctatgacttggtgttggtctggctctgaccagtgtgtctatcgtggaaagtgtagatgcatacagatactacacgtggactggggcatattggcttctttctccactaggtagtcctcaacaagtgggtcctatcga

SEQ ID NO: 114848 - DNA, 419 bp, Glycine max
  Clone ID: PAT_MRT3847_74718C.1
ttttatcgtgcgaacacgcgctaaatgtaaccatggttttgcttacactatgcctgataaaggtgctgatcaagcatgtgcacaccaactacttatgcctggatagttacagcatatgttgctagactactacaaacagcagagtactgatggaacctataacgtctctgatgtctctacacaagctactaaaactggatactcttgagaatatgctgcacatgtagcccaggatggaatcacaggcaaaacaaactaaagcgaatttacagacatggtattgtcgatttgcacacactaatgattttatggatgacgactacatgatccatggataccaatgtatgagaaatgacgttacactgactgacactttccaagatgaggcggcgctcaggaatttccatgagtgaaatgac

SEQ ID NO: 114849 - DNA, 1922 bp, Glycine max
  Clone ID: PAT_MRT3847_74719C.1
gctgatgctggtttgaggaccttgatacttgcgtatcgtgaacttgatgaagaagagtacaatctattcaatgaagagtttatggaggccaagaacttagtgagtgcagatcgggaacaaattgtggaggaaatatcagaaaagattgagaaggatttaattcttcttggtgttactgcagttgaagataaacttcaaaatggggttcctgagtgcattgacaagctagcgcaggcaggaattaagctatgggttctgactggtgataaaatggagacagcaatcaatattgggtttgcttgtagtttactaagacaaggaatgaagcaaattataattagttcagacactccagaaaccaaatcactcgagaaaatggaggacaagtctgctgctgcagtggcagttaaggtaagtgttattcatcaattaacgaatggaaaggaattacttgctgaatctgatgaaaactctgaggcattagctcttatcattgatgggaagtctctcacttatgcactagaagatgatgtaaaggacttatttcttacacttgctgctggctgtgcatctgtcgtatgctgtcgttcatctcccaagcagaaagcacttgttactagattggtaaaggttaaaactggcagtacaactctagcaattggtgatggagcaaatgatgttggaatgcttcaagaagcagacattgggatcggtatcagtggtgttgaaggaatgcaggctgtaatgtcgagtgatatcgcaattgcccaatttcggtttctagagcgtttacttcttgtgcatgggcattggtgttacagaagaatctcatcaatgatttgctacttcttttacaagaatattgccttcggcttcaccctctttttctacgagatctatgcctcgttctcagggcaagctgcatacaatgattggtatctctccctatataacgtattcttcacttcccttcctgtaattgccttgggagtgtttgaccaggatgtctctgctagactatgcctcaagtttccattattatatcaagaaggtgtacaaaatgtcctattcagctggaaacggatcctcggttgggctttcaacggagtcttgagtgctaccataatattcttcttctgcatcaacggaatggagaatcaagcattccgtaaagccggggaagttgctgatcttgaagttcttggtgccaccatgtacacttgtgttgtgtgggtggtgaattcccaaatggcattgtccattagttacttcacttacatacaacatttattcatatggggtggcattcttttctggtacatattcctcttagtgtatggaaccatggacccttctctatcaaccactgcctataaggtcttgattgaagcttgtgcaccagcaccatcttactggctcatcactttgcttgtgcttgttgcttcactccttccatacttcgcctacgcttcgatccaaatgcggtttttccccacgttccatcaaatgatacagtggatacgaaatgatggccaaacaactgatccagaatatgttaatattgtgagacaaagatcaataagacacacaacggttgggttcacggctcggtttgaagcatcacatagttcaggagcatccaagagtattcaagtctgaaaacaatgttagcaattaagcaatgttttttctgtttctttgttgtatttaaagttctttggtctgaacataggcgaaaatttggtataggtaatcaatcacgtacttcggattgtatatatttaaggtagagatgggtcttatgtagttgacaaagaaatgtcaagagatatgctctttgacaaaggtaaacaagtaatcagtgccctgaaagataatgaaaaaattggcgagtaatgaaagattaaagagcttcctttgca

SEQ ID NO: 114850 - DNA, 241 bp, Glycine max
  Clone ID: PAT_MRT3847_7471C.1
taaaccctattaatcaacatcctattccgtcttcttgtctccttcgcgtctacattcaccatcctccttcgctaatcctaaccaaccacctccacccttattcctaattcccattcttttccgcttaatgctatcgctccagtctttccggctaacacaccaccacataatcacgatcacaatcacagctgtaaactgctggtgaacttttgtctttactaattgagatggtacttcttat

SEQ ID NO: 114851 - DNA, 496 bp, Glycine max
  Clone ID: PAT_MRT3847_74720C.1
gcggctaatgtgcaatcgggtgagcttgtgaactatgattcgttatctgggtttcccttgtatgtctcaaaagacatcgatggaatgcttgttgttaataggattcgatcagaaatagtagatgttaggaagaaggagattgttgtccatgtcatggatggggttattatggatgctgaatttgagcaatcggttttatctgaggatgatacagaggaggattgacttgactgtattcgggttttgccctttgattttggcttcatgttttgttgtattcaacggtggcataacagaattaaaaaaaaaacaaacagtgccattgtctttttacttgtacatgttacaatgtatctcttttcctgtacacggccctactgttggctagtcctacaaatcctggaacttgcccccatttcaaaataattgttaaaaaggtatcacgaattacttgtaacgatatatttaatggggatagtctcctcctttgctgtcc

SEQ ID NO: 114852 - DNA, 231 bp, Glycine max
  Clone ID: PAT_MRT3847_74721C.1
gaaaagggaaaaaaaaattgttttgcccccggtccttccaattttaacatttaaagtggggaacgggggggatttctcgacttggccaacaatccgggcccagggttggtttgaaaaacaacctttaagccactggaaagggttagttttaactggttttttggggccattgtgctaaacatgaacggcacccgggaagcattcctccaaggaaaaaggggggcccccccg

SEQ ID NO: 114853 - DNA, 346 bp, Glycine max
  unsure (1)..(346): unsure at all n locations
  Clone ID: PAT_MRT3847_74722C.1
gtgattcactttaattgntcttcttggagaaatcctcatgtgatctcaaagggtgtcaagatggagttagtcatctccatccaatagagcatcttttttagcattccaattgagcatttggtttgttagcatctaccacttcaactcttaacacacaaaatttttaaaaacgactgcaatttcagccacaacgttaaggtttttagactctccccgaccacattgacttcaatatcaaccatcacggaaaaatcacgaccacaactacaatttaaaaccttgaacaaaacaatacaagatagagtcaccatgccatttggtttggtctcagcttggaacaagcgtc

SEQ ID NO: 114854 - DNA, 235 bp, Glycine max
  Clone ID: PAT_MRT3847_74723C.1
ccgtcgttaccgagaacgcgagcggccgcccacggggagggtttatgacgataagccggcgatggcccccacacaagaaagacgaagagggaaatcttccagcggggccccgaccaccagaaccagcgaaatgaccgcaccaagaaaagcaagatgcgcaccacaccccagaggccaaagacggaccaggcacaccgaaacatgggccaacccacacccagcggtccaggggaaa

SEQ ID NO: 114855 - DNA, 508 bp, Glycine max
  Clone ID: PAT_MRT3847_74724C.1
ggctcgagctataaagtgataagcaaacgagtactctaagtcttacattcatagatctcaccttgttcattgccttcaatccttcaaatgcaataacaaacacaacccttttcaggaatcctcaatgttgatcactgttctgcaaaaaatttacctattgggaagtgaagcacagacccagatacttctttcaggccctccggtgcttgctggagttattggcatcatagcttatgctatatatagagctggtggaataggtggtgtgagactatatgtacccatattatcgattgtggctgcactacacctgaaaactggttcaagcatctcagctttcatggtcacaggagggtcaattgcatacgttatgtgcaatatgtgcatcacaggtcctaaattcggcgggagtcattgattgactatgacatagcactttcatcctaaccatgcatgttgttgctagtgagtcttaggattatttggaaccttgaattctcagaatggt

SEQ ID NO: 114856 - DNA, 443 bp, Glycine max
  Clone ID: PAT_MRT3847_74725C.1
aaccaataaaaaacaaatagccccaactttaaattttaaaaggaaaaaaaaaaaaaaaaaccttttattgggcccccaaatatttctaaacttcggagcaatacccccccaaattttccccccccttcttcaatcaccccaccccgaaaaaaaaaccttaaaaagaaaaaaccaaaaaaaaggggtcatcctaggccttcctttcaaaaccaaaaaccaccctgggcaccaacggaccccccaaggggacccccttaaaccatggcccttttaaaacccccggccctcaaaccattaggggccttgtccccccccgagggaaaataaacaccccctgcccggacatttttctccggtttggctgggcccggaccctcccccggtaaaccacctgggcccatgtccccaaaaagtttctttggaaaaacccccttatttccctg

SEQ ID NO: 114857 - DNA, 368 bp, Glycine max
  Clone ID: PAT_MRT3847_74726C.1
aaagaaaaatgatctgcatttattcggggaagactcaagttacgcagccattgattgagtcgttcttgacgcgttctgtacttacgcagtcaaaggcatggaatagcactcacgatagctgtgcgcgcacgtgagcttcgtcgtagtcaacgaacgggccatcagcgatagcgccaggaaccttgttctccagcccaatcttcaagtggctccagcataccgtgctcttgagcccatattgataaaggtcgcgcagatacgcaaccacattcgggaaatctgtcaagtgcttcttgtcggccttcgactggtatacatccagacgaatgagcgtatggaacagacacaaatccgcttccgtgattccc

SEQ ID NO: 114858 - DNA, 107 bp, Glycine max
  Clone ID: PAT_MRT3847_74727C.1
gggagaggtgctttccaatatttaggtaccagatcacagagcctcccttcaacaatagttgacaatgtattgcaacaaaactttatggaggtaaagagaagctcttt

SEQ ID NO: 114859 - DNA, 388 bp, Glycine max
  Clone ID: PAT_MRT3847_74728C.1
gtcgcgcagggactggagcaggggaagccggtgctgcccgtgcggagacagcgagagctcgtatcgcggaggcggtgtgcgcccgactgttaccatgagcgatcaggctctgatcttgctgaaagacttcttgtccggcggcatggccgctgctcatctccaagactgctgtcgcgcccatcgagagggtcaaactgctgctgcaggtccagcatgccatcaaacaaatcattgctgataagcaatacacagggatcattgattgcgtggtgagaatccccaaggagcaagtctctgtctccttctggacgcgtaacctgaccaacgtgatccgttacttacgcacgcaagctctcaaattcgccttcaatgacaagtacaagcagat

SEQ ID NO: 114860 - DNA, 1020 bp, Glycine max
  unsure (1)..(1020): unsure at all n locations
  Clone ID: PAT_MRT3847_74729C.1
ggtggctgacttctctctcgactcagctcacgtttggtttggcagtgctcttacctccaacttttgtattcttcttttccttttctattctttctctctccattcttcctccttccactctttgcgtactagtaatcccccttcaataccatccatcagcattcatattttcacaatttttctttcaattcccaaaagcataaacaaaaaaaaaattgaaaatcaaagcaataagaacacgcattctttacttccaattcccaattcttcttctgccctagattttaccccctttattattgcactccaccaccactgtgcatcgatcgatcgttggttcttgaatttcccttgtggttaggtttcctcgatggagtcggaggatgatatgcccgacgccaacgacatcgagtccctcgacgacgatttctacagtggcgagaccgaggacgctcccttggactactacagcgactacgacgccgacgattacttcgacgacgccgagaggatcgagtctcgccgccctgagcaaaattttaccatattgaaggaatccgatatacgactaagacaggaagatgacgtcactagtagcaacggttctttccatatcaaggggttnttgcaagcatactactccgtcaccacaattggagcgtcagtagagtgcacgatgcatggtttgctgatgaagaacgagtccgaaaagcagttggtttgttggagaagccaattgtccagcatcctaatactagagagcttacttgcggtatctgttttgaaaattatcctcgtgctaggattgaaatggcttcctgtgggcatccctattgtatctcatgttgggaaggctatatcagcacatccattaatgatggtcctggatgtttgatgttgagatgtcctgatcccacttgtgatgctgctattggtcaagatatgattaatcttctagtgtcggatgaagataagcagaaatatgcacgttacctacttagatcttatattgaagacaat

SEQ ID NO: 114861 - DNA, 543 bp, Glycine max
  unsure (1)..(543): unsure at all n locations
  Clone ID: PAT_MRT3847_7472C.1
cgtgaaccatttatttgtacatttaatngcaccnaagaagcggcctggcgcaacacggggtgacgatgtttgaaatattaaaactacacagtccatgtacaatacaaaagcggcagactgaacgaacagggaacatacaaccgccacagcggagttatgatggagctacacatcctggaaacatgcctggtggtcatgtttggaatagagatgtaactcggccaatgaatgtagatggcatgcagagaatacgggaacaggaaccgcaaggttataatctctaagcacaagcagggatggtagctggaaagaatcctggcggcaacccaatgcaacgaggagaaccttagtaacaaatgaaaagaaaagatcaaacgggtatgcgagtataccctccagagcagaagccaagacgtatataaggttgggcaggcagagatcaaagcaagatagaattgcaagaacctctaaagaacgtgagctcattcaagacaattcatgagcccgcaagttcagatagtatgcttccgcacttgcggacct

SEQ ID NO: 114862 - DNA, 442 bp, Glycine max
  Clone ID: PAT_MRT3847_74730C.1
ctcattcatcggtgtaagccattataacactaaataagggatcactgcgactatatcctggactgtggctctcacactccttgatagctctcacctctatcgataggaccatcaaatgccgaagagatgctatgcgagatgccgtacgaagagaccgacgagctccacaccctcctaggagcctgacagagaacgacactcgcctcacgggctcaacggcgattcaaagcatgtccacagggacactaagacgaactcgcctaactcgctgcagagcaacacggacactgacgtgacccaccctgaattcacgagcatcaatgctgtctccatcgataatctttacagaatcatcgaaggcacgcctcgagagaatggtaccaacgcgtatgataccgtggacaggattacgtctctcgcccataggaagaagaacggtgct

SEQ ID NO: 114863 - DNA, 680 bp, Glycine max
  unsure (1)..(680): unsure at all n locations
  Clone ID: PAT_MRT3847_74731C.1
ctaggtactataacggattctggaattctggaaggttcttcaagtcaaacgcgagtcaatgactgaggccgcgagcctgcaagcacttatacgaagtcccgcagttttcatggagttcctgcagaggagcgtctacactggcgttctttcttggttaaactaggagctgacaatcttaagggtgtaaaaaatgaagaactcctagttgcttgccataatgtcagaagtgatctttgtgataacctcagctgtgaaggatgtatgtgggaagcccccaagtgaacgtcttttcctggataaatatggaagaatttgtttgtgcttggatgaaattgtatggaagggatatttggaaaatacagaaaaagatagaatcaaaagattggtcaggttaaagcctccaactgagttctaaatgagaagttcaaaagtactcattatacaacttgcagtctgtgttagttgttcagcatcttgcaactgggagtgggcagggcacttagtttatttccaacaattgtcggtcaggcaaacctctacatatgagcnttcttcctttatgtagcgaggcaaggatttgctgggccancatttgnattaccccttcttaattttaaacattntttttctggcatcaaatttttatatttattctatcttgggcattgggcttttggttg

SEQ ID NO: 114864 - DNA, 103 bp, Glycine max
  Clone ID: PAT_MRT3847_74732C.1
taggactgaaaccatggacattaccaccgtatttggctacaaactggaaaacgccctttgcctgacctttactgccagatgcatcaactccatccctgaaagg

SEQ ID NO: 114865 - DNA, 1409 bp, Glycine max
  Clone ID: PAT_MRT3847_74733C.1
ccacgcgtccgctataacggattctggaattctggaaggttcttcaagtcaaacgcgagtcaatgactgaggccgcgagcctgcaagcacttatacgaagtcccgcaggtatgctggcttcctattcactcacttgggcctgtttgtaactgagggttgatctgctatgttactatcaacacccccttcgtcgaaaacaaccttgtccgcaaggttgtgaagatcacgtaagtcgtcccaaagttcccaggacgcctcctccggaggaagaccctcccattgcaccaaaacacgttttaccggcgtcatgcccgaggagtcgagtttccagtcgaggattgcgaaagggtgtacaatgggttttcatggagttcctgcagaggagcagtgtggttttgctgaagggaggagacgagacaatgatactggctgttctgtttgccaacgttgagggcaatatcctcatcgaacgtttcgtttcgtgcccaaaattaataactcaactacgtgggaaactagaaaactgatacgggcctaagctgacgttcattctaagataaaaagatagctgtcagagataaggttgtaaaaaatgactaacttctagtttcatgctataattaaattttttcagttaacacaatccaactgaatgtcaacaaattaggtatgaggacggaatctggtaatctggaaggttcttcaagtcagatctttgtgatagactcagctgtgagagccgtatggcacttaccccaaattccgcgggtatgctggcatccttttcaaacacttgggcctgtttgtaactgagggttattctaggatttttctataaacacacaaaaagttagaatcaaaagtgtggtcaggttaaagccgaccacttagttctaaatgaaaatttcaaaagtactcattatacaacttgcagtctgtgttagttgttcagcatcttgcaactgggagtggcaaggcacttaagtttatttccaacaattgtcggtcaggcaaacctctacatatgagctttcttccttagtgtagcgaggcaaggattttgctgggccaacatttgtattacccttcttaatttttaacattttttttctgccatcaaatttttattttattctatcttgtgcattgtgcttttgttggatttggatgaatccttttttttgttcctacgatgatactctctctctctctctatatatatatatgtatatatactttcctcaacagttaactactgttacgcaatttgttcctgtgatgcatttcgatgttaaactaggagctgacaatcttaagggtgtaaacaaaaaaaaaaaaaaaaagaaaaaaaaaaaaaaaaaaaaaaaaaaaaaaagaggggaaaaaaaaaaaaaaaaaaaaaaaaaaaa

SEQ ID NO: 114866 - DNA, 284 bp, Glycine max
  Clone ID: PAT_MRT3847_74734C.1
gttcaccgctactctctgttgccacctcctccgaggcccacgcgcgaattccgagcgtgctgacgctatatgctctattcagcatgacctgggaacccctgatctggtgactcgtaatttaccggacttacaatatccaggcttgcaccatgcggtgaatgtcgaatgtatgtgtgacggtatcattttcgtcgccatagctttcatcacctcaacatcccaaggcgcgtgggctccacgccgcgaaactcgcgtcgtgggccgtgctgagttcccgatgttgg

SEQ ID NO: 114867 - DNA, 1033 bp, Glycine max
  Clone ID: PAT_MRT3847_74735C.1
gtagaattaagactaggttccattatttgggtagtttatattagaataggatggaatgaaacctcatgctttgtattctattccttcccctccaataaaactatccaggcaatagaatgctaattttatttcattccactccatgattccatttcatttcactcatcactagagacctaaacatagcctcaggaaaaaagaactacaaaggcaagtttttaacctgagaaggcatcggaaagcgatgttggcatagaagctttggtgaggtccataataaacaccatttttgtgactataaatgcaggaaaataattggaaacctaaaatcaataatacacaggaaacataacataaatagtaactgttctgaacgggcaccaatgcctttaaaagcagcaactggcccatctgtagttccatatcagtacccaaatcaacctctacctcgccctccacctctgtttccaccaggctttccaccgggaccacccctacctcgtcctccttgtcctttaggtccaccttcatcaaggccacgcccaattccttttggttgacgtccaccaggaccatcctccctacctcttcctcttccacgtcccacaccagggggtttgcgatcagtgcggctctttgtttcttcctggactttgtcaataacctcatcaggaacccgaaggtactttatggtattgccgcgaatgtagcactcgggcatacgccaaaatctatctccatctttagaggtacaaatgacttctcggagatgaatgttcatccatgtatcacaattaaccaagtgcccgttataagtctccccatttttcagttccactagcatagggtggccttgggcagtcttgagaagggaaaggggcagcatggtcggaatcggtgattgcagagttgacggtgctaataagtgtcactgtttctttgcgatttcacagagaaaactattaatcagacctctcttttgttcctactttcttttttaatcttaggcgacctcgagccgaatcggctcgag

SEQ ID NO: 114868 - DNA, 461 bp, Glycine max
  Clone ID: PAT_MRT3847_74736C.1
gaaatccaccgggatttaccaatattttcctccaattggccgtaaaaggggattaaggaaacaaatgccggattagggccaaatcaaaaaaagaaaataaatggggctaattttacaaattccctaccatccccaacaatgaagatgaatttttaattatccaaaacacacacaattttttccatttacattccttttaaacaaatgaaacactttcaatcactctggagcacggtttgaagccctaattttgaaagaacttgaccgcattgccccataatacagagtgcaaatgggtttcatcactctgcctgactttatcctcactgagttccggtggagcccattgggttctgaaggcacaccgcccttttatttgccttactgaaggtccccaactggtgcctcattgaaccacaggaaatgaatgaatttgtattatttttgacttacactaacct

SEQ ID NO: 114869 - DNA, 738 bp, Glycine max
  Clone ID: PAT_MRT3847_74737C.1
caattattttatatgcattattattattattattattagtggtttgctaccatggtaatgacatatcagggaagggcctagagtgtaatagtagagagatggcaggtgtactccttcaccagatgtgccaagttttccagtcatttatgtatgagtagacaactaggattatggtaggactaccatctttggagaacagggtaaagattttgaggaatcttttggcaaaagaaaaggtggacaccgaagttgagtttagacaccttgcaactatgacagaagagctgcctgctcgtgtcgagaagaacttgtgcacaactgctgcttatcggcctgttagagagctaattcagcaagagaggataaagagtctggtaagtggcaattgtataatttattttgagtttaatggcgatgcactcatcattcaatcacaaatcacagttaacataactctttaagataatggcgatgccctcatcattcaatcacaaatcactcatcattcaatcacaatttattttgagtttaacggcaatgcactcatcattcaatcacaaatcccagttaatataactcttaagataatggcgatgcactcatcattcaatcacaaatcacagttaatataactcttaagataagtttgttcaagtcaacaaacttatcataaacggtgttttttgattggatgacagtgtttacacagtgaataaaataaaaaataaaaaaaaaata

SEQ ID NO: 114870 - DNA, 356 bp, Glycine max
  Clone ID: PAT_MRT3847_74738C.1
aaggaaatcttccaggtttcatgctcttaaattttaggggttacctttttttcgacaacaaaaagggtgtttatttttcattttaccgggcccaagccaaaaggggaatgaattaaaagccttacacccgtcagcttattaaaatataccacaattcaccccaaagaaaaagaaaagggacaacatttggcccttcccatcccaaccattgaatacattggctaaaatttttaattttaacagctaatcaaaacttcccaaaaaaaaaacaaatcaagttatcaagggggggtcctgcgtccccggcggggagtctttcgcttcacatacattttttccattttattcagggggcg

SEQ ID NO: 114871 - DNA, 387 bp, Glycine max
  Clone ID: PAT_MRT3847_74739C.1
ccgggaaaaaaaaatcccaacaaattgggctttgaacaggaacctaaaaaaacctcctaagggggaaaatgggggggcaaaacaaaaaaaaaataaggcccttttttttaacaaattttacctaggggaaattcccttggcacatttacaactgtttggggggaatttttccccgaaatttccctcaaacccttttccgtataaaaagaaaatagccccccccaaaaattaaaagggccaattttccagtgggggggtgcactaagggaaaattttgtttatttggaaactttttctttccttaaatcgttaaaaatggggccccccgaatttgccaaaaaaaaactaaaatgcccccccccttttttttaaaaaccccccccgggg

SEQ ID NO: 114872 - DNA, 317 bp, Glycine max
  Clone ID: PAT_MRT3847_7473C.1
gtttgagtggacctgtctcagctacctttaccttggtattctctactcatgtcgtgcattcgtgtttcaaccggctccattggcttccttatgtcatactacttttgtgcacttccttggttctcattcagtaaagatagtttgaggttcttgttgtcattgcttattaactatgaaaaaggttgattgatataaactggttcacatttgcaatatatagggcatacggttgttaaattcatttgtttgattttatatttcaatggaatcttcaatttgttctccttatgcctgtttcccaatattattgtattaat

SEQ ID NO: 114873 - DNA, 217 bp, Glycine max
  Clone ID: PAT_MRT3847_74740C.1
tatacacgttcgttgaggtgtaatctatcttatcgattgcagagtaagcccttgatgggggactttcctgcgacaaccaagatgcttgcatcgctcttcaacgctactttctgtcagagaggtggtcgacggatgaatacatcctatatggagcgtacattgtggcactatcacccgataagagaagttgcgtaagcaaacaccaatcatgccttta

SEQ ID NO: 114874 - DNA, 767 bp, Glycine max
  Clone ID: PAT_MRT3847_74741C.1
ttaacaacattacaaatggagagtgtggaccttaacggaaacattccagttaatttatttagccttgcctatttacaaaatgttgtgctaaacaacaacaaccttggtggaaccttggatattggcaccaacaacagaaaacacctgaaacttgttaatttgaagtcaaattcaattcaggacttcgagcaacaaaatgatctcccagagaatatcacgataatacttgagtccaaccccatttgtacagaaacaggagctatggagaggagttactgcaaaaaacacaacatcttagatacagaaccacaaaataaatgtccacctgatagttgcagtcgagatcagattctaagtcccaagtgcatatgtggatatccaattacaggaactttgactttcagagcaccctcatattttgaatggagagacacaacatccctggagaaacatcttttgcaagaatttcaatctcatgatctacctgtggattcagtttctttaatcatttcagatccatttcatagttttgtgtataccatacaaattttcccacgaggccaagatcgtttcgaccgacaagacaaatctacaataagctctattcttggcaacctaagtgctactagtccatatgattttattacaggaaaccaaggaccgaaggagtcaactaattcatcaagcaaggtcttaattattcgagtagcagttggggggttctttcgttatgcttgttttattagtccttgcaggtgtttatgctt

SEQ ID NO: 114875 - DNA, 296 bp, Glycine max
  Clone ID: PAT_MRT3847_74742C.1
gaggctcaggagcaaggaccagcgcaagctttttccccgaaaggtgcagagggagctgctcacgaggggcatgatcacatggcgccagcagaaccaccttctaaacatgcaagcagccgcaaaaaccatgcagaggacggcggactcgatccccgacagatcacactacgcattgccagagagaggccgcgacaacgccgcaggacgcctaaacagagacgggccgcgaccgcgccagacaggcggaccacgggacacgagcaaagcgagaatttttttttttccccccccccccc

SEQ ID NO: 114876 - DNA, 170 bp, Glycine max
  Clone ID: PAT_MRT3847_74743C.1
tcgaccaagccttcgggtttgttggaaacgcacagatgcaatcattgtccacactaaccatcagcgacatgactgggtctttccctagtcaagactgtccaaggtcaacttatgctggtcgaacttaaataggtgaagacacataccgttcattaacctaatggctacac

SEQ ID NO: 114877 - DNA, 333 bp, Glycine max
  unsure (1)..(333): unsure at all n locations
  Clone ID: PAT_MRT3847_74744C.1
aaacataaaatttaattacctgcttgtttgtaaacatttaacccccccttcaacaaaaactacaatcatnacatgnctcattttcacgacccaatcccccatattaaacaccaaactaccttattttttcccactaaaattttaacaaatcaaagaagtataccaataccacccaaaacaaaaaccaaaaataattatccacaaaatgatatttacacatttaccaattgacattatttccccaaccctccaatcaataaacattactttcttcctaacaactacaaccctttaatcatgaaacctaataaatatcttccatacactatcacc

SEQ ID NO: 114878 - DNA, 190 bp, Glycine max
  Clone ID: PAT_MRT3847_74745C.1
atcttttatacaaacacacttctaaatccacttaaacttatagttcttctcatacacaccaccaacatggactgtttcatattgcaagcgggctaccttaattcagcttttcccttttttggtactattccaagatgtatacaaaaccgactttataatactggcaatcgtatcttttcaatcatcccca

SEQ ID NO: 114879 - DNA, 1058 bp, Glycine max
  Clone ID: PAT_MRT3847_74746C.1
gcttatggcttacctaaaacaatttatttatttaacaactttcaaacagcatcttacacaaaggctttgctttcttcatatgtcatgaactacttatcccagaaccccaaagttgttattattcacgggaagagaattcgtgactgaagaaccttttgactaccaaggtacaatatggtagaaagagtccactaattctgtctatggtcaaaagagtaaagttgctatctgtgactgtgaatgctcccaagacatgtacaaacccagattctgattcacatgattagtacaaactttccctaacaagtgaaaaggctatttgctaatgccactcactcactccctcttcatattcagatatatgccatgcatatggattatggagatttaaattacatatttaagaagaaaagttctcaaaagaaatctcctatagatgaagaactgaatatagaaatcctccttctcttcctgctttctaacatgtcctgtgaaacagaaaatctatctaacactgatcttagagcttgatgaacagaccctgccagaaactggcggtactcgggatcttcaatattttgttctttgcagctaattatcacaaacacactattcatccttcctcccaaggttgcaatctcagcccttattatcataagatgaagtgcatcaagtgcttgtcttatatcggccaataacccgggtttgtattcacaacatagtgatgccttgattgagtaagggaaaccattcaatccaccctcctgttcttcaactcttatttcatcactgtccttcggtatcattaggccttcactagcttgtgtcgcattcgttttcagctctttcaaatgtctaataacctcacccagcaaggttgctttgtccaacttcttagcaccaggaatgacagagcgaagtgtatcaagatgtgcattaattcttgctctccttctcctctctgcctcactatggttcttcaaggcttcaatgcttctctcaggagacacacccttgcgttccaatttgacaggggcctctacaagctctcccttctc

SEQ ID NO: 114880 - DNA, 189 bp, Glycine max
  Clone ID: PAT_MRT3847_74747C.1
ggttggtcataatctcacacaatttcactctttaaaatgtatatatagtgcaaaacatttttcagcccagagggattataacacaagcttaagccattgcacaccccacacttaattgcttatttatcagggaatagcttagctaaatttcttgaaacagaggctcattacggaggacacatatgatgc

SEQ ID NO: 114881 - DNA, 2586 bp, Glycine max
  Clone ID: PAT_MRT3847_74748C.1
taacatatatacacaactacataaagtcaaggcaaaccatatcatgaaaaaccaacttatgttcttatccatgttcctttcgtttctgattcttccaaccgctagccaaaaacatgcatgtggctctgccaagactagcaactttccattttgtgacacttcactatcttatgaggacagggcaaaggacttggtgtcacgcttaacacttcaagaaaagacacaacaactagtaaacccttctgcaggtatttcgcggcttggtgttcctgcttatgaatggtggtcagaggctcttcatggtgtctcaaacttggggccaggaacacgttttgacaagaaggtgccaggtgccactagcttcccagcagtgatactatcagctgcaagcttcaatgcaagtttgtggcagaagatggggcaggttgtgtcaaccgaggctagagccatgtacaatgtggatttggctggcttgacattttggagtcctaatgtgaatgtgttccgtgaccctaggtgggggcgtggccaagaaactccaggggaggatcccttggtggtgtctagatatgctgttatgtatgttcgtggcttacaagaagtggaggatgaagcaagtgctaaagctgataggcttaaggtttcaagttgttgtaagcattacactgcttatgaccttgacaattggaaaggcatagatcgcttccatttcgatgcaaaggtgacaaagcaagacttggaggactcgtaccagcctccgttcaagagttgtgtggtggagggccatgttagcagtgttatgtgttcttataatagggtgaatgggattcctacatgtgctgacccagaccttctcaaagggataatcagaggccagtggggtctagacggatatattgtttcagattgtgattcagtggaagtctattacaatgcaattcattacactgcaactcctgaagatgcagtggctcttgcactgaaagcaggtttaaacatgaactgtggcgattttcttaaaaaatacactgcaaatgctgtaaacttgaaaaaagtagatgtagcaactgtagaccaggccttggtgtacaactacatagtcctgatgagattgggcttctttgatgaccccaagtcacttccatttgcaaaccttggaccatccgatgtatgtactaaagacaatcagcaactggctctagatgctgcaaagcagggaatagttttgctggaaaataataatggagctcttcccttgtcccaaactaacattaaaaaattggctgtgattggaccaaatgccaatgccaccacagttatgattagcaactatgccggcataccttgtcgctacactagccctttacaaggactacagaagtacatttcttctgtaaattatgcacctggttgtagcaatgttaaatgtgacaaccagagcctcattgcagcagcggttaaggcagcagcctctgctgatgcagtggtgttggttgtgggattagaccaatctattgaagcagagggcctggatagagagaacttgacattacctggttttcaagagaagtttgtgaaagatgtggctggtgctaccaaaggaaaagtgattttagtcataatggcagctggtccaattgacatttcttccactaaaagtgttagtaacataggggggatattgtgggttggttatcctggtcaagctggaggggatgccatagcccaagtaatatttggagactacaacccaggtggtaggtctccttttacatggtatccacaatcttatgttgatcaagtgcccatgacagacatgaacatgagagccaacaaaagcagaaatttccccggaagaacctacaggttttataatgggaattccctctatgaatttggtcatggattaagctactccacattctccatgtatgttgcatctgctccctccagcataatgattgaaaacacatccatttctgaaccacataacatgctctcttccaacaactcaggcacccaagttgagtctctctctgatggtcaagccattgatatttccaccataaactgccaggacttgacatttttgcttgtcattggtgtgaagaacaatggacccttaaatggatctcatgtggtcctagtgttctgggagccagcaacttcagagtttgtgattggtgctccaattaaacaacttataggatttgaaagagtacaagttgtggtgggggtgacagagtttgtaacagtgaaaattgatatatgccaactgataagtaatgtggatagtgatggcaaaagaaagctggtcattggacagcacaccattttggttggatcttccagtgaaactcaggttagacaccacattgatgtcaaactttctgggagtatgaatggaaaagaattcatgtctgaatgaatccagtaagagaactttgctagcagctacaagtcatagcaataatacgatgagtttgataacagtatgtggaagtggaagatatgagatatcatatgtatgatggatcatatactatgtattagatattactaataaaaatactatgtattagctga

SEQ ID NO: 114882 - DNA, 251 bp, Glycine max
  Clone ID: PAT_MRT3847_74749C.1
tttaacagaacgacgacatgcttatagatcccatctactacgtcaaggatgattggagctatagctcatagcgggcaccgatataccggtacgaccagatatatccactgaaagactggagtgctaaagtggagaccctcggatgccttggaggggggctggcatagttcccagaatctccatgattaccgaagaagcattgagaccctgccgcatcatgggtgggtgctggctcggaaagttccctcaag

SEQ ID NO: 114883 - DNA, 482 bp, Glycine max
  Clone ID: PAT_MRT3847_7474C.1
aagtattcaggtataacaaccatcatgtttcatgtcattttcattctccaatgtagcattatttttaactttgtatgtggcatgtctcatgcagttgcaaaaagcagtgaaactattagattcaggggctgtcagggccacaagatttctctggcgatatccaacagctcgagttattttatttttctacttggtgagatcagttcattacatgtttaaaatgtcaatttagctgagatgaaataccattaaaggatttgaaattttacttaccaaccttgagaaattgcaacaggtttttgtacatctcttcttgatgtatctcttgcatcgccttcaggtaaagatctgattgcaatatagaatatatgacaattactgatacatgcagccatgttaaactgatacctttgaatagcttatcactgtaaaatcttgtggtaccgacatctttaatataattttgtagctgatctataaaa

SEQ ID NO: 114884 - DNA, 931 bp, Glycine max
  unsure (1)..(931): unsure at all n locations
  Clone ID: PAT_MRT3847_74750C.1
cccacgcgtccgcccacgcgtccgcccacgcgtccgtttagacttactcatataaataactcagggcggtggctatgtcaaactgagaactaagatcccgctggcggttggcgcaacctttcgatcttcatccaacggggcaacgttggatctgctgaactgaacttctttttatatgcactctgtgatttctcgcttcttcgccatgggagaagacttcaacaataacgatcctctcatccgcaaccaaaacgccgccgttcaggctcgcgccaaggaccagaaccgcgccaacgcccttcagctcaagctgattggacagagtcaccctactggtctcacagcgaatttgttgaggctctttgagcctaggcctgccttggactataagcctcctccggagaaaagaaatgcccatcgctaataggcacaaaaaagagcaagaatacacaagttaagactagagaagggagctgcaaaggctgctgaggagcttgagaaatatgatccacacaatgacccaaatgtatcaggagatccatacaagacattgtttatagccagacttagttatgagagcactgatagcagaatgaaaagggagtttgagtcatatggtgcaatcaaacgggtaggtgttttgaatatcccaaagggattcagtaaggatatcgtatatgctaggctcttgatataatgtattttacttctatttgacatctttacatgctattaagcttcaaaatgtattttcaatttcaatacttttaaaattaagaactagctttttttattataatagtaacactacttttttaaaccctttttgttagctgctgattaacctgctttttgtaatttaaatggttctcatgattaaccatcttgtcgtanagttaattagttacgcataattntaatgccattctgt

SEQ ID NO: 114885 - DNA, 395 bp, Glycine max
  Clone ID: PAT_MRT3847_74751C.1
acgcgccaggccacccttccgttccgatacgacagacggcggaaggcggaggtcataatacgagactatgtgaagggatgtatgtctattctggcctgcaaagctcttccacgcaaacacatgacataacacaacgcaccgctatggatcgcgctgtcccttcaaatcacacactcatgattcattgcgcgctaaaaagagcacagacagctgagggacatccgtgttggccccaaagttaactaaaaaatagatgtgcagacaatagctttggactatgcaaaggagatgatcttgatacagttgctgacaaaagaccactcatgctatacactcctaccgggaaccccaaaattgatggcagacacacacgaatgactgctactatggctatt

SEQ ID NO: 114886 - DNA, 546 bp, Glycine max
  Clone ID: PAT_MRT3847_74752C.1
tttttcttgttagtgaaattgtgttagacctgattaattaaatagatcatttttgtctgtgtccagtctccactccacccgtagtgttcaaacacacatgacaaagacacgaatattacctttttacacaattttcttcctattgtttcatcgtaatcctttcttcaatgcaatttgcttgaaacatgacagttctacagctttacaagggtgaattgtgttgatcatcttttatagaaaaaaggtttcaattattgtcattctttcttgtgatcagttttatggtggttccatatcagagggctccgagttacaaatagaggttgcagagtttttctggaggaatgttcagctcaatggaagcctgatcataatatctgagaatgttatgggctcaatgaagattaatgagaacggtgaatccatactacattatggccaaaggtgtggaagatgcaaattgcaaaatgtcaaggtattgaacaagggaattgattggacttgcggtgaaaacatatactggaaacacgatgtgcagcgatctga

SEQ ID NO: 114887 - DNA, 509 bp, Glycine max
  Clone ID: PAT_MRT3847_74753C.1
gccacacctgcgggcagctcaacacaaagccccagagccagggatatgtccgtactttattcacgcccatcatcatatggtataacaataacccagagtcgggtccaaaaacgctacctgtgcgcccacattcacacgtaggaggactacaaccatcgctgactatggttgactgaaaccctgtgctgcctcctgatgaacctatagcacactacaacaatcgccatgaatctccggctgagagtgcatgtggtcatgaaactcggcctactgctgatgcagatgctgcatacaagatggagaatggaccagccgaaggtaattgccttgcacagaaagtgattcatagagtatctagcccagaccaagttacccctcaggaagaagatcgagaaagtgaaacatgatatgtgaaaaaatgcatcatctacctgaagaagacctagaccagctaaagaatgcactgcgaagaaccctagagggagggaatgggcctgaacacagatagg

SEQ ID NO: 114888 - DNA, 2097 bp, Glycine max
  Clone ID: PAT_MRT3847_74754C.1
atggaagaaagtgaaattctgaccttggaggtctcgccgccgccgcctcccgacttcaacttccgccgcgaaatcgcgcgcctcgccgacctccgcgacaggctctccgcgtgctctactttaaacgagaagctccgcgtgatcgacgccgactccagagtgaagcgcttcttccgttcccgccgcggcctcgctggggttttggcatcgctgcaattgagctccgaccaactgttcctgctcaagtgcgtggttgccgccggacaagagcacgtgctgtgtttgggcgaaacggaatcgttggaatcctccgtcgccacgagtgcagtgaagagcgcgctttacactctggcggatatgattgagaatatggattcctttaacggcaatggcggagcgggttttgggatggctttgggggatcacgagattgcggagttgaacaatttgttagagattttggcagaaattgagcgattctatgactgtattggaggaattgttgggcatgacgtgaaagaatgccaaattttgggaattaatgcacctaatgggcttaacctttctgaagacacagagtatgcatctcaagcagctctatggggtatagagggtttgccagacctaggtgaaatttatccgttgggaggctctgccgacagacttggtttggttgatcctaacacaggtgaatgcctgcctgctgcaatgctaccatattgtggaaggactttgttggaaggtcttataagagatcttcaggctagagaattcttgtacttcaagttatatgggaaacaatgcatcacacctgttgcaataatgacaagttccgcaaagaacaaccacaaacatgtcacctctctgtgtgaaagactttcatggtttggaagaggtcgatcaactttccaattttttgaacagcctcttgttccagttgttggtgcagaagaaggccagtggctggtcaccaaaccattcagtcccttgagtaagcctggtggtcatggtgtcatatggaaacttgctcatgacaaaggcatcttcacatggttttactgtcaaggaagaaaaggtgcaactgtgcgccaagtcagtaatgtggtggcagccacagatttaaccctcctagccttagctgggattggcttacgtcaaggaaagaaactgggatttgcatcttgtaagcggatcttgggtgccacagaaggagttaatgtgctcatggagaagaaaagtcttgatgggaactgggaatatggtgtgtcttgtattgaatacactgaatttgacaagtttggaattactaccggacctcttgctccaaaaggtttgcagacagagttcccagccaatacaaacatcttatatattgatttgccttctgcggagctagttggatcaagtaagagtgaaactagtttacctggaatgacacctgatggcgctctattagatatcttacgaaatgctcatgatcttctttcacaatgtgatataagacttcctgagattgaagctaacgagaactatgttgattcgggaccaccatttctcatccttctgcatcctgctctcggtcctctttgggaattttatggtggttccatatcagagggctccgagttacaaatagaggttgcagagtttttctggaggaatgttcagctcaatggaagcctgatcataatatctgagaatgttatgggctcaatgaagattaatgagaacggtgaatccatactacattatggccaaaggtgtggaagatgcaaattgcaaaatgtcaaggtattgaacaagggaattgattggacttgcggtgaaaacatatactggaaacacgatgtgcagcgatctgaggtgctgcagatcatactgcatggaaatgctgaatttgaggctactgatgttgtcttacagggaaatcatgtgtttgaagttccagatggctacaaactgaaaatcacgccaggaagcccaggtttagcaatcaagttggatccaattgatcaagatatgatggagagtggaagctggcactgggattacaagatagaaggttctcacattcagctagaattagtagaatcataa

SEQ ID NO: 114889 - DNA, 3327 bp, Glycine max
  Clone ID: PAT_MRT3847_74755C.1
tcctcgcgtccgcggacgcgtgggtttgtttgtgtatgtttaaaattatggaagtttaattgaattctatcagcaaatggctgtgctctctaaacatgttggttcttaaatggtgaaatacagtatccacggtctatttattaaatgagcattttaacatatttttcttgttagtgaaattgtgttagacatgattaattaaataggtcatttttgtctgtgtccagtctccactccacccgtagtgttcaaacacacatgacaaagacacgaatataaccttttttacacaattttcttcctattgtttcatcgtaatcctttcttcaatgcaatttgcttgaaacatgacagttctacagctttacaagggtgaattgtgttgatcatcttttatagaaaaaaggtttcaattattgtcattctttcttgtgatacgaaactctcctctgctttttttcaccataataaccgcttcgtcttctcattcagctccaaaccttctttgtttcattccgactctatctcttactccaaagttctttctcttccatcttcttctctatcctcatgttgccatgtgtctcgaatctccaccgagaccttggaggtctcgccgccgccgcctcccgacttcaacttacgcagcgaaatcccgcgcctcgcagacatccgcgacaggttctccgcgtgctctactttaaacgagaagctctgcgtgatcgacgccgactccagagtgaagcgcttcttccgttcacgccgcggcctcgctggggttttggcatcgctgcagtagagctctgaccaactgttcttgcacaagatcgttattatcgccccacaatagtaggaactgtgttcgggaattatagagtatatgtaatacctttaaactaataactgactagcttatgtgctgtaaattaactggtatagggtaatcatgtgtttgaagttccagatggctacaaactgaaaatcacgccaggcatcccaggtctcttaaacttctgaaatgactttttgcttggttatttatgcagaagtttcctgattcaatatctgcatttatcatgattatgtttagaatgttagttttgtaatccttagtcaaaaaatatttgttctgactagtcatagagtgttactgcattaggttcataactgcatttcacgtttagccatctggttggatccatttaatattgttaaagtttgattggatactatgaataaatgtcagtgttctaaacgtgttggttcttaaatggtaaaattaggtatacatggtccatttattaaattagcattttaacatgtttttcttgttactaaaattgttgtagacctgattaattaaatagttcattattgtgtgagtcctttctccgaagctcccatagtgttccttcaggcttgacaaatactcgaatattagttttttagaaaattttgttccaaatctgttgcagtaatgctatgttccgcaaagttcacccacaaaattgtcaccgctcagcttgaaagacttacattgttttgatgatgtctaaaaaattaataatttcattgatagcctcttgttccagttgttggtgcagaagaaggccagtggctggtcaccaaaccattcagtcccttgagtaagcctggtggtcatggtgtcatatggaaacttgctcatgacaaaggcatcttcacatggttttactgtcaaggaagaaaaggtgcaactgtgcgccaagtcagtaatgtggtggcagccacagatttaaccctcctagccttagctgggattggcttacgtcaaggaaagaaactgggatttgcatcttgtaagcggatcttgggtgccacagaaggagttaatgtgctcatggagaagaaaagtcttgatgggaactgggaatatggtgtgtcttgtattgaatacactgaatttgacaagtttggaattactaccggacctcttgctccaaaaggtttgcagacagagttcccagccaatacaaacatcttatatattgatttgccttctgcggagctagttggatcaagtaagagtgaaactagtttacctggaatggtgctaaatactagaaagccaatagtttacacagatcagtttggaagacgtcatagtgtctctggtggtagacttgagtgcacaatgcaaaatatagctgacaattattccaattcatattcatccagatgttataatgatggtggaagataagctagatacatatattgtatacaatgaaagaagaagggttacctcctctgctaagaaaaaaagaagacatggagacaagtctttacatcagacacctgatggcgctctattagatatcttacgaaatgctcatgatcttctttcacaatgtgatataagacttcctgagattgaagctaacgagaactatgttgattcgggaccaccatttctcatccttctgcatcctgctctcggtcctctttgggaagtcactaagcaaaaattttatggtggttccatatcagagggctccgagttacaaatagaggttgcagagtttttctggaggaatgttcagctcaatggaagcctgatcataatatctgagaatgttatgggctcaatgaagattaatgagaacggtgaatccatactacattatggccaaaggtgtggaagatgcaaattgcaaaatgtcaaggtattgaacaagggaattgattggacttgcggtgaaaacatatactggaaacacgatgtgcagcgatctgaggtgctgcagatcatactgcatggaaatgctgaatttgaggctactgatgttgtcttacagggaaatcatgtgtttgaagttccagatggctacaaactgaaaatcacgccaggaagcccaggtttagcaatcaagttggatccaattgatcaagatatgatggagagtggaagctggcactgggattacaagatagaaggttctcacattcagctagaattagtagaatcataaaccactaaccactttaaatgtctgctgcgtgaatcatggttcacaactggcattggggttcattacctaaataatttcgattaccaagtgacaggttgaacagaagttaagcctttgtcacttttggttgttttaattgtaatatgttggtaggtttgtaaaatccgtgtcacttccctcgtgttcttctatttttccattctttacccccttttatttattgggatgatctcatgtaaccaacattgttaaactgagatcaattcaatcaatgaatatggatctatttcgttaaaaaaaaaaaaaaaaaaaaaaa

SEQ ID NO: 114890 - DNA, 1213 bp, Glycine max
  Clone ID: PAT_MRT3847_74756C.1
gcgagcccaaaaatcaagaaacccttcacacaaaccccaccaccaaccatgtccaccaaactactcctaaccctaatcctcatctcttacaccctctccaatgtcataggagaagaaacgggctttgtgggcacactacaccccaaatccttaggtcttcacaagaaacaaaccctaagccacttcaaattctactggcatgacatagtgagcagtggagccaactccacctcagccacaatcatcccaccactccccaaatacaacacaaccacttccttcggcatggtcaacgtcatggacaaccccttgactctgggccccgagctgggctccaagctcgtgggccgggccgaggggttctatgccctaacctcacagtcccagatcaacttgcttatggtcatgaactttgccttgtttgaagggaagtacaacgggagcaccataactatcgtggggaggaacgctgttagtgaaaatgaaaaggatattcctgtggttggtggaagtggggtttttaagtttgctaaaggatatgctcacgccaagacctacttctttgatcccaagactggggatgctaccactgagtacaacatctatgtcctgcattacgaggaggggatctacgcactaacatcacaatcccagatcaatttgctcatggtcatgaactttgccttgtttgaagggaagtacaacgggagcaccataactatcgtggggaggaacgctgttagtgaaaatgaaaaggattttcctgtggttggtgggagtggttaaagaattttttgtcaatcaataattgagagattatttagtattatttgatatcattaagggggtgattggttatgtaattttttttatttaagtctaattatgagaggaaataattcttagaaatggagttgatgatttatagtgaaagatagtctttacaataatgaaattgtatcaatggtctctgaaatattcaatacccatcatttagtcggtccgggtaatatattttaataatcgtaagcgactcatttgaagaattttttcaataattgagagactatttaatatgatttctaatcattaagagattggttgtgtaatttttttatgagagtactatttatgagagaaaataatacttagaaatgaaattgatgatttacattgtaagagatttattctatttcatctttattttaaaaaa

SEQ ID NO: 114891 - DNA, 256 bp, Glycine max
  Clone ID: PAT_MRT3847_74757C.1
tacgaagctcgaatttacctagcaagagaggtaacaaacaattaactccacttactaaacataactcaatttctattattttctctagaacctttttaatagggttccaataccaaactggccggtaatattataacctactctctacaatacactcatcacttacaaatttttcatacattccacttattttctacacccttctaattcttctcttcctttttatcacttccattaacattctctattcatttta

SEQ ID NO: 114892 - DNA, 520 bp, Glycine max
  Clone ID: PAT_MRT3847_74758C.1
ggctcgagctggaatacagaaacatgagtttcaaactctactctttcattcataccatggaactcagaccttccttcctggttcttacttcattcctcttgttgctgctttggcttgcaagaatttacaagcagaaaatcaaagtaaggagtgtggttcataagcttcccccagggccatggaagttgcctctaatagggaacctgcatcaactggcaggggcaggcacacttccacaccacacccttcaaaatctatcacgcaaatatgggcctctgatgcaccttcaacttggtgaaatttctgcagtggttgtgtcatcctctgacatggccaaggagataatgaagactcatgatcttaattttgtgcagaggccagaactcctttgtcctaaaatcatggcctatgattcaacggatattgcctttgctccatacggtgattactggagacagatgaggaaaatatgtacgctagagcttctcagtgccaagagggttcagtctttctccttcat

SEQ ID NO: 114893 - DNA, 691 bp, Glycine max
  Clone ID: PAT_MRT3847_74759C.1
gttcaagatctcatctcatactatcaattgtcattgaaagtacttaaccttcaaagccaatcaactgcaaggggaaagttaagttttgtggatcttgctggctcagaaagagtaaaaaagtcgggctcttcaggtagtcaacttaaagaagctcaaagtatcaacaaatcattatcagcactaggagatgttattagtgctttgtcttttggtggtcaacacataccttacagaaatcacaagctaactatgttgatgagtgattcactagggggtaatgccaaaactctcatgtttgtgaatgtatctccggtagagtcaagcttggatgagacgcataactctctaatgtatgcatcacgagtgagatcaattgtgaatgatccgagcaaaaatgtttcttccaaagagatagctcgactgaagaaattgattggatattggaaggagcaagcaggaaggagaggagaggatgaagatttagaagaaatccaagaagaaagaccaactaaagagaggactgatggccggcattctatgtaacaggattttgattttggaatgttgtgtgatcaattcccactcaaacaagattgcataagcttgatagagtgtaatttatttgagggatgcaagatgtatagttgaattatgtacatatatttttaatattttaagtccttcgcatata

SEQ ID NO: 114894 - DNA, 764 bp, Glycine max
  Clone ID: PAT_MRT3847_7475C.1
gaaaaaacccaattttcgatttatttatttcccccctttgaacaaaaataaaaatcgcgcgaagaaaaatatatgtaaaataggacatggaattggaatatatttcccgtagcataataataataagaagaagaagaaaattccctacacaaagaattcttcaaccttgtgaaattgatgtatcaataagggaaaaaaggggcacattattacatccagaacagaaccacatagccctaaaactaaggctctagttgtagtgctttagcagttggattttgtggagaatgttgattttgtagtatcccattgaccccatgatgatgatgggaatcctcatccgaagccattgctgctgctgtagttgttttcttcccaagcccaaagtgccccaaaccctcccatccccaatcccaaaggttcaacacaatgtatgtcccaatcccaccaataagcccataagcaatcgaatacgtcaacggcatcagaatgagcgtcacgaacgccggtatcgcttctctcatgtcctcccaatcaatctccaccaccgatctcatcatcaaaacccccaccagaatcaacggcggccccaccgcccacgccggtatcgacgccagcaaaccagtgaagaaacacgctaaaaacgaatccgccgctaccgtcaacgccgtgatccccgttctcccaccctccctgatccccgcagacccctcgaagggcccacccccaaggggtgggggctttcccaatcccttgtcttttca

SEQ ID NO: 114895 - DNA, 360 bp, Glycine max
  Clone ID: PAT_MRT3847_74760C.1
gacgtatttgaaaccttaaaacctgtggaatcattaaatacaaatgttacaaataaccaacaaaaattggtacattgttgcaatttaaagaaagactaatttgggggaaatagttaatttaatccttaaattaaagtttagttgttaactaccatcagcatataaattaagatataaggtagagatgccaaattaccgtaagtagatggattgttgatcaagtcaagaactaacgggtaagtgtctgcaaatatgaattttgcatttggaagacgatggtttagtatgatgattagcttctgtacattggagttgaattgtagtatccattcattgactcgcgttagacattgtcttcgt

SEQ ID NO: 114896 - DNA, 454 bp, Glycine max
  Clone ID: PAT_MRT3847_74761C.1
attcggctcgagatatacacacacacttgtttacgccattctggccctcgacagttgtagcgtccctagcacagaaattgtcgttatgttggggacgaggtcaccgccactggtcggccaaagctgggatttgttgggctccggaggtggtgctgccgtgctgtttgatgccctcggaggccttggagggccgtgcgacatgatgaacttaccgatgcaatcaccaaagggcctacagagctctgaccttgatggtgtcggtctaggtattgtggcgggcctaggggaattatgattcgaggaacatggtcatgtttgcgcatgaaattgataccgatccgaaccgattccagtttctgaccaacgtggctttaaaaagggtgtgaatgaatatgtccgctggatgctgcagggattacacgttggagacataccatgtacctaacatcatgac

SEQ ID NO: 114897 - DNA, 430 bp, Glycine max
  Clone ID: PAT_MRT3847_74762C.1
agaaaataatgagaatcgcatgcttcaagagacttctgatgtatctccagttggagtacggaaaaggaaggcacctctaaatgcacatagcaagacaaaatctacttcaaacaggcagtctaattctagaagacaaagtcttgcacatgctggtttaacatggaaatcaggtgttatgcgaagcacccggatcaagacaagaccattgcagcattggtgtggagagaaagtgttatatgggcgagtacataacagcatgataacagtaattgcgatgatgtacgccgagagggaagtggatggcaaatcacctgtgctgaatgtgaagtcgtatgtttctgatcaatatgctgatctggcgtctaaagtagccaagtagcactttcactgtgtaccctttacttgcaagggcttgctatgagatgagtcc

SEQ ID NO: 114898 - DNA, 364 bp, Glycine max
  Clone ID: PAT_MRT3847_74763C.1
gggggccactaaaaaaaaagaatttttttagaaaagtctctagaacatacattttggtcccggaaaaaacccgcttttccttttcaacccacccaaactattcggcctggaccccaaggtttgttttttaagaaccccacacaccccccaccctttggtaaacccctcggttaaaccggggggagagggccaaaagccccgaaacccctgtgccgaaggttatggagggaaccctcccgggggggcgggccttttagattataggaggggccgttttttttcccccattgccaaccttttgaaagggtgggcaccttggtaacccaaagcggtccccatattggggggggggggagtttccctt

SEQ ID NO: 114899 - DNA, 291 bp, Glycine max
  Clone ID: PAT_MRT3847_74764C.1
cgttatcggatgaatgatgcgggcataaaggtcaacaagggcccatcataaggacaaagtataacgagatgcggtattgttcaagcacactaagatgctgcctcagtggctgacgcatgcatcagaacacaggcttactgatcattagatgtcgccaaattctatagctgactacgatatagatgcgacaggtgactgcaagttagcggcttgcaatccgttttacagctgtgctcgggactggctcttgaaatcacgcggtatgcgcttctggctggggaagattggccg

SEQ ID NO: 114900 - DNA, 386 bp, Glycine max
  unsure (1)..(386): unsure at all n locations
  Clone ID: PAT_MRT3847_74765C.1
ctgaatttgtgtacaactactttcatatcaagttgcaatggctcgattttcattggatgagatatcagacactggtgcctttgtgagatctgcttccacattcagaaattggatttcgagggacctgaattcgcaatttccaccagaatcagggaggtatcatctctatgtatcatatgcttgtccttgggcttccaggtgccttgcttacttgaatattaaaggacttaacaaagctatcagtttctcggccgtcaagcccatctttgaaagaacaaatgaatctgatgactataaggggtgggtttttcctgaatcagaaactgaggtgcctggagctgaacctgatatgttgaatggagcaaagactattanggaactttatg

SEQ ID NO: 114901 - DNA, 1582 bp, Glycine max
  Clone ID: PAT_MRT3847_74766C.1
gcaattggcttgatgggaattcgtgcatgttaaaattcattgcgcaaaagataattgtctgtactactgtatatgcttgtcttctgacttctgaatccatttaagtatgctactatgtagcttcgtgcatgcgccaaaagggtgagactaccattcgtacgccccaaaagcacttttcctccctctgacttttgctacaactactaccagtacaagcatatagttggaatggctcgattttcattggatgagatatcagacactggtgcctttgtgagatctgcttcaacattcagaaattggatttcgagggacccgaattcgctgtttccaccggaatcagggaggtatcatctctatgtatcatatgcttgtccttgggcttccaggtgccttgcttacttgaatatcaaaggacttgacaaagccatcagtttctcggctgtcaaacccatctttgagagaactagagaatcagatgaatataagggatggatttttcctgaatcggaaaccgaggtgcctggagctgaacctgataggttcaatggagcaaagactattagggaactttatgaaattgcaagtgaaaactatgccggaaagtacactgttccggttctgtgggataagaaactcaagacaattgttaacaacgagagctcagagataatccgcatgtttaatactgaattcaataatattgcagaaaaccccaccttggacttgtatcccactgatttaaaagcccaaattgatgataccaacgagtggatatacgatagtataaataatggtgtttataaatgtgggtttgcaaagaagcaagaaccatacaatgaggctgcaagacaattgtacggggctttggacaaatgtgaggatatactaagcaagcaacgctatatatgtggcaatacactaactgaagcagacattcgtttgtttgtcactcttattagatttgatgaggtttatgctgttcacttcaagtgcaacaagaagctgctacgcgaatacccgaatcttttcaattacacgaaagacattttccaaattcctggcattagtagcacagtgaacatggaacatataaagttgcattactatggaagtcatccttctatcaatccatttgggatcgttcctgtagggccaaatattgattattctgctcctcatgacagagaaaggttttctgcataggtggtttatagcatgtttgtataattgtaagagatttatgaggaattttctgtatcttctaagtgaactgttttgttgaataactgcagaaacaatagtgctttgttgaaaaacatattttcaaaataaactggcataggtgtgtgcttgtgtctactatctataattagaatgtgttcaaaagagtgtattgttggcatttctgttgtataattgtaagagatttatgagaaattttctgtatcttctaagtgaattgttttgttgaataattgcagaaacaatagtgctttgttgaaaaacatattttcaaaataaactgggacaggtttgtataaaaaaaaaaaaaaaaaaaggggcggccgccgattattga

SEQ ID NO: 114902 - DNA, 285 bp, Glycine max
  Clone ID: PAT_MRT3847_74767C.1
acttatatcatgtcacttaaggttactcacttatgaacagggttgccactgcaattacatagatggctacttcgcttacttatggagctgtactaccatcgattgctattctccaccgcaacgtagcctatgtcaaagctattaagaataccgagggaatgggccctggcacatacaccatgtggattggatggcatccatgatcaaacgctgtgatacattttgaacccgttctagtctctgactatgccatacgatcatgtgaattgaaatgtggatcttgag

SEQ ID NO: 114903 - DNA, 449 bp, Glycine max
  Clone ID: PAT_MRT3847_74768C.1
atcgggattgaaaaaacatgatggaaaaaagcaacgggtccacattcaatcaagatcttcatgcccgttaagaagtaaataatatagacaacggtccacattttacattttcaaacttttacaaattgtgcaatatggtttgcacctataaaaaaacaaactccatgctacaacaattatgctatgtgagatgcatcgcttgatttacttcttgccctcaccagaaacgtttaacttcaagaatataccgtctccatcttggaccacatacgttttcccttcctgtacatacttaccaccaacctccaccgttgactcacataccaaggtcctttagatcctcaaactgcataacctgaggacaaataaaccccctgttaaaatcacactggatagcccatacagctaggccagccttttgttggtgtcgaattgtcctacacttaacc

SEQ ID NO: 114904 - DNA, 230 bp, Glycine max
  Clone ID: PAT_MRT3847_74769C.1
ggctcgagcctcaatgcttctaagtttgatgtccggtctaacgacacaagcgcccaagcctggcggtattaggcaacgtacaacgcctccatgcagcatgacggtcttgaacatgaaagagggaaggctgcagactatggactgggacacagtgatcacagcttgtctaccgcatacagacgagctgattataacgtactacagggctgagagaattaggcagaatatgg

SEQ ID NO: 114905 - DNA, 168 bp, Glycine max
  Clone ID: PAT_MRT3847_7476C.1
tttaagaactataacaagatagctttatcatctattctatgaatgcacaattgaagcatcaaccttacgatatgaaagggaaacatcctatgctacgagactggctcctttttaacaggctaatttgttagtgaaatgagctcaagctcaatgactcccgttttcctt

SEQ ID NO: 114906 - DNA, 558 bp, Glycine max
  Clone ID: PAT_MRT3847_74770C.1
ggctcgaggttttttaattatagtcagagtttcgtctcaataatttgtggaatatagatttctatgagatgtcaatataaattcttaaagtgaatcttcaattctaattatacaatagtgccaaaaacacttataaaactgcatataaatattttcataagtaaatgtattctattgctgtaaaaaaaaaagtaaatctattctatttttaagtaataagtgcataaatttcggtaaaaaaaaattataagtggataaataaatatgaagagtgtgtttctttacctgctgcatgcattagaaattatatataattttgatttttaacccatgatattgatgtgaagtattaattaattttgttgatgactatttttttaaaaaaaaattgattaatcatttttattaaatttttttatcttgattacattttttttcaccctcaaaactcaaatgcaagaacttgcttaaagaaccaaattcaatatcattagatcaataatttattatttgagttattgggtgaaatgttggtaattgatgtatatcacacattaa

SEQ ID NO: 114907 - DNA, 433 bp, Glycine max
  Clone ID: PAT_MRT3847_74771C.1
aatttgagcttagtgagtaaactcaatcaataggcaggccaagttttcagaaaaaagcagcttgacaacttgaatgagttgcaatggttgggatgtctaggttgaggggagagcctgccataagattggggacggcctgtaaagcttcggagtggagttgcggatgccagtgcatacttagggagcggtattcctatgatcccttccaggatttgagtcacaagtcattctcatctggacttccttttttctgctctttcaaaaattgtgtaaaataaatattaacctcttttacactcctttgaagtagaaagtacgttcatcttcaaaggagtgtaaaagagggtaatatatattttactactcctttgaagatgaacgtactttctactttcagctttaatgcattgcttcttttattgtcctgtatatc

SEQ ID NO: 114908 - DNA, 1284 bp, Glycine max
  Clone ID: PAT_MRT3847_74772C.1
gagagacttaaagaagagggcttcttaacagacataatctatgatgacgaggttatcactcggttaaaggagagacttcaagttaaaactgataaaaatcttcctatggttgataacagaaaatactctggagttaggaaatcgactcttggactatcaggtggcaaagaattaatagccatcatccgagcttcagggagtattcgccgtatcgagagttcattaagtacccgtagctctggtatcattggagagaagttaattgagaagatacgcaaagttagagagtcaaataaatacaaggctgctattatccgaattgacagtccaggaggggatgctcttgcttctgatttgatgtggagagaaatcaggcttctggctgcctcaaaaccagtcattgcttcaatgtctgatgtggcagcaagtggagggtactacatggcaatgggagcaggagttattgttgcagaaagtcttaccttaactggttcaattggagtggtaacaggaaaatttaacctggggaaactgtacgagaagatcggctttaacaaagaaattatatcaaggggaagatatgctgagctccttgctgctgagcaacgtcctttcagaccagatgaagcagagctatttgccaaatctgctcagcatgcttataaacaatttcgagacaaggcagcttcatccagatcaatgactgtagaaaagatggaggagtttgcacagggaagggtttggactggtaaggatgcagctttgcgtggtttagttgatgctattggtggcctttctcgagctattgccatagcaaaaatgaaggctgatatacctcaagacagacaggttacacttgtggagatctctagagccagcccttctctacccgagattttgttaggcgtagggagttccctcgttggagctgacagaacggcaaaggaactgcttcagggcttgacattttctgatggagttcaagcccggatggatggaataaagtttcagacattggaagaatatccttttggcaaccctattttgtcaataataaaagacatcctcagttccctatagctgtccatagttcattttaatcattttgtctcactatattcatatagtttttcctatatgttgtgtcaaggggcaatagacgagaaaggtttcctctgtatcttgttctgtttcttcaaatgtctccctcaaaacccttgtaaatgcatgatgtaaagatggaaagttcaaagcgttgttttacgtatcaactcagacggaatt

SEQ ID NO: 114909 - DNA, 137 bp, Glycine max
  Clone ID: PAT_MRT3847_74773C.1
cgaggttgcgttcaatgttcagggggtttctgtcgactgcttcattggggtggctgagttgcgaacagggtcagtgtgtggagcgtgcgaatgtgcttgagatgaaagagtagcagatctcactggcagtgcatcgg

SEQ ID NO: 114910 - DNA, 199 bp, Glycine max
  Clone ID: PAT_MRT3847_74774C.1
aggcggacccttttttatgtcaagaagtttggcagcccattgccaaattcttaatttttgcttctgttggccttggggattccttgccaatccagcaggcagccgaattggttcaaaaaacccaacgaattggggtggcaggaaacctggttaagcttgttttaagggaggcagctattaaagggaaattggaatttaa

SEQ ID NO: 114911 - DNA, 491 bp, Glycine max
  Clone ID: PAT_MRT3847_74775C.1
gggggaaaattttgttttttttgccaagggcaaaataaacatttccttttggaaactttttaaaaatggaggggtaaacaaaaatgcccccaacttaattggaaaaaattttttccccatgaaaacatgcttgcccttgaaatgctaaaaaaactcctttggggttttttaactactcccctttccatgatcaacatttgttttttttgccaaaggaatttgcttctccttacatttttggggtttttcataaaaactttcccccattttgcctttccctttttgtttttgaaaggggtcgccccaacaatttttcttcttaactgccttttgccattgttttttaaaaacttgtaattcacgggaagacagtctccccacataaactttttgatcctttggccgagaagaaaccttttttccatttaagcctcccaaaagagggttaccctttgggactttttttttcccctcccccccccccacctttt

SEQ ID NO: 114912 - DNA, 316 bp, Glycine max
  Clone ID: PAT_MRT3847_74776C.1
gactacacgaaatttacaaaaaaaaaaaaaaaaaaaaaaaaaaaaaaaaaaaaaaaaaaaaaaaaaaaaaaaaaaaaaaaaaaaaataaaaataaataaaaaaaaaataaaaaataatttaaataaaattaaaaaaaattaaaaaaaaatcgggtctctttaaaggtttcaggtttacttccgtttcaatccaagttcaaacttcttcaatagtttccctaaatttcatttcagggtcgttctttttaaatttttgtaactggaaatccccggcttttccccattttaatccctttgaacaatatccccttttccc

SEQ ID NO: 114913 - DNA, 369 bp, Glycine max
  Clone ID: PAT_MRT3847_74777C.1
cacaaattgttaactcgagaccgtcatcgaactatgacgcaccccattgatccgccattagaggagcacgtgccaaagcagctgaggatgatcccgcaccagatgtgcaagacttcgccgcacgagatattagaggacctcaggacgccaccgcttacgcccgtgcccattgagccaatgcgcttgtcagcggcgtctttctcgctgtcatttctgaacaatattgactgcttgaagatcaacgagactgtcgtgcgcaacggtgtgacgtactatgtcctggaagtataccagtttcactacagttcccggctgcccacaaacgtaaacaacccacgcatggccgctacgcaccagtcggatggcagc

SEQ ID NO: 114914 - DNA, 258 bp, Glycine max
  Clone ID: PAT_MRT3847_74778C.1
ggatttgggaattattgctcccatcgccatagggttcattgtctgcgcttacattttgttgggaggggccttctctggagcggccatgaacccagctgagacatttgtgcctgctggggggagctggacctgaaccagccactggatctactgagcccggcctgatcatcgtggcggaattgctggccttgattacgaggctgtctttataagccacacgcacgagcagattaccaccactgactactactagggggg

SEQ ID NO: 114915 - DNA, 202 bp, Glycine max
  unsure (1)..(202): unsure at all n locations
  Clone ID: PAT_MRT3847_74779C.1
gtcgcangcacgcgtacgtaagctcggaattcggctcgagnnctngcnagcctnnngntgnnngcgcantttnntancncngccanntgccgtatgactatcggnttgatgcatgngctgcnnnttctgcngatgntngtnttcttanttcntgaccaangtancnattnannagnncaagtccaagngcggcnnncacatg

SEQ ID NO: 114916 - DNA, 498 bp, Glycine max
  Clone ID: PAT_MRT3847_7477C.1
cccacgcgtccgcccacgcgtccgcccacgcgtccgcccacgcgtccgagacgacagaagggtagatggatagcttgtgtctcaggtgttgttcagacagctttgtatgcagatttcttctactattacttcatcagctggaagaacaattcgaaactgaagttgcctgcctgaattatctcaagttgttttggaatttagacctgtgtgaccagtcaccgctaaattttacagagcgtcgtggtttggatgatgttagttttgagagtaacgagacaaggctaactcctctccctgttcatgagtggggtaagtaagttttgtttttaaggttcaagggtaaacaggttttaacttctgatgaatataaccgtcccgtgggttaaaatgcaaatgttatgtgatgatgttttgtatattcacgtctccattgcatattattgtatagtttgtagtgtaaggtagctgattttgggtatgatacgaatgatccctagc

SEQ ID NO: 114917 - DNA, 325 bp, Glycine max
  Clone ID: PAT_MRT3847_74780C.1
caaaatcaacgagaagggccacccccctttttcttttgatcacaaattgcgattttcagggtgctagcttcaagggccaagcctattccaaggtgcattgacccatttttcattatgaattaacccaatcattctatgggccttttttaacccaaaaaagccacttaatcccaggccactggccaccttggtgacctggaaattaaaatgattgactggttaaccagggcccggattttttccttattagatcccgaagccgtcttgcaccacccacttccagggaagcctcttacctaccccctttatttaccttagaaaataa

SEQ ID NO: 114918 - DNA, 356 bp, Glycine max
  Clone ID: PAT_MRT3847_74781C.1
ggctcgagatttcaatattattaaacaacaggtggagtcgtctatattgatgaatgcaaacttcaattcttgtttcaatctatgccatttaggaattcgtaaacctatatgccttaatggatagagaatcactactgagaatagctttgtctgatttagaatcaaaccttcctaggtttttcttattcttaagaatatagtgttcccatgcaaatacatgaaaatatgatatatttgtttctttgtccttcctcaattcatatgctgtcttgtgcaaaatgctcttgattgaaacccaattcaattcatatgtagtatataacaactatttatggcttcagctcaaaaatattttt

SEQ ID NO: 114919 - DNA, 620 bp, Glycine max
  Clone ID: PAT_MRT3847_74782C.1
caccgcgtccggcggaatcctccgagccaccgtcgcatcggcagaaaccaaccaccggcgatgacgacagaatcagccacctccccgatgtgctcctcctccaaatcctctccctcctccccaccaagcaggccgtcatcaccggcattctctccaagcgggggcgtccgctctggcccgccgtctcggtcctcgacttcgacgacgagtcctccccggagttccaccatcccggaggtctcactggcttcgccgaattcgtctactccgtgctcctcctccacgacgcgcccgccatcgagcgcttccgccttcgctgcgccaaccctaactactccgcgcgcgacatcgccacttggctgtgtcacgtggcgcgccgccgcgccgagcgcgtggagctctccctctcgctctcgcgctacgtggcgctcccgcgctgcctcttccactgcgacactgtctcggtcatgaagctcaacggcgtgttcctcaacgcgctcgcttctttctccgtctctttgcctctgctgaaggttctgcatgtcggggatagggttctgtttggttgtcacgattatgtggtgaagcttatcgctgggtgcccccggctcgaggacttg

SEQ ID NO: 114920 - DNA, 1603 bp, Glycine max
  Clone ID: PAT_MRT3847_74783C.1
cccatctagaatcccttgacttttggaacgctcttaattctttctttctctctctgcctctcatttaaaatctttgtcaccaagaaattaatagcatcaccccaccgttcgagccaactcttacgtccttcaacacatcacataaccctgcaccttcctctgttctcaaacatatttattcatctttttctccaaaaaaacaaaacagagaacatagcaccctcctctgttttgaaacagagaacaaagaaccatcgccatgcttgatccgagaacacaccaccccaccaattctttcgaattgtacgacgcaacacgacacaaaccccacacatgggatgttacgaactccggtttgtggccttcgaaaccggctttggaggaggcagaggtagatgattccgggatttgttcacctcccatgaggaccacgagccccccacgccgaaaaaacaaccaccgaagcctctcgccaacgtcgaggacgcaagccatagtgagagggcagagggagctcatggaaatggtgaagaacatgcccgagtccaactacgagctctccttgaaggacctcgttgagcaccacatggttgttgatgctactagacatgaaaaaaacgcggtggaagagagaaacttgagcagcgtgtacaacaagagagaaaaaaatggtggtagtagaaaggttgataataataataataacaaaaatatggcacaggtgaagaggaacgggaacattgatcgtggagggttctacctcaaaatggggcttccttttccttttggatctaaggacaagaagaagaagataaaagaaaaatgagcccttggggaatagttgtagttcgagagttacccctaaaccttctgatggatcagcaaagggtggtgttgttgataaggagtggtggaagaagagtcctttagcgtgtaaagagagtgatagtggtgaatcgagtatcaatagtgacagtgggaagagttctggtagcagtagtagcaatagcagcagtagcaggagtaacagcaggcgtgagaacagtggtaggcgttgctggcctttcattcgcagacccaaaaatcgaacacaaaaaagtaagatatccttctgatgaaacaacacagtgctctgagaactacacatgttcatgatccttagaagctttatcttcataaactcctcacaagttttaccgcgagtcatttgattacaacccagtagtaccatgtaactttttatgaatgatgaaggcacattcaactaggaatctcgaagaaatgtattgtgaggatgaaatctgtataaatgtcactgtgcttcatgtaattaagtttttctaattttcatacatgataaggcatatacaagcatgccaaaagaaggtttaccaagtttcaacatgtattgtgaggatgatgaaatctgtataaatgtcacagtgcttcatgtaattaagtttttctgaagacatgtatctataccctcagataatagaacctagccaaaaaaactcgagactagctatatacgagtcattattatcacctatgcactaatcatacgtctatagactgttaccatgcgtgaaatgagttatcg

SEQ ID NO: 114921 - DNA, 245 bp, Glycine max
  Clone ID: PAT_MRT3847_74784C.1
gacatgtggctattggctactactgtattggacaacattactctagactctcctcctggaattcctattaggcataggttaaaccttctgaggttctaaattattatttttaaaatattgcatcattttgtttctctgagccacattctggctaatttcttcagatctatctttcagcttgctatttatttctttggcttgtagaattttttctagttcgcctgttctgagggtaaagctcttca

SEQ ID NO: 114922 - DNA, 169 bp, Glycine max
  Clone ID: PAT_MRT3847_74785C.1
gaggccgcctcccggtgcgggtccggaccggactgctcggtccgcccattttttgcctacgcgatcaaatttctgcatggggcaggctgtattctactaagtgtaaatacgcaagaaaaaattatgaaccttagacaaaggggtgttggggatcttaaacatttgtact

SEQ ID NO: 114923 - DNA, 231 bp, Glycine max
  unsure (1)..(231): unsure at all n locations
  Clone ID: PAT_MRT3847_74786C.1
gtggactcgattacgaaaagggacaagcnnaggggccaagcaggaaacaacccatactccatggaacggaccggggnggccaanagaaaaccgagcaagggcaacgagacnccgcgccgcgacnaggccagcnncgacggacngangaccaagcaagnnaggagcaagacggcagagaagaaaaacaggcccggcggcggagaggaaaaacagaagcgcgaaaggacacac

SEQ ID NO: 114924 - DNA, 1691 bp, Glycine max
  Clone ID: PAT_MRT3847_74787C.1
aattcggctcgagacgacttaacccataatagttcttaaattcacatgtataatcgcttcatcgtcaaacagtcacttctcaccgtcactttagcagtctcttgcggtggcacaaactgtatcacgtttcaaaagactaacttggtgaccggtgaggtgttcctagttaccatacgaaagaggattttggtgtaggatgggatcgatagagaacgcttccaaaccaaggaaggaaaatccgaaatttgaattgccagcgggttttagatttcatccaacagatgaagaactcataaatcaatacctcacaaagaaggttgttgacaactgtttctgtgctatagccattggtgaggttgatttgaacaagtgtgagccatgggatttgcctgggttggctaaaatgggtgaaactgagtggtattttttctgtgtgagggacagaaaattcccaacaggtataaggactaatagggccactgatattggttattggaaagccacaggaaaagacaaggagataataatggagaatgcactcattgggatgaagaaaaccttggttttctacaagggaagagctcctaaaggtgaaaagacaaactgggttatgcatgaatataggttggaagggaaacataatcaacccccccctgcaaagagtgaatgggtgatttgtagagtctttgagaagagtcgttgtgggaagaaaatgcatgttccaaagtgtgggaggttcaacaacccctttggagaggaaccatcatcaggtgcttctctattgcctcctttgatggattcttctccatacaacagtgaaacaagaaccaccactgctggggagttgtctcaggtgacatgcttctctgatccaaatcaaactgaggatcagaacaacacacatgatgacattgttgatagcatggaaactcctattttgaacttctcacccttttcaaggcctgatgatgcatccactttggccaaagcaaccctttcttcagcctcaaaccaatcagcacagattgcacaccaaattggggactcacagttcccagattattgttatgcgcctcaagaaccgtccatgttgaggatgctgatggaaaaccatgaaccctgtgcgaagcaaactcagaaagaagagtttcctgagggaagagactttgatggagatatctcatctatgatatacagcagtgacatgataaacagaatgtttgggaatcaagaacattcttcatcagcttctgcagggcctgtggacactgatttcctatggaattactgaaggttaaggaatattatttagtgttaagacagaaaatatgttaattatatttatattcatatgatacatacaggttggttacctgcaacttcatgaacttattgtaggaattatgggaaatgcatgaaattgaatttcccccctctggttgataactttgataaaaactagtgctgaatagtccatatgttatatatgatctgttaatctttattttcatcattgcagcccaattacaggttgttaccaccaccttttcttaggacttgtttgtgcaacttttgggttaccatctgctttagataatgtggtcatattcatagccagtttactcaagataatgttaggggtgatttattttaaatcaatttaaagttaaatatataatttgctctttttg

SEQ ID NO: 114925 - DNA, 262 bp, Glycine max
  Clone ID: PAT_MRT3847_74788C.1
acggctgcgagaagacgacagaagggtccttcttcgttccttcatcgttccttcttcattcttcaaccaataagtgttcgaatgtgagactttcaattcatttcatgttttgtttgctttcatcttcatcttgttcactttcaatttttttcctctatttttaatgtgttttaactgtttatctaagccgtcatctcacctaataaatgataaaatgaatttcaaccgatcatttatattgtaatctcgtttaatcactgtt

SEQ ID NO: 114926 - DNA, 631 bp, Glycine max
  Clone ID: PAT_MRT3847_74789C.1
ggctcgaggtttctgtcactaaaactactacattatctgcagctaaaacaacaattacatctagatcctctacacctttgtcaagatctactgcaagatcttctacaccgacaaccaagcctaccttacctgcatccagacctacatcaagggcatcaaccccagctcgccgaccgtcaacaccacctaatgtacccactgtatcttctccttcagttaagacttcttcagtctccaagtcagctcctgtgatatcaaggcagccagtaccatcccgtggcacttcaccaactgtgaaatcaagaccatggaagccatcggagatgcctggattttcacttgatgctccacccaatttgaggacaacgcttccagaaaggtcactgtcaacaactagggggaggcctggagcacctaatctacggtcctcatctgttgagcctgcttctaatggtagaccaaggcggcaatcatgctctctttcaagaagacgttcctccaatggcatttctcgtccaactggaagctctatgccagcagttaatcgtgcatactccagggcaaatgacaatgttagtcctgttgtaatgggcaccaaaatggttgagagggtaataaatatgccaaaact

SEQ ID NO: 114927 - DNA, 307 bp, Glycine max
  Clone ID: PAT_MRT3847_7478C.1
attcggcacgagggttatgcatttggtgaaagcctttgagaagcttctcactatacctaagagttcaaaggagaaagatcacaaggaggagcatgatcatgagcatgaagagcaaaagaataagagccaggtgatgaaatgggcattgccagggttgcaatttcaacaacatcctaagcctaagacacttgaagctactactgatgatgcttctgtttcgggttcttcttcattttgtggtacttctgatttggacttgacatccgagaaccgtcgtatcgggcaagagctttcagtttcttcatct

SEQ ID NO: 114928 - DNA, 680 bp, Glycine max
  Clone ID: PAT_MRT3847_74790C.1
atcactcgtccgcccacgcgtccgcccacgcgtgcgtccacgcgtccggtcaatggggatggagggagggatgtgaatcttggtgatagcaattatagctttggggaggctgaggcattgagtgatgagatggaagaagagtctcggtatgttgcggagattttgaggatcagggatgttctgcttaaccctgaagatgagtctgaggctgtgttatttgattcattgaggcggcttcagttgatggaactcaccgtggactgtttaaaggcaactgagattggcaaggctgtcaatcctctccgaaagcatggatcaaaagatattcgtcaactttcaaggactcttatcgatggctggaaagaaatggtggatgagtgggtcaaggccactactaccacagctatcacaggttcagaagaaggtacaccggattcagtgaatccatctgttgtagatgatgatgaagaagaaggacttccatcaccttccttggatgaaggggctttctttgtcactcaggctggttcaatggaactgtcacagttctttgatggcatggacgacgacggaaatactcgaccaactgggccattcagcaagaaccatgagaatggcagaaagccggtttttgacagccatgttttacagatgaggaagtcgcaagcttcccatgacac

SEQ ID NO: 114929 - DNA, 457 bp, Glycine max
  Clone ID: PAT_MRT3847_74791C.1
cgttcttttttttttttttttttttttttaccgtttaattgttgttacttcaatgggtatggggaactgttacactcataaaaataacttggaatttaatcagtacatatacaagggataaaactttaaaaaaattgagtaatttaacaaatggttgaaatccttactgaaatatcgatgcgttatgggttttgatgccaatgaatattgtttatttataaaaaacatttgcaactatagaatttttaatgactttaaaggatctaggcctccaaactattcatataagtcgattttggctaattagctgatcttttaaatccgtgtacttatggatttggtattgtactccggattaagtttctcttggcaatccttaaaaatttaagtatgcaccatgacagttcaaacatttgtcatgaatattaactttatgactcttaaattttttaagtat

SEQ ID NO: 114930 - DNA, 326 bp, Glycine max
  Clone ID: PAT_MRT3847_74792C.1
gcaatacttaaagatctcgtcttgaaatacactgaatgactatcttgggggatccactagtattattaacatgtaggttcttaaaatagattttatccttatcactatgctccatttacgtctgatctcaaggtccttggtgaacttgatattacctttaaactgtttaccctattcaaaccatataaccagcttctaacttttttatcttctgcaagctctgatgcactttcttaaccatatatcaaacttataactgatccaagctcaccaatcattgatttatatccattattactttcaaccgtacatgaatagcaaacact

SEQ ID NO: 114931 - DNA, 522 bp, Glycine max
  Clone ID: PAT_MRT3847_74793C.1
taattttcaatgcagtgctcactttcttcatcaattcccaaaagttcactgcattgatcttaaactctataatcgtccttaccatatcagttaccctgattgcactcaatactgaatctgaggaaacaaagaacctttccaaacagaagcaaataattgggttcttctgtgccctaggtgcatctgccatatttgcattgcatcactctcttatgcaattttattttgagaaaattataaagactgaaactttttctactgtattaagcatgattttttacccaatgatcgtgggtacaattggtggccttgtgggattgcttgtaagtggagattggagaactatgggaatggagatgaaggaattcgaaaacggtagtgtgtcatatgtaatgactctggtttgtacttctgtgacatggcagataggttgtgttggtatgctggggttgatttttgaggtatcttcattaccctcagcctgcactaagcaatctggaattgaacatagctcctatcctt

SEQ ID NO: 114932 - DNA, 537 bp, Glycine max
  Clone ID: PAT_MRT3847_74794C.1
gaacattggcataatctaatgcctaaaaaatgtcttaattttacacacataaaccacgaaagcgagtggcctagtatcaccaaataaaatgtcaaccaaattgaaagtctcaacatgattttgacagttttatttgtattacgtgcgtccacaaatcaaataaattacttgagtacaatatccttacaattagaaacaaattctgatccacttattattagcttgcctcatgcataatatttgaactctgttataaatatgaaacaaaacaatggttgacaatgcaatggagaagacttcaacaaacttatataattatcgtcaggttataaccagatgtgattttactataagctacacactaacctaaacaatgctcatgtttttgttaaagaaacttatatgatgcagtgatttaaggttactcataatctttgatccttgcaacctcttatatgctgaatcattgcttataatgccattgctatggctaaaagagtgcctattgacaaaagtgacatggcatcactaaatttg

SEQ ID NO: 114933 - DNA, 500 bp, Glycine max
  Clone ID: PAT_MRT3847_74795C.1
gctttcaaaaaataaatctataatattatagtgtaaacaataaatatgtcttctgcaaattaaaataactaaaatagtcatgagttattcttgcataaaaccagagccattatattaaaaaggacttaagtggaaaacaaaagaatatagaggatacaagtgttaacataactgttacatgaattgtatgaactaaaaagtaacttgccccacaaaagtttcctaagtttacatatataccatggatggtctaaatttggagctctgatgatgaggacctctctttgctcctaatctacccatcggccaatggtttgaaaaatattttttaagtgtttatttcttataaatagttacattaatatatcttttgtttttattttcaaatatttgtgtagaaaacaatgaaaaataaaataagctggcatttcattaatatttataaaaaacaagaattataaataaaaaaaatgtatgcccaaattaaaattgtaatttaa

SEQ ID NO: 114934 - DNA, 638 bp, Glycine max
  unsure (1)..(638): unsure at all n locations
  Clone ID: PAT_MRT3847_74796C.1
caggagagaaggtggaacaataatacaccagagagagtacttgatttctagggtttgaagcacttccccaagtcgtggctggaaaacaagggaagaaaaatgagcgaaagcacagagacccagaagcgccaagctgctgattcagagagcaaggagaatgctgttgcttccaagaaaccaaaggtcgaatcttgtggaacgggtaccgatggtaatgccgtaaagaaaccatctttcctcattgaagctgatgcagctgaagataagggcgccaggcacaccatggaggatgcgtccgtcatgcttcttgacgcaagtttagattaccctggaaatttgagatgtgcacactttgctatttatgatggacatggaggccggttagctgcagaatatgctcaaaagcatttgcatcggaatgttctttcagcaggattaccacgtgagttgtttgatgcaaaggaagctagacgagctattttgaatggtttccttaaaactgatgagtctcttcttcaagaaagtgctgaagggggatggcaggatggtgctacagctgtatgtgtttgggtattgagacaaagagttgtggttgcaaatttaggagatgccaaggcagtattagctnngtcaactga

SEQ ID NO: 114935 - DNA, 310 bp, Glycine max
  Clone ID: PAT_MRT3847_74797C.1
gcggtcaataatgacctcaacagagcttcaaagaaaaactcccaaaaattgctggcgattctcctgcattgactcctaaaaagcagctggatcgcatataaaaaatcttgggcacttaaagctcgacttctacatgggtaacataaactcgttgataggaggtaaaaaccatatcgcaatttatagaacccgatctctttttggagtggcgacatagcaagcgggcatttgcagggctagaaatgtgcccacggcataagatccccccctgtaagatgcgactcaattggaacatgaaaccctggtgtat

SEQ ID NO: 114936 - DNA, 385 bp, Glycine max
  Clone ID: PAT_MRT3847_74798C.1
ggctggctcagctattaatttcaaaagctacaaaaaaatacttgagatatcattttttaaaaataatgtatttactaaccctaaagaattaagcctccaatcattatgcagagaccaattgaacaagattcttaacccagcagagtacactattattacatcactttcaaataattatattgactcttatattctgtcagagtcaaacctattcatctatccttataaaattatcatcaaaacttataaaactaccaaattacttctatccatccctatcattctcaagttaactaatgctcttgacatatctataaaatgtataaaatacactcgtaaaacctgcattgtccctaagacacaatcttttcctcacgcgcagttc

SEQ ID NO: 114937 - DNA, 292 bp, Glycine max
  Clone ID: PAT_MRT3847_74799C.1
cccacgcgtccgaccactcgttcgttctacctacttcttctccttttgtgcaacttagctcgcggtggataaaaatgaggataaagaacatttctcctctgatgaaaatgtaagaacaataggtttggaggaacctaatccaatggaatttgacagcgaagtatcatcatcagcgtcttatagtcctattcctgaatctactattgatgcagaacatgctgaagattctgatactgcagaatgctttgataatcatgcactagtagctttagttccagctttcgagcaaaat

SEQ ID NO: 114938 - DNA, 1270 bp, Glycine max
  Clone ID: PAT_MRT3847_7479C.1
gacgagtggcacctcaggcgtcagcttcttccttttcatactgttgtacttttaccaaataagagaaacaaaaaacaaatccacacactccattttcgattcctttccatttctccgttccccttggaacgttttctctctgtgtgtctcgctagggcaaaaaccatgaacatcttcaggctcgccggtgatatgacccatcttctcagcattctcgtcctcctcctcaaaatctacgccaccaaatcatgctcagggatttctcgcaagactcaagagctctacgcgattgtgttcgtggcacgctatttggatctgttcacggacttcatctccgtttacaacaccttcatgaaggtggtgttcattgccagctccttagccattgtttggtgcatgcgttttcaccccatggtcaggagaagttacgatagggaactcgacacttttcgccattatttccttgttggggcaagctttgctttggcactcatcttgcatgaaaagttcactgttcaagagattttctgggcattttcaatatacttggaggcagttgcaatattaccccagttggttttgttgcaaaggagtggaaatgtggacaatttgactgggcaatacatattctttcttggtgcatatcgtgcattttacatcctgaactggatataccgctatctgactgagccacattttactagatggatagcttgtgtctcaggtgttgttcagacagctttgtatgcagatttcttctactattacttcatcagctggaagaacaattcaaaactgaagttgcctgcctgaattatctcaagttgtttaggaatttagacctgtgtgaccagtcactgctaaattttacagagcgtggtttggatgatgttagttttgagagtaaagggacaaggctaactcctctccctgttcatgagggggtaagtttttgtttttgggttcaagggtaaacagttttaacgtctgatgaatataaccgtctcgtggcaattcagaggttaaaatgcaaatgttatgtgatggtgttttgtatattcacgtctccattgcatattattgtatagtttgtagtgtaaggtatgctgattttggttatgatacgaatgatccctagcttaggtatgattagactgtaaaattataccatttcttcttttcgcggaggtgactaaatgaaaattcagtcggaataccataacttgattgctatttctatttataatcgcaaattatgttaattggacat

SEQ ID NO: 114939 - DNA, 278 bp, Glycine max
  unsure (1)..(278): unsure at all n locations
  Clone ID: PAT_MRT3847_747C.1
cccacacgaccgaacgggtgacagaagacgaccgaaggagcccacgggacactggacggcaaggcccccgacacccgcctagctngaagacagccaaaaaaaggagaacaanaagcccgcgggaaccgccaaagagggggaaaagaaagggaaaagagcgaaaaagaaggacgaacagaaaacgccccnggangacaacccgaacaggaccaaggacacgagagaccgcgcggaagaccccaccaacaaaaacgcaactagtcactgagacaagggga

SEQ ID NO: 114940 - DNA, 235 bp, Glycine max
  Clone ID: PAT_MRT3847_74800C.1
atatataaatatatagataaactgtgatcgatgaaggcaagactctgctaacaggcggcgtccagattgcggggggcgtgtttcaaattccgatagtctagatggaatgcgcgttgtggtggagccgagcgacaggcacgacattcaggcgttaaggagaatggaggcgaagaagatgacagagttaaacagggagcgcgtgagggaaccgtccgagcccgatttgatacggaat

SEQ ID NO: 114941 - DNA, 914 bp, Glycine max
  Clone ID: PAT_MRT3847_74801C.1
gtttgttaaccctagattggatcgaatttttctgaaatatgatatgatccggttatgtctttttttacaaaaaaaaattgaaagtgctgtttttcgtaacaaatgctagatatgtatatgcatgtgatttcaatgaattgaaaaattcaacatggtgattggtgtctcgcatggttggtagattaccatgccccttaagcatgagatcagggattcaatctccaggttgttagatatgtatatgcatgtgatttaaatgaataaaaaaaatacccacatagtgattggtgtggtatgatttacagataatcatgtcccttaagcatgtgatcagagatacgatcttcatatccaagtgcatagaagatcatcatctgttgggaaaggtcatcccttaaaatggatttttgtaccttgagggattagattagtgtctggctctcggtcagggatatcgtgggcacctgaaatgaaatgaattgggaaaattatgatgcttgtatttctagtgatcgaagacacccataaaatggattcatcatgctttgattaattttagctatagtttctttatggagatcatcaggctataacaattttcgagggtactaatactattacccattaacaattagtggatgataatattttgttcataaactcacgtgtgggatttgaaatgtgaatgcatcaatttgtgtttgtattattttttttttaattttaattgaagggagctagtggcaaatcatggtcttaatagatgagttcaagattaatgagtttatggtactcttcgctgtcttgatttgggtatgattgtgtgtgtctgtgaaatggccgtagttggtatttgaggcaagattctaaggctgattcctggtctattttaaatgagtagcttcatgtgatgt

SEQ ID NO: 114942 - DNA, 383 bp, Glycine max
  Clone ID: PAT_MRT3847_74802C.1
atacagcgtcaggcgagaagacgacggggtgggacttcagagttaagttgcgagtataggatgtcaatgcgaaaagatgattctcattgaactcgctgatgtattcacttctatcattctcgcacgattctgacgtagattgctgtgtagtagaatatgcaggtctgactggtcgagcatgatatccctgtgttatgaccttcaaacgtcacatcaaatgaatttgcatacactggtcttgaaatagtcggtgatactccgcgtagtatcatcactgtaatgatacctgtatttgagtcacagtttgatggtctctactggcgtggaatttcggaagcacgtatgtacttaacagtaggttcagttatacaatgtcacactca

SEQ ID NO: 114943 - DNA, 421 bp, Glycine max
  Clone ID: PAT_MRT3847_74803C.1
aaagagagaacatttaaacttattcttacagtatgccttaaacatacataggttacaaaagtaaagaaattcattacctactttaacaacaaacagaacgtaggtaattgcttgtccaaaactaattacaacatatatatatttatatagagagagagagagagattaagagagagagagagaggaattctattggcagctatatggcctaatctctggaataaagctgcctaaactaagatacttctgaaacattgatatttgacttgagcgcaacgcatccctggtaatacacacgtgacactttcactctctccaaacatttgggatgggccattagaatcattgattactcaattaaacccttacaacattcaactctctaaattttgctccccactttgtcggggcccctctaaat

SEQ ID NO: 114944 - DNA, 454 bp, Glycine max
  Clone ID: PAT_MRT3847_74804C.1
tcacctgcaaccctggtgccttaacaactgaaccttcttgataaacataagcgacaaataaaatatctgatggctcatggactccatgagactcaaaaatttcaacgtgactgcgtgcctttctttcgtaccccactgtggtgtcaaaaaagccacatgaatattttcttaggtccccatggcttgtatgaccaaatattatcctttgagcctatctactgccactagaatatatgtgtaccattatgcccaatgtatgccacttttctatagcttgtggaacatcatcaagaactattccctgccatcaattattctcataaccagagcgccacatatgaccctgctattctactcaggacacgatcgttctatctgctctaatcatagctagcacattagctaccaatgcctcagtgacggctttctggcaggcaccctcctcaggcatatg

SEQ ID NO: 114945 - DNA, 239 bp, Glycine max
  unsure (1)..(239): unsure at all n locations
  Clone ID: PAT_MRT3847_74805C.1
taagttaaaacccattgataattgnacttaacaggaatggagaactgacngntaacattgttgggacttgtacgnaagagggtatattgctatatggcggaacttatgacatagtgtaccttagtcgagacattgtgcacatctccattatgtgagtcatgatgacccgtaatgttggatgaccccnacatatgntnattcagccatgtatatacactcattgtggnctcatgataatt

SEQ ID NO: 114946 - DNA, 423 bp, Glycine max
  unsure (1)..(423): unsure at all n locations
  Clone ID: PAT_MRT3847_74806C.1
aaaaataagggatataacattataaaaagagatttaggaaacaattggtgttcataaaatattcataaaatggaaatatatattcatagatagactcatttccagatgctgtatggctttatactgggaatagaatcgacaaaaaggttgaagtactgaccttactcatgtcacagggtttatataataatttccacacactttttttcttctctctcaatcatgttacttatttttatcatcaatttcttcaattttcttttcttatttcttcctctgcgnaaaaacgactgaaaggttgaaaagtggaattacaaccagaccattgttctatatttatttgngtatcgacgaaaggcagaaaactgttcataccatgttcctagaatattgngaactatatatatcttggaagttttttaa

SEQ ID NO: 114947 - DNA, 612 bp, Glycine max
  unsure (1)..(612): unsure at all n locations
  Clone ID: PAT_MRT3847_74807C.1
cttgtttttttttttttttttttttttttttttttttttttttttttttttttttttttttggttttttttttttttttttttttttttttttggggggaaggaaaaaaaaaaagatagtctggtaaaaaaaaagggaaaaggaattggaaaggaaggggggggtggaggattgaaataaggttttttatattataggggaatgggaaagaaaaggagaaggagttctcttatggtcactctttttgggaaagaaccagaagggcaggggcggcataccaattttggcgctgggaacaaggagccgggggaaagcgctggtgggaaagaaaaacggggtgggggagggggggggggaaaaaaaacaggggggggaggtgaggggggaacgggaaccacaggggggggggtaaagggaggaaggggggctggaaggggggggcttagccgatggagggaattggggttaaagaggttgaatggaggggacccatgggccgccccgagggggaacccggnaaacccggggcgggacccgggggcctacccggggtttctggaggggggccggggggagcccgggggtttcctggggttaggcggtttctggggg

SEQ ID NO: 114948 - DNA, 332 bp, Glycine max
  Clone ID: PAT_MRT3847_74808C.1
acgctgtgccggcccgcgggccccggtcccgggttcccgccacgccccccgtttacgcttatggctactgctgcgcggaagtggcctccatacgggggaccaacacggccacaaacgcattgcgttgtgtgtcgcaatcctggacatgccacgaagcgtacctcgtcaatctcgtataagtgctactagaatcgcttcctcccaacccagaggaagctcagctcttgggcttgtgagatctctctcgcattgaatggctggaaacgcttagtgtgcctaccatagcgcatatgtgagagatccattcgatgcagacgatgatgattgctcct

SEQ ID NO: 114949 - DNA, 226 bp, Glycine max
  Clone ID: PAT_MRT3847_74809C.1
tttcttgtaaaaaaacgattgtattctatttagcatgttagcataatcacaatatgctcgtacaagtaagaattttggctgcaccaaacattaacaaaccctagaagaacatcaaaacaaccagaactatacaacaatttaaaggagaaaaattcttacttgtacgagcatattgtgattatgctaacatgctaaatagaatacaatcttttttgtacaagaaacc

SEQ ID NO: 114950 - DNA, 197 bp, Glycine max
  Clone ID: PAT_MRT3847_7480C.1
agtttgttattagctgcgttagaaggattgcgcgtatagcttatgtgtaaactctacaaaatctattttttttagtgagacaaccacatttttcactctttttctctctaaaacttcataaaagtatttgtcattttaatatacataacatatgacaagttgtgatttatgaggttatagaaaatgattcaaaagat

SEQ ID NO: 114951 - DNA, 246 bp, Glycine max
  Clone ID: PAT_MRT3847_74810C.1
actttctctttctaccaaattgtacttgataaagtttgttattcatacccacacttcacctttcattcaaataacatgtgatcaatcatcattttaattattaatctacttttaattgataccctatttataatagtcttcttataatctaaagttttctctaaaattttccacttattttcatatctaatatttttcttttcttttttactcttgtaatcatttttttaaactttattattattt

SEQ ID NO: 114952 - DNA, 443 bp, Glycine max
  Clone ID: PAT_MRT3847_74811C.1
ttgaactgctgacaggagaacctccggtgacagatggaaaagaattggtcaagtgggttttggatcattcaacaaacccacaatacattcttgattttaatgtcagtagatcatcacaagaagtcagaagccagatgcttgcaattctcaagattgctcttgtttgtgttagtacatccccaaaggcaagaccaaatatgaacactgtgcttcagatgcttcttaatgttggatgaagtcaaattctttagtattggaatatatcttgaagagagattttttgtaatttttggatgatgctttaagtcaagaaaatatgaaaggtagacatattacaggacaaagttggcttaattattttatggtgtgttaccagtgtaagtaaaactagtaccgtacatataagatataacttatacatataaaagtatacttttgttttc

SEQ ID NO: 114953 - DNA, 329 bp, Glycine max
  unsure (1)..(329): unsure at all n locations
  Clone ID: PAT_MRT3847_74812C.1
tctagagcggccgccctgtggggggtttttttttttttaaagaaacaagagggtgccaatgaaccatcaaaagaaaatgagacaaacaaaactgtgtcgtaatggcgttgtcgacaactttaacacttgctctagaaagaggtcaaacaagccaagtgtttaaacctcgggtaagatcggaacaactctaatcaaatttggggtttactgtaaccactcaaacctaacagtcctccaaaaaggtgtgtctcatcgcgttcgtcaaatncaagcctttgaggcctggttttgctttgccttccgggtcttcaagaccttcttnacaatct

SEQ ID NO: 114954 - DNA, 3009 bp, Glycine max
  Clone ID: PAT_MRT3847_74813C.1
cccgcgtccgggattctctagtgaatttacactcttagaaacgtttaatgcttctgggtttaagcttaatgggtctattcctgagtggttgggtgagagacttggtgtgttggaggagcttgaccttagcctttgttctataaagggttcaattcctgattcaattgggaggttgagtaagttgaaagttttgttgctttcagggaattttctcactggtagaatgccttcgacccttgggaacctcacaaggctttctgttcttgatctctctggcaactctctttcatggcctgtgcctgattctgtgtctaaacttgggaacctctcaaggcttgatctttcttataatttcttgtctgggtctgttccacctgaactgggtgccctttcgagtcttcaatttttgaacctttctgggaattcttttactgggtcggttccctctcaactgggtaacctttccaagttggttgaggttgatcttagtatgaattttctgtcgagctcattgtcgggtggtttgttttcttctgtgggacggccctcgaggttctcattctcagagggaatttgttagatggctgttcttcctgctcctttgaggtcaatgcctaggttgcacttttatgatacagcccgtaacttggtccccgagacagtaacttacaataccggctgctgaaggcatagcttacctacatgagtgcagccctccccttgtccacagagatatccaagctagcagtatactacttgatgataaatttgaagtgcgacttggaagtttgagtgaggttactgcccaaggagatcttcaacaaggagtcatctcaagggttttcagcaagccaccatcttgcaatcaagcagattctggtaaatcatcagtgacatgttttatgataaactactgttatcgcaagattttacttgagctcattaccggtaacattgaagtcagcaagttagatgatgcgtcttatttggtgggcttggctttattgtgctgctggcattggtcctcatgcttgttctaaaacaatgtcacaatcggaaaagcttggaagttccaagggagaccaaagatgggggggctgttgaagaaggggaaaggcctatacctccgaaagatattgactttgtgactggtgtcggagaagcatggcgtgtcgagcaaacattggaaaatccatggaattttgtgagagaaaaaaatactagctcagcaaggttgagatcaaactcttttaggaaatcttggagcactgcatctgtggttgtcaaaaaggtagatttgaatttatttaagagagaatcgtatgtagagggattgggtgtcactagtaagatcacacatgcgtaggttctcccaatcctgggccactgcttggacaatgaaaatgagaaatgcatagtttacaagtacatgccaaatcgagatttagctacttccttgcacagagtcactggttcagatggtaaaatacagatccctggattggatcacgagattgaaaattgcgataggagctgctgaagataactggtggtgccatgagtgcagccctccccttgtccacagagatatacaagctagcatctatactacttgatgataaatttgaagtgcgacttggaagtttgagtgaggtaacttttcaaggagatcttcaacaaggagtcatctcaagggttatgagtgagccaagatcttctaatcaagccgattctggtaaatcaccagtgacatgtgcctatgatgtctactgttttgggaagattttacttgagctcattaccggtaacattgaagtcagcaagtcagatgatgccactacaaaggagtggttagagcaaaccttgccttacatcactatatacgataaagaacgggtgactaagattattgacccatcattgatcgtggatgaggacctattggaagaggtatgggctatggcaattgtggccaatgcatgcttgaatcccaagccttccaaacgtcctcctatgagacatgtcctgaaagcattggaaaatccattgaagattgtgagagaagaaaatactagctcagcaaggttgagaacaaactcttctaggaaatcttggagcactgcattctttggtagctggaggcacagctcatcagacagtgttgttgccacaaacaaagagggttcaaatgacactaaaaaatcaggaaaagtaggttctcaaagtagtggaaatgatcactcttcttccaataaaagatcgtccaatgaaattttccctgaaccattggaaatacaagatgtggagacaggagtgacaagataaccacttgtgaaatgggtttggttattctttagtctgtgagatttttttaccactttctcggataattggtggtgccatagcaattgcttgttattagcacgtcagactccacccagcatccattatggtccatattgaagcaacggagtaccataatactgctattgatagcttttgctttccaaagcttagattaagcagtacagattgaaatgcctggtatgagagctccaaaaaaactgaataattttactcattcaatagattgtttgaaacacacagccctctcttaggttaaaagtgtgtgacaaaatgaaaaataatgaaagggttttcattttaatgagtaattgtaagggggaaaaacgttgttactcagcttttctttggtaggttatatgtatttagcattgtaaatcttcttgagctctgtagcatttgccctaatcttgagtgttgaaagttaatctttttgcgcttaagaaaaacacaaaatggttaattggttgagttagttaagtttattagttagttctttagcatgtgtcattagttagtactagattgattggttggaagtcatgtgctactagaggttctctgtgtaagttcatgatgtgattattgaaacacaacttttacaattcagtaattcaaaaaaaaaataaaaaaaaaaagaaaaaa

SEQ ID NO: 114955 - DNA, 728 bp, Glycine max
  unsure (1)..(728): unsure at all n locations
  Clone ID: PAT_MRT3847_74814C.1
aatcaacaaaaatcaatcaaattcgttctaatataaacgtttaaacgtgcaggaaaaataaatccatagaacacactacccaccccgcaaaatccaaatgcttaaaaacgacatttcagaccaattgaacttaatcattcccacaagtttccatagactgccaaaaaactaagtaaaacctctagccttataaggcatgccaataaaataatttaaaaaatcaaagcggtcacagctttttttttaataaaacattgaccggtataaataatattactgttatgtatggcgtttaactatacacccaagccaaggaagttttggtttgcctcctcatttcatccaccgtgataggcttccttttacggtatagacaaatttaatcttccttttcttattcttatattaataagacatatagacaggaatttgctcaattatgctcgcaatttacctatagatttcgcatagaggtcaatgctaccaatttgcagccgggaattagactgaatatctctgactgccagaaacctaaatctgaaaacattacatggaaaatttgcagaactgattgtgtatgttctacgctggaaacggtcttcaaagaactgagagggtttgcttgtccaaaacttgccagctgatcccgtcatcactgctcccttcaagaatccagtncattggatccctttctggtgcatcattggctgacatcaactcatatgcta

SEQ ID NO: 114956 - DNA, 2316 bp, Glycine max
  Clone ID: PAT_MRT3847_74815C.1
agacaaacaagtagatgtagaggcgtggaactattccctgggcgtagttaagcataattagagagaaagagagtgtgggtgcgcggctttcggttgatcctagattattcaggcatttatctccaataagacacagaggctgcggtccaagtttcacaattcgctgtcgagtaccacttttgagtatctattcataaactaaaattcacttttcaccaataggaaaaccattgcttatgttggcgagcgatccagtcctattaaagcaagttcttgctagttgtgaaagccgtatgtggcaggtgaattggtggtacagaacgagtgaagtgggatcaagagatcattcttggcttggaatcgatgagggtggagtttgatacccagatggaatgggtatgtgttattcctatttacgtgattcaatcagaacaaagatactaagaagcttgtggaaacaagatagggccgctgtggggaatgggcaaattgctttacgttatattgtcgagcttttggctatgagatcacgtctgatcttggactttacagatcatgtttggacagagtgcttctctcaatacttgggaagatggatgcatcttgacccatgtgaaggaatctatgacaagccattattatatgaaaaagggtgggggaaaaaactaaattatgtaatagccatagcaaaagatggagtttatgatgtcaccaaacgatacacaaggaagtggcatgaggtcctatctcgacgtactatccttacagagccttctttgtcaactttactctctaatataacaaaagaaagtcgaagaggctttgcatctcaactactttcaattattgaatcccatgatatggaggaaaacaaagaacttgagaggagtttacatgctgaagatgacgagtcactctcattacctggaagaagaagtgggaatgaggaatggcgcaaatctagattagaaatgggttctgataagctaagttcctctgcttgcccagttcgtttgtgcgtagatgagcacgtgacaaggatttataatgcattccgtcctatcctttatcaatttgttggggaagaattaacaaagtcggaagctgttgaagtactcaggattactaaaggaattcttttggatcttagcaagtccccctataaaacaagaaggacctccattgactcagttctagataacccaaaatttcagaaactattgccatcttttgatgacttacttggtgctcttgttgtggggtcgtgtatagaacatttggtaacaagatgtttgagcttgcagcatatgagttgatgtcagccaatgatgcaccagaaagggatccaatggactggattcttgaagggagtagtgatgatgggatcagttggcaggttttggacaagcaaacctctcagttctttgaagaccgtttccagcgcagaacatacacaatcagttctgcaagttttccatgtaatgttttcaggtttaggtttctggcagtcagagatattcagtctaattcccggctgcaaatcggtagcattgacctctatgcaaaatctatatgaaatccggagactttaattacctcccgactaaattacgaaatagttaaggtctccttcttcccgatgatccgaaaaattaagataaaagaaaaaaaaatctatatgaaatataggtaaattgtgagcatagttgagcaaattcttttgtctatgtcttattttataagaaaaagaaaattaagattaaatttgtctatgccttaaaaggaagcccatcaccgtggatgaaatgaggaggcaaaactaaaacttcctggcttgagattactgcccatacataacagtaatattatttatactggtcaatgttttattaaaaaagctatatatatgtgaccgcattgatttttaagaataagaaaaggaagattaaatttgtctataccgtaaaaggaagcctatcacggtggatgaaatgaggaggcaaaccaaaacttccttggcttgggtgtatagttaaacgccatacataacagtaatattatttataccggtcaatgttttattaaaaaaaaaactgtggccgccttgattttttaaaatattttattggcatgccctataaggctaaaggttttacttagttttttggcagtctatggaaacctgtgggaatgattaagttcaattggtctgaaaagtcgtttttaagcatttggatttttccgggtgggtagtgtgttctatggatttatttttcctgcccgttttaacgtttatattagaacgaatttgatttt

SEQ ID NO: 114957 - DNA, 1424 bp, Glycine max
  Clone ID: PAT_MRT3847_74816C.1
cgacccacgcgacggctgcgagaagacgacagaagggggaggaggccaaggggcccttcgatgtcttcttgtgtttcaatgaggcagagacacgccacagcttcacaggtactctctatcacgctttacagagcgccagattcaagacttacatggagaatggcaagttgagacgtggcgacaaaatcgcaaccgctattctcactgcaatggaagcatcaaggatttcaatcgtcgttttctcaccatactttgcctcctccacctgctgccttgatcaacttgtccacatccatcgctgtatgaataccaaaaaccaactcattttgccaatcttttacgacgtcgaccagtccgatgtaagagatcagctaaatacatttggccaagccatgcttcaacaccaacatcgtttcggaaagagctccgacaaagtgctccagtggagctcagttttgtctcatgtcgccaacttgaccgccttctgtttctccagtactggggaccaatatgaatatcaatttgtggaagagatcgtggattgggtcaccaagaccgttccccgcaatgatgtttttctgagtttctgtggaagagatactcggtactcctttacaggttttctctacaatgccttgagccggagtggtttcaaaacctacatgaatgatgatggggaccagatttcacaatccactattggaaaatcaaggctttcaatcattgtattttctaaaaattatgcacattcctcgtcgtgtcttgatgagcttttggcaatccttgaatgcatgaagatgaaaaaccaactggtttggcccatattttacaaagtggagcccagggatataaggcgtcaaagaaatagttatggtgaagccatgactgaacatgaaaatatgttgggtaaggactctgagaaggtacagaaatggagatcagctttgtttgaagccgcaaacttgaaaggatggacctttgaaaccgggtatgaatatgaagttattgaagaaattgtggaaagggccattaaaatttaaaatggattctatgtaccaaccacgaagtccttgctcaagtgtcaactagaaatcaaccgataaaattcaactggcggttctataagtagcaggagctggttcacaaattgacgataacatgtctcattaggagggaatgaatgaaggatattcagaaacttgatcagcatgtcatatttctcagcgtaataaatacgaaaccttgtcttcagccaggctattgtagccactgcctatttctacacatttgatctgacatttctatggatttcattggacgtctcctaaggtagagaacaaagcccctattttggtggtagattttttccagtaaccgattaaaattatactgcggtagtgagtcaaatccgaggaagttggtcc

SEQ ID NO: 114958 - DNA, 671 bp, Glycine max
  Clone ID: PAT_MRT3847_74817C.1
agggggccaaatttcccaatccccaatgggaaaatcaaggctttcaaacacggtatttcctaaaaattaggcccattcctggtcgggtcttaaggagcttttggcaaaccttgaatgcatgaaaatgaaaaaccaactggtttggcccatattttacaaagtggagcccagggatataaggcgtcaaagaaatagttatggtgaagccatgactgaacatgaaaatatgttgggtaaggactctgagaaggtacagaaatggagatcagctttgtttgaagccgcaaacttgaaaggatggacctttgaaaccgggtacaacacatactctgtattttgttgtgtgccaattactattttttttatgtatgtagtaaacaaaaaaaaagcattgcgcttttgtaggtatgaatatgaagttattgaagaaattgtggaaagggccattaaaatttaaaatggattctatgtaccaaccacgaagtccttgctcaagtgtcaactagaaatcaaccgataaaattcaactggcggttctataagtagcaggagctggttcacaaattgacgataacatgtctcattaggagggaatgaatgaaggatattcagaaacttgatcagcatgtcatatttctcagcgtaataaatacgaaaccttgtcttcagcc

SEQ ID NO: 114959 - DNA, 153 bp, Glycine max
  unsure (1)..(153): unsure at all n locations
  Clone ID: PAT_MRT3847_74818C.1
cgtgnatncagcatatgtcncagaggccnacgattcntcactcttnttccatngcctgnngnnttcactactcntcncctggtctccagtgagntganccctagctccaattggtcccattagttanctctttcctgcatctnatatatccca

SEQ ID NO: 114960 - DNA, 514 bp, Glycine max
  unsure (1)..(514): unsure at all n locations
  Clone ID: PAT_MRT3847_74819C.1
tnggagacagcatgcccaagacaagatgaattccaaattaaatacccggcagggtctttattttgcaagtgttcattgtcgatggaaatcgagcgaaacaaaattcctttactaatctattcatttgagggcatctggacaataacaatagcccccaccccagaaggtataccatgatactacactttcagcaaagatattgtacaacctatttaatgatctgaaaataaaaaccttgaatactcgttttatatatttggttaggaatctaaaattggggcccgcaaatctaagcttggcttttaaaaggattttttttcatcaaaattatttgtaatcacctgtgcacttttttcattacagcaaagctcatttccaataaaactgcttaagcataacctaccagcaaaaaaaacattctgggatgttggggacctgcttaaactgagtgaggccccatttcatattatgggaaactaaaacgcaatattgacagccctaacccaaaataaaa

SEQ ID NO: 114961 - DNA, 223 bp, Glycine max
  Clone ID: PAT_MRT3847_7481C.1
gaattcggcacgaggtctctctctctctctctccctcttgccgtatttgtcacgagggtatgttagatgatcgattgtgcattctgacttgattgtttggttctacatggattgttcttgtcttgaaggttagattgttttcctccgacttatgagtcacggttagagatagttggtgattgccacttcttcacaccctgagcccattcaggatttcataacc

SEQ ID NO: 114962 - DNA, 197 bp, Glycine max
  Clone ID: PAT_MRT3847_74820C.1
gggaacattctaaaactatagctatagctaaaaaataattaatcggggcccacataataacaatatgggtcatgctaaccaggggcctttggttaaagaactaaaagggaaaaagatttaatgtggaaatcataggggaactcaaatggtcattagccgggggatttttcacctcccaataaaaatatttctacttt

SEQ ID NO: 114963 - DNA, 354 bp, Glycine max
  Clone ID: PAT_MRT3847_74821C.1
aatatattcaattttctaaaatactttatattttaacataaaagtcacacaaaccctaaatatttaacatatatataatttatcccaaaccaaactttttaaaactcaacaacaattttctccctacaccaacctccccttataattaacttgactaacaaacacataattattaccaactctaacatattcctttttcacatgcccccctaaacacataaattgatgattctttttctaagccttttcttctacttcaaaatcaaaaccctaaccaacctaaaccctctctcctttaatccttaaaccaaccttaatattcctactcataatggtcaccctcttttcattaat

SEQ ID NO: 114964 - DNA, 527 bp, Glycine max
  Clone ID: PAT_MRT3847_74822C.1
acggaacacaattacagtaactttttgcattgcatttgcaatatgttgaacaatataacatgtgattaattcaggccttatttaatttgcagatacatatacacattaattattttgtttaacccagtctcttggtgggatgtgatgacaataggcaaataacagcctcttatacagcaccgttacatgaaggcttgaacgggagggtactttatttgagggtactatccacaagcttcaaccccttctttttctatttcaaaatttgcgaggcggccctcaaagcaaacctgataatattgtcccattcccgcttgctgatcatatggctgacctgtgttatttggcaaatgcatggcttattatatttttaacatgaataaactgtcgggaaattagatcatgttatgtatgagacaaagttacgtaagtgaatattatatgatcaatgctttggggttcaccttccatggaactcaaaaactgctgtgctgaaattgaagatttggcatctctttaccaatcag

SEQ ID NO: 114965 - DNA, 428 bp, Glycine max
  unsure (1)..(428): unsure at all n locations
  Clone ID: PAT_MRT3847_74823C.1
ggctcgagttcattgcttaattctgtcgtcacacttgtgccttaccatcaggatcacgatgggtgcatacattactgcgactgtgttgacagctctgactgacgatgacctagtgcatgcagagccctagaagccagtgaaatcttggaaaactgggctcgagaccaagcggcgctgacggcgttcgcacagaagatcacagtcgagccacaggacatcatgaagaactggactgccgatgacgatgatgtgcgcaacgttgctggcgtccagtgcgcgcaatattcaaagggctaccaggccggaatggctcctgggactaacaatagcactgtttggagaaaacttgcagcttgatagactgctcgatgagacgctcgaacttaccgactaccacggcaactncaacaactgtacgggcactattg

SEQ ID NO: 114966 - DNA, 466 bp, Glycine max
  Clone ID: PAT_MRT3847_74824C.1
gttgatcatgaaaaaatctctaccatttggtattcttatacattcggtatagtagtggggattgtttcatttgaagttatcataacacttcctttttttatacctttggtatccagtaggatacactctagtggaaatgtcactttactggtagaatgattatggctattttgattttataatgaattaattaatttgtattggtgaccatgaataaggagttgtggatccatgaatatgcggttttgatcaaatttgcttgaattttcttctcagcgggcagaggtgccatttgcgaagtataaattgcttttgacaaatgatcctatgacaagtctatcattttggttttggtggtgtattaataagagtaatactgaattattgatttaccccctcgtagttgaatatttgagtgcttatattttggtaaatattaataaatgattcagcatgtggaagtgct

SEQ ID NO: 114967 - DNA, 2550 bp, Glycine max
  Clone ID: PAT_MRT3847_74825C.1
cggacgcgtgggcggacgcgtgggcaactgcctctctctcctttccaggttcacggtggtgtgtgcagcgcgctaaactagttggattcgaacttggagatcaaagaagtttatatgtttcgccaaaatttgagcaggggacctctcaaaatattgacgaggtggctcatattccttactatcttacaagtcagttgtgctatcaaagatcctgatgtagaaggtgaagctctgcttgatcttttgcatttcctcaatgattccaataagcaaataacggactgggacagttttttagtgagcccgtgcttcagttggtctcatgtcacttgtagaaacgggcatgtcatatccctggccttggcttcagttggattttctggaacgctttctccctcaattatcaaattgaagtatttgtctagcttagaattgcagaacaacaacctttctggacccttgcctgattacatttccaacttgacagagctacaatatctaaatcttgctgacaacaattttaatggttctataccagctaaatggggtgaactacccaatctaaagcatctggatctttcatctaatggtcttacgggaagcatcccaaagcaactcttttcagttccattgtttaactttacagatacgcaacttcagtgtggccctggcttcgagcagccttgcgcttctaaatctgaaaatccagcttcagctcacaaatcaaaattggcaaaaattgtacgttatgcaagttgtggtgcatttgcacttctgtgtcttggggctatctttacgtatcgacaacatcaaaagcataggcgaaaaattgatgtctttgttgatgtttcaggtgaagacgagagaaagatttctttcgggcaattgagaagattttcttggcgtgaacttcaacttgccactaaaaatttcagtgaaggcaatgtaattggtcagggtggctttggaaaagtgtacaaaggagtactctctgataacacaaaagtcgctgtgaaacgcctcattgattatcacaatcctggtggagaggctgcattcgagagagaagttcaactaataagtgttgcagttcatagaaacctcctaagactaattggcttctgcacaaccacaactgaaagaatccttgtataccctttcatggaaaatcttagtgtagcatatcgactgagagatttaaaacctggtgagaaaggcttggactggccaacaaggaaacgcgtggcttttggcactgcccatggtttaattcggttacatgagcaatgcaatcccaagataatacatcgtgatctaaaggctgcaaatatcctactagatgatgaatttgaagctgttctaggtgattttgggctagccaagctggttgatgcaaggatgactcatgtcaccactcaagttaggggcacaatgggtcacattgccccagagtatttgtccactggaaaatcttcagaaaagactgatgtttttggatatggcataacacttcttgaacttgtcaccggtgagcgtgcattagacctctctcggcttgaagaggacgaggatgttcttctgattgattatgtgaaaaagctgctgagagagaaaaggttggaggacattgttgatagaaatttggagagttatgatccaaaggaagttgagacgattctacaggttgcattgctttgcacccaaggctatcccgaggatcgtccaaccatgtcagaggtggtgaaaatgctgcagggagttggcttggcagatagatgggctgactggcagcaacttgaagaggctaggaatcaagaattctcactcatgactcaccaatttgtttggaatgatgagtctactcttgatcaagaagccatacagctttccagagcaagataagcagagctggagagtcaattttgaaatttggttgcttggtatggcatagaatataacatatactgatatactatacttatgtgtaatttaatgttctctaaagaaaaatgtataattaactaaaaaagcctgtgtttatataatgctggatgtacgatggaaaagaaaggaaaggaatgagggggatttggcacaggcaaacatattcgaacaggagaaaatttaggttgcaaatgtatatatcacaactgtgttgcttttgtaaccatggaaattaatggcttgtgcttgcaatgctatattctttcttttctagcttcttctagtttttggttttcaggattcaatcacactaaaccttagcctatcctacatgagaaggtttccaaactcaatgtcattacgcagcaggggagtgctcaaaaagttttagcttgaatagctagagatgttgtatgtctgaccatgaatgccatgctagatgggggaatgggctttgcaggaaaaaaaatcatatatatgtaatttcttacttgactttccagagggtatgtagcataaatccaaatgatatgccccacaaatcctctgagtgcaatctgccatgcaaattatcagggctgcgaattcataagataagctttgttc

SEQ ID NO: 114968 - DNA, 265 bp, Glycine max
  Clone ID: PAT_MRT3847_74826C.1
gagaggaaagtgatagaggaagcgagtgaaatgggtaaaaagtttgagggttgggagtgtagtttgcagtgcagtgggaacctttcgcctcaggcacactatccgatgaggaggttggaagaagaaggaagagattcagagggcaagaaagtggttttgagcgttatgggaatgagttgcgctgcttgtgccggatccattgagaaagccatcaaacgcttacctgggattcgagaggccgttgttgatgtcttgaaccataaag

SEQ ID NO: 114969 - DNA, 204 bp, Glycine max
  unsure (1)..(204): unsure at all n locations
  Clone ID: PAT_MRT3847_74827C.1
cngtgnttgnngangatgccgatncagaaacatncgccatcggaaggcctgnagaggctactncaccccgngcacgttgaaggcggggttggctgagttcatctccaccttgntcttcgtggttacgccggntcaggtttccngcatcgcctacnatncgntccaccganaacggcgccgccactcccgncggcctcatctccg

SEQ ID NO: 114970 - DNA, 624 bp, Glycine max
  Clone ID: PAT_MRT3847_74828C.1
ctcgagcgctcctcctgcccttgctgtccctctctcagctcttgggcgtgcctggcccctgaggcccctctctgaacacgggcttcggcctcgtgccagtggcaggttcctgggcccggcctccggccacccgcgacgaatcacttctaaagttggtttctatccccgatggtttaggacctgttgatgaccgaaacgatgcgggcaagttatgtgatgctatgcaaaacaccatgccaactatgcttgagaagctcatagaggatgttcatttgaatggtgacaacagaatcaccttgagggtggccgtttgctgcgtggcatcggcttcggctgttgggtggcagctggctgcctggggtgccctgtggtgggcggcaccagccgcggtatctggcctgccctgctgcggcccccacctgctcgttgatggggccttcgattctgctgccgctagcttttccatgttgggtcctttgtttccgatcgtgctcgatctctttccgcctctatggccactcactttgctctgggtatacctgggttgggattgtgaacaattattttggtatttatttattattaatcaatttgaaaaagattattcacaaaaaaaaaaaaaca

SEQ ID NO: 114971 - DNA, 380 bp, Glycine max
  Clone ID: PAT_MRT3847_74829C.1
atagctcacacttcaaggttactcacaccatccaattcaaaatcatccaatcgacatacaagtttaccaaaatcacactctgaccaaaaacaaaaagggccaccacatcagacacacacatctcaccctccttcaaatcaaattaactactagtagtaccactttactttcccttcctctaagctttattattttttctttctctaagtatttttagtgacaccctttttgaatcagatccaaaagaagctactagttttgtttctttctttacggggttttgagccaattatataagttttccatgcacgatttgtgcctagttgagagcatgaggctgatgagtctggcttggttctcaattctactggtgattctgg

SEQ ID NO: 114972 - DNA, 314 bp, Glycine max
  Clone ID: PAT_MRT3847_7482C.1
gaacggatgtctaattgtctgttgaccggctattgcctatttcggtgttccttcctcgtttacgtcgcccccattgacacgttgttcccaaaatttaagcactataaatttcgacacttgccaagtactccaacgcctacttcatctctcttataatcacacacacctaccttatagctatggaaactggaggctttcatggctaccgcaagctccccaacacaacctctgggttgaagctgtcagtgtcagacatgaacatgaacatgaggcagcagcaggtagcatcatcagatcagaactgcagcaaccac

SEQ ID NO: 114973 - DNA, 317 bp, Glycine max
  Clone ID: PAT_MRT3847_74830C.1
ggacaaactgttttttttttgggtgggtatttaacagtttaatacagattaacaacgggtgatgattgccacatttgtgaaaaatgggccttagaagaaaaaaacattagaggaaaaaaaaacacacggaaaacctgtgtaaggcaagatattggcgccctctataaggaagttcaaatacggggaaggggttttttatgtaaaataacataaatgaaaaccccccaccggttcttggatgttctggcccaaacttttgttaataaatgagcgggaacaggtcaattttagaaaagggggagatacagtgttttttt

SEQ ID NO: 114974 - DNA, 643 bp, Glycine max
  unsure (1)..(643): unsure at all n locations
  Clone ID: PAT_MRT3847_74831C.1
cacgcgtccgatccaatattgacaactttattagaagtccgtgtgaggggttgaggccaagagctgggaagattgccactgacaaaagtggggtggaaatcaaccaagttgacaaggaaaatcaggtggctaaaagggcaaggagatcttctgaaggtttggttcctcacaaaaataaaaagggatgatgttaaaaagccccataagtgtgaccttgatggttgccaaatgagtttcaagactaaggctgagttactactgcataaacgaaacctttgcccacatgaagggtgtggtaagaagttcagctcccacaaatatgctttacttcaccagcgtgttcatgatgatgagaggccccttaagtgcccatggaaaggttgttccatgtcattcaagtgggcttgggcaaggacagagcatattcgcgtacatactggggagaagccttatcactgcaaggtcgagggatgtggcctttctttcaggtttgtatcagattttagcaggcacagacggaaaacggngcaccatgtgaaacctnctgcttgagaagatataatattcatttgttaactttttgttctcgcaacatgtgcatatttgcagttagattggtaaaagtgaggcatagagtcatgtc

SEQ ID NO: 114975 - DNA, 340 bp, Glycine max
  unsure (1)..(340): unsure at all n locations
  Clone ID: PAT_MRT3847_74832C.1
gaataaatttgagactctttgctacctgcgcgacctggatgatgcacaattggcaaaggaattanaatggcgtcttaggaagggatgcgttcgtttgttgcaattcnagttcgaacacngtttcntgtaccnngagcacaacaggtcaccaggatactacgatagacgctactggaccatgatgaagctgcctatgtctggttgcactgatgcttctcaggtgttgaaggagctttaagaggctaagactgcataccccaactgcttcatccgtatcatcggatttgacaaccgtcgtcaagtgcactgcattagctttatctgctacaagccctcaact

SEQ ID NO: 114976 - DNA, 778 bp, Glycine max
  Clone ID: PAT_MRT3847_74833C.1
cttgcatgacctcgcagctttttacacaaggtgacataaggaagttaagtgtgggataaattatggatttttgggttggttgttttctattttatttgtaatgaaaacatgatgaaaatatgtttggttgaatttctaaaaacatctccaggaacaaaaaccttatttcgggtaaaataaaattgtggtgacaataaatataattttaaacaaatttaaaaataaaaaaaacaagaattcaatatataataaatttttaatatttttattccagaaaacaaaaaaataaaaatgcaaacgaaacatccttatacacccaaaaacaaactaatttcatccttatcccctttgtcgctagaaaaaaaaattaaggcacgaagaagatccatccctcaaattttcacagcgaacttcccagcctcatgttccttccccttcacttcacattcacaactccacaacaataataatcttaatcaacacaaatagcatattcccaatctccttcaacaacacacacacacacatccattcattctctctctctctctcatggcttcttcttccatttccgctccaacgctcaccttcccgacgcagaagctcgccgttccgttcccggcgccgcggacgccctcgctcctcccgttcccgttgcaatccccctgccgctgcctcgcctccgcctcctccgacgaccgcagtggcggcggcgccaaacgcggctgggagtccgtgctgcaccacttctccgaggtcgcgaaacgcgtcgattcct

SEQ ID NO: 114977 - DNA, 120 bp, Glycine max
  Clone ID: PAT_MRT3847_74834C.1
aatagcaaatcaatttcttttaagaataaaaataatgcacactgaacaactatctcactacatgcgagtaaaccaccgacggaaaggagacccacactattgctgtcacttacccacacg

SEQ ID NO: 114978 - DNA, 181 bp, Glycine max
  Clone ID: PAT_MRT3847_74835C.1
gttctaagcaagacatcggaaacattattgtgtcaccacaataatagactcactttatttattcagagatcaactttgatctccaggaaccctaaatggccactattgtatccaataattaccctcaaagagttggagctacgcttctactttgagggcttttataattccctcaacaaag

SEQ ID NO: 114979 - DNA, 472 bp, Glycine max
  Clone ID: PAT_MRT3847_74836C.1
aaaaaaacaaaaaagatgattattaacaaaaatgatcaaatcaatgatcatgattcatgagcttccagcttcatttcccatctaactaaggaaaggattttattgaccaaaaaaaaaagactaagaagctaaaatgacctttttttaagagaaacctgaacaactttgttgacccacccatcttttttattcatgggaatatcattgccattggtgctgctatttgggttgtaagggttgttgatatcactatcaaatccaccactaccaccatgttttttttcgcatcatcattattactttgaggagcatttgcatttccaattccattttgagggtttttcctaaaagggttcttattgttatgcatccacactttgaaaaccccttttagagaccccaatcttattggaaaatttttggaccaacccatcatcccctttttggattttccaccccaatttcttaaaaa

SEQ ID NO: 114980 - DNA, 420 bp, Glycine max
  Clone ID: PAT_MRT3847_74837C.1
tgttgatcctttctggaagctcaagaggtttcttaacattggttgtgaagctacccttaagagaaacgtgaaaataatagatgattttgtccatggagtaattaagacaagaaaggcacaattggcacttcagcaagaatataatgtcaaagaggacatactatcaaggtttttgattgagagcaagaaggaccaaaaaactatgactgatcagtacttgagggatataattctcaactttatgatagctggcaaagacacaagtgcaaacactctttcatggttcttctacatgctctgcaagaaccctcttatagaggaaaagattgtgcaagaagtgagagatgtcacttgtagttgtagccatgaaagtgaaccaaacatagaagaatttgtggccaaaataacagatgacaccct

SEQ ID NO: 114981 - DNA, 284 bp, Glycine max
  Clone ID: PAT_MRT3847_74838C.1
gaagtttataacaaaattcagcctcagaaactgagtatcaagggaagaactcctcaaatggagacaccattagtggtccaaaattttacttcagaagctgactattttccagtgacaagcttgaaggatgttaaatttggttttgtgggcagagacagtgaagatatggagaatagcattgccagtggcattgacccatctattccaggttctccacaaactcctcaacttccatatatgctggtcatcttggagacattgaactctcttctatctctgtgagc

SEQ ID NO: 114982 - DNA, 569 bp, Glycine max
  Clone ID: PAT_MRT3847_74839C.1
ccacgcgtccgcccacgcgtccgttgggcctgaagaatgttcaaggctgctccaaaggataggtcattgtcttaattctatcatccaaacattgcttacctgggaaagatatgtcttgacattctgccagatacttcggggactgtcctctacatactcactgaacttatgactattcaagctcttttaagtgcgccagactctgatgatcccttctccgctatcattgtcaaacatcgaaaatttactgaggcccatgcagctccaatggcctatgaccggacccatttctttgctggcggaactggctgcttctgattaaactttcgcgttagataacgttctcagagggacggtctgctgtataactgtgcacattgaaatagctagtatgctcgaattgtctaagctattctggagggcataattccagttactttctggaacgtgaaaactacttccttcctgctgaaaacagtatgtaggaactagtttgaacaaaatcctatcctttgtagcacacattggatattgctctatctccacggacgcgtgggcggacgcgtggg

SEQ ID NO: 114983 - DNA, 244 bp, Glycine max
  Clone ID: PAT_MRT3847_7483C.1
tgaactttaataggagcataaacctagattagctattcgcgacataggccgattggaagaccgactaccatcaaaccaccgtgccaagtaactcgctattgcaagcccggacaacaaccagcccaggacagaaaatgaactcctactaatcaagagaggtacctaattgcctaccataaaggctaattgaaccatggaaccagaagagcacattggcctcccgcagtgagccaggtgctagaca

SEQ ID NO: 114984 - DNA, 783 bp, Glycine max
  Clone ID: PAT_MRT3847_74840C.1
gacaacttaacaatcttctctatcaccccatctcatttttctcactcttgttagttattcctggtacccattttgaacagtgatgaagcgtcatcataggtcaccacaccaccaacagagaagttgggctgaaatatgttgtttcggttggtcctgcttacagctcttctgggcaagggtggtcatgcgcaagtggtttaacatggggagctatgagtctgattacagtgctgaccctgttgatgatgatgatgattctgaaagtggttcagacaatgaagagcggggaagacagtcgcagtttgcggacaacagatgtaatgaagatgaagcttcatctgaatcaacagaatttcttccaaagttaaggaggcaaaagtcatcaacttatagatctcagtatataaacaaaaatgagctgagggtatgtgttgggacgtggaatgttggaggaaagcttccacctgatgaccttgatattgatgattggcttggcatcaatgaaccagctgacatctatgtcctgggtcttcaagagattgtacccttaaaccctggtaacatatttggtgctgaagatacccgtcctgttccaaaatgggagaatattattcgagaaacactgaatagagttcgacctgaaatgccaaagataaaatcctttagtgaccttccatgccaatcaaaatttccgttagtgacccacgttcttgatcaagatttaagcctattactgacatccctgagtgacaagagtgaatattacttgaaagtgatagtgac

SEQ ID NO: 114985 - DNA, 320 bp, Glycine max
  Clone ID: PAT_MRT3847_74841C.1
ggctcgagctgagagacggggagctagagtcttgtgattctgctgcgagatggtccctacactgaagtcagtgtctattctttatttaactcaataccatgttggcgaggactccgcatacaaccgacaatgccaggtgctaccaaatacctcggcgactacaagaacgctcgagcaggatgatctgaagaaggcttacaagaaagccgacattaacaatcaccccgacatgggcggcgatccctataggtataaagagctggcgcacgctcatgaggttctgagtgaccctgagaagcgagacatatatgatcagcatg

SEQ ID NO: 114986 - DNA, 441 bp, Glycine max
  Clone ID: PAT_MRT3847_74842C.1
gggggaacgggccctgttaccagcattttattcacaatatataaattttattctaaacattggcgggccctattaattaattaaaatatctccatcctaaaaaaaaaaaatctgctttgggggttttttaacaactactacttggcaccgccattcaacgttcgccacagggacttttcaattttcaatccaaatgggagatgctttaataaaaaataattggaacagccaaattcaaaaatggggaattgaaaactgtttcgagtttcgactttttgatgacatcaatcaacccccataacgggttttaaaaaactcaggggggtttttttccaaaatgcttggacccccttttttaaagaactgacctatgggcgttttacgggccgcaaggaaagttttatcccaaaagtttttgggggcttcatcgccaagggtttt

SEQ ID NO: 114987 - DNA, 392 bp, Glycine max
  unsure (1)..(392): unsure at all n locations
  Clone ID: PAT_MRT3847_74843C.1
attcataataactgatccatatttgattaaaagacttaacttaaacaaatgcgggttcattcagatgtcannnnaaagatatcattatgttcctagagttatatatgataaactattcccactaaggaagcacaaaacaagttaagatccaccaccaattatttatttgctcctatgaagtttgagactatcacttaaatttacacacttaatatccttcaaaatatttacggtaacactgttgatccattttctcattgctcttaggagatttatctttgctctctatcgtcaccttaggaaattccaacccaggtttttgagttagtgaaatatcggaatcttattttctatcctttggtgacaaaccttggttctttagtgattgtgat

SEQ ID NO: 114988 - DNA, 318 bp, Glycine max
  Clone ID: PAT_MRT3847_74844C.1
aaaccattagctatgacaggggacaaaaggaatttatttataatacacaggggagctacaaatcataacttttttattatggacattatagaggaactgggatacatgagtaaatggcccaaaaagaatgaaaaaacttgggccaatgactttcagagtccaaaaatgatgaacctctaaaaggccccaaaaaaaaaataaccctgaaatagcaatgcccttgtcatggcactatgtttaaagaatcaaaatgaacatttttggtaaaacctgcctgcctgaaaattttcacacaaatgaataaaaaaaatcaaatcc

SEQ ID NO: 114989 - DNA, 614 bp, Glycine max
  unsure (1)..(614): unsure at all n locations
  Clone ID: PAT_MRT3847_74845C.1
agtatgnnctgacttagatggcagtttagaaggtttnannnnaggacccagannncttggtnntgataaaagcgttntnnnnttatannnntaataaaatagcgtacatttaaaataagctttttttttaccgaatacttaaattctttaatttgtttaaatttatctgttccataactctcaacattgactttatagatgttagggtatatggaaagcatgaagggactctcaccccttttttttttttgtgggtatggtacccgcccggcattcaattggcttctggttatatttaatagagccataaacatttgttagataatcaatattcaataaatgcttgacagctccataagtaccatatccatcaggtaccatggcaacttccaagagggaaatgaataatttaaagcactcaaagtttactggagaaaatcagaaatagaggggccaaagaatagttattgtgaatcacaagtatcttgtgcaaataatcttcataaaatcttgtcccaaaaaacttatcttcataaattcaattattttgtctaatcatttaaataatgaaatgcattttcagcttctctcccctcccctaacccctgaaagga

SEQ ID NO: 114990 - DNA, 1008 bp, Glycine max
  unsure (1)..(1008): unsure at all n locations
  Clone ID: PAT_MRT3847_74846C.1
atcattaatatatttatcaattttctgtttgtcttttttaaaataaatcatgattttattgtccttgttatgattttatatttcaattactttaataattagttttattcaacatttataatttaataagctaatttttcagctttcaactaccaacttctaactagtttttcagttagttttgtcgaatataaccattgtcaaaagggttggagggaaaacccctttattaatgtttcaacatataaatgaataatgaaatgaaacacgtctacattattgccaagggacatgctagttgggccatacaaacctcaagttcaactttgtgaggtaaattggagaaggagttacatttgagtctaatctctttctcttaaacacaccctgatcaactgccattcaccacgattaacagacctctgaagagctccaatgagtcttctctaacaagtctctgcttgcagcacttggaagaaattagaccaaacaggtttgttaaggtaagttccaaaaaaaggtttctttaacccttttcaaaattggcggccttgtccctggcccctgcggggggggtctgaaatggggttgttgccacggctctgggtggccctccgtggcacgtcgttcggctccttgggctcccccgcctcgtccttggtggtatttgcgccccgttgctcccgtctgttgtggttggaattgcgcccttgatctagaagttttctactaatgggaatttcaatcttgcttctatttatcgtaactannncctattcaagagtatttgggacaggccaggtccgaaaagagtgaaattgtttctttggaagtcagcccatgatgctctcccaaccaactatcttnngcatcactgaaatatcnnnacaaatgctccctctgccaacagcgtgangagattactgtccatgctcnnngagattgttctacagcagnacaggtttagctcctaacctctcttcaccggttcaaggaacaaaattttcg

SEQ ID NO: 114991 - DNA, 1648 bp, Glycine max
  Clone ID: PAT_MRT3847_74847C.1
gatcgcttcggctgccattgaaagaaactgttgaatcgcgtcgattaaggtgattttcgtttcgtgctttcacttttgaactcctttcaattttcctttggtttttcgtaaatcaagtttgctttttacttcctttcgaacccgaaatttgtcattttcaaaggctcgaggtccttgtttatatgaatttcgagaggaactaggttgctatgaaacaaacatggtttggtcttgatgacgaaattgagtgacctcttattagtatgaattgaactgtggagctgatagtattaatttcagtttcctttctgagggtattgtttcatgctctaattcccttttgtttgatttgatgcatctcaatttcttttgcaggttttgagatttctaggctttcatctcagacagtgaaaaaatgatagatataagtacacttaatgctgcacagattactgtgctgggatctgccttttgtgctatgctttccatgcatttcacgtcgcagttactgtctcagcatctcttttattggaagaatccgaaagagcaaaaggctattatcattatcatcctcatggctccaatctatgcagctgtctcctttgtgggtctcttggatatcagaggaagcaaggagtttttcacctttttggagtcagttaaagaatgttatgaagctttggtcattgccaagtttttggctttgatgtatagttaccttaacatatccattagtagaaacattgtgccagatgaaatcaaaggcagggaaattcaccactcttttccaatgacactttttcagcctcgtactgttcggctgaaccaccataatttgaagcttctaaaatattggacatggcagtttgttgttgtccgtccagtatgttctgttctgatgattgcattacagctagtcgggctgtatccaacttggttgagctgggcattcaccatcgttctcaacatatctgtgtcgttagccttgtattctctggtggtcttttaccatgtgtttgctaaagaactggcaccacacaaacctctagctaaattcttgtgcatcaaaggaattgttttcttctgcttttggcagggaatgttgctggagcttttagcggcaactggtgtcattcaatctcgccatttgcggttagatgtggagcacattgaggaagcaatgcagaatattttggtatgtctagagatggttatcttttctgttcttcaacagtatgcttatcatcctgcaccatatagtggagaagttgagaaaatgcttaaacaaaacaagaaaaatgaatgatatgataaggtcaaaagaaaaattcagggtacagtcgtacagagatgtatttaagagctgtttattgtggcgctagtagatacttgaaagcattgatgcaaagtggatgtgttcttttaataatgttattgtgctgtacaagattccccatccaccacctctgtatcgtttcctttttggttgctgtaatttccaagcctactaaaagagattagtctttattatattattatttgctatctagtatatctactatctagcgtatggtcatttgcttaggatgatagttgtttctggttactgtctcagatacttttatggtttggattgctcaatatacat

SEQ ID NO: 114992 - DNA, 754 bp, Glycine max
  unsure (1)..(754): unsure at all n locations
  Clone ID: PAT_MRT3847_74848C.1
gcatgcctgcagtttatgtgaaaaaaataataatgaaaataaaaggggacatgaattgaagagaaagccttctctttatcttatccatctatccggctgcataggcatagactagagagagagttgcaatggccgtttctttggcagtgaaccgtcctctgcttggtcttcacgagaatgtaccattagctgttgctcatccccaattcctcccgttcaaatggccacccaagtccaaactcccctccgtcgtcggaattcgatgctcctcctcccctttcaacgacaaaaccctcatttccatcacacctaacacttcccacctcaatcccaaccctctcgcttgtcgctttcacgcttcccagtttggaggtacttccttctcttttctcaaccctaacttttcatttcgtctttttttttctctcccttctcgtacatttttcttacttgtcatgttaccaacttcagatatttaatccgaaccaacatgactcaactcatatctagttttggtatagtttatctcgaaatactttaatttgagttatcacatcgtttgctatacggattggattgtgtgtttttgacaggtatatatcttcctccttcccggaaccatatttcttcttaaatgctcaaattgtttgttgcaacccagtattgctagtntacagcctagagtaatagaccccaattagatgagatgagataacctcacttagggtgtgnttcaattgtatttncataatgc

SEQ ID NO: 114993 - DNA, 249 bp, Glycine max
  Clone ID: PAT_MRT3847_74849C.1
gtggttacacctgttagggataatcgccattgccatgatgaataaaccatcttccagatggaacattcattgttcctgatagcacaatgaccacaatagaatccacagacaaactcgttccccgttccacaacaacctgatatctaacctgcatactaacaaggcccactttggtaaggcgacaaggggcttaaaagagaagcattcattgacctcccccctgctcattcactcattcgacgcatcact

SEQ ID NO: 114994 - DNA, 418 bp, Glycine max
  Clone ID: PAT_MRT3847_7484C.1
ccccaaaaaagttttttttttccataaaacagggttttggcctaaaacccccctaagtggcaaccaaaaaacaccttcaaaattcgatcctttctttttatggaaccaataccagtttttttttttcctttgctgaaaacaagctgaaggaattttcttctttgggataaaaagagggcaaatttatttattcggttttaaaaggaaaattgatggtgtttaaagctgtgctcctccccccaaaatttgatggcccccaaaacctgggttttttttttttccgccccccccttaaaaaaaaccaggggggcctcctttgaaaagctaaacttttttgtttgaacagtttgttttttcaaccagggttttcttcactgagggatctgccacagggcccccctccccgggagggataaat

SEQ ID NO: 114995 - DNA, 1103 bp, Glycine max
  Clone ID: PAT_MRT3847_74850C.1
ttttggaaaccgcaagtaaaatgtgttttttcctttgatatttatttatttgactatattcaattcaaataatggaaaaagcagtgtaagaacaagtatgacagtaacaatgacataagtgttacacatgctcttaatcccttcccaaaaagaatgaaataaaatacaatgtataaaagcagcaaaacaaaagatcttgccaacaaacttgattttggctgctttgcaaagcggactgaagcatccagatctgagaaatcaccagaaatgattaccagtgctccaatccttaattagtctatgttacatcaaccatgaaataaaacagattgcctgcactatacacttcttgctttgacagtaaaaccatatgtggaggccctctttctttcatgacaaatccaagttagatcacctcattccttgtatcctctataaaatagtggatttggaagacaactggagtaccaactatgggacatctcttcaaggaaatatgcctgtttaaaacaggcgtagaaaagaagtacaagattcctgaaggtactaatttggcaacccagttcttgcttcacacacttctttcttctccatggttggggctttcacaatcccatgcatgtagatatacatgtatatatacaaattccatgctattggactttatctccacaggaccacaggagaagatagaacaagattaagtaacctgagtttctgagaatctagttaaaaaaataggcagaccccaaaacctcctgaagatcaaagtctcctcgttcaggtaagggaggaaagttcaatgcgggaaaagtcttttggaagctctccaacaaattttccaatattggagcatcatagagttcaacaaacttttccctgagtatcctgttcatttcatcaacatcacacgcatgtgtccaatatgaatcatgaacccctgcaaagttcaaccctgcttttttacaagcaactgcagtcatcatcatgtgagaaccatcaagagagtgaacaaaatttgggggaaaagctgttctctgccgtttaaccatgaccttgttagtctcccgttgtaatgtcaatatctgaagggaagtcttgat

SEQ ID NO: 114996 - DNA, 202 bp, Glycine max
  Clone ID: PAT_MRT3847_74851C.1
aaacacttggaacgatacgaactaaactgacaaccaactcgggagagggacatgggggggacgggtgaaccaaggcaccaattgcggacaaaactgagaaggcgggaccacaggagcaagaggaaagaagcagtctgggagatctcactcaatggcttgagcgaccaccttacgacagatagctgcccaggctccagctatg

SEQ ID NO: 114997 - DNA, 1327 bp, Glycine max
  Clone ID: PAT_MRT3847_74852C.1
aattcaattcggctcgagggctcgaggaaggagagaaagagaatgaagaactagaaagcagatcaggtagttcccagatagagaaacttgaagaagttgtctgcattgaacaaggggaaagtaaagaagaaagtcgtaatgttgaagctgaagatgttaaggaaattccacacaatgtaaacaaagagcctgcacaggcttcagaaattgaagcaaaatatgtgacattggatcatccaaaggttacccctgtgaacagagaaagcaatgcgacaaagaagaagaaaaaatcgatgctatccacatctaagcctaaggcatcccaattttccacccctagaagttcaaatcctacatcaactcccaccaagacattggcatctgcctcttcaactaaaaggggaaattctccatcaatatcttggaggaaaattacttccacttcagagaacagaaaagttccaaataaatctttgcacatgtcccttagcttggctccaagccaacctgatcctgcttcgcatactacaatgaggaaatctttgattatggagaaaatgggggataaggacatagtcaaacgagcattcaagactttccagaacaatttcaatcagccaaaaacttctggtgaaaacaaatctttggtaaaagaaaaggttccttcaaaggtgacagagtcaaggaatccaacatctataaccttgagaaaggaagatggacagtcacctaaggttgacagtatggatagaagaagtgtgaatgctgttcgaactgctttcggcctaaaaggtgacgttaaagcagagaaaggaaaagagtttccgagaaaaatagatgaaaaatttaattcaaaagaggtagaaagaacgcatcttcaactgaaatcaaagggggaaaagataaaacatatttccaaagccacacacttgccagcttttcactggggtcagaaagcatcaaaaagtcatccagaaaagggggatgttaagattgagaaatggaggtagcctaaaatcaagagatgggattgaatacatcagtgggcgtctaagatctatatgttcagaggaaatgcttatggctacaactcaagtcacactatgatgatattttagtttagactctagtctgcaacaggggaaaaattatctagttatataagactataggagcatatgaacaatgtgaggaggaggaggaaggactaaagcttcagttattcataataaatttcttgtgagaaataatattgtataactataatgtctaatatgagaaatgtatgcatttctaataattaattgcatcatttacattctatgag

SEQ ID NO: 114998 - DNA, 733 bp, Glycine max
  unsure (1)..(733): unsure at all n locations
  Clone ID: PAT_MRT3847_74853C.1
ggaagaggatgaggagatgcaaggccgtggaaccactatctcccaaaatgtttgctggggttgtgttcccatgttggtaagttgcttacctcaaggcctggcaataaatcctaccaagggaaactgaattcaattgaacaggagttgacgtaaagccaaactactcagtatgaactctctgcacaaaccattcgagtttcgagcttattctcagaaatcagcatgagataaaatgtaaaaaaaggtgtaaaaggatgaggagatgcaaggccgtggaaccactatctcaggtcaatcaatgtcaacaagcagaagtttggggtctccatccagccggagtgaacagacaatggcaacacctgctagtgatagcacttttcttaggttaaaccatcttgacatacatggtgatgatgctggatcacaggtgcagttgctagcaagaagaaaaagaggggccaacgtgctattggaggtgataagagtggaaagaggtctccgccaatttagtatgaaagtgtgtgagaaggtagaaagcaagggaagaacaacttacaatgaggctttagcaaatgaacactnacctgtagatatgccttcagttgggaagcacccagcagcttcctttatataataattcagagagagatttcatgtagctgatgaacttgtgggctgatttgctgatccatccattggtgttcaactcctgatcagcaacattatgatgaga

SEQ ID NO: 114999 - DNA, 153 bp, Glycine max
  Clone ID: PAT_MRT3847_74854C.1
gaatcgcatgggcaaaccaaattcggcgctttcaacacggacactcttcacgatccacgcttaagtcctcatccatacgacatcatagcacgtctataatggcccatacattcagattcacagggcttacgtgtttgaatcatcgtgaccagt

SEQ ID NO: 115000 - DNA, 201 bp, Glycine max
  Clone ID: PAT_MRT3847_74855C.1
gtcttacctacgtaaatgggggacctgctgagggagtacattgttggagagcccaacactgaatctcatgacactgacagaacactcgttgctggggactgacgctctccattctgaagacaggttaacgaggcactgttagtaaagtcaaccagaatgtgctggtagactattgtgaacgacctactatctacttaccct

SEQ ID NO: 115001 - DNA, 486 bp, Glycine max
  unsure (1)..(486): unsure at all n locations
  Clone ID: PAT_MRT3847_74856C.1
tatgcacttgaattgtttgttataaaactgaatattttcacttgtctgataggaaattaagaatagatgttgtcatatttgactattttagttattaggtaccactcctttgggtagaaataatggctgtgagaggcatttttttttcaattgtgattctttgagccattgaaatactatcttgagacactactactattatgttcatctatgcacaccaaacccttgttatttgtgtctaatttcattcaaagcttccttcccattgaattgcaggctttggtcaattgtagacacgagttaacatttatgagaaatcgaattttatatttgtttaatttattacaagtactactacagatgtaaaagtgatttttttttacaaatatgtgaacatcaaccaatgcanataaatttagttttgatcaatatcttcacctatttttattttgtgaacttttattcaagtttgttggtttaactagc

SEQ ID NO: 115002 - DNA, 224 bp, Glycine max
  Clone ID: PAT_MRT3847_74857C.1
tttaatttaagaatcaaagcagaaaggttcaagagagggactcagaggccctgcctgtcaaatcaaccactgctttgattcttaaattaaataaatattattgttgttgttgcatttgatcattcacactaccctacatacctaatttattaaattctatgctaccaaataaatttgtagttatttgacattgatgactttgaattttatatacataattacct

SEQ ID NO: 115003 - DNA, 488 bp, Glycine max
  Clone ID: PAT_MRT3847_74858C.1
ttccttgccagcaatttgccgtgctagcatgtgtgcacgtcctccttcttggggggggggggggggagggggaataggttaggggactagaattaggcgcaattagtagccagaagagacggcccactagtatgtttaaacacccacgcatgggaagagttggactgctgttgccgtttgcgatgactgatagcttgacacttcacccaggtaactcaagtagcttaccggtgtaaattagcacaccaattgatccaagtttagcacagctattgtatcgccactgatgatatgcctggtatgtttgcgagagcttgtactggttgaatggggcctggcggtttgtccactgctggattgaagtgaaggtgtgagtataacagtgccaacgctagggatactaccatgcaaataagccctcagtaatggctgtagccaagttgccctaccgcaatgcgctgctagcacactaaccccagctatgggct

SEQ ID NO: 115004 - DNA, 289 bp, Glycine max
  Clone ID: PAT_MRT3847_74859C.1
tgcccaatctagatcaaggaataccatttcttctgaagataaacctttcaacttgagaagccgcgaccccatctattccaacaagcttggcaagttgttcgagattaccctaaagaaaaaccctcatctttgggacttgtatgtctttctcagtcgtgtgtatatgaacgagggagctctttttctgccacacttcaatttaaaggccatagaggtactagtgattaatgaaggagaagcaaacattgaacttgttgacattaaagaacaacaccagacgcagcaacag

SEQ ID NO: 115005 - DNA, 834 bp, Glycine max
  Clone ID: PAT_MRT3847_7485C.1
gcacgaggctcaatctcgcccgccatcaagcaatgatcgaggtactggttcctctcagactccaatttcaaccttgttagtgcaaggagctgcttcattttcatccctttcatcagcattaaattctgcgatggattcgcgggttcaattacaatcacaaaccccctaatgctgcaactgataccaataatggtttgcttgctcaatctcgcctgcagacaggcaatgatcgtgggcttggttcatcccggactccgatttcaaccttgttagtgcaaggagctgcttcgttttcatccctttcatcagcattaaattctgcgatggattctgctgaaagattagttgaggaccttgagtcatatattcataatcacccaacaaatggtgtcaatacaaattcaactcatgatgggaatgttgctgcaactgattccacacctgcagcttctacatctcattttagtaggaatgttgacaccactgctgatattggcttagaaattcagacaacagatagtaacatacagactgagactagtccattggacccttcttcttcttcatctcacagaggaagcactcgtgtttcaacttcaaggcaagtttcaaatgatcgcagaagaaggagatcaaggtgaaggtcttttatgtaaggagatgtaaatcatattaccagaaggttcccaatttatagaaagcgacaatttgctttttatagaaaattttctgtctatttaagcaattggtttgtataaaggaataaacaaccattttaagcattttgtgtggtgttagccaatttttattcaatggatgagaggatatttcagc

SEQ ID NO: 115006 - DNA, 262 bp, Glycine max
  Clone ID: PAT_MRT3847_74860C.1
tgttgatgagggtgctgacttcattgaaactgatatcttatcatccaaagatggtgtccttgtatgtttgcatgatgtaacccttggtaatactactgactattgcagatcgaacagagtttgttatccgttatgaccatattgaagtcaatgggaaaacctgactggcttttgtactgctcgtttcacattcgacagatgcaagttattgaggtctgagcacaggttttctttcagggccaacagtttattcggaaggttt

SEQ ID NO: 115007 - DNA, 715 bp, Glycine max
  Clone ID: PAT_MRT3847_74861C.1
gcacgagagataacacatatcaaattatatactaacctctcaagaatgtccaccatcacggcttcttacaatgtgactccgaatgagccaactccaaacgtttctttgtggctttccgagagtgaccaagttgcacgttggagtcacacctccaccatctacatttacaaagaaaaccaaacccaaaacgcccttgagagaatgagggattctctaagcaaaattcttgtgcactaccaccctttggccggtcgattgacttggttagagggtggtaaagtagcactgaattgcaatggaaagggagtgacattgattgaagccgaatcacaaaaaacaatggatgattatggcgattttgcgccgagcgaaaagctgaagaatgaactcattcctccggttgattactctcaacccattgaggagcttcccttgttgcttgttcaattaacaaggttcaaaaaaggaagcagcaacaataataataataaccaattaggccttgcaattggagtggctttttgccatgttttgtgtgatgggttagcagccataaggttcattaatgcatgggcaaagcttactagagggggagtgttggactcaattgaaatgtttccgtttcttgatagaacaatcatgaattccacatacccaccaaggactccacgttttgatcaccctgagttgaagcctctgcctctcaaactaggca

SEQ ID NO: 115008 - DNA, 311 bp, Glycine max
  Clone ID: PAT_MRT3847_74862C.1
caaccaatttctgtcccccaaacaatgcactccctaataatgcaggtggatggtgcaaccctccccttcaccacttcgacctttcccaacctattttccaacaaattgctcaatacaaagctggaatagtacccgtggcttaccgaaggtagttacaattatcgttatttttctgttaactaccaacaaagattaatacaattaataagaaacggattcatatcccatgagggctattcttgctgtgcttcttgagtgagccttaaggcctgttctctagtcccggctagtccttgggattaactcacaaa

SEQ ID NO: 115009 - DNA, 233 bp, Glycine max
  Clone ID: PAT_MRT3847_74863C.1
ggcggccgccctttttttttttttttcaacaattttgctgttttatttgaggaatcgcacaatgcaccatactaacgcaggacgatcgcaggaacctaaaccggataacgagcaatgcaagcaggcccgggcccaccaaccggggccatggcgcttacgcagggctgtcacacagcactgacccatctaaaggcacttccacaatctatctggcacaccatgtcaccctcctt

SEQ ID NO: 115010 - DNA, 252 bp, Glycine max
  Clone ID: PAT_MRT3847_74864C.1
tcgggattaaactggagactggatcaaacttatacaaaattatacaataagtaacttgtagtgaggtgaccgctagaaaaaatggcgtgattatggataaaaaatgaaattgatagggaaattgtttcagaaaaaaggagtgaatgggcctcatatgaacaagggttagaaacaaacagaaacagtgcaaagcattttgatgcatgcaagtggacaaaaatcagcaacacacaattacctagggaaaatgaa

SEQ ID NO: 115011 - DNA, 1437 bp, Glycine max
  Clone ID: PAT_MRT3847_74865C.1
agatatttgagctgattaatacccttaagtagatgaggttttctcttatccacattatgaatcttcctgcattaagaaagtggagccttttgctgctacacaagggaaattttgatagctttactttactgatcatcaattttgcttcatcctcttccctattcacctatcacaagccactaacattaaatattgaaatggaactaagcaccatgttttgcttgtttgctccttttctcttcattggtctggtcaaggaactgctttaatccttcaaatgaaacatataaatctgccattaagattattactaccaacaatttaacagatttttctaatgagggtgaccttgaacgagaaatcacgtctattaaattcacactactgagtggaaaagctcttcagcgagatggcagtgcttgcacaatggtatattcacctgttcttgcagggcaaaggctgctgtatcacaatttcacaaagtatgaactatacaaaagggctattacttttatgataaatgaaagtaggaaacagaataaccgaagtttgaagcaagtaataaatgatcaagttgtcatgaaagtaagatatttgagctgattaatacccttaagtagatgaggttttctcttatccacattatgaatcttcctgcattaagaaagtggagccttttgctgctacacaagggaaattttgatagctttactttactgatcatcaattttgcttcatcctcttccctattcacctatcacaagccactaacattaaatattgaaatggaactaagcaccatgttttgcttgtttgctccttttctcttcattggtctgctcaagcaactgctttaatccttcccctacaaaccttggagtagctgttcccacctgattccataggtcgaccttacataggagaaaccttttaaatgttttctcgaaacccaaacattttccttgccacaaaaataaaaaggttacatatcaaaatttcactttccactttatgtagcacctctccaatccttcaactagttcatgtgattgccatgtaatataaattaccaaacaatggaagaagtataacttatttttttgctaagtagcgttgaatatgcaaaagagcatcacatggacaaccaatagcaactttacaagaaatgaataatggaattgcatgtgtatgtttgcaagtgaaagaaatgatatgaacctttttattttgggaacacatttgaaaggtttctctaatgtaaagaccaaccaatggaaccgggagggagtggctatttctagtgtttggaagagaatgacgtgagcaatgacttgaaaagaactatgaagagaaaagaagcataaatgcagaacatggtgctgaattccatgtcaaacattaagtgaatggcctgcctgtaataggtgaatgggaaag

SEQ ID NO: 115012 - DNA, 1827 bp, Glycine max
  Clone ID: PAT_MRT3847_74866C.1
catccagtgtaccctgtaacccctgaaggaagcaacatgaatggatttccaaagatgtccatgtatccaaaggatgttggttctggagtcatgtcagttcaagctgggaatccaatggaaacactcactttgggacaaggaaatgtggaacagaatgggccaagtactaagctagtttgtacaaccccctattgttccagatcatagaggctccacagtgtctgatatcactgcaagtttgagttccattgatccaccaacactgtctctggggttatctttgtcatccagtccaagacaaacatcatcatcaatacatgcagctttacatgcactgccatacttcaacaatcaagatagcatcataagtgctgcttgaaaaagataaacatatatctttggcccattatctatagctactttggattcacagagatgtttatcactaatctactttctctttttggcgggagaaatataaaacatgttaaaggaaaagatgatgaattagatccttctgaaggcaaggtaataagtcatgagaccaatttgatccttctgttccttgtacagaccatggaaaggtcctgtcatgtttttgtttattgtttattggccacttttatgtttgtagttactataactgaaaataaccaagtacttcctgttaatttttaatgaattgacgttcgatatggactttcacagaaaaaaaaaaaaaaaaaaaaaaaaaaaaaaaaaaacgagcgagattacagtgcttgcacaatggtatactcacctgttcttgcagggcaaaggctgatgtatcctcctttattctattaactactatacaaaagggctattacttttatgataaatgaaagtaggaaacagaataaccgaagtttgaagcaagtaataaatgatcaagttgtcatgaaagtaagatatttgagctgattaatacccttaagtagatgaggttttctcttatccacattatgaatcttcctgcattaagaaagtggagccttttgctgctacacaagggaaattttgatagctttactttactgatcatcaattttgcttcatcctcttccctattcacctatcacaagccactaacattaaatattgaaatggaactaagcaccatgttttgcttgtttgctccttttctcttcattgttctgttcaagtaactgcttctaatcctacccctacaaaccttggagtagctgctcgcacctgattccaagggtcgaccttacataggagaaacctttcaaatgtattctctaaaaccaaacatttgctttgtcacaaaaataaaaaggccacatatcaaattctcactttccattttatctagaacctctcgaatccttcaactagttcatgtgattgccaagtaaaataaattaccaaacaatggaagtataactcatttttttgctgaatagcattgaatatgcaaaagagcatcacatgaaccactagcaactgtacaaggaatgaataatgaaattgcatgtgtatgtttgcaagtgaaagcaatgatataaaccttttttatttttgtgactaagaagattgttttgggtgttgggaacgcatttgaaaggattctctaatgtaaagaccaaccaatggaattgggagggagtgactatttctagtgtttggaagagaatgatgtcagcaatgacttaaagagaactatgaatagaaaagaagcataaatgcaaaatatggtgctgaattccatgtccaacattaagtgaatggccctgtaataggtgaatgcggacgaagaagaacccacgcgtccgcggacga

SEQ ID NO: 115013 - DNA, 441 bp, Glycine max
  Clone ID: PAT_MRT3847_74867C.1
gcatggtgcatccattgtggctgccattctcaaggaccggtaatgagccaagcttctgctttcctaagatgaactacacaaagaaggatttgttgttgactatcttattattctttccccacttcttttttttctgatgaatgctagtcttgaatggtagtgtcaagtggtaatgaatttgatggttgtaactactttggtatttatagaggccattcttccaatatatgtttgattagaagggagattatactgagcattgtctttatccaagatgatgattttcctggttgtgattgcttcgtcatatatattgaatactgcctaggaggtgttcttagtacacattcttttgctaggtgacttttttctgttaaaatttcccacttgtctttgcttctctttcaggaatttgttcaatgactggactattgagttgaa

SEQ ID NO: 115014 - DNA, 750 bp, Glycine max
  Clone ID: PAT_MRT3847_74868C.1
gtaattcgcgatcctgtcaacttgttcaaaaacttttatgggataacaaaataatgacaatgaatcaaaattttcacataaattctaacctaacttttccagaacctcacttatttaacttctgtgcaaccacctataagttatacttatatggactttgttgtttgttaggaatcaattaagtacttgcctcaattaaaaagttctcatgagctagaagcttattcaaacattctgccccaatcgatgacagtgccgatgggtgaaagatttcattcaagtaaatttagtcataaatcttgtttggacaaacttctccataagctaaagaagaaaataagaagataaaatgtattgagcttctgcaccgtagtttttggggatattaaataaaaagagcttctataaaagttgattttaactcatgtgagaaactaaattcattttaccttttttttccttctcttatagaagcctacggagaagtttattcaaatggggctatagtgtggaaatttatgaactgtggaatctttgcagctagtgctttgaaatgcctctttgttcataataacattacattccagctgcacaaaagtattttttttttaccatgattcttctgtatgctatgttgtgtagttgtttcttatatgaaccataatatgtattcatgctgtcctgaattgaagtgcttctgagttatttaacttattttgtacacatgtcatcatattgatcttcatgcca

SEQ ID NO: 115015 - DNA, 917 bp, Glycine max
  Clone ID: PAT_MRT3847_74869C.1
tttttttttttttttttttttttataataaagttcttggctacgataattattactcttaagtatataaaaactgttgcccagagtcagcagctattattggatcagtttgtcctgcaaccaattgttcattacagcgttcagttaagatggtaggccaaatcgattataaacagatgcagtatctatctacatcatagaagaaaactaaataaatggcagatcagtcccttttattttcaatcagtaattcacattaaactttctttttccaagaaaatatgcagagaaaaactgctgcacgttgaaactccggaagacggaatacattaacatgaatacaaaccaacaaatcactcttcaccagatttgggggggcccttccatttaaaattgtccgcgtatgatttaaccttcagcaatggtgtgtggggcttcttgaccgaatactcccaaccatgtttctctgcaaatgcttttgctgcttgttcgctatcaaaagtcaaggcagaatcaccaacatgagagtaggggtccccagtggatgtccagcccatcagtggattttcccacttttgggttgataagaagttgatcttccatcttccaacctttccagatccttgttgagatgcagttctagcaggagagtaaattagaaccctcctacgaaggtgttcttcaggaattccagaaaccattccgatctcgcctcgcttaatttcggccaatgcgccggtggagaacggccgggccatggtggcgcgaagggcgcgttgtaaggtattcgccatcgtcgatgagaaattttattctgcgcacacacaacaggaccgagtgaaaatggaatcgaaaaacgtatcacggtatgtgtcttcgacgaaaagaaaaaaaattcaaaacacacgcacctcgttc

SEQ ID NO: 115016 - DNA, 413 bp, Glycine max
  Clone ID: PAT_MRT3847_7486C.1
tcgcccacgcgtccgcccacgcgtccgcccacgcgtccgattttagggcatattaatgggcggaaatacacttctgggtggggagcaaggctttcctatggccatgagtggaattagctcaggtgatctttctaatgcttatagagtttaatatttttatatattgtaattataaatattttaaattattaattaaatttttaatgtagttattatgaaaatcaacaaatatttattatatttataattaaacgaaaatgtaaatacgagtactgcatatactatttatttgtaattataaataaaacatgcatttctaatatatatatcttctatatatgaatatgacatttgttgtgcctatggtatatatagttttgtgcatttaccaatcaatttcagaggcttcaatg

SEQ ID NO: 115017 - DNA, 325 bp, Glycine max
  Clone ID: PAT_MRT3847_74870C.1
gttcttttgttctgctgaggtgcctgtttatatagctgagattgcacctcaaaagttgagaggtggccttgggtcagtgaaccaggttgaagccttattgttgcttcttgatgcatgcctgtttttttttttttttattagaagtttattattcattaattttggacattttctggttcagctctctgatacagtgggcattatgctggccttatctgttgattcttttcgcccactggagagtccttgcaatgctagggaaattgctacttactaacttggcttagctctcgcggatcgaccattgaaaattttaaaagccttg

SEQ ID NO: 115018 - DNA, 376 bp, Glycine max
  Clone ID: PAT_MRT3847_74871C.1
attcgggcgggagggccttcataaaaccaagcgctggaataccgccactcactctcacccctctagggggggctcaaaagccaaatccagtccatcttcagccttagctcccgaacttgatatttcatacccgagacctccccagaaaccctaacctctcccccgtagaaacaaccgtagccgacaggaaccacgccgcaattaaagagcaccaccgtagaaaccccacacccagccctaaggcccctgccccagctccgaacgttaccatacccgagctcaccctcgcctttggcgatatctccgccgaccacccaacctaccggttcgaagcccaccgagagatagagaagcgcgggggcgtccggcacggcat

SEQ ID NO: 115019 - DNA, 430 bp, Glycine max
  Clone ID: PAT_MRT3847_74872C.1
cctcgtgccgaaattcggcacgaggctcaaaacggaggtacatttaatgtaactattgatggaaatcacatggattgtgccggaggcagcggaatttgcctctttgtttttgatatgaaagattttaaaaatcccacaacaaagaaatgttttgactcctcacaaatgtctacactttgttctacaattggaaaagtgaaagacggaaatcttattattatgggaaccaaaggagattgcaccaaattttgcacagaagattttaaacagtgttgtgctatgttaggaagtatggagatctcaagattggaaaatcgagattgttgggctatgatggtgaagaagggaatgcctcaaacattttatgaaatgagaaagcccgagaccgtcactttcaatcgaactttcgattgttgttgttagaaaaaaa

SEQ ID NO: 115020 - DNA, 655 bp, Glycine max
  unsure (1)..(655): unsure at all n locations
  Clone ID: PAT_MRT3847_74873C.1
ggatgcacgcggcccgcagccgggagcctggagagcggacagcggccgcccttaaacctgattctctctttttaancggcgaaaacagaaaaaaacaacagggcgggtgggacacaacaacgggaacccccccccagcccaagagcccaagggcagccaaacaaaaaaccgcgggacctaacaaaacaccccgatgaccgcgccccgcaacccagaaagggggacccgccccagagaaagacgaccaacaggtcctcacaagacaacgccccatagggccagtagcacaaagcctgcacacccaaagatgcacggaatgaagacccgaaagcaaacaccaggttgccccaacatggtgactgacgaaacaagccagggggcacgaaaaaaacgcgcccgaacacccctccggaaagaagctgcccagaaatcaccccaaaaaaaccgaagcccagccccttgcagcctgaggaaagggcaagccagggggccaaaaacgagaaacacaaccccccgagacaataggcaacgaacacacacgggcggacccagccacgcagggacccatggggaagggaccaaagaaaacccccaggcccccagcaaaaataaacccggcgccctcccaggaagaagggggggccccccaaaagga

SEQ ID NO: 115021 - DNA, 373 bp, Glycine max
  Clone ID: PAT_MRT3847_74874C.1
tctgttatttgatgggggtgagttgtgattaagggcagtgttttcacccacaccacaagcggcttatcgggtttgtattgcacagagagagaatggcgaccacacccagtttgtgtggcagtgtgatgttgagcacctcccttctgaggtagcatgctatggtatctgagaacatgagaatgctgaaggctaatgctggtgtttttgacttaaagggagggcatgaagggcgtgggagtgcaatggtacgttacaatgagaagctgataaccccacaaggagatcaagactttgactgcccagatgatgttttcattcttgaaaaggctgaggaatttggcattgaccttgcctactgatgcatggctggtgc

SEQ ID NO: 115022 - DNA, 737 bp, Glycine max
  unsure (1)..(737): unsure at all n locations
  Clone ID: PAT_MRT3847_74875C.1
gaaaaaaacaatctgaacccaaattcgcaggtcgttgaaagttgaaatccaaggagaaacacaaaagaagaagaagaaaaaggaagaaaccagcgtcacatcatcgtggttctgcaaaatatatttttctttttgggtgaataaataaagggttgtgcgtggtggtgttttgttgtgtttgtgagtatctgaatccgcgcagttaggtttgtgattgattgattgatcaatcaaagagagagagagagagagagggaatgggagatcaagtggagggaacgccacacaacgttcccccacaggcggctctaagctctttccgcgcccaattttgcagattcgaccgatctcgcacatgaccttaattccgctgaaatgcagaagttctactcttagattgaaaaaaagacagtgagttttgagcgcaatgcaactctaaatgacatcttccagcagcgtttcaccaaaacccccactctcgtcaatggcttttccaacctctacgccatggaggtggatcctactgttgagcatgaggacatgggtggcgctgatgggatggactccttgttctccgagctcgccggcgcgattcccangattgatgaggccatgagctttgctgagatgttgaaggctattgcaatggaaggaacagaaaacagagtctcattactgactatccactcaaatcaggacactgcattntgatacctgtggaactgcaaagagtactt

SEQ ID NO: 115023 - DNA, 317 bp, Glycine max
  Clone ID: PAT_MRT3847_74876C.1
tcgtccacgcgtccgtgagtgtgctgttgcagaggtagccagttatcatgggacctgctgggccagggggtcctgggcctgatggacctggttggggtcctgggcctggtggacctgcttggggtcctgctggtggtggacctgccggcccagaatggggtcctgggcctggtgggccacgctggggtccacgcctgcgtggacctggcttctttgggcctggcggacctgccttctttgggcctgatgggttatttggtggatgtgcaaatggtttatgctgccttgtatctttatggggagtaacatttaacaca

SEQ ID NO: 115024 - DNA, 341 bp, Glycine max
  Clone ID: PAT_MRT3847_74877C.1
tttttgtgggtttttttttttgtttttgggggttttttttttgtttttatatccacaaattaaaaaaccaacattttttaacccatatatacggacgttcattcagcaaaacctggtcattatattataggctggatttaaataacaggggacaaggtggagctaatttacatttacattaataataacccacattttttccaccaccttggtagctgggtgttaatcccacacgttcataaccataggacttacttgacatagtagtaatagtaaaagaaggaagggatcgatgtcgtctaattaagagttaattaataatgggtttgagaccaagtttt

SEQ ID NO: 115025 - DNA, 340 bp, Glycine max
  unsure (1)..(340): unsure at all n locations
  Clone ID: PAT_MRT3847_74878C.1
ccccctccagacccaacccgaaatccccggtccaacccaccgcacccagaccccgtgggaaaccccatatcctattttaattaanaaaaaaaaaaaaaaaaaaaaaaaaaaaaaaaaaaaaaaaaaaaaaaaaaaaaaaaaaaaaaaanaggggccgccccctcaaaagaacccaacctaactaccccgtccatccacacaaaaacccctccaaaagggccaccaaaatccaatccactgcccgccgttaaacaaccccgaaactgaaaaaaccctgccgtaacccaactaaatccccttccaccacatccccctttccccacctggcgaaaaaccaaaa

SEQ ID NO: 115026 - DNA, 270 bp, Glycine max
  Clone ID: PAT_MRT3847_74879C.1
atcaatatatctattaaccaagtgagataatttaacctactctatttcttcaaagcggggggtttcttagcatgggggggccaccccaactatatgttccctatactaattaacaccttctatgaaacccgtacttcctagtttaaatacccacatatcaacttttctttgtacccacacaacattattggctttcaaaccactcctaaaaattccttcttatcatcaaaccaatacattcatttcgaacaacatttttcatacttcaaa

SEQ ID NO: 115027 - DNA, 139 bp, Glycine max
  unsure (1)..(139): unsure at all n locations
  Clone ID: PAT_MRT3847_7487C.1
attagaatntgnaggtgtggaatagatggaagaatgtggaaagtggtgacnaanaagacnaagaagaannngtngataagtccagngaagagagtnttgctaccctccancgncgacgangtttctcaaggcattgcct

SEQ ID NO: 115028 - DNA, 782 bp, Glycine max
  unsure (1)..(782): unsure at all n locations
  Clone ID: PAT_MRT3847_74880C.1
cgggaaaaattccanaaaaaaaaaaaaaaaaaaaaaaaaaaaaaaaaaaaaaaaaaaaaaaaaaaaaaaaaaaaaaaaaaaaaaaaaaaaaaaattcctttggctttggaccaataaaaaaataccaaanaaaaggtaaaaaaggtaaaaaaaaaatttggggggttccccccggaaaaacaaagaaggttttgggggagaacccctttcaaaagctttcagggaaaacttcccccaaaacgggggggggtccaacaatccaaaccggaaaaaacccccggcacaaagggctttgttcccttttcaagaaaggggggaaacccccccaatcccaaacccccgggccctggttaaaaatttttttgcttgggggggggcccccctgggccacttaaaaaaaaaggaaacggggggggtggaggcgcccctggttcctacccgggcccaaaaagaagccccggacccccagtccgggggggtaaaaaaaccccggcgaaaaaaaaaaaggaaacctgtgggggcaattgggagggccaaattgaccagggttgggaaaaaaccctatgttgattggccccccccatttaaaagggcttatttgggccccccggcttgcccgaaaggggaaaaaaaaaaacctggttccaccaaaaactggttataaacaaggtccccaaaaaaagggtggttaaaaaaaagaaatttccttggaatggaaaaacccctttaaagtaatatattcccaaatattaccgttggggaaccaaacccaaacctttcac

SEQ ID NO: 115029 - DNA, 575 bp, Glycine max
  Clone ID: PAT_MRT3847_74881C.1
agtcattgaacacatccctttatgcatctaacccctttgacaagtttggagtgtgttcaggtcgtacatgaagatccaaacgacaggcttctccaaaaatggataaaaccaacaaacttgtcaaaggagttaaggataaggacatgtttaatgacctagtttatgagatcctttgacccacgcgtccgctaagatgatgctcgcaaattttgggatttggaagtaaggcttgagcatgtgtatcatgtgggaacttaaacaacagaaaatccaaatagtataattgttgttgtttaagttcccacacggtgaaattttcccacatgatactaattaccgagccacaagttggttgagtttgtcaagtttcatccattttttggagaagcaggttgtttgaatctttgggtacggacccagacgagcacccgaactttttaagtcttagatgggtaaagaccatgttatttttatcaggagaaatcgaagtggttgatttgggaagagaattattctctctacctccaagaggctaacaattggctaatttaacatatcttcaattcatattcttc

SEQ ID NO: 115030 - DNA, 653 bp, Glycine max
  Clone ID: PAT_MRT3847_74882C.1
gcggagacatagttaggttagagcggtgaataggtgcggttagttggggggtagaaaagcgagtgaatacatacaatacatgggcgcagtgagatggaagaagaaggtgttccggtggaaggttcttcaggtacggtgagtcgggcacggaagcttctgtttcggcgaatgctggtggggatcaaagacggaaggttcttcttgggctccttctactgcatcgacaagcaaggcaacatcattctccaggacgccgtcgaatatcgcagcacgcgccaatcttcgccttctcccatggaacagaggtgcctcggccttattctcattccttcctcttgccgcacctcttgtcacgtcgattgcgctatccacgaacagttatctctcctttcgctgaatcaaacaccaccgcactagccagggttttactgtgccccttcaattgcttatatatgttactgaaaattacgtacgctggttggttctatatgtttttctttcttgctttgttcctccttctaattgatgtgtaattgagatgctgaaatgaattggatttatcagttccatgtgagtaggaactggtgaatttgaatttccttgtgtgtgctcgattaaggataaagaaagcggccgccacaaggaaccaagca

SEQ ID NO: 115031 - DNA, 618 bp, Glycine max
  Clone ID: PAT_MRT3847_74883C.1
acgaggtgggacatgacatccattccccatcaccttgttagatggatccaagatacctaaaaccatgctacttgtgtcatttgataaataccaagcatagaatagtcaatggtgcatctttatcctctccttttatttaggaaatgatagtgccatttgcagagaaagagtcaaagagacaagtttccgcttgcaaaaacccaccatatcatatgcaggaattctcatgttctgtatttgcttacctttctccaaaaatgaaaggtcacctttaggaaaaggagatccatgaatggcatcttgtcaaattagtttgcagcattccttcagttgagcaacttatctaatagagtataaattacatgagcctccctgaggttttgtaaaattacacaaaccttacctgcttttttaacatttacactaaccttccttcaggggttgccagtgtaacgtttttttacccaattaaggggggttagtgtaccactaaataaaggcagagggtggttgtgtaatttcatgaaacttcagggatgttggtgtaattttctctaatacttttcacagtgaaagctctgaaatatacataattgtatacaagcattttgttactca

SEQ ID NO: 115032 - DNA, 474 bp, Glycine max
  Clone ID: PAT_MRT3847_74884C.1
cccacccccccaaaaataagggtttggaattttttggtcccaaaaaacaaataaagatcccatttacttgaagggggcccataaaaaacccgggtccccaataggcaaaatccccggaagcaaatttcatttaaaaataaaccggccccttcgtttttgacctccaaaacccctccaaataggggcctttttaagcatttaaaactattcaccccccgggcgggaaaatcgggcagttttgttggaaaaaacaacataaagggggggggttttttaaacaatattttttttttttttgggggatatagggggggcaatcccaccacaaaaggcccggtggggcataaggagcggtcccaaacccttaaaatgggaaacaacaatttttttgaacccattggggaaatgggggggggtttttttgttgaaaccatacccaaggttgggaaaaaaagggcatcctttgaacttttt

SEQ ID NO: 115033 - DNA, 314 bp, Glycine max
  Clone ID: PAT_MRT3847_74885C.1
ttagtaaccgccgccagtgtgctggaattctccctttccatcgtcctccccttttttttctaccacttccatttaatattatacgtagagttaacattatatgtctcccttctcatgctgaccttgatagaaatgtcaaagtaaaaaataaactcgacacacattcaaattttgaactttattatcatattcatccaaacattgttgcaaactttcacaaattacaatcactcattgatcttttacataaaattcttgaaaaaccacttttcaatcaacttacgacaatatatcatcctgattatattttaaac

SEQ ID NO: 115034 - DNA, 275 bp, Glycine max
  Clone ID: PAT_MRT3847_74886C.1
aaaaaaaattttagcttccaaataacaactgttcgaatcaagtcccaaagggacacttaaatttcaactatgaaattttttatagctgaaaaaaattttcttttggaaatatacctattggaagggggggtttattaccaaagaaacgtctctcttgaccctgccttttttggggaaaagggagacaaaatatgtaccaaaactcatcaatgcctgcactgatccctgactagggctggagcccccctctttagcagccccataaaactcctttg

SEQ ID NO: 115035 - DNA, 1006 bp, Glycine max
  Clone ID: PAT_MRT3847_74887C.1
cacgcgtccgtttgaagttaaaattgtatttatttacttcactgtaacttcccgtggcagtaggtttataaggtattgctttattatcccccaccacatgttgaactattcgcccacgcgtccgaaacggtggatgttaatatctatcttatccagatagagctttgatgaaacgactgtttcatatcagaactataaccttgctactctgtaaaaccttaaatggaatcttcctatctccacgcaactcatttccaatctatccaaatttgcaagctaacatcatgtctacctccacactcaaatgctcagatcacatcaattccatttcctactactcattatctgtacaaccactgcaacagcttcatcatccctttaagtttcactgttcccctcaaagcattatccacttccatccattcctcactttcttcccctaagccacctatcacaaaggaggatgccatacttcaggccaaaacatccctttcagcaaccttagagaagcccctaaacaataccaaactaataggcaaattcaagaaactaaggcaacccaagttccgggttgaaattccagtcattgatgactcaccggattcactgtctcaacttgctcttgatttttttggggacatgcccatcaaaagaaaaggttctcccatcaagatcttaatgttgtggcctgatgctagcttgaaagaatctgccactattgcctttcagtctcactcaacttttgaacacattgacattccctcagtggccaaaacagaccccagaatcttgaattctgcagatgtggcaatatttttggcgcctgagagttcccaattggcacccataagaagagtgagtgatgccttttatccaaagccagtggttttgtttaatccaaaatgggcatttgaggaagagagcaaccttggtgatctgagtggctttgtggattcttttgaagtggtttattcttttatagggttggaggtgagagggatcttga

SEQ ID NO: 115036 - DNA, 369 bp, Glycine max
  unsure (1)..(369): unsure at all n locations
  Clone ID: PAT_MRT3847_74888C.1
aatcactctatcttctctttctctctgtccagtttatgtctctccccaccaaactttcagtcacggctttttcctacctgtcgccgccacctcctattaaaaaagccaaatccctcctcctacnctcctactccaacaaccacnacnccttttttgacccttcctccattcctctctacaactatctccccaattcccgctccgccaatctcgcccgcaagaaagccacccctccccaacccgccaaaaatctcctcatcaagctccacaaagcttaaccaacatttgccacaaatttccaagaagatacatgggcaaaactaaaatcttccatttgtgctatatttattaaacaacctaactcttttt

SEQ ID NO: 115037 - DNA, 220 bp, Glycine max
  Clone ID: PAT_MRT3847_74889C.1
gccaaacaacgggggaaaaataaaaattacttcccctgattggaaacacaccgtaccaacttttgtggggcaaaacagttcaaaaaaacccacccttatttttaaagggcattacattccctttacgaaacactttttttttttaaaggtttggggaaattccacatttaacacatacaccaaaatcatttttgacttgtataccccccccaaaacccaa

SEQ ID NO: 115038 - DNA, 578 bp, Glycine max
  unsure (1)..(578): unsure at all n locations
  Clone ID: PAT_MRT3847_7488C.1
ctaggactagcgtcgatctatcgctagnaatgtaccagagtcctgtcacctggcgctatgccatttgcaaccagcgccgcgcaaagggcttagccggtggctgcagagcgggccagcgcagcggaagtttttgaggatgaccgaaagggggaggcggctaggtaacaaggagaaggtgatgcaagttgcagtcagaagctgaaagaaaagagagacggccaagcccctggagggagatatgtcgtatatggcctagaaggaaagggatgcttgctaggggggggttagtgcagtacgcggcggaagccgccagcctccggtagcctacaaactaaaaaagttcttagaggaaaagagcctccagccgcgactccaaaagcctccagcgtagccgccataaaaaaaagagagaaggagagagatagagaaagaggaataaaataagacagaaaaaagaaagagaaagaaaaaaggaaaaaaaaataagccaggctaggtaaagaaaggaaaaaacgggtagcacggtatagaagaattaacgattactattaaagaaatgtaggtaacacggtaaaaga

SEQ ID NO: 115039 - DNA, 325 bp, Glycine max
  Clone ID: PAT_MRT3847_74890C.1
caccaaaataaataaattataaaataaaggatagaggttttcatacaacccctttttgggggtttgggaagaaacaaaaaaaaaggggtacccccaatttttccctttcttcccctggggaagaaaaacacttgacttggtcatgaaataaggaaccacaaccattttgttaaaataatgggggaaacccattgtttgtacaaggtcagaatttaacagaaaactgcctacttatatccctaaatcattataagggagttctcctttcattgggaaacaaaatggagtattccctcgttttcaagcatgttgtctcaaatccatt

SEQ ID NO: 115040 - DNA, 272 bp, Glycine max
  Clone ID: PAT_MRT3847_74891C.1
acgcccacgcgtcggaacccattgtactataaaaacactttgcgctattaagacataaacatggggttatgtacaccatcaaatcatatgaatctaacctctcaacctatgaccataatgacaacatgtagcaagattactatcacatgttaaccaccacggtaacataatatatagctaaagctatctattggcactcatggtaagcactccaaaatgcctagaaatatggcactgccacaaatatgagataatattactaaattactacc

SEQ ID NO: 115041 - DNA, 353 bp, Glycine max
  Clone ID: PAT_MRT3847_74892C.1
gccttatctttttcttataaaaaaatgactgacaaatatctactataacaatcaataacaactacattaacaagcattcatggcgagtgcatcatctcgtatataaaaacccaaatactccatcccccttcacaatagaaaacatcaaacgtccaaataacatctaatgcttcctcaacaactaacaccactggtttcattaaccaaatcattcatacctctcattttttgctctatcacaacactaaatcgcatcttaacataaacttactgcacattatttgaaaacattcttttctgcaattacaccttaaatattactaatttcctcaaatacattaaaatcaatttct

SEQ ID NO: 115042 - DNA, 590 bp, Glycine max
  Clone ID: PAT_MRT3847_74893C.1
ccgggaaacacacttaatttttccacgccttcaatacaccacactcttctagctccttgcaatggctgactcggatcgctcttctagtgaagtttctacacattctactggtggtctttaattgctggaaggattcctggaagaacagcagaggaaatagagaagtattggacttcaagattctcaggttctagtgaatgaggtgccaagagttctactacgattggtgttcagtctaggatgagcaagaagattttgggtgcaagattagtgtgattttgtgggacataaaaactgaattaaagttggccttattttataggtatttgtatttgtattggctataaaaaaaaaaagtggggcagcaactatagaagctggtttgtgtaatattttccatcttgaaatgttgcctggtgtgatattttccatcttgaaatgttacttggtggttggtcttatctgaattgtacttattgatgttcaccttcgtgtatttttcttattcatttaccattttgggtttttatcttgtgtctgcaatctgtattggaagagtccaactatggaaatgagaattaattagagac

SEQ ID NO: 115043 - DNA, 1078 bp, Glycine max
  Clone ID: PAT_MRT3847_74894C.1
ccaccggctcgagctcatcttcttctgaattctattgttgcagggtaacacatggctctgttattcaaggatccgtcgaagatttcggcgtatcgagatagaaggttccccgggacgcaagaggagtttgagcacgcgcttctgacctcaaccaccgtttacgtggggaacatgtcgttttacacgacggaggagcaagtttacgagctcttctcgcgtgctggggaaatcaaaaagatcatcatgggcttggacaagaacacaaaaacgccttgcggcttctgtttcgttttatattattctcgtgaagatactgaggatgtttgcaaatacataagtgggacgatactggatgatcgtcccattcgagttgattttgattggggatttcaggatggtagacaatgggggcgtgggaggagtggtggccaggtccgtgacgaatatcgcactgattatgatcctggtagaggtggctatgggaagctggttcagaaagaattagaagtacaaaggcagcttgtagattatggcactggttctttgggttcttttccaccagttattccaacttcctatggtagacatggtggaggtcatggtcatggtggttcccatcgacatggtagagattactataggaagagacaccgagatgatgaccgccacatacacgagtcctcaaaaagaacttctgatcatgaatctcggaggaacactgaccatgaatccagaccggaaaaaaatccacggtttcgtgagagtggtgattctgatgatgacgaggaagatgatagaaaaagacgggcttaaccagaatttcatgcttgatcaagttgttttaaatttaaacatttctactgacataattaaaggtggatgattgtttgtataatgtatattattgcaaattgcaaagatctcactgttagtttaacctttcttgaaattctaggctggatctgctgcctgcatatatatggcagtgctatttactgttttgtatcaatatttttctcttgtgcttttgtctaccaacatattaataagattttgttaactttgtctattgatagag

SEQ ID NO: 115044 - DNA, 203 bp, Glycine max
  Clone ID: PAT_MRT3847_74895C.1
cccacgcgtccgctctcgcacacaacaacgcgcacgttgaacctgccatccaggcttagcttgtacagtggcgactcctggagaggatactgatgatcaggaggaagtcgaaaaggctcatgatgaccttggcgctcttatatacgacagaaactgcaccgatatcgtgcttagattagcgaggaccgatgctgaggcttacg

SEQ ID NO: 115045 - DNA, 680 bp, Glycine max
  Clone ID: PAT_MRT3847_74896C.1
ttcgggaaaacacacttaattttttcacgccttcaatacaccacactcttctagctccttgcaatggctgactcggatcgctcttctagtgaagtttctacacattctactgattcagggaagcgagggtcttccaaagttgaattttctgaagatgaggaaactcttatcatcaggatgtataaactggtaggggagaggtggtctttaattgctggaaggattcctggaagaacagcagaggaaatagagaagtattggacttcaagattctcaggttctagtgaatgaggtgccaagagttctactacgattggtgttcagtctaggatgagcaagaagattttgggtgcaagattagtgtgattttgtgggacataaaaactgaattaaagttggccttattttataggtatttgtatttgtattggctataaaaaaaaaaagtggggcagcaactatagaagctggtttgtgtaatattttccatcttgaaatgttgcctggtgtgatattttccatcttgaaatgttacttggtggttggtcttatctgaattgtacttattgatgttcaccttcgtgtatttttcttattcatttaccattttgggtttttatcttgtgtctgcaatctgtattggaagagtccaactatggaaatgagaattaattagagat

SEQ ID NO: 115046 - DNA, 1531 bp, Glycine max
  Clone ID: PAT_MRT3847_74897C.1
caatgttatttatagaaataaccaagcttaattttaagcaacgaacatgatacataaatatcctctaattaaatgaaataaaaaaaactaagcaatgatgtcttgaaataggcaattccttaagcaactagctgaaaatgcttttaatgcattgaaataaactaatccaatacactcgtctattataaactaatcaaatagaagcctagcttatttcagtctttcggtcaaatgaatctttaacaagcttcattaattcgaccatcctcaatcatagttgttcctgtcgttccattattctttcttccaatttagtgtagcgcaagatgccctgcagcatccaaaagcttacccagtctttccgcaaccgtagtcaaagttgtatcactcttgcagaacgcaaacctgacgtatctcttctggtagtttaagctagaaccttcatttgaagacaagtttgtatgaaaaaatccttgacctggaacagccactacccctgcttctattatcagtttcttaacaaattctacatctgaaaggagccaattgtcaggaagctcggcaaataagaagaaggaaccctgaggtataaacactatcttaaaacctactccatctagcaacttgatgatatagtctctttttgattgatagtctcttctgagtgattcaaagtattcagggggacttctcaaagcagtcaatgcagcttcctgaaaaggtgccggagcagaatctgtaactcttccgtgaatatttctgatagcagacgcaagaaaagctggtgcaattgcccatccaaccctccaacctgtgacgctgaatgattttgacaaagaagacgttataacagtccgctctagcattccaggaaatgaggccagggatatatgttttaggttgtcatacgttatatgctcatatacttcatctgttatagccaggcaattccggctgcagcattctccagcaataatctcaagttcctcttttgtgaaaacctttccagtaggattgtgaggactgttcagcactatggctttggttttctcagtaaatgatcggagtaatttgcttggatccagagtccattgaggcgggtcaagtggcacgtgaatagggactcccccggccatggcaacacatccttcatacgtttcataggaagggtcaaaaagtatgacttcgtcacccggatcaattgttgcaaagattgcagctgcgaatgcctcgctttgaccgcagcaaatagctacgtcagtaacagggtcgatgtctaaaccatgcatttgcttcaccatcttggccaagagatcacacacaccttgcacgtgcctgtactggttgaagtcggaattgatggcagaaacggcggcgtttttgaggtggggaggggaggggaagtcggggaagccctcggcgaggttgatggcgttgcatctctgagcgagctgggacagttcttgaatggaagacgatgtaatcttctttgctgcacgcgacaactttccttccattattatattttcgc

SEQ ID NO: 115047 - DNA, 377 bp, Glycine max
  Clone ID: PAT_MRT3847_74898C.1
cgccgcctttttttttttttttttttttttttttgtgtgggggaaaacaattaagggcatattaaatatatatctatttgggaagcatttatgtacaaggtgcttttataatcgaagaggaaacaagattaatttgcctccaattactttaaagttacagtgaaacccagaatttcttcgagaaggcattgacttcacgtagccgctatgtatgtgaaagagcttgttgacatgcatagaccacgagcccatcttggacacttaaagaccacagcaaaactctcactctggaccaatgttcacagatccccacaaggtggaagggaccctcttgttgcttgccttgaaaatgacaaaaccaggcattgattttttca

SEQ ID NO: 115048 - DNA, 400 bp, Glycine max
  Clone ID: PAT_MRT3847_74899C.1
gaataatactatcttcttcgctctctttcttgtatgtgcctacacatcatacctaccttcacacaacgctgatactatcttcgacataaatggagattttgaccaaaacggtggtccctactacatatttgccaatatactacgagacctacgcgcaatagaaatccccttaacaagaaacgaaacctgccctctcactgtagttcaatctcctctatgagtctctaatggactaccactaatcatatcatcaccattccaaatacttaccatacaacaacgactaaatgagaacaatggtgttacttttgtgccaccctgtgccataattccttctagagggactactgtaagaggattaccataaggactctctgataaacttacatgttatgaacat

SEQ ID NO: 115049 - DNA, 1855 bp, Glycine max
  Clone ID: PAT_MRT3847_7489C.1
atgaatcgagcactggtattaaggggactcggccaccgatgctgaagccgccgccgggggcgagggttcaggtggtggatgatagcacgtgttccacgtgggaccttttgagggacttggctcctcaaggggaagaagggttaccgttgaaccgttccgagaatgagagtgaagtagcgagagaagtagagagaggagcggtggagaaggaagaaggggaagttggtactagagagagtccgaagagggaagaggaagagaatgtggctgggctttcggagtcgtgttcgttttctacttccaacgaagatgattcttcgagtagtactacggaccctacgtctaataatatttctccgcaagggagaatcaaacggattattaccgccgaaagctggcagaagggtgagtttctcgggggtggctcgtttggctctgtttatgaagggatttccgatgatggattcttttttgctgtaaaagaagtttcactgcttgatcaagggactcagggaaagcagagtgtatatcaactggagcaggaaatagcacttttgagtcaatttgagcatgaaaatattgttcaatactatggcacagaaatggatcaatcaaagttgtatatctttcttgagcttgtaacgaaaggttcccttagaagcctctatcagaagtatactcttcgagattcccaagtatcttcctatacgagacagattctgcatggtttgaagtatcttcatgaccgaaatgtggttcacagggatattaaatgtgcaaatatattggtggatgcaagtggatctgtcaagcttgcagattttggattggcaaaggcaaccaaattgaatgatgttaaatcaatgaaggggacagcattctggatggcgcctgaggttgtaaaaggaaagaacaagggttatggccttccagctgatatttggagtctgggatgcactgtactggagatgttaacaggccaacttccgtactgtgatttggaatctatgcaggcattatatagaattggaaaaggtgagcgacctcgtattcctgattctctttcgagagatgcacaagattttatcctgcagtgccttcaagttagtccaaatgatcgtgccactgctgctcaacttttaaaccattcatttgtccaaaggccactttctcagtcctctggttcttcatttcctcatattcacggccggaagggttaaactgtcatcttcaactatgaaacattagggagttctgtctttcattgcatgtaacatttccaatgttcagtcttgaagttgctggggttcatctgggtccattgctgcagaaattgttgatttgctcgtgttgtagtttttagagtttggttgcttgtaacttatatcaaaatttcagcacgactttggatctaacacgtcatatggcactccaaagaaccaagttatcgactaggcaatatcctattggagaattatgctcaatacgtgttatctaattactctgatgatttgttcgttgtagcaaaggtgaagtatcaacgtccagctgaaaaagttaaccctgccttcttcccctcaaatcaggtgaccggcgaaaaacccatagggtttaactctgggagcaatagtagcaagaattagagactattctatttgtacatattatttattttttattattagttggcattgtttgtgtacatctgtatttcgtagttttcttttttattatttttgtctaattcgtgtgtaatgtttccccctttttgtatgtcctttctgaaaatttggtctttggtcgaatgcgattggacgagtaaatggttttaataaatttatagatacccttgggc

SEQ ID NO: 115050 - DNA, 175 bp, Glycine max
  unsure (1)..(175): unsure at all n locations
  Clone ID: PAT_MRT3847_748C.1
cccttttgtatttttgggatgaggagggagaagangaagcgagcggtgctatggacacgngaggggagaagcccgccaagatgaacagggccattgtgaaggaaaggggagggagaaaggcaatgcaagccacgtatgggatggctaacaaaaaaaaaggagggaagggagaagc

SEQ ID NO: 115051 - DNA, 362 bp, Glycine max
  Clone ID: PAT_MRT3847_74900C.1
ctcgagccgaatcggctcgaggtaagcttcaagagcttagcatatttcctggttgcccctacattatgttaccagccaagctatcctcgcacaccttatattcgaaagggttggctgtttcgccaacttgtcaagctgataatatttacaggagttatgggatttataatagaacaatacattaatcccattgtacaaaattcacagcatcctctcaagggaaaccttctttacgccatcgagagagttctgaagctttctgttccaaatttatatgtgtggctctgcatgttctattgctttttccacctttggttaaatatattggcagagcttcttcgatttggtgatcgtgaattcta

SEQ ID NO: 115052 - DNA, 670 bp, Glycine max
  Clone ID: PAT_MRT3847_74901C.1
ggtgtttgttgccttccttttctattttccaagtatgcgtgaacttgatctaagtttctgcattttactttgtatccctgatgcttttggaaatttccaatgcttaaaaaagctatgtttaaggggaaacaattttgaaagactacccagcctcaaggagctttccaaactgttacatttaaacttacaacactgcaagagattgagatatttgcctgagctcccttcacgaactgattggcctgggagctggacacctgttaaacatgaagaatatggattgggattaaatattttcaactgcccagaattagttgagagagattgctgcaccaacaattgtttctcatggatgatacaaatacttcagtgcctcagtctttccggctttagtgggctgttcagctttccattattttcaagtattattccaggaagtgaaataccaaggtggttcaagaaagagcatgtgggcacgggcaatgtcataaacatagacagatctcactttacgcagcattacaaaaataggataggcattgcgttgggtgtaatcttcgtggtacacaaagaaagaagaatgccccctccagacatggaacaacctgcaattcttagtattacatgtggacctttctattccaccccaacaaagagagggagtacgtga

SEQ ID NO: 115053 - DNA, 248 bp, Glycine max
  Clone ID: PAT_MRT3847_74902C.1
tccaagcttctaggctcaccaggccatggtggactgtgattgcagcaacctgttatccctccactgttgggaatgggaggtgttcgctgttctgtgaaaccagcctcacgcagtgccctccactctaagaaccaggagacctatgccttcgctcaagtcccatgattcaattctcaacttggagcgggcaggccaacattttgcggtcacagcccaacccagcaaagccaaagaaccggacgcgtggg

SEQ ID NO: 115054 - DNA, 387 bp, Glycine max
  Clone ID: PAT_MRT3847_74903C.1
gcagaacttacaggaccgtatgctagactcgccgtggcgagatgtacattcatataggcgagagagcatgggttaggaccgaatgaggaggactgattaccgaactcagatctgatctgaaacgatgctctaagcgctctatcatgctactagagaatcacagatcatttatgcgagtgctcacactggagctttttacttgaattccccagtggccatcgaagtagccaaacgcagctgctagactgcgactatacaaacccatcaacagatttcctaacaatcaaaagcttcataatggaaacagaaccgacagaaacactcaatgaaaataaggcttctttgggtccgtacagccagaccttgggatgataacgtttgctgcat

SEQ ID NO: 115055 - DNA, 434 bp, Glycine max
  Clone ID: PAT_MRT3847_74904C.1
ctcttgcgaacccccactcttccaggatgatgaggggtgttattgaagttatttcgcggatgattaacccaaaacgcaagcttgtgagcgcaggcgcagaggatatcaagaagtcacatgtcaaacgttgagactgaggttctccacaaagccatggttaacacaaacaccactaagagcgctaacgccttagaaaccgaagagggcacgttcaaccaagggaaacctgtcaccgaacggtatgactccgcctgcgaggcaaaaaatggaagaataggatggatgctctttaagcatacactgtgaaagccttgatatctgggaacacccctgatgccctaatgcagattatccctggtgtattacgccagacaaggtccatttgcgtccgaaggcctaactgaaactcaggtggaatctatctcacgcttgct

SEQ ID NO: 115056 - DNA, 292 bp, Glycine max
  Clone ID: PAT_MRT3847_74905C.1
ctaggaatttatggcacagtcgggtactgtttttggatgactacccgtttgatgcgacgttcggtttggtcaatctgacacccttcctaaaagatgggtctgggccttatcacaggtcaaattgggggttaacgggaatgcaagacggtggacccaaaactatgtggtggatacttctccaaagtggaaaaaagcgtcattacatttaactgtttgaagcgtctattggttaaatttcccccaagaaaactgttaatgctaactaaaagacacgtgttcccggcacagctgt

SEQ ID NO: 115057 - DNA, 985 bp, Glycine max
  Clone ID: PAT_MRT3847_74906C.1
taccaggaagtagaaactaacactactacattgatagcttttagcatcgtttagttaacttacattgtttaaaatgttaccaattaacagacaatattgcaacatttataaactaaatgttacaaaaatgagatatcatatatttttttaaaatttttaaatatttgaaaacttaaagaccatgttcggttggtgaggaaagaaaaatgaaaatgaaaaaaaaaattcaaaatttcaagatgaatctcatactttcatatatttgtttaatttaaatacttcttctcaatttcatttatttttcttttttttcctaccaaacactacatgaacgctacaaaaatgttttaagtatttttccgttacatagtgcctacgtctattgcaccattttatttctctacacaaatctctcactctaacttttgcccccattctcattcttcgtatagttccttgtgttcttctcgctatcctttccctttcacggttcacttggaaccttcttcatctaaggattcgtcttgttttcttaaattttttctgctgccactttgatgttcgtttccgttttcgcatgaatctgtgaaaggatttttgtgagcttcaattgaaatctaattcgtgttatttattgcagtaagaatgagaagaacaaattcatcaacgttgtcgctagctatctcaggcgaatcactgagacgaagcttcgtattagctctatccttttgaatgtgttgcaatggcaaaccacatcgtgtgatcaatcgcaaagttctggtaacttaggttttgtttttgaattcatttagcgtgttttctagttcattttgaatacatagattttgaattccagtttgtgttctatgctttgtgaacacgtgttcatccctgattctcatttttttattggatttgcaaccagtttgtggtgtgatccttattctccctaatcaatacttgatttcttattgtttgtgctcgt

SEQ ID NO: 115058 - DNA, 489 bp, Glycine max
  Clone ID: PAT_MRT3847_74907C.1
agcgcttatgtcataatgatcctgagtttgtattatcaattttacgcttagtaacaccacataggattcaccatagaaagctacagtatcaagtaaatatagattatcattaaccaagagtgacctagttccaacaatatctgacttaaaagacaatctgaatatattatttccaaatgaacacaaataacccaatttgtccaaataagaaactgaaatcaaattctgtctaaatgacggtacaacaaaagtgtctttcaaatccaagtaaaagccagtgcacaataataatttaaaatgacctatggctttcacctccaccaatttatcatctccaacatagattcattttggtgtgattaattttcttacgtgtatctgtttatatatatatatatatatatatatatatatatattatattaaaaaatataattataatgatttcatcatctattaatgcacatatggtggtatggtgatctgcag

SEQ ID NO: 115059 - DNA, 308 bp, Glycine max
  Clone ID: PAT_MRT3847_74908C.1
cgcgtccatgaggagacgacagaaggggaaagtggggttgggtgtgatacacaagacattcgagcctaatgttgctctcttacaccaaccaagcacctctcactccttcatcttcgctttcagcacagtcgcaaattgcgcagcaggatatgcaaatctcttcgctcgtcaccagatcatccaaaatgatgaatcatgattccgaggactaacagcatcacattctccatgccaccgatgacgacgagatgttggacacgctgatgggaggtcacgacgactacggatcatcagttcaccatcaccaa

SEQ ID NO: 115060 - DNA, 298 bp, Glycine max
  Clone ID: PAT_MRT3847_74909C.1
gatagctcacacactaaggatttgatttctcacatcccacacttcagcgtcaagctctgctttcataatctcacttcttcagctcaagatgctgaagtcctcaatcacgctttcagatgatgaggagctgatcactatggtcggagttcatcactgtgtcacagttgtgttcatcagacgtaggtaagcattgatcttagtgggagatttaacaggtggagtgggagcatatcccttgagtccgatgtcgcaggggacgttgggatagccattcacccgtgtctgttgctgcctgtgg

SEQ ID NO: 115061 - DNA, 770 bp, Glycine max
  Clone ID: PAT_MRT3847_7490C.1
caaaatagaaagaaagaagaatgggtgagtgagtgtaaaaactgcgctctcacaattgcggccatggaagaagcttcttcgagcgaatattccattttcaaaaaaagaaaaaccactgcattccatattccgtgcgatcggagaagaggaacagactctgaagtacactttcgcttgaagaattttgttgtgaaggctcactctcgtgttcatcgctcactcactcatgctcgtgttttctgaactccgggatccattctacgatcaatttcgttcatgttccgttctctctttctctcctatgctcgtgttcttctcggaattggtttcactctgactgaactgaaggggttaacattctttgcaggagttctactagagaagcatatagttgttgtctgttctaatttgatcttcatgtaggatgacatagagaagttggtatctaagttagaagacaaggtttgtgctcccgaggaaggttcttgcatggatgctataatccttcacctacatggttgtttgccgcctgaattgcaggcaagtagttttgattggatacaattttcagatatagatgctctcataatactcacaagtgcagtgccacagataaagcatggggtttgatccaaccaaaggaccaagatcagagttctattttgatggtttgactaagttatactttatacatattatcttgaaaacaggttaggaagtacctgctttgtgttttgattttgattttttttcttttaatctttgcagct

SEQ ID NO: 115062 - DNA, 481 bp, Glycine max
  Clone ID: PAT_MRT3847_74910C.1
ccgaccacaccgtttccgcccaccctgttgccaaagagaaaaaaaaccgcgggaaacagcgggcgacacacccaaaaatggttgcaattggaggacggaaaaaaacatattggaaaaaggtgcgtcctttgttcccttaagaaaattgctgggggcacagggggcatagttgttttttttccccccccccaagtggggggaactgaccagggaaatataaacggcgggggggggggggatccccaaaataaaggatatttaaataccccgatggggggaaacaaataccggggccaaaaaagggggggggggcccacatagggggccggcggtgcccataaatacccccccaaagaagcccccctgaggcaggggggccccccagggggggcccttgggggggggtcgggcaacgggcccccccccggggaaacggggataaaaatcccctttatcccggggaccaccaaaaaccccgggg

SEQ ID NO: 115063 - DNA, 169 bp, Glycine max
  Clone ID: PAT_MRT3847_74911C.1
atgactatgggagaacccaccaaatacctgcccagtgaactcagtcactacaaaatcttgagacggtccccacggcatgggaaatccagcacgcgcatgataagtttcaaacccgcttttactctctaaacaattgaaactgctaaaagtgcttcccgcatttttgatc

SEQ ID NO: 115064 - DNA, 407 bp, Glycine max
  Clone ID: PAT_MRT3847_74912C.1
ggctcgagctcgagccgctcgagccgctcgagccgctcgagcggctcgagaaaaaaaaaaaaaaaaaaaaaaaaaaaaaaaaaaaaaaaaaaaaaaaaaaaaaaaaaaaaaaaaaaaaaaatataaaaaaaacgatatataatataaaatagaaaaaaaaaaaaaaaaaaaaaaaaatggggggggcccccatttatgggtctttttccccgggaaataatttccgtccgggtcccgggggggccaccttttttcttttttggggatatttttaagcctggggaaaataagggcaaaacttgtttcctggggaaaaatgtttcccctccaaagtccccacaaatttacgtcccggaaaattaaggggaaaaccggggggggccaaagggggggcctacccaccatta

SEQ ID NO: 115065 - DNA, 257 bp, Glycine max
  Clone ID: PAT_MRT3847_74913C.1
cggctcgagcggctcgagcggctcgagactcaattgctttacaatgtgttgcaccccaccatccgccattgcttagagttagaagcctcttatccactaaccacttatgacccatttgagtactgattgccaggtagaaaggagggtagaaaaagaagataaattggggatggaagtgggggaaaagagggtaggggttagagggagtgtggttgcagcagggtcagtgtgggacagcaggatgaagagtgatgaag

SEQ ID NO: 115066 - DNA, 186 bp, Glycine max
  unsure (1)..(186): unsure at all n locations
  Clone ID: PAT_MRT3847_74914C.1
tagcgcgtcggaacctgtttccctaagtggttccttggttaggtatccagatagcccccagactggattggagacagggaaggaaaggggcgtctaanacgatcagagttccgactagacgtcctacaaacgtaacgcagcagctaattatatcttctctatggcgaagataagacgaatggccaa

SEQ ID NO: 115067 - DNA, 477 bp, Glycine max
  Clone ID: PAT_MRT3847_74915C.1
catccaggacaaaccttaagaaattgtgtttgtcagagctttgcaatcactttaacaaaggatgctgcaatgcatcctaagtaaattttctttcattgtttcattctttttttctatatgtggaccaatttttttttctctctcccagaatgaacctaaacgcctgaaaaaacaccttccccaaatcctgaaactcctgaaaccagatgaccggattctgattgtggggaccacacggcgtcccttcgatgctgaactccaatctttctgcaaagtttaccagaaaattattttggtgcccagaccagactatgcttccagatacgttctgtggaagcaaatcattgaacgcaatggaggagtcctcaccagtgccttgaatgtcagctgcctggcgaaggtcactgacggcttcacccaaggacatacagtcgaagtggttaaaggcgtgctcacagatcagagaatccggcggca

SEQ ID NO: 115068 - DNA, 170 bp, Glycine max
  Clone ID: PAT_MRT3847_74916C.1
tcgtccaaggaccgacaagtaaatggtccttatattagttggttacagatcacattcccttacgcattacgtgcctttgacgtatgacgcaaggtctccgtcttgctatcgactttagtagcctcacactgttttgtctcgccctagcttgccctggtcttgcaggtcga

SEQ ID NO: 115069 - DNA, 684 bp, Glycine max
  unsure (1)..(684): unsure at all n locations
  Clone ID: PAT_MRT3847_74917C.1
agaataaaaatgaaatagatgcttcactatttgaattgggttgaaacagtccaaaactgaagtcgtgcctagtctttttggaaactcttctaaaatcaaattctacttaagggactttgcctgcattgcattttattggtatcaccattcctacactggtcttagacattagtatttattaacctccaaaaggaaagaaattgaaagaagtattggacaatgatctgaacataaacatggttagggtctcagttaatcattgggcaatcatgcctaatttcaccctggtttcccgttttgaccccaatccgtcctagcttcatcatggcacttacaaaagaagcttcaaaggctgtgttgttggatgcaaataagttcactaggtctcttgttcttttatgagtaaacaaagcttgatcagaggcaaggagtcctcttccttgctgaagattcttgtagtattggttatcaaatgtcctaggtgtaactgggtccatgtcaatggctaatctggggtccacattttttggacacacttgctggagctgttttgcatacgtaggattcactgtgtgatcaatgcttttccttcttctgaagttgtaaatccgtttggagaactggctgcantgagagnaccngattgtatgtgctcctgatagagcaactnnntccgtaaggnng

SEQ ID NO: 115070 - DNA, 860 bp, Glycine max
  Clone ID: PAT_MRT3847_74918C.1
cttaaaccaataaacaaacccacccaatcactaaagcaaccttcttgattatcctaaagccgcagcgcaagcaatcactctttttctttctcataataatgcaaattcttccccactctgcagcaacaaattctcatttgcaaaccccataaaggcatatcatctttatactttaccgggatctgtgtctccttttatttttccccaagacaaagtagacattgtcttccactcacttcaaaaaagagagtgagagagagaaactttgtggtctgtgttctgtgaaactgaagtgttcttcctcaatcattgtcttttacagtcaaattcagcgtctaagatctcatttcaaaaaaatttccgcttgttaaagttggtttctcactcacaagtcacaagtcacaccctttatttacttcagcatccaacaaagtgttcctcacttgttctgttcaatgactcagatcttcaaatgtgagtgttgtagcatcattgcatgagtcacccatcaaacattgttcaagtaactgtttttagtttattttgtaaatgagggtgtggagggttcacccacaagagcaaaagctttgtccaaatggtgttttgaggtgggttttggtttggatgagtgtttgttttcttgtgttcacggttggtccaccgtctcgctcgagggtgaggaagagtgtatcttctcaactttcttgtcctccatgtgattgtttctgctcttcagctgaatatctcctcgatcctctatgactggtcaacagctcaatttacaattgtggtaaacatgatccgattttgaatgacgaaatgaacaatggtctactgacaatgctatctgaggagctaaa

SEQ ID NO: 115071 - DNA, 1323 bp, Glycine max
  Clone ID: PAT_MRT3847_74919C.1
acggctgcgagaagaccacagaaggggggggaaattgatatgatatgcgaaatattatcatgtcatgtgtgggtggcatggcactctcattctcatcttaatttatttaagagacacactcactatatataaagagaaccaatgcacaccaattctcataattcccctcgagccgtgcctttgcacaacatacacgttctcctatcctagctacttactctctcttccttcaattcctcaactctctagctcttatggaaactcaacaccaacaacccaccatcaagtctaggttcagacgcatctgtgtctactgtggtagcagccctggcaaaaaccccagctaccagctcgctgctattcaactcggaaaacaactggtggagaggaacattgacttggtttatggaggaggaagcatagggttgatgggtctaatctcacaagttgtgtatgatggtggacgccacgtgttaggggtgattccagagacacttaatgcaagagagataactggagagagtgttggagaagtgagagctgtatcgggcatgcaccaacgcaaagccgaaatggcccgacaagccgatgcatttattgcactgccaggtggatatggcacccttgaagaactactggaaattatcacctgggctcaactaggcatccatgataaaccggtggggttgttgaacgtggatgggtactacaactcgctgctggcattcatggacaaagctgtggacgaaggtttcgtaacaccagctgcccgtcacattattgtttctgcccacactgcccaagaactcatgtgcaaacttgaggaatatgtccccgagcactgtggcgtggcccccaagctaagttgggagatggagcaacagttagttaacactgcaaagtcagatatttcccgttgactaataactaaataattaatcttctacaagctcactaatgcaccatcaaagaccctagatttagtgtataagtataaagtataatataacctcaaccccatgatgtagttgtaagctccacagaatagggcgaccacagtcgtttttagtttagctgtggatctaatcatttgtaatttctatggttcaagttcaagatattcaccatgtaatttctttaattttctttcttgattggctttcatggctgagactatgtattttaattatttcttagttaccaactaattgtgcattagaatttgacctggatgatcatcgaagatatatttatagtaatatatatactatatatgcattaatttggaacagaaaaagcgccgcattaccaccatttactttt

SEQ ID NO: 115072 - DNA, 436 bp, Glycine max
  Clone ID: PAT_MRT3847_7491C.1
acctcgctcactcagttagttgttccgaaaaccctaattataattaaatttaatttcaccatggcacagaagcaaaagctgcgcccttctcctctcgacgagccacccactgcttcctcttccgattccgaggaagaagagccacaacaacaacaaccatcctcccagaagaacaaagaagaggaagacgaagaagtttcctccggagaagaagaagaagaagacgaagaagaagaagaagctgcttcctccgaagaagaggaagaagacgaagatctcccaccaccaccagtttccaaaaaccctccaccccctcccgcaaaccctcagccccaacactcttcctccgaatccgaaaccgaatcaggatccgagaccgaatccgaacctgaccccactcccgtcaaggtcaagcctttagcttccaagcccatgg

SEQ ID NO: 115073 - DNA, 485 bp, Glycine max
  unsure (1)..(485): unsure at all n locations
  Clone ID: PAT_MRT3847_74920C.1
cgaggatgttgtaattgaagaagagtgccacacacccacatcaccctctcaaaaattacccaccaacccattggtgtgccctccagctcccaagaaagcacgagtagtgcctcgaagacttaagaatttagacccaccatcacaagaagggttcttccaagtgccccacgatctggcttcagtcttcgtcctacgctcacccagccttccaagaagaacagcaaagcaagcttttttctaggcacttccacatattctataatatccgatcgagccgaggaaaattactatggatgataaatctttctctccggtatttaactgaactggatagacagactcaaactcgatggtatatatgaatttacttatatgtgttaattaatataaagtattttaattatcaccaggtgtatattaattggttggttttcttctctataggtgntcctagaaattctcaattccttatgttgttatgaata

SEQ ID NO: 115074 - DNA, 542 bp, Glycine max
  unsure (1)..(542): unsure at all n locations
  Clone ID: PAT_MRT3847_74921C.1
ggcgcctcggcacgttctgggctcttatttgagacaatgcccggatcttcctctgcaaaacccgttatgtgttccggcagctcctatctcatctgtccagagagactacgtatgaacaaaaaggttgcttcgtgtgtcatggtcttgagcttaccatctagatcttgtgcatatgatatgccgatgggtgacataggctcgccttgtgtacgatcatgtaccttctgccactaatcatatgcctaccatggtcgagcctgatctggtggtgactagccttacaacggttctcgctgtacctgagcgaactatgccttcgtgaaacctacgtcttgatttacacgatggagttactggcaccaagccttgcctgggatacgtgacaccctacgcacagacctnggtagaatggttcagatgaatggcccatacaatgactcatctcaagccaattatgcaatcacacatacggcgaggactgccctaccttgctggactgcttattgcagaacattcttcattgcctatatcggaactttttg

SEQ ID NO: 115075 - DNA, 1484 bp, Glycine max
  Clone ID: PAT_MRT3847_74922C.1
ggctctgggaccgaggaaaggaagcagtgattgaattggggatttagggattgtgtacagtaacaatgaatttcaagatggattccgatagcgcgaagctgttcgtaggaggcatttctcgcgacactaccgaacacgttctcaaactccacttcgccaagtacggcgtcgtttcggactccacaatctccgtagaccgcaccacccgaagccctagaggttttggcttcgtcaccttctccgacctctccgcagctgataaagccctccaagacacccacgtcatcctcggaagaacggtagaagtgaaaaaagcaattcccaggagtgaacaacatcaacaccaaaacccattacagagtagagggggtggttattattataataataataataataataatgatgataataataataatagtaatgactattgcagtgaccacaacgttaggactaaaaagatatttgtagggggtttacctggtatatccgaggaggagtttaagaactactttgagaggttcggtcggataaccgatgtcgtggtgatgcaggacagtgtaactcaccggccaagggggtttgggttcatcactttcgagtccgaggaatcggttcaaaacgttatggtgaagagttttcatgacttgaacggtagacaggtggaggtgaagagggctgttcccaaagaggggaaccatggctatgatgggtttagtaaattaagaaataagagtgaaagaggagttcctaagagttttcctccttttagtcatagggatatgctcccgctcccaggtttcacacctttgccgtggtatagtggtgatggagtatatgcatatgggtctaatgcgtatggttgctggtaccctgtgggtggttatggggggaatggatacgcagttccttctgatgctcctagtaacctctggtatgggccaatgatgactggtcctcaggcatgtcaggtgccttacgctagtgctgttccaaatgttgtgtatgtggggggtaggattggaatagtaggtagtggtgctggatcttgggggtacactggcattatgggatctgcaacaaatttgaaatttgatcaagcttttaatgccaatgaatttgttcctggcaatgtgacatcacctcatggtgtaaagcaggatgttattgactcttcaagtttgaaaggaagcaatggtggaatttctagttgacagactaaaagggtccttcaaccttaattcatgtaggtaaatacttactgactgcttcagggttgtgaaaggttggcatattcttttgctagatgttgtaagggctagtcactcttcttttttgttttaatttgtgaagatacttttttatgtgtcacaaacatgtagtttagcaactcgtcatgtttagttatggatatttattagtgtagaggtttcatgcatctgtaaaataatttcatgcaaatccttctctattgttctttt

SEQ ID NO: 115076 - DNA, 819 bp, Glycine max
  Clone ID: PAT_MRT3847_74923C.1
gtactagtgttgggaaggaggaaaggaaacaagaagaggaggggtttttgttttggtgattgaattggggatttagggattgtgtacggtaacaatgaatttcaagatggattccgatagagcgaagctgttcgtaggaggcatttctcgcgacaccaccgaagacgttctcaaactccacttcgccaagtacggcgtcgtttccgactccacaatatccgtagaccgcaccacccgaagccctagaggttttggctttgtcactttctccgacctctccgcagctgataaagccctccaagacacccacgtcatcctcggaagaacggtagaagtgaaaaaagcgattcccaggagtgaacaacatcaacaccaaaaccaattacagagtagagtgggtggttattataataataataataataataataataattatagtaatgactgtagcagtgactacaacgttaggactaaaaagatttttgttgggggtttacctgctggtatatctgaggaggagtttaagaactactttgagaggtttggtcggattaccgatgtcgtggtgatgcaggacagtgtaactcaccggcccaggggatttgggtttatcacttttgagtccgaggattccgttcaaaacgttatggtgaagagttttcatgacttgaatggtagacaggtggaggtgaagagggctgttccgaaagaagggaaccatggctatgatgggtttagtaaattcagaaataagagtgaaagaggagttccttaagagtttgcttcttatagtcctaggaatatgttccccgggtt

SEQ ID NO: 115077 - DNA, 633 bp, Glycine max
  Clone ID: PAT_MRT3847_74924C.1
ggcaatgggcaagtacttgaccaaaagacaagcttttcttttcctttacaaaaaatgtaagatgaaaaatcatacaagaattaagtctatccatgtaatcgacatccaaaccagaatttatcccggttaccatcaatattcactattttccgggggtttttttaacaagaaaatatactagagcatatacctgtaaggttcaaagatgtaaaaaatcattatcagatatctcagttcttggaaaatcttcaaccacgtcatgatctaagctccaaactggtaacatctcacttgctcggcctgttctactaatgcagaaagtctcttctggaatctttgcagctacactaggctgccgagtactcaactgcctgatagtattgcagttgcgggatatatacactagagtaagcttttcccagtgaattcaaattcccattcatcctgctgcccctgttctgcctttgatgcctagtaaagttaggaacaatgggaacctgtgaatgttgaaatgatctagcgggaggcacaaagtcattagccctccatcctgacctcaatcccagaggttgatacaacagcccagattgaaacattagtgaagcaacactatgatagaagtaagggggaact

SEQ ID NO: 115078 - DNA, 509 bp, Glycine max
  Clone ID: PAT_MRT3847_74925C.1
cccacgcgtccgggcaattccaaagcttagtgtacatgggatgacttctgcagtcaaagatctgctaaatctggctccattagataaggtgacagtttaagcaatccaaataagtgttcactgagaaatgagaatatcatttttcagataaatgtaccaaggtctaagaagaaaaaaatattcatgtggtatatgtaaataatattagaagttcactactgtatttcccctgctacaggtatactgattgctgagattgaaatttaaatataaattagttatgtatcggatttgaactctctaatctccatataccagttgatatggcatgtctcaatgactaaattttaaagtcaaaatgtaaaaaaataaaaaaattaccattttcttaaaattcccttactttttattttcagtagaaaagtatagaatgtgcatgaaatgagccactttatgaaatatactgaaatataaaatgcaattgttttttaaagtttgttatcctttta

SEQ ID NO: 115079 - DNA, 144 bp, Glycine max
  Clone ID: PAT_MRT3847_74926C.1
atcgtctagctatctcgatcgaactgtccaaggtgctgtcacctacgattggaccagaatcatgaatacctagggaagttaatagtggtattcagatgagtagactagccagaacgaggtaaattggctgaagtaagaatctag

SEQ ID NO: 115080 - DNA, 266 bp, Glycine max
  Clone ID: PAT_MRT3847_74927C.1
aaaaaaaaaaaaaaaaaaaaaaaaaaaggggcgacctttttaaagggtgcgccgcttgggtcggcgggactgcctgacgtacgctttcatgtagggtcattgaatttcaataaggggcccttaatttaatagcgtggggactggaaaaccccggcgttacccaaaataatctgcttttaccaaatttactttttttgcagctgatttaattttgagaaggccggatacaatcgccttggccacaaccggcccaccttaaaagcaaa

SEQ ID NO: 115081 - DNA, 468 bp, Glycine max
  Clone ID: PAT_MRT3847_74928C.1
ggtttttttttttttttttttttgaaaaaataataaagggaaaacaaagaataaagggaacaatcagagaggtacatatatgtaatctgaacaaagaatgaaggaaaaacaaaagaaacatatgaccatgttttcatcatgtatgtgaatgataagaatatgaatccggataagttgatgttgaaatgggtggtgaggggtaacatgtacaccttgggtcatgaattaccttcttcttactgatatcaagctttgaacacaacacacaataccacccttgaaacctttgatggaccaaactattttgatcctcattgtaatcagactcctcttccatgtccgagttattttcttcagtatcttcctctgcttcatcatcatcagtaggtatccaagtcaaaccaaacattggaagaatgacaaggagaattttatcaattttatggttgctccattttttcagtctct

SEQ ID NO: 115082 - DNA, 335 bp, Glycine max
  Clone ID: PAT_MRT3847_74929C.1
cagaaattgattgaactcacacaaaaaacgttttcccgctgtcttgtttgtctttcctttcattttccaagaaaaagtacaatttttgagagtgaaaaactgctgtctcattgcctatctaagcaccattaacagaaagaaccttccataagttccatttcttttgctggcaaagacttcaacttttcatcattctgggtaaccctttaggctttagtttcatgcaattaatgtttcattaaaaatattttggttattgtttcaacctttatatatatatatatatatatatatatatatatatatatatatattccccccaaggagtagatcta

SEQ ID NO: 115083 - DNA, 482 bp, Glycine max
  unsure (1)..(482): unsure at all n locations
  Clone ID: PAT_MRT3847_7492C.1
ttgaacttaactcgtaattcttatatatagtgattgagttgttttagtgtctagtcataatatgaacttctcagctgtttggcaagtcatttgggttgtgttttatggcctatatgggtcttcagtacagaaatggtatagtcttcaatgatgctgttttggcttttgagaacattctggttaggttcagaactttgacatggctaaaagtaagagttcggggatttccttgttcgttttttgaatgggtcaatagccttggcctctatttgtaaaatatggagggatagccaatatcttatattatactttgactccagtcttatgtgttatccgttggctgcagtcacattttttggtgggtgcatttgttgtcttggtgtctttgtgttgggcaatgtatagtctgttctatatggttcagttnttagtatatcaatttggtagggatatttgcttcagtgggggccttttntatgatt

SEQ ID NO: 115084 - DNA, 553 bp, Glycine max
  unsure (1)..(553): unsure at all n locations
  Clone ID: PAT_MRT3847_74930C.1
ggataaaaattgggaagactttattaaggaccccggggaaaaaaagaaaaacaattatttccgggtaacaagggaacaacaaatttttctccccaaaactggtttttaaaaaagaaccccacgggccttttataaaaaacccgaacccgggggtttaataaaaaaaaaaaaacaaacgggtgtggcccatacccaaaaaaaatggggcccttgcgccccacggccccggggggggacccgggaaaccccgacccggccgtgaaagccnacaattttggcccgtgggggggggggatacaacttggcccaaaaaggggaaaaaatgaacccggggggaaacagggaaccggtcccaatccgccaaaaaataaaacccggaagcaaaaagggaaaaacctggggggccaaaagaaagagcgaacccccggggggccccaggggggaaccgcccccaaatcaatggggaaacccaacgggcccctttcaaaaaagaaaaacccccccccccggggaaagaagaaaacctccccgcccccggggggggggttttttt

SEQ ID NO: 115085 - DNA, 249 bp, Glycine max
  Clone ID: PAT_MRT3847_74931C.1
tacgatttctttggcacttcgatactgtggtttcttcaaccatctgatgtgaatggttttttttttcatgttgattttttttcttagtgttcttttgtttctggtgtttaggggagttggggtttggtaattattttgtggggttttcattttcttctttaccctacaaaatttaaacaaaaatcgatttttttgttgaatttgctgactggtatgagtgtttcagcaatcagaagtacttcataagtt

SEQ ID NO: 115086 - DNA, 430 bp, Glycine max
  Clone ID: PAT_MRT3847_74932C.1
cccacgcgtccgtacggctgcgagaagacgacagaagggggtaacacaagaacatatcgctccccttcgttctgctctctattgggctggattttaccgatcaatctctctgttcttcggttgcaatctcgttctctcttttggaatcgtttcctctccatctaatctctctggtcttcggtttcaatcactgctgtttagtccttaggttgtgtctacatattgaccttccttgatccgcatatctatgaattgtttggttttgtataaagaagagaagagaggttggggttgggggcaatagcaatagagcaatggagggcgagggaggaggagaggggttgaaccaggcagtgcagcagcaactgaatctgaagcaagtgaagacccgtgctatcagcctcttcaaagccatctcccgtattttgga

SEQ ID NO: 115087 - DNA, 296 bp, Glycine max
  Clone ID: PAT_MRT3847_74933C.1
tttacgcgtgggcggtcccgagaggctagggtgcggtctgcattgaccctttagccccctatcccttaccataaagtaactcctactttgaggttattattaagcccacttcccgatacctgagggtgcctacacaacacagatctgaaatgacgtacatggccactttctgagcccagacctcctttcactacgactgactctgcagaacccactatacccaagccgcccctgccagacaagtcaacgtctgtgcgaactaaatggcgaggaggctcgtagaggtgcgagattcc

SEQ ID NO: 115088 - DNA, 567 bp, Glycine max
  Clone ID: PAT_MRT3847_74934C.1
gaagcgaggaaaaaagcacaacagcaaacaacgtgaccccaccctctcttcccttccctcttcctataaatgctcacactctaacaaaccgaagacctctcccacttgcgatcggaagaaagagatcatcaaaccctaacacgctctctctttctctctccgaatccgaattttttatcaccttctcctcgatcattgtgattgagattgagattaaccctaacgcacacgctcactgttgcgattccgagttctatggctatgagcggtgcgtcttccgatcattcccccaagcccggcgtctcctcgccctggagccagattgtcgccgccgctgctcctccttcctccacctccccgccgcctccacccgtcgtcgacgcctccgtcgcggtcaattctccgccgacggaagattctgacaacggcggcggaaacaatgtcattaccggcaaaaggcctgcgtggaataaaccctcgaatgctgcttcttcttccgtcattggcgccgattcctgggcgctgccagcggagtccgctcgcgctccgaccaaatcgccgtctccg

SEQ ID NO: 115089 - DNA, 254 bp, Glycine max
  Clone ID: PAT_MRT3847_74935C.1
gcctccttgaaattagagacattgaagacgtagcacaaatttattattgcgagtgtgcgacgaggacgagctcgagatcgtgtaaaagtgaaaattagccacttgaaaattgagtcaccaagtgttcaagcgcgttttctaacaaaaaaataatgtttttagaagttcttcctttaatatttttttagaaattttttaacctttatattttcaattttatctttcgcgtcttggttctaaatttaacttcaata

SEQ ID NO: 115090 - DNA, 288 bp, Glycine max
  Clone ID: PAT_MRT3847_74936C.1
gggaagttgaagcttaacataaatgattaatttacataattgtagttttgccaaattctcttcattagccaatcaatgtgttcaacgctatgattagtaacatgaagaatgttgaacacatttaattacatattgacagaactgtggaggttgcagatcatttgtcatatccttttgtcagaaggctgcaatccttgccacatcacatccttttgtgtttacttagtatcttaagacttgcaacaatgccaatttccctagatcaatttcttaacctggagagtgaac

SEQ ID NO: 115091 - DNA, 327 bp, Glycine max
  Clone ID: PAT_MRT3847_74937C.1
ggggaaagaaaaaattggttttattcttttttccaaaatttaatcaaagggttttccctaatcatggcaacccctggggccctattttttaccattttctaattaaaataagaagcccaaaattggacattgccccgaagcttcaggaatttcccccccgaaaacccccctttgaaatgaacccaggggttttcatcgatgactgaagttggcaaggaatacaaatgtttaatgtcccaccgatgttgcgtaaaaaatgttaaatgggagaagaaagcaagcaaggttttttttcaccggtgacttagggggcaacaaaaaataccc

SEQ ID NO: 115092 - DNA, 286 bp, Glycine max
  Clone ID: PAT_MRT3847_74938C.1
ggacactctcggcagtttatccacgaccacaagagtcaatgagtgaggacacccatttgtaacaaaagtagccaaaaggcccataagatagacccaaacagcgagcacagccagaccctctaccgaataagtgaggactattgaatcctgcactcctaaatggagcatcctccaacatattcacgaaaggtcattttaaaatataaatttatatcttagaatcaacttttcaaaatataataatgagaatgcagaaatccacccgcactcacccagataaacaaaa

SEQ ID NO: 115093 - DNA, 218 bp, Glycine max
  Clone ID: PAT_MRT3847_74939C.1
cgtcgcctgatacaacaggcttttgatgatatagaacaatgacatacctagggcacagtggcatttccatgagaaaatcgaataacgagatcagcatatacaaatagcattaggatgaacctgtttgaagaattcaacatttgaaagttgtcatactctgaatcgttgataaaagaatctctgtgaatgtacccaccagcaccactgatactgccacg

SEQ ID NO: 115094 - DNA, 786 bp, Glycine max
  unsure (1)..(786): unsure at all n locations
  Clone ID: PAT_MRT3847_7493C.1
attcagtctatgctttaaaaattccttcatatgcttctcataacaagaatctatatgtgctgctgagtgatcactctatgcgtggacccctttaagatggcgtcaacctctacttcaagaactcgaatcaagtggcaaaagcttgaggaaacaaagcagcaaagatcaatgacaagaccatgcgagcatgctactaattcctcaagctcccaagaacgaggtattgggaatgttgaggaagatagtatcaatgaagaagatgtttgttcaagtggttgtgctacaccaaaggctaaaaggttcagaataccagaggtgctaacatgtccaccagctcctaagaagagaagggtaatgcccaattactcatcaaaaaaatccccaatagcatttttcgcttcaccagatatagagttcttcttcttctcatcatcactcagaaatgtttcagcttgatgcttcaagtttagttccaagaaagtatgaagttcagtaggtgactctctaaattgctgatccttggaagagagagtttatgactattttgtagtgtgcacttacgtacattgttaggcatgactttttatattcttataatgttttttttttctggttttggttttggttttgatttggctagtgtgtgctgcaattaatgtaaatttctaaaccatgaaggtttatctaatgtctctacccttcacaggttatatggacttctagaagggcatgtagtttcaatttgtatcatataactttgacgtcattctgngaattatatgtatc

SEQ ID NO: 115095 - DNA, 551 bp, Glycine max
  unsure (1)..(551): unsure at all n locations
  Clone ID: PAT_MRT3847_74940C.1
gagagagagaactagtctcggnttttttttttttttttttttccagggaacttttagtctttttctgattcccagaacttattccaattctctcgtacaaaatatatttatgcttcaataatcaatacaaagaagaggaaaaacaataagtagaaggcagtatgcaagcttcagggtatgagagggaccctcatgctttattgatgagtcctacaccatattgattccgcatggacaacaaattaagaaaattcaccaattattaattataatgtaacaataggtatgacctccgagtctgatgagattgattcactgccaagagttgccaacgaatttgatatagaatatccaacccaaggttgataatcttcaattctagcaagctcaatttcttcacggttttgctctgcattagatttcttatccaatctctggatcctttctaattcaaatgtaacttctttcatagttggacgttttttcccattcaactctaaacatctatttacaagattaccaactgcagggatttttcccttctctgcttc

SEQ ID NO: 115096 - DNA, 163 bp, Glycine max
  Clone ID: PAT_MRT3847_74941C.1
gtgatcttaaggatcacgttcaaaatatcaaagtgtgttgtgttttcacaggattggggggctatctataaaacaacggatccatttcaactcgtatctctgcgcaccaaactagcttttgctttatctgttgccatttaaccctcagacacaaagaatgcga

SEQ ID NO: 115097 - DNA, 2030 bp, Glycine max
  Clone ID: PAT_MRT3847_74942C.1
ctcgagccgcaacctttcacaacacggccaacataaagacacagcaacgaaggtggtggatccaacaacgccaaacgttgaacccacagtctggttctttctctctcatcaaccgatcaaccacccaatacccatcatgtaaacctttttttttctcttctgatcaaaaccaacaccaccccctcaacccattcaaagccttttccatctttctctctctattctgtttcctgcgtcgagaagggttgttggggttgtggaggaggatgcaagccaattaattaatcttgcattgcagccaccactttggtgttggtgtttctctaattcattcagggttgaaattgagaagggacttggaaatggtggtgattgatgaaaagaaccgtgtgattaggagggatatggtggagctttcacaacatgatcaatctgtaactgtggcatattatggggaggagttgcatgggggcgtgcctctaccccgcttctctagaatgtctcctttaaacacggatagacaaaacaagggaatggagaataaatacaagctcttgaacagtccggtaaagcaagcaacgcctgctgaagctcagaagtttgcaagttccattaaggtcgcaacagaaggaacatcctctcgtggtcaggcaatgtcatctgctgttcttcaagcagaggaagtccaatcaaatttggaaagagaattccctagttttgtgaagtctttagttagatcacacgttgctagttgtttttggatggggctgcctgtgtcattctgtaaaagacacttaccggataaggatacaacattcattttggaagatgaatctggtaaagaatacatgacaaaatacattgcatgtaagacaggattgagtgctggatggagacagttttctgctgtgcacaaattgcatgagggtgatgtggttgtcttccaattagtggaacctaccaaatttaaggtttacataataagagctaataatacgagggaactagatggagcctttctgagtcttgatagttgcataaaacaaaaaatgggaggcaatgataatgcagatagtgatgatgtggcatgtaataactcaaagagaaaacatggtaaatctgtccaacaagatgtccaaacgaaaaagaaggccagcgcgtcaagattgagacctaaggcaaggccatcagtcgaacaatctgaaaatgatagtgaggaagctctctcagaagttatggagggctttaaaatgctcgagttcaatgatgtgaagggttttgaaaatttcagcatcatagttgatggagtaccaatagatgctgaattctctaccgaggttcgaaacaagtactacaggctctgctgcagtcagcatgcctttcttcatgaaaatctcattaagggcatgaactataagctgattgctggaattatattggaaactgtcaacattgctgatgcaatagaagttagtgtgatatgtaccccacgtgcagaattttctaactgggacaaaactttgcttgcctttgagcatttaggcatggatgttgaatttctaagagtccgattacgccggcttgcaagaattgcctatgagaaagatgatgcctctgagaccaaaaaacacttggcatataggaatgagtacagtcgcgcagacgatgaaataaagaacatggaagccaagcttgaagaattgaagggagcatgcaatggttttggtgcttatcttgagagtttgaagtgcagagctgaaagcaatcatatcaagtttcagaaagaggttgttgctccttggtgaaactttatatgttttgctagaaaatgtatgtatatttattttgcgtggtcaaatacaattattctgtaaccttagacggaaaatatgcctcaactaagatatctattgtagtatatgtgcagttatacgaggggcagttagcaaaaccatttcactttgcatgtttgttgttggaggttttgatataaattaaataatttaaagtcaatacataaagttatttct

SEQ ID NO: 115098 - DNA, 673 bp, Glycine max
  unsure (1)..(673): unsure at all n locations
  Clone ID: PAT_MRT3847_74943C.1
gtaccggtccggattcccggggcgacccacgcgtccgctttccctcaatgtcatcgtcgggggtgggggagggggcttctttatgggtcaatgggggctttttgatgttagatcttacctttatttttgaaatctgagtttctcaaatatgagtgcggggttgggaatcgtcgctgggatgtgattgtgggagaagttcaggggcccaaagtggggggggcgaaactcgctggggaagaggaaagaaaaggggtgggggggggggagaaaaaataaaatgagaaggcaccgtgggatatcaccttcgacgggggggactagggggcnaaaaatttaccagtgagacttttcaggagcagatgcgagggggggatggctccaactaaaatgggcatccattttgggggagcctttggggtggcaacagataaggtccggtgagacatatcaaatgggggatgaccccaaacatgggcgtgtaggaaatttggttgtggggtaaaaggggatgagatgtgccgattatatgtgaatcatggagtgtgaattgtgagagaatctaaccactttatttagggggtgtgggagggggtttaaaggggaactctcttggggtgtgtcacattntatcccagtgggatctttattttaattaattttacatagggggggg

SEQ ID NO: 115099 - DNA, 352 bp, Glycine max
  Clone ID: PAT_MRT3847_74944C.1
ggagagcgagagagaaactagtctcgaattttttttttttttttttttttttttttcccacatcaaaaagtaaatagaaaatatgacttttgtgaaaacaatgagatcaagataacaaaaataatagtttttttttattaatcaaacaaaaatcaaaatataatctgaaggggcacgaagatccaaattgtttttcgtcttcaaccacaaaagttggtccacctgactcagcatcaacataataaattccttcttgttggacgcctaacgagcttttccttctgaacatactcttactcagtaccgtatcattaaatagaacgctcctcgaggtttgtgtgtcaagttaaac

SEQ ID NO: 115100 - DNA, 508 bp, Glycine max
  Clone ID: PAT_MRT3847_74945C.1
gtttttaggagacgtaaagtttattttatatattcggataattaataataactcacatctgtgaattaaattttcttgacaactaactacataaggcctaaaaagtaaaaacctttcctaacacacccaagacatttcagctttatgattgaaccctttacttcgaaggctaacaaatgattatactcagcaaatgaaagctagcttttaactttgtggcatcaaacataagacaattgtaacaacacatctgaaactaaaaccgagaggagaaaaaaaaaatataaaccgaagcaatcatcctcatttctgatcaatacttgagaagagagcattcccttggaagattgttttggaacctctcattgtcttggcagtaatcataaatcatgtggtatttcctgacccatttgaaccaccttctttgtgtggacgtaagtgtgctagagctgtattggttccaccaattggtagggctagctgctctgcaaaaccttgggttcccttt

SEQ ID NO: 115101 - DNA, 403 bp, Glycine max
  Clone ID: PAT_MRT3847_74946C.1
acagagaaaaataagccatccatattatgtcgtaattgccaaaagcaagaaaataaactgaaaaataggcaaaaactaaaagaactaaaagatagacaaaaacaaataagttgttcaagattgaggaggtggttaaggtggatgacatcatagggacaacttgttgattttggtttggttatgtagaacaaacaagtaatgaatcacacataagttggtgaaggtgaaggtgcaaaagtggatgaaggagttggtggaggatcttcaacaaccttgtagatcatttttgaaacatttggtgctttaaaacattaagaggtgaaacactttttctccttgagcttttttttattttttcatttggtctttcccatcattaagggcttcatcaggctcaatgtcg

SEQ ID NO: 115102 - DNA, 475 bp, Glycine max
  Clone ID: PAT_MRT3847_74947C.1
gaaagcttcttgtatacttctgagattcttaggatggctcctaggacttctttgtttcaattggaggcagaaagccaacattattgtgaagatcattgggatgctcttaaaaatcagcataatgaagttgattatctggatttattgaagtattgtttctcttctgcatatatgctagcattactgcatgatgttcttgggattgctatggaagagaaaagccaacattattgtgaccatcaaagtaacgctcttaaagattggactcttggatctttttttattggattcattggaagatacccctctaatctgcacatatacttacatgactgaatgatggccttgagatagttacatatgagacattggttgcatttgttgacttaatcatacacactgcattctatgggacgcattggacatagcatacaatagacgacggcataccacctcgagaagggacgatttattg

SEQ ID NO: 115103 - DNA, 1058 bp, Glycine max
  Clone ID: PAT_MRT3847_74948C.1
ccacgcgtccgggcagatagtctagctaatcacggtttatccttgttatatcaagttaattaaggtttttaatgttctgatcgttgttgttcgtgcatggcattgggtgtaacttagcattatttagcacaccagaactgaaaatggtaacgtgaatgataaagtagtctcttctctctctatctatcctgtttggcattcctacccaaatcacttttctattttccattcattcatacatatccgcgtcaacatgtcattcattttttgttccttattgtcagaaccaaaatcatttctctgaccctcaatccaatcacaacaaccttatccaattgcctcgtttctaccaatacaacacaaccaactccttttatttatttctacccatttttctttatttcatcggaaaaaacaaaagatacgatcttatgatgaggggaagaacaagacatgaagaagatgagcaatctcgagctttgtaccagctctccgcgctcgttctcaacctccttcgctcgcctctgtcgtcgttgacgttctctgacgaggttccgccgttggcggcgtcacggcgtcccgggctgggtcagatatcgccggcgggattcgcctccttgctgttgggaatatcgctggcgttgatgctttgtggatcggtgacgttcttcatcgggttcgtgttgatgccatgggttctgggattggtcatgctcttctacgtcgccggaatcctctccagcctctccgtcttcggccgctccattctctgctacgccaccgctccaccctcgccacgtaaggacattcccgcatggaagcttatgtgaagtgaccagatggaagaatgaaaatgaggagtacgatggtgtggggttttgtgctgtctattggtgcaggaatcgtggttaactgagttttattaagctactgaagtgaactatgtgcatatggcttctatgtgcatcagaaatagccaagtaaaattctgaagaactacttactaccttggtatttcggggggttgtttcccagcttcttcccttctgttatcaatt

SEQ ID NO: 115104 - DNA, 412 bp, Glycine max
  Clone ID: PAT_MRT3847_74949C.1
tccaaatccaatttcaatatgatacggattcccacttgttgccgcaaacacacaacatatttccttcttctttctctgccctttcgtgatttgctaagtcatactctctctccactgggtaaacatgcttaattctgaaggagatttaaaaataagttttggctataaatgcaatagcgatagaggtattccttgtgaagttgccagtggctgcaaaatccttcctggagtacgtagaacaagcagtttctcctgcttttcaggtgcagccttaagtgcaaatgctacattagcaaacacaaacatctgcaatggtaagataggagaagaaatccttccaagttgggattctcctaattcatttcgaaaaggaacctcttcaccaagtctttcaaagttggacatactatca

SEQ ID NO: 115105 - DNA, 473 bp, Glycine max
  Clone ID: PAT_MRT3847_7494C.1
agatagagagactaaagagaataaagttatggtgtgaaaagtgtatgataagaatatgcaccttagattaatttaagaactcttaaaaaatgatggatgatggaccacttaagatttggtccaccctagactccatcaaagtaattttatcaattgatcaaaattcttatttttaaaccaaacatgcacataataaattaatacgattaggatgaggaaaaaaataaagagagaaaggagtaagaaaagaaactaaataaaaatatgtattgtttagaatttagattggtagaaataaaaaataaaagaaatttcttaatttataaaataatgaataattttttataaacataattttatatttataaatattttaatatttcttttacgatattttttggtgtgaaaagatgccattaattttaatcttgagaaaatttatttattttttagtcaaaaaaagaagatttatt

SEQ ID NO: 115106 - DNA, 314 bp, Glycine max
  Clone ID: PAT_MRT3847_74950C.1
tcccgttcgacgactacagacgacgactctatggggttctagtgtatgtgattgctgggagtcgttcttcttcggcggtatcttcttcttttgttgtttgtgtgtttgttttttctctcacctgaaaatgtcttgctgcggtcgtaactgtggttgcggaagcgccttcatgtgcggcaacggctgccgatgctgcattatgtacccagacttgagctacaccgattcaaccaccaccgataccttgttcatgggagtggcaccagttaaggctcaattccagagtgcttaaatgtgtgttcccgcttagaacg

SEQ ID NO: 115107 - DNA, 554 bp, Glycine max
  Clone ID: PAT_MRT3847_74951C.1
cgaaaacattgtacggttaattggtcatttgcatgatcaatattgttttgcaacagtaatatatttacttatctgttcttagatactttttacccgctcaaacgttggtcaccaattcaatataatgaaccctttagagttaagagaagactacgtatatatatatatatatgctagttgtagaatctggtttaaagaagaggatgttagctatttaaaccaaatgtactgatgaacaacctctttcttctcaatttcttaacccggttgctcatcttgaagaaaaaagaaacatagttaattatatatggggattaatttaagatatggaaatgaagaatcatcaacctgttcctgctagctagccacaaattctacaagggtgtgtactgataaaatagttagcagaagagaggtaaacgaatggtattataattagtaattattattattattattctagttgcttagccttatcgatctgcgtaatgtgtaatggaccatatccagtggtgtaggcatagttagtgagatgaagatggtgatgatgatga

SEQ ID NO: 115108 - DNA, 264 bp, Glycine max
  unsure (1)..(264): unsure at all n locations
  Clone ID: PAT_MRT3847_74952C.1
acttacatagatcatgtaacggcactgccgcacggggcgcgnggcaggggagacacattcacacactcacacannnncatttacacacacacaacagtacgcaacaacatacttaacannggacctaggtccggcccgccatgaggggcgagctcattcttgggcaggacgaacaccctcattgaaaanntcacgtggcactggatgtcgatcccgttgatgacctggaaggccccgcactcgacctggccgaggatgaagttg

SEQ ID NO: 115109 - DNA, 234 bp, Glycine max
  Clone ID: PAT_MRT3847_74953C.1
attagagaagccataaaaacaagaattcagaggtgcctcccgatttaacacgccgagacagagccagaattaaaggcacatgggaaacagaccattattttatgccagcggagaacatgggttgctagctactaggatcctattagtaccatattattgacttggggcacttggtattattaattattataccagtaaatttcagtaagggcttttttcattatagttcccaag

SEQ ID NO: 115110 - DNA, 265 bp, Glycine max
  Clone ID: PAT_MRT3847_74954C.1
ggctctcacacgctcggccccgtcggctccggcggaaacgaacaagacgtcgacattgtggacgttggcgtctctaagttccattcccctaattatactacatcgtcgttcgcctccgatcacaaccatcgccggagcttcacgccggcaaaacctctgccgttcaagataacggatgagatgatcggcatgaccgttccgagaaaggctcgttgagcatctgcaaaaaggtttcatgaaagttggatttccgcaagcagcggtg

SEQ ID NO: 115111 - DNA, 412 bp, Glycine max
  Clone ID: PAT_MRT3847_74955C.1
tcttgttggttacgattttggtctgatggtgggtgggaattgggcccattttttgctataatagatttttatgccaaaaacacattttttgaatttttaaaggatttagcttacttttaaaaaaaagaagtaaattggtcattttttaattatactggactaggtcaaaatagacttttacactaaaaacacattttttttaatgtctttaaggattttgcttacttttttttttaaaaaaaaaatgaccacaaaagaagacaatggccattttctaattgtcgtggcccaaaggctaaaattttatgtataataataacaataatcataatacttatcaattttaacataaatattatattgaaggaacaaacattaaaacttaatgagaaatacatttattaagagacta

SEQ ID NO: 115112 - DNA, 156 bp, Glycine max
  unsure (1)..(156): unsure at all n locations
  Clone ID: PAT_MRT3847_74956C.1
agtgtaaagggtattgccatctaatcataaaccatcatatacagtgattgtcatccaatttgttgacttttgcactaactaccataaaggttatagcaacaatgatttctgattaattgacagttttaaactgtagttcattaaaaatnntaaact

SEQ ID NO: 115113 - DNA, 322 bp, Glycine max
  Clone ID: PAT_MRT3847_74957C.1
aggaaaaaccgaaggaaaaattgccattaaaaatgaaaactttgccgggggctcttataggcatgacggtaaccatcaacgtcaccatcaacaacgccatggccaatgttaaggacaagattcacgtcacggcgggccttcatccggagaatcaccccgggaagcacctcggagagcaactgacacatgcacggaccatcatccataacgacatacacattgatttaacccttaatcttcgtctcaggcttattgatcctatcattaagcctttcgttatggcatacgctcacgactacattaatgacaagatgatctaccc

SEQ ID NO: 115114 - DNA, 274 bp, Glycine max
  Clone ID: PAT_MRT3847_74958C.1
gtggaggatacggatcgctctgttggtgatttaggagcaacagtttcagcacacaggtggggactgcccggccaaatatcagtagaacccctgcagacattggtaatacaggggtgtaatctgaagacagaccgattgtagcatacggatcgctaatagtaaaagtgcaagaaaaaaaaaccattgcttggaaagtacttgacgaagaaaagcagggacagacagtattgatgaatagagcggcgactctgcatagattaggtatacaggcatt

SEQ ID NO: 115115 - DNA, 224 bp, Glycine max
  Clone ID: PAT_MRT3847_74959C.1
ggtggggctcaagatcaaaaagttaataacaaatcaaaagaaacagtgtaaaatatcctaccactgaagcatctgggggcgagaggcaaaatggcagacaagaacgaaacgattcctaacaatcatgacatatatgcgaaaacgaacccttgcataaatctcacagtaccttgctgaacctaatcccgaaccgcccctgcatcgggcaaaatgactatttttaa

SEQ ID NO: 115116 - DNA, 372 bp, Glycine max
  Clone ID: PAT_MRT3847_7495C.1
ccgggcccacaatcgaagtatttatcaacaaaaagctgttaccctccgagactttttagaaaaaaaccaaggccctccgactttggtccatgagacgaaaagccactggccatggaaccataaaccggggcagcctttcccccaacataaaaatttttctactccgacacagtttctgttttaacaaggcccggcaaaagcctgaataaaatttctgcccttccgccctaacaccagggttccttccttctccaccagggaatgggttatgaatggccccttaggaggcttattaccacagaattcacctttcacctcagaggactgggctggcagccgcccatttttaaccttgactatcactggcgaaac

SEQ ID NO: 115117 - DNA, 339 bp, Glycine max
  Clone ID: PAT_MRT3847_74960C.1
gaaggcatcaatgtaatcagagtgagagataagagatctagggagggaaattggggcttcgtgttgcgatgacagtaaggaacgtcttaaacaaaaacaattttcagaatggaacaatgtttaataatttggaatctgaaaaagaaaaaaagaaaaaaaattaaatttattaaaataaaaaaaaaaaaaaaatatttaaaaaaaaatattaaaaaaattagattaaataaaaaaaaaaaaaataaaaaaaaaaatataataaataaaataaaaaaatggggggggccttttaaaagaaacaaatttttttcccctgtgtttaaaaataaaatatttttt

SEQ ID NO: 115118 - DNA, 113 bp, Glycine max
  unsure (1)..(113): unsure at all n locations
  Clone ID: PAT_MRT3847_74961C.1
tcgtcttcaatcctttcgttattctctnattcatccttctccntctgaataatcccagatcctcctntctgccctttnactccgtncacgcttttacgtgaccggatctgtat

SEQ ID NO: 115119 - DNA, 724 bp, Glycine max
  unsure (1)..(724): unsure at all n locations
  Clone ID: PAT_MRT3847_74962C.1
catgaatctaatattagtttcttaatacattatttcctatttgtatatctaatttatatgatttgtcaaattactttgctggataaagttaaacattttgtttcagtaaaaaaaaagttaatcattttgtatgacatataatattgattttattattgttatatacctaagagttggttaaaattattatataaaattgataataacaaatcaaaatgagtttaatttatatgtttttaaatttaatttataacaatattctaataaatatttctatgtacatagacaacaaatcaaatttagactatgtttatgagttcgatctgtagacctgtgcgaaaaaaaaaagcccgtatatatgaggatgtaatttcctatctcgcaatgcatatgatattttagtctttttttttgaaagtgaaaaattaatataatagaaaatcaaattaattttgaaactaaaatattttaaattaaagtaaaaaatatatattttaaagaaaaaaagataatataatagtataaaatcatctcaatttcaagcagtgggagtcaaacccgtcatagctattttaactaaccctagtaatgctcacataaatnttcgagtgttatgataggcattattagtcattagaagccgtttccaataaaagaaacaaagacatagtacatcatttatgggtctaaagaatctatccgggctcactctactttcaaaaat

SEQ ID NO: 115120 - DNA, 1195 bp, Glycine max
  Clone ID: PAT_MRT3847_74963C.1
tcgcatgcacgcgtacgtaagctcggaattcggctcgagatctcttcaactactacttttccaagatactgaatggtcagggatggcgcttaagcctggggctaggtgcagtccctgctttcatttttgttataggctcttggggccctcctgcctcgccgggcccccgtgttgtccgtccccttcaggttggtgccaaaagggagcttgtaaaaattcgtggtacaactgaagttgatgcagaattcagggacatacttgctgctagtgaagcctcacagaatgtgaaacacccttggagaaccttgatggatagaaagtataggccacagcttgtttttgccatttgcattcccttcttccaacagttcactggcttgaatgtgatcacattctatgctcctattttgttcagaacaattggttttggaagcggggcatctctcatgtctgcagtgatcattggcagctttaaacctgtttcaaccctggtttcaattcttcttgtcgataaatttggaagacgcacccttttcctggagggtggtgctcaaatgttgatttgccagatcatcatgacagttgctattgcagttacatttggtaccaatggaaacccaggtacactgcctaagtggtatgcaatcgttgttgtggggatcatctgtgtgtatgtttcaggttttgcttggtcatggggtcctttagcctggttgatacctagtgaaatctttccccttgagattagacctgctgctcagagtatcacagttggtgtcaacatgatcagcactttcttcatagctcaattcttcacatcaatgctctgtcacatgaagtttggtttgttcatcttctttgggtgctttgtggtgatcatgaccttattcatctacaagttattgcctgagacaaagggcatcccacttgaggaaatgagtatggtttggcagaaacaccccatctggggcaaatttttggagtcggacaaccccatccaaaacgacaaaatgaactccaaatgttgattactagttgtgttggtttcagtctttgatttatccacgtctgctttaacaacttgaatttattggcctagctttctttatgatactctaatgtacataacattttaagatgaaatcttcactttgtatactgcaaagacctttaacaattgattatcaacttgatt

SEQ ID NO: 115121 - DNA, 406 bp, Glycine max
  Clone ID: PAT_MRT3847_74964C.1
cacaattgaattactctaattaacacattatgtattccagatgagtctgcatttggctgaaaatgtagcctatgcagctttctcggtagtgttgcttacatggccataagcctatatataccttaagcagcaacgtggaacaacctattcttgagtaaggcatcttattgtgcaagggggagaatgtacaagggactatctatatccatacttgttactattcctctttataagaaacaagttaacaagttatagggtaaatatagtgtattttattttacactataacttttctcttataaataggaacaaatgtatagtgctaattataaatgataatattatgatttatgattatgatgctttccaaatcttataagcttttcccttaatagctaatgaccat

SEQ ID NO: 115122 - DNA, 234 bp, Glycine max
  Clone ID: PAT_MRT3847_74965C.1
aaattcttcttacgacggctcattgctggtggggggttcaaaccaaagaaaaaccgcaagcgctttccttctctgaccaaaaaaactttttaagcgcacttttggtaagggaaaaagactcacagctgtctggctcaaggtttaatgtggcgaaaccttcctagggcgttccaggggttttttatgagcccccacggcttgtcttagaggcgcttgctctcccccacacccccg

SEQ ID NO: 115123 - DNA, 166 bp, Glycine max
  Clone ID: PAT_MRT3847_74966C.1
gtgaatttagggttgaaaacaccatttatttttcaaattagcgagcagaactgtggagagttgtctattgaccttatacgtggtggaatcttagtggacatatctggagatcggatcagactaatgcaaaagagttccattagtgactcgctgaaaattgctgcat

SEQ ID NO: 115124 - DNA, 457 bp, Glycine max
  Clone ID: PAT_MRT3847_74967C.1
tgggctgattgatgtgcttgcatggccgtgagaagatcatagaagggcatcctcgtgagaagatgatagaagggcatggtggggagaagatgatagaagggcgtggtcgtgagaagatgatagaagggcatggtcgtgagaagatgatagaagggcatggtcgtgagaagatgatagaagggcatggtcgtgagaagatgatagaaggggacaaaaagccagagacggtcctcctaagccccccacgctcgcgcccgacgcccgtccccgccgcggtccgtcccgtctgcggtacctttatagattaattatttgcgtctcatggagatatatataagaacttactcatcctaaataccgagtactactaacggctgggagataaagccatatattttaaccctaatttacgctaagcctctaagccctatagagaacctagaaaggacatcgatag

SEQ ID NO: 115125 - DNA, 154 bp, Glycine max
  Clone ID: PAT_MRT3847_74968C.1
ctcaaaattttataagaagatctctggagttttccaccttttagatagtgaagggagtacgcggatgaaaacctcagcagcacaacctcacttgacaaatggagttcctacttctggtgctgccacccaaactatgggtgccacaggcagggta

SEQ ID NO: 115126 - DNA, 216 bp, Glycine max
  Clone ID: PAT_MRT3847_74969C.1
gcagtcaaggggttcaactcttctttcttgtatcaatggaatgagtccttatatacaaggcgaatatgctgatatctaaaggcattatacatggtctaaaaacatgtaatcttcaatttacaattacctcctcaatcaattctcctaaacctaggttctctactccattgacacacttgctcagcttcatttcgagaaaactcatcccttcattcc

SEQ ID NO: 115127 - DNA, 433 bp, Glycine max
  Clone ID: PAT_MRT3847_7496C.1
tatcctcactcttgctatttttaattaaacatattactgcctctctggttgctactttataaactgatggagttaacagtttgagatatagtaaagctatttatagtgctttgaattatgggtaacatagtttggtcatcaactacagtgtagcccacctaccactttgacataaactgtctactgttattcctttttataggctgctataggtatgctaatataaacccaccctcgactggcccaatcaattgcaggcccactccccttatttctagcataactaactaatgggtatctatcatgatcttatgataggagggtggtccttgacatatataaagaattacttcactccaaataaatataaaatctatgctaaactctgggcttacaaatgttggatagtcatgttgtcaaagatacaacttca

SEQ ID NO: 115128 - DNA, 268 bp, Glycine max
  unsure (1)..(268): unsure at all n locations
  Clone ID: PAT_MRT3847_74970C.1
tgaggacactgattagctaataaagttaaatggtcacgagctacgttaataaagaagaggcaagaactttcatcttccatctctgaagtgtacttgccagtccactaccctgcctccctagagagaatttcggcggtcttaattgggaaaataagtccccacctcccgcaggagggctctgttattccaacaagaggggaagttcttcaagagctaatgatcttctcctgtacttctctcctcattcgccaggtttttangccatttt

SEQ ID NO: 115129 - DNA, 233 bp, Glycine max
  unsure (1)..(233): unsure at all n locations
  Clone ID: PAT_MRT3847_74971C.1
cacccttacnaagccccgaatcgggttaaagctcgacacaatcattttcaaacactttttaaaataacttctacccacaaattggccttttttccattcattcgcagtttccaacaaaattcaactccacttccccatgggaatattcaccgaacatttcttgcaagccatatggttatcataatattaaattcacctgaattgacacaataacttacaactattctccacct

SEQ ID NO: 115130 - DNA, 715 bp, Glycine max
  Clone ID: PAT_MRT3847_74972C.1
aacaccaaagttaattagctttaataaaattaataaatgttacaaaccaattgcacctaaataaaatgccagtatttaatttgaacattcccaggctaagatttcatgtatgtacaaagctaagagggaattccaagtgcctgaggcaacaatgtttcatgtttcagaagctgtcaagatttcagatactcattcccctgcatgtccagtaaggtttgaaataaggcataactgaacttgcaaaatgaaaaatgaaggcacaacaaagcttaagttatccaatccactgctaaataacactgccaaccaattggtgaattcattctcctcatctcagctgtttgtagcagctataggcgatggcaaccgacacagcagcgcagacaacagcaagagcagcataagtatcctcctgctcccagctgtcaagccatgttggcatggaactaaacttgcgtaatgctcctttgcccttgttgatccgagaaatcacattcacattctccctcttattatcagctgagagctcggtcatttcctcaaatacatcattctgacaacaacaagagtcttcattgtcttggcaacagctctctccatctgtttgacagcggccagcaaccatgcctcctaaatttcttccaccattcagctgaagcctttgttcttgctttttcttctgttcatcttctgataaacaatttgacccctgatt

SEQ ID NO: 115131 - DNA, 409 bp, Glycine max
  unsure (1)..(409): unsure at all n locations
  Clone ID: PAT_MRT3847_74973C.1
acgcngcaatataaaggataaaaaattatggaatcctactgtccaaagtcatcatcttctgttccccttctcnatactgctagtcactttccaactttgttccactgaaaaacacacttacaaatatattactaactttttctcatatactaacgcacctttctactagtatttgtatctttaatgttttagagggtactgccatccaattaatgtgttctaaaactaatgcatcgggctatatatcacaatgtattttatcaataatttatttttcttgatctgtgctgtttcttttatcttttggtagcatggcaaataattatatctggtaaagcatataaacttgcattgaaagttaataacctgattacaagcttcactgttttaccccattttaatttttaat

SEQ ID NO: 115132 - DNA, 346 bp, Glycine max
  Clone ID: PAT_MRT3847_74974C.1
tgcgtccactcacacggcagatttttttgagggtgttgtcttttttctcaaaccttaacagggccgatgtacattctttcttgcaggaaccttacagggacgacatacatcctccccataagttaccgtggataacgagcagactcattgcgaacccccatgggagcatatcctgctcactcgttatgaccgaacaggggatcatttctggtataaagggaaatagtgaggggagaaagtttactcacgtaaaaggatttggttatcgaggtgcggctgagatagcagacatgattgattgtggcggacatgttgatatgcccggatggactgaggtgcacggact

SEQ ID NO: 115133 - DNA, 382 bp, Glycine max
  Clone ID: PAT_MRT3847_74975C.1
caaatattgacgaaaggtggtctgaaagaagaaaatattatcgattttatgtatggggacgttgcattcaatgggtaaaacccaaggcctgtagtcatcattaacaaaccagattgatgtaatgtttataaagtgagtccaaaggatcacaccgtctaatatttgactaatgattacttttctgctgattcatttggatatttattatgcactgacttatgtcagtgtcaatgttgtagacagtgatcctgatgatcatatattagtttactatactgaccatggaagttcttatgtactcagtatgcatgctgattatgacttatactcggatgatctgatcgaagtcttgaagattaagcctgcttcttgaacatataca

SEQ ID NO: 115134 - DNA, 664 bp, Glycine max
  unsure (1)..(664): unsure at all n locations
  Clone ID: PAT_MRT3847_74976C.1
gatattttgtggtggagcaaatgaagtttcagcttagaggaaatgggtttattttacaacaggaatgttgtgttcatagtttgctatttgcatgctattaagagtaaagcttgagtttggcttttccacatgttcatgttaatttgtgtggagcaggagaaacgggtagaataaaatgcccatggggggtgtggaattatacttttgagatcacttgtgggtggggagtaactcgtaccatttttataccattgaattaacttgagaaatattttcagaatcattctcaatttattacggtagttgaattggcttaactgtagtaagacttcatttttgccatgttaaatgcttttgttgggtagtatggacaataaaagccattgttatgattccttagttgtgagaaatatgtaaagtggtgcaaggaataagattttactatcaccgttgtctgaggattctgaaaccgttaactttgaagttttgttttgcccaacctgaatgcgcatattgttacgggaaaagggaatgaataaataaagtttgtggtttgattgtagagagtttttagtggcttgtgtgatgttnggatgtgatatgtgatggattgagttttaggtacacggtgggactgggtggctttggatcaggggacagtgaa

SEQ ID NO: 115135 - DNA, 538 bp, Glycine max
  Clone ID: PAT_MRT3847_74977C.1
cattgatcttcattatcaactacaacaggaccagtaccaagcaatgcacccaaaaaaaattgctcccaacgtctaacacccctttgcattatgcttgaggttatggtccgcaggcgtgacggattactcgagttgcttctcggggatgatgttggaaaaaacatataacaatctgtttgagggcagtatttcaaggtacactttcctgaccaatgatgaattttgacatcaaattccggaaaaagcagtcgtcccataacttgaacatgagagatgcatatatagaataattcatccattttttgcttttgaactctacccaacagctcaattagcagtacacctccaatgcacaaaacaggttcaggtagcttgaatttttgcaagcggttttcctgtaaagtcagtatgtcactaacctattgcaagggtcaaacacatgcataaaatactgtattgtaaaaaaaaaaaacattttcaatctaaaatggataaatgtctaatccatgcttgctatattcagcaggtaaaacatgag

SEQ ID NO: 115136 - DNA, 359 bp, Glycine max
  Clone ID: PAT_MRT3847_74978C.1
gttataatcgcgagcggacagccttatttttttccatcttcggttgttatgaatgagaaggacacggacacttacgcaattattttattaatagcctttatgcatagcgacattggtatagttaagctctgattactgaaaggaacaagctgctagttgaatttgagggcccacttgatagccaaatttgtgacgttcgcggcggaggaaccatgtcgagcgatagccttagccgaaacctgcttgatatcctttatttagaaacaaagctttttaccttgttgacctttcatgatgaacttgactaggcttgatatgtcctgtttgttctccaagcaactctttgaatcgttggtcct

SEQ ID NO: 115137 - DNA, 383 bp, Glycine max
  Clone ID: PAT_MRT3847_74979C.1
ggctcgagctcgagccgattcggctcgtgttttatctgtgcgacttgagcatcctatgctcggggaattattgaagaatactgagcaagatctcaatgaagcctactctactgtcgaggacaaggcacttctataagagggctgtgttataactgtggtatctcttgagaactcgatcagagatcgtgactctaacagagagagtaggcttgatggctctggagaaaaagaattagagactcacatctcagatgcagttatcattaagagctctgaggggacgtgatagagaaaaggagagagttgggttcgaaatggaatcttttatccacgagcaatcatctatggagaaccagacatcgtcattgggaacactgatcagt

SEQ ID NO: 115138 - DNA, 256 bp, Glycine max
  Clone ID: PAT_MRT3847_7497C.1
gacattgatattgttatattatattattactacaattaaggaagcatttacttgtggtgctaattaactgtgactgatacaacattgagtgtgtaaaatatggaataaccttgattgtgtttgatacttagcacaagaaggccaaaaatgttaggtggtgttgctacaatgggggctaatgtggggagtagacccagccagaggactaaggcccctgtattttaatgatcgcatcgccgaaggggggggtgcaaac

SEQ ID NO: 115139 - DNA, 284 bp, Glycine max
  Clone ID: PAT_MRT3847_74980C.1
tcggagactcggatcgcagggaagcttatgtggttggttaacgtggttctaaattgtagttggatggggtaatttgttgttaagtttttaatctgtttgttcccgttagcaacatacgacaatatatatatataacattgttggttctgtttttagctttattaaaatatcaatgaagattcaggaaatttgtattctcgggaattcatactaatggtttagtgtgttttggggaatgtctgtaaattttattttgaatcaaaagtaatttatatttagaaaaa

SEQ ID NO: 115140 - DNA, 101 bp, Glycine max
  Clone ID: PAT_MRT3847_74981C.1
aaaccagaaaagtccctcttggaggtcgccatttccagaccatggatagatttcacaaactatagaccctccatttgtttgtcctattaggacgcgtggca

SEQ ID NO: 115141 - DNA, 1246 bp, Glycine max
  Clone ID: PAT_MRT3847_74982C.1
caaaaggcaggtgattgtttggggcttgccaaaaagtgacagacagaggtaaagcagctatagaaatggaacacaagacaagtctccaagcatcctaaagtatgatggagtggatttttgttgaaggatatgattagagaatccctgttgtatagaaaacttttgtgtggattggaactgaaacacctatgatctctaattcagaaaaaaataaaatcaaaacataggcgatgcctcagcacaaacgtgaaacagcatgaaatgaactgtgactaccatgtcatgtcagcagcactctcccgagagattattcatatgaccaaactgccctcgttcccctaatccgttttcgagagttacaaccaccatggacggcgggaaccgaccggaggcggagcgctggctatacaccgccaacaagctcctgagcgcgcgtgacctgcacggtgcgcgctccttcgccatccgcgcgcgtgagtcggacccgacctacgatgcctcggagcacctcctgacggtcatcgacacgctcctcgccggcgagtcgcggatcaacgaccaccaccgcgactggtacgggatcctccagattctccgctacgccaccaacatggaccacatcgccgcccagtatcgccgcctcgcgctcctcctcgaccctcaccgcaacatgttcgccttcgccagccacgccttctccctcgtcaacgacgcctggtccgttctctccaattccgccaagaaagccatgtacgacagcgagctccgcttgctcaccgctccggcgccgccgcaacatcatcctcttcccccgcagcctcaacccacgccgaggcgaaaccctagatcgagggacgagccgaatcctaaccgtcccgagtcggctgagtcgagtcggcagactcggaccgtggaaactgatacaggaacaagtttctggacctcgtgtccttattgttatgtgctgtatgaatatcccaaggtttatgaggagtgtaccttacggtgccagagttgtcggagagggtttcatgcggtggtgatacggtcgccgccgccgttgagtgggaaagacggttcttattgtagttgggggtttttcccgttagggttttctgggaattcgaaggatgtgaacgggcatgcctcgaattggaacccgttttcgcctttgtttccttgccccttgaaggggtcgtccaaaaggaggcctcagaggaactgggcttactatgacgacgatgct

SEQ ID NO: 115142 - DNA, 359 bp, Glycine max
  Clone ID: PAT_MRT3847_74983C.1
ggactcgtcaatggctaaacactggctgcactattggcaggacacgggccataagggtcacactctatgcatgtatcgccgtagaccattggtggtgcacggaaccacaacagcaagacacgtggcagttcgtccttacgactatgcaccaccaccatcataatcaaaacctttgatgccaaccctaccacctataaacgacacagcaacgggtcacaaattctacagcaacataactggcaaggtgggggccccacactgggttcctgtgccagccaaagtggatgagcacatgttcattactattggattaaacctagacacgtgtgatcctaagaatgccaccaatgccacgtgtc

SEQ ID NO: 115143 - DNA, 201 bp, Glycine max
  Clone ID: PAT_MRT3847_74984C.1
attgataaatatcattgtttgtctacagggctagaaaggaggatacgaaaacttatcctattcaaaaaatatagaatgggtgataatcctatgttactgcttgtataaagcaccccttggaagcatgtacaacaaacatctacatataaaaacaatattttacgggggaaaaggttttgtaaaaaaaggcggcgtgattta

SEQ ID NO: 115144 - DNA, 809 bp, Glycine max
  Clone ID: PAT_MRT3847_74985C.1
cgcgaacaagcgcaggaattcacggacattaagttcagagaggcctatttggacacggtttgtctgaatatggtgcaggacccggggcactatgacgtgttggtgatgcccaacctttacggtgacattctgtccgatttgtgtgccggacttatcggtggacttggtgtcaccccgtccggaaatattggcgaaggggcggcagtgtttgaaagtgtgcacgggacggcgccggacattgcgggacaggacaaggccaaccctaccgcccttctgctgtccggcgtgatgatgctccgctacatgggcttggagtcgtacgccaacaaaatcgagaaggcttgtttcgacgcgatttcgcacggggaccacaaaacgcgcgacttgggcggcacgggcacatgttcatcattcacggcggacatttgcgcgagaataaagagcatgtgaacgggcgaagagggaaggaatcgctgatcgagactgatttgtcctgtcttatttgtttctcattctttgcccggtcgtaaacttaggcttttttgtttttttgcatctgtctctgttgctctctctctctctcttttctcatttgtctgttaagaaatcgtctgcgtaataatttgtcagtgcatacgaaacggccatttctcccatttttgaaccacaaaagacagtctctagtcgaagcaaatacaaaagcaattgtttaggcatttgaatgattgaccgagtaaaccatcgtttgttatttctttacaccattgacttttaaatgttcatctcataaacaataaattgttcaccat

SEQ ID NO: 115145 - DNA, 324 bp, Glycine max
  Clone ID: PAT_MRT3847_74986C.1
cttaccttttggaaaagctgactttttagtttacgatcttgttgtcaactttcctagcgtgagttataacattgcaatgccaggcgacctatatgttctcatcttctaatactcaactaactgctcacatatgctcatccatggtgaacttcactcagcttaaatctcactgagatacttcattacatacctccatcagaatagaaccctcacatgtaaatgttcgcttggcctcaatcatctatcctccgtgccattgtgacatcttgccaaatatttattcaaaaatgttaccaaaattacatacatgggattgcatctctc

SEQ ID NO: 115146 - DNA, 929 bp, Glycine max
  Clone ID: PAT_MRT3847_74987C.1
cggtaagcaatatataggtatgatactcagtgattagaaactaactgtcgtgaagaaacagaaagcactttatcctcgattttgacagggaaactgtaacaattaactagcggtacaccctcaactaaaatcttcaggattgggagttgcagtactttatggaagtatcgatatagcaaaaccttgtgtagactagaattgccgaattgctgaaacaatttcagcaatgccttcaaattttcttctatctttgagaagcatcttagccaaattaagagccttccgttcacaggtagcccgtttaacagcatcagtaatggattcaaaatcctcaacatgggccacaccaacgattctccttatcattttggcagcaccaaatccaagactgtcatgaaacaaatctgtcatgtatctcttctgtgcaagaagctgaacctcaggattgttataaattgctggaagatatgcctcaccagcaccatttctgtgctcatcccaaagtgcaatgaatttgtcataaaacagattccaagtgtcttcaattgtctgaagaatccactccttatatgcttttgaatgattgggttgatgaacaagtccgtcctgagcatagaaagccaagatgaggtttcccaagaatgcacccatgtcaaaacccattggtccatagaatgcaaattctggatcaatgacttgagttcattcaggagtaaccatcacagaactagtgtgcagatctccatgtatgagtgccagtgccctctcggagaacctggaggaaaaaataaaaagttatttactaaagcatgggaaaatgtgggagtggcagggaggcagacatgcatatatacttagacttgagatcagcaatttcaagtttgaggagatcatcttggcgaagagcctcggcatcaggatcaagataa

SEQ ID NO: 115147 - DNA, 150 bp, Glycine max
  Clone ID: PAT_MRT3847_74988C.1
aagacaaaagcagaagccatcaaacttaacttaagcataattatatagcttgatgccaaatccgattgaacctaacttaacgccaaacaaattagacagggagaaaggtctttaaccaggtatgaaaaattacctggaaaaggggggaaa

SEQ ID NO: 115148 - DNA, 134 bp, Glycine max
  unsure (1)..(134): unsure at all n locations
  Clone ID: PAT_MRT3847_74989C.1
gncctctttctcaaccccttnaataaananagganaactccattnttnaaactccagaacttttgncattntgcaccttnatctatctattctttnnccnaaacatgggctgccgggggaactgggacctcttt

SEQ ID NO: 115149 - DNA, 350 bp, Glycine max
  Clone ID: PAT_MRT3847_7498C.1
ttttttttttttttttttttttttttttttttttttttttttttttttttggttttttttttttttttttttttttttttttttttaaaaaccagcgcccccttaaagggccttaaaaatgggggaagctgggtccaaccgaaaaaaacccttgacctttaaaaggggggaaccccggcccaccccaacgtcccccttcaaggttttacggggggaaccaagggtcccttttgaagaccttaccagcacctgaggggggccccttttaaccccccgggggggggggaaccccgggcccaggaggggcccccctcggggtgttaacccggggggcccaagaacctttccag

SEQ ID NO: 115150 - DNA, 236 bp, Glycine max
  Clone ID: PAT_MRT3847_74990C.1
ccttaacatacccttagagccccttattttttatatatatttgttccaggggtaatacaactataggagatgattcttgtacattcttccactccattatgtcactagacttaactgttttaccttatagcattctttattattaatttcatgtctctggtaccaaaaaataactggtgcttgttcgtccgatataaaattggaggccttcttggcgccttacaaatttgggctcc

SEQ ID NO: 115151 - DNA, 772 bp, Glycine max
  Clone ID: PAT_MRT3847_74991C.1
ggctcgagattttttccttaaacaatttccgttctcggttcattcacccacgtcaacaaaacaatatcaaccgaaccatccaaatcccgagaaaacaaaaaaagaaacaaaagccatttgcatgagatagatagatagaacgaaaccgaatcgatgatggggtgggtggcgaatcggtggacgggcgtcgccgccgccatatggatccagtggagctgcggcgcatcgtacaccttcagcatctactcctccgtgctcaagtccacgcagggctacgaccaatccacgctcgacaccgtctctgtcttcaaggacatcggcgccaacttcggcgttctctccggcctcctctactccgccgtcgccccctacacaacccaccgcgcctccccctccaagtccatatggacctcgctcagcgggccctgggtcgtcgtcgcggccggcgccgtccagtgcttcgctggcttcatcttcatctgggcctccgtcgtgggcctcgtgagcccgccgcccgtgccggtcatgtgcttcttcgcgtggctcgcgtctaacggtcagaccttcttgaacaccaccatgtcgttaccggcttgcgcaattttcctgagtacagctgcaccatcattggtatcatgaagggatttctgcgactgagtggagctatcttggtccaaatctaccatacgttttttgatggggacccagcaacctaccttttgatgcttgctgtgttgccttccgtgatctgtgtgttgcttatgttctttct

SEQ ID NO: 115152 - DNA, 329 bp, Glycine max
  Clone ID: PAT_MRT3847_74992C.1
atcctttggtgttaaataggtggatggggaaactgactttcctccagggcacttaccgaaatgctaatagaatgcctctatctatagggggaggagctggtgcacagaatgctattctcatgaatatgccaaatgctgttctttcaatgtggagatattttgttggagatctcggctctgaagatgctaagatgacttctgactacattaaatgtgcagactccttcttcatagcatccggaaatatggctgatgacgccaacaattttgaggcttttccccacaagctggtacagttcggacagacttacgaaaaagctgaatagaaa

SEQ ID NO: 115153 - DNA, 207 bp, Glycine max
  Clone ID: PAT_MRT3847_74993C.1
aaggtcccgggggacaacccaaatcgtttattaataaacgggaccggagccccaatattataatcaaaaaagaaagaaaatttgaattctggaacaaaaaagaggaagcaaacccatttttttaaaagggggggaaaggggcaatttgctcccttgccccaaaaatagaaccgtggagtggtttaccttctttgatccgaaacataa

SEQ ID NO: 115154 - DNA, 1097 bp, Glycine max
  unsure (1)..(1097): unsure at all n locations
  Clone ID: PAT_MRT3847_74994C.1
ctctccttctagaaacttcgcttctttcactccctgcacttcttccttcttcgccaccgctcgttccctcctctgcggcgttccgcggtggagccaccggcgggattccggctgtccnctcactccccgtcctcggatcagcgccgtcgccaccatggccaattagagaacacacacaaaactcagcgcagtcgtgtttgaatccccacctcccacatctctcgtgtgatcttgtgagagataatagaagttattgtcttatgtaggtgttcattcagttatttctttgattcttgttttcattttgttgctttgacagcactgcttgtatttatgcttttctttctagctgcaaccataaatgccattgtcatatcgctgctgatatctttggcagctgcaggaggattcctggctcttttctttgcttttgttacagctatatacattggagcattagcaattgccatatttgctatttcagttaccacattttggtcaattgtggctattctgataatcacaggttttattggattcatttacactgtgtggctggtaactagaaaaagctttggatttgctaaacactccttggacgtgaccggctctgcaatttcatcttacactactgcacggcatgcccgctaccaaatacacacgaattcaaagtaggggatgatcacaaatggaaacttgtgtacaaaccctaagctacatgtccgtgttttggaatgacgcgagcttctgttggctgaaatcaatttctcactccgcaatacagttccttctgcatgttgcaccccaacctcccttacaccgaacttcgaacgcattgtcccctccgccctcgaactcatcattgtgatcctaatgattgagacatttctcttgcactcaagatcgtggtggtgatcggtgagaatggttgtgacaactccattgtggctgtgcttcgcctccaattttgagaccaccgggtcagatctccagtgaatgatataattcaggatctccaaggggttccagtggttggcgaagaggcttggtattgcggaagtgttgacgaatctaagtagtggatttttcgcgttaat

SEQ ID NO: 115155 - DNA, 370 bp, Glycine max
  Clone ID: PAT_MRT3847_74995C.1
aatcgccaccagcgagagaaagtctggatgataatcggacccaaccttcatattctaaattcactgccaggattttacggtggggcaccacgtattagaggcttctgggccccacgtcgcaaatttctgtggtcacaacgaaaaatagatggtagtgcacaagcacccctacaaaaagggaagtttagtggaacgatacttcagtggcggaccccaccccacttttcagaacgaccaggagctggtacgggtcaaccagatgctacgcactgaaggactgcgggcgccaccatgtgataaaaggcctaagacatggtctttggtcggacattttcattgcatctaattgctgaagggacaaaccatggcc

SEQ ID NO: 115156 - DNA, 520 bp, Glycine max
  Clone ID: PAT_MRT3847_74996C.1
gggcctatgtcgacggcgaccgcggccccccctccccgggcgccggcgccccccccgttctttttttttaaataactctgtttaccaattagcaatagcatgtcctcgaatataaacataatccaaaagaaatttacaactaagattataatatatgaaccagaaaagttgtaattgcatccttcactttcctaacccatccgatatctaattaattctgatttaatatttgttttcaggtagcaataagtattactaatgaaggctcgttgtgcaaggctatgttggtgtctcagtcttgatatcactgtaaccatgaactactacttgaattttcattgagccacctacaaacctttcaaaaagattgttcaccattcatagaatgataagttaaagtcctttgttttcctggacaaccatgaccaagaatggactttaatcatctcccatactatttcagaatgtaacacaatttaaaccaatgtacaaattagaaactgagccaattcaacaagat

SEQ ID NO: 115157 - DNA, 649 bp, Glycine max
  Clone ID: PAT_MRT3847_74997C.1
tagggaatttggccctcgaggccaagaattcaagccaacagttttttttttttttttctggtcaaagtgtcattttaaagataagatgttgcattactagaatttgattattatttctcttggctcttgcacatagcatgatggatatcccaggccatacatgcaaatggtctcagttcaagagttcttcatctcattctattcgtaaatcatgaagagttggtagatgaaatattcttgcatattttcttacttaagtatagtaggatactattcttagagataaaaactttgtttttcttaatacatttatagagactggggatagaggatgaattgtatgacatggcaagtcctttaactcaaacattaaatcagttatcaatgcctgaaattttaagtacgtcattttttacatggatattccttaaaatcgccttaactattactatatggcggcataggaactccttactctttaagggcattcctttcgaccctcataaagtgatggatgaggccttattccttgcttggtcttggcaaagagccagagagaaaggattccatactcaatttaaccactggtcttccaatctttcggagtgttttggttaatattctgtattcctttcgtgatgggtgttgt

SEQ ID NO: 115158 - DNA, 464 bp, Glycine max
  Clone ID: PAT_MRT3847_74998C.1
atgaggaggaagaagaaaaaaatgaaaaaaaaaatagagaaaatgaggaagagaaaaaaaactaagttggccaaagaaaagaagaaggagattgttccatgcataaggaatgaagcaccataccctttggtgccatccaagaaagacaaggaacaacactttcctcgtttccttgatatcttcaagaaattggagataactatcccatttggagaagccttgcaacaaatgtcgctctactacaaatttcttaaagatctactgaccaagaagggaaaatatatccacagtgataatattgtgatggagggaaattgcagtgctgttatccagagaatctttccaccaaaatacaaggatccagggagtgtcacaatcccttgctcaattggtgttgtgtcaattggaaaagcccttattgacttaagggccaacattaacttgatgcctctatccatgtgtag

SEQ ID NO: 115159 - DNA, 496 bp, Glycine max
  Clone ID: PAT_MRT3847_74999C.1
ggaattcggcacgagggagaactagtctcgagtttttttttttttttttgtgcagaagaataaaaaagaaggagtagagacgagagtcgtcatcatggaaagggcaggatggacgaaatcagtgtcctatctttgctttcctcttatctccgatgagaggtaagtaaagaggggcaactgtcataccctaatttcgtccggggattattatttgatgatatacaacctttgattggccgtttcgagatacttggcaccctttgttgcacaatatatgcagtcccgagacgtgccgagaatcaaaaggaagcaggcttacgcgattcgtgaaaattccgtaatgtgacggaaatcgaaaagaggtgttttgcgcattccgtgagtttccgtaacttcttcgaaagctaaaaaagagtaaatacataatccgtaaggattcgtaaccttgcggaagggaaataagtatcgttacgaaattcgtaaagtttcgtaacgt

SEQ ID NO: 115160 - DNA, 114 bp, Glycine max
  Clone ID: PAT_MRT3847_7499C.1
ggccgacgaagtttttgccattttcaaaggcgccttcttctcccgcaatggggtctgtggctttaaatcattcaaatctgaatccgaaaccataattagatgtcaaatctcaac

SEQ ID NO: 115161 - DNA, 397 bp, Glycine max
  Clone ID: PAT_MRT3847_749C.1
gttctaacaacactgagacattgtttcggatatctgctctgtgaattttctgggatgactacatgttacctgaaatgaccattcttactcttacataatatggacaaattgggctgataacacacaaaatcaactggcttttcaaaacaagttccggcttacattagagatcaactaaaaacctggatggaaatcattacacgatgaattttttacagtttgatcaaatatagtgcgtactacaacaactttgatagctgatggttattcatctacggatgctacagagcatgatactaaacacgactacaataccacttgaacataacattgaaggatagtagacatccataatcaatacgtgtgcatatatgctcaatcatagcgtgctaatgaa

SEQ ID NO: 115162 - DNA, 608 bp, Glycine max
  unsure (1)..(608): unsure at all n locations
  Clone ID: PAT_MRT3847_74C.1
ccacgcgtccggcaagtttcatgtgaatgctggatgcatgcgcccacgtttgaagtgttcaaaattctaagtcaaggtcttcgattgaggcttaaccaacctaatctacagccatatatgatcagtttatttacaccacgatgcacaatccaattgaccaaacccacaacatagtcacatagcagctcccaaattaacaaagtaaagatggccattcaaccaatgcaacctcactttgtgttggttccactatttgctcaaggccacatgatccccatgatagacatggcaaagatcttggccgagcaaggagtggtcgtgactttgctcagcacccctcaaaacgcctcaaggtttgagcaaacaatctgcagagcaatatcacaatctggccttccaattcaccttcttgcaaaatcccanttcccatgccaacaagttgggtcttccaatagggtgcgagaatcttgacactttgcaatcaagaaacctcctcagaaagttctacaatgcacttgacatgcttcaagagcccttggaagagtatctcaaaagtcatgctactcctccagggtgcatcattctcagacaaatgcatctcttggact

SEQ ID NO: 115163 - DNA, 716 bp, Glycine max
  unsure (1)..(716): unsure at all n locations
  Clone ID: PAT_MRT3847_75000C.1
gacacgaggaagagatgcaaaaggaacacgaagaaagacgcagaatggaaaaagaagagnnncagatgagagcgttcaaggcacaaccaatcataaaagaggacccaatccccgttccagagaaagtccgcaaacccctcacccaagttcaggaatttagtttacatgtgaatcatcgggcagtggatagagcacaatttgatgaaaggattaaggaaaaggaaatgatgtacaaacgatacagagaagagagtgaagcagcaagaatgatagaggaagagaaagagttgaaacagatgagaaggacaatggttccacatgctaggccagttcctaattttgataatccattttgtccccaaaagtcttcaaaggacataacaaaacccaagtcaccaaatttgcgtgtacttcatagaaaggaaagacggaaggtattcaatggaactgcgttctcgagtccagctgctaacatgagatgactcaatttttcagttccaactttgtgattagtgttcaagaactcttgaatcattgaccccccttcccaaggtgttgtgttgtgtaatacttaaattctttgatgtatatttttgaaaaacaagttaacggtcatatgtactttatagccatacagtgtgatcattaatggtgctatttttcgtagattaataatgctaattaaattatgaattcctctgaaaaaaaaaaaaaaa

SEQ ID NO: 115164 - DNA, 150 bp, Glycine max
  Clone ID: PAT_MRT3847_75001C.1
attgttataccaagatacctggcaataatgttaaagcacaacccctaaaaaaccagaaccataaacatgaacgagtgaaaaaaacccataatcattcaggaagacttttatacccactgaatccgatcctggggtaaaaggctgaaggca

SEQ ID NO: 115165 - DNA, 366 bp, Glycine max
  Clone ID: PAT_MRT3847_75002C.1
aattcggctcgaggaagtcgccatgcacatcaaatggataactcaaccagagatggacctgatgagacaccagagatggtgactcgtccaccaagatcagtttcacttccccatgaacaaacagaagccgtggaagttaaaaaagtatatgctcgtgctgcttcatttcagcctgagaggtcgaatgaagctcggcatgtacatcccaagttacctgactgtgatgatttagctgctaggattgcagccttgagaggaacataagtaatagaatcacgatgaataaatttttgatgaccagcgtgaactgtgattacgatcattatggcttaattgtacggactgtgggtactgctggaggatgca

SEQ ID NO: 115166 - DNA, 797 bp, Glycine max
  Clone ID: PAT_MRT3847_75003C.1
cccacgcgtccgcccacgcgtccgagtgggtgtacatgtgggacaagtttggtggttatttgcttttgttgcttggtttgacatctaaggcggaacaagcacaggatgaggttcgtttgagactctttcttgatagcattggattttctgatttaagtgctaagaaaataaagaagtggatgccagaagatcgcaggcaatttgaaatcattcaggagagttacataagagaaaaggagatggaagaggaagtcttcatgcagaggcgtgaagaggagggcagagggaaagaaaggaggaaggccctacttgaaaaagaggaacgtaaatggaaggagatagaagcttctctgctctcctccattcctaatgctagcagcagagaggctgctgccatggcagcggcagtacgtgcagttggaggcgattctgttctagatgattcctttgctcgagagagggtttcaagcattgcacgtaggattcgtgcttcacaattatctcggcgtgcacttcagacaggagtggcaggtgccatatgtgttcttgatgatgagccaacagccagtggcaggcagttgtggtcccattgattccagtctatgtcaaagtcaaaaagttagcttctccattgcattgatgattcaacctgaatctggtccttgtgtgtcttttgggcactgagtttcagaagaagatttgctgggaaattcttgtggctggatctgaacaaggtattgaggctggacaagttgggcttagattgatactaaaggtgataggcaaacaacggttgc

SEQ ID NO: 115167 - DNA, 493 bp, Glycine max
  Clone ID: PAT_MRT3847_75004C.1
gggaaggtctgaaaaatacagcactttggccccattacaaggcccgccccggttcccttacggggtgccggggatcgggccaaaattgggtgcaaagcctgccttgggtcccgccccgggggggaaggggaacctcaaaacaaggggttcaccagccctttttccagacggggttttcttactagaaattggcaaaagcgggcccttggggtcccttggcaaaataggggggccccgggggtttatcccctttcggacttttttttttttgggggaagaaacaccagggtttggttccctcccaatcatggcaacccggggttttttaaaatcaggtaaacgggaaataaaggggtccaatcgcttttgcacaggacgggggcctggcaacatcggggttgcctggggggcataaggccaacccttttcatttggcctttggggggaccaggcattaacccctccattttggggagggtattggccctccagg

SEQ ID NO: 115168 - DNA, 309 bp, Glycine max
  Clone ID: PAT_MRT3847_75005C.1
gggaaaaaattcggatttggggttttctatcccccccaaaccaaataaaaaaacaaatcagggcgggggggtcacaaaaattccccaatccccccctaggggccctaaaaaaaactggaattggaggggtttttatccccaccccaaaacactgatttcttttttaaaaatttcaaaagcctttgattggaggaggggtccaaaaaaagaggagggccccctcaagctttaaaaagggcccttgcagcatttcgtctctcaggggcaggggccgcccaacaaagggctttccccggggggggtttttcc

SEQ ID NO: 115169 - DNA, 567 bp, Glycine max
  Clone ID: PAT_MRT3847_75006C.1
atgccgagatgcatgctttttgcagatgacatagtcctccttggagagtcgagggaggagttgaatgagaggttggaaacttggagacgagctctagaaacacatggctttcgcctaagcagaagcaaatcggagtatatggaatgtaagttcaacaaaagaaggagggatgatggagaaattgaaggggatgtgaatcatcgcattcaagcaggatggatgaaatggagaaaagcatcgggggtgttatgtgatgcaaaggtaccgatcaagctaaagggaaagttttatcggactgcggtaagaccgacgattttgtacggaacagaatgttgggcgatcaagagccaacatgagaataaagtaggtgtagcggagatgaggatgttgcggtggatgtgtggtaagactcgacaggataaaattagaaacggagctattagagagaggaccggtagactctgtagtgaggagagtagaccagatggaggaaaggcaaacaattcaaggcagaggaagacccaaaaagactataagagaggttatcaagaaggatctcgaacttaa

SEQ ID NO: 115170 - DNA, 351 bp, Glycine max
  Clone ID: PAT_MRT3847_75007C.1
atgttttcgtacagaggggatgtgaatcatcgcattcaagcaggatggatgaaatggagaaaagcattgggggtgttatgtgatacaaaggtaccgatcaagctaaagggaaagttttatcggactgcggtaagaccggcgattttgtacggaacagaatgttgggcggtcaagagccaacatgagaataaagtaggtgtagcggagatgaggatgttgcggtggatgtgtgagagaagaccggtagactctgtagtgaggagagtagaccagatggagagaagacaaacaattcgaggcagaggaagacccaaaaagactataagagaggtgacggtcattgacatatga

SEQ ID NO: 115171 - DNA, 402 bp, Glycine max
  Clone ID: PAT_MRT3847_75008C.1
gttgttgttaattattataattttatttacttccaaagaatcaggcctccgtaacaaaaagaagaaggtaaaatgatcgccccttttaataataaatttttctggcgaaaaaataaactagttttcataacaacgatttttaaaacttttttcctaatatgaaaaaaaagaattttatattgtacgggctaaaatgcctgaactctttcatgaaacacccttaaatggaaacagccaacaaaagggcccaattttatgggaaaggaaattcaacaccatcttgcaaatcatggttgtagggggaaaatgtcccgcacacgggtccatcaaagctagggctatacttcacgggagccactaacatactctacacgtttgggggacatgctgggactgggtgag

SEQ ID NO: 115172 - DNA, 3660 bp, Glycine max
  Clone ID: PAT_MRT3847_75009C.1
tcaaagtttcggaattgcaccaattatcatacttctatccaaaccattaatttcgagatccttttttataacctctcttatagtctttttgggtcttcctctgcctcgaattgtttgtctgctttccatcttgactactctccttacttctgagtttactaggcaaatctgtatttgccaatacctcataaattttgcttctatcatcttctttacactagttcctactcccactttgtctgtaggacctttgtgggtcatgttctgctttcgactcctgctactctacaacagcaactccttaatctgcgttactcctaccttattctcatgttggctcttgaccgcccaacattctattccgtacaaaatcgcctgtcttaccgcagtccgaaaaaactttccctttagcttgatcggtacctttgcatcacataacaccccttatgcttttctccatttcatccagcctgcttgaatgcgatgattcactcccccttctctttcaccatcatcctttattacagacacaagatatttaaaccgtgtgacttgtgggaaaatgtctcctattttcacctctcaaaaccacaatcactccttctttcttacattccgatatacatgattatccgatttgctactgcttaggcgaaagccatgtgtttctagagctcgtctctaagtttccaacctctcattcaactcctccctcgactctccaaggaggactatgtcatctgcaaaaagcatgcatctcggcgctatctcttggatttgttccgtgaggacatccagaattaaggtaaaaaggtaggggctaagggttgacccttgatgtaaaccaattgtgatgggaaaatcgtctgactctccaccctgtgtcctaacactagtcgataccctatcatacatatcttggatagctcgaatatatgcaaccctaacccctttcttctttagagctttccacaaaatctctctaggcactctatcatacgctttctccaagtcaataaaaatcaagtgcaagtcttgttgggccatgcgatattgctccatcacccgccgtaataaataaatcccttccatggtcgaccttcccggcatgaaaccaaattgattctcagtaacttgagtctcctttcttaatctccgttcgatcactctttcccataatttcatggtatgactcatgagcttgattcccctataatttgcacaattttgtatatcccccttgttcttatagattggcactaacgtgcttctcctccattcctccggcatgcgttttgacctcataatttcgttaaagagttcggtgagccactcaagacctctatctccaagagttttccacacttcaataggtatgttgtctggccccaccgccttaccattactcattcttttcaacgcttcctttacttcctgtttctgaatccgacgatagtacttatagttccggtcctcttctcttgtgtctagactgctagagtcatatccatattcatcattaaataagttgtggaaatacgccttccacctttccttgatatctttttcatgcactaagactttgccttcttcatccttaacacactttacttgatccaaatttctagtcttcctctctctacccttagcaagcctatatatagatctttctccgtccctggttcctagagcttggtatagtccgtcaaaagcttgggttcttgtctcactcaccgcctttttggtttcatttctagctatcttatacttatcccaagtttcagaatttctacacctagaccactccttgaaacactccttttttactctaattttgctctgaacattttcattccaccaccacgattctttacccctaggtccaaaacctctagattcacccaacgtctctttagccactttaataatctcttgggacatcttgttccacatatcatttgcacttccttgtgattgtccacaccaaccctcccatatcttttgttggaagattccttgtttctcacccttcaagtgccaccatttgatccttggtgctaccagaggacttcttctctttgccctatctctaattcttacatccataaccaaaactctatgttgggtagtcaagctctctcccgggataactttacagttcaagcaatacttcctatcagacttcctgataaggaagaaatctatctgagaacatgtccctccacttttgtaagtgataagatgttcttctcttttcttaaaccatgtattggttatagaaagatccaaagcctccgaaaactctaagatggatttaccctccccattcatctcccctaggccaaaatccccatgcaccccctcaaaacctctagccacgctacctacatgtccattgagatcccctcctaggaaaactttctctccttggggtatatcctgaagtaccccttctagatcctcccaaaattttaccttaaagtgttctgctaacccaacctgaggtgcgtacccactaataacattaaaggtgtcctgtcccactaccaattttaagactatgatacgatctcctactcttcttacatccacgacatccttcttccactccttgtccacaataatccctaccccatttcttgatctgatttttcccgtataccacagcttaaatcccgagttgtctaattctttcgctttttcacctgtccacttagtttcttgtagacacataaaattgatcttcctcctcaccataacatccactatttccatagattttccagtaagtgtgcctatattccatgtaccaaagcgaatcctcctgtcatgaactagcttctttacccacacccgttcacgaaaatgtgggaacccttgcttacttttcactacatccgggcggcgatgcagcggcccttgctcttttaacactgtactcgagccatacagcgcgttgcttccgggcaacgacctaacattcacattattacgtaattgatccatgtcatagagattcgacaaagttttacgttggctgtcgaaagcctaacacaatcctctccttttatccgggcttgggaccggctaagaatagcaaagctaacctaggcaggatttattcggatttatgttattctccaaaaatgggggtttgaacgagtgtgcactcatgcatgtgtcatattttacttccaaggtttatgggttcatattatatatttatccttgcctcttcagttcaaagataggaatcaaattaaaacttgaatcaatttgtattcttgttttgggtagaaaaaattgcagtgaagacatagggttgaagatgaaattagagggtaagtaaagtatcttttaaaatatgaacatcttgcgctgattatatcaagtggagtattcttgttttgggttggaaaaattgcatttgagatgaaattagagggtaagtgaagtatcttttaaaatatgaacatcttgcactgattaaatacacaagaattgcttgaactgcgtaagattataaataaatggcatcttttttattctttaaatctggtggagttttgcaacgttgcttgtaataccagctgaatgaatcctaggcaaagtataaatgttgatttagcttcaatataaaattgattcagtatttcagtt

SEQ ID NO: 115173 - DNA, 643 bp, Glycine max
  Clone ID: PAT_MRT3847_7500C.1
tcgtgaatttgaacagccagttgtcttctctaccgttgtcccgagatagtgatggcaattgtactacagcaaacacaatatattctactaacatgactggacagtcttgtaactctggtcctgaggaagcaatgactgctaccaatgaagagattcagaatttgtccaatgagttgtcctcaattaacattgatagaaatgccgaacattgcggtataaccaaacctaatagcccgcctactgatcatgcattggttaaatcccctcaaattcaaggatcaaaatataatgttgacagatttagagatgtgataactacaaatgtgactggtaaagctaccttgaataatgtggcctgtaattctagggaacagtgtgattggaaattggattctcaatctctagtatcagatactgctgaaattgatgatgatgtgacatcttttgataatcaaagactcaaggatccagaagttgtttgccgttcttatttgccaaagtcaaccagtttccttcatgcatcaaaccattctagcccttgtcttctgcagcatggggaactttgtactgccataaatgcaggttctgtatctgctgatgatagagttcaaaatgaatctatgttacatgcatccaatatatt

SEQ ID NO: 115174 - DNA, 5493 bp, Glycine max
  Clone ID: PAT_MRT3847_75010C.1
tcaaagtttcggaattgcaccaattatcatacttctatccaaaccattaatttcgagatccttttttataacctctcttatagtctttttgggtcttcctctgcctcgaattgtttgtcttctctccatctggtctactctccttactacagagtctaccggtcttctctctacatgcccaaaccacctaagtctattttccaccatcttctctacaataggcgctactccaaccctctctctaatagctttgtttctaattttatcctgtcgagtcttaccacacatccaccgcaacatcctcatctccgctacacctactttattctcatgttggctcttgaccgcccaacattctgttccgtacaaaatcgccggtcttaccgcagtccgataaaactttccctttagcttgatcggtacctttgcatcacataacacccccgatgcttttctccatttcatccatcctgcttgaatgcgatgattcacatccccttcaatttccccatcatcctgtattacagacccaagatatttaaaccgtgtgacttgagggataatatggtctcctattttcacctctgagttagaaaccctccttcttttgttgaacttacattccatatactccgatttgcttctgcttaggcgaaagccatgtgtttctagagctcgtctccaagtttccaacctctcattcaactcctccctcgactctccaaggaggactatgtcatctgcaaaaagcatgcatctcggcgctatctcttggatttgttccgtgaggacatccagaattaaggtaaaaaggtaggggctaagggttgacccttgatgtaaaccaattgtgatgggaaaatcgtctgactctccaccctgtgtcctaacactagtcgataccctatcatacatatcttggatagctcgaatatatgcaaccctaacccctttcttctttagagctttccacaaaatctctctaggcactctatcatacgctttctccaagtcaataaaaatcaagtgcaagtcttgttgggccatgcgatattgctccatcacccgccgtaataaataaatcccttccatggtcgaccttcccggcatgaaaccaaattgattctcagtaacttgagtctcctttcttaatctccgttcgatcactctttcccataatttcatggtatgactcatgagcttgattcccctataatttgcacaattttgtatatcccccttgttcttatagattggcactaacgtgcttctcctccattcctccggcatgcgttttgacctcataatttcgttaaagagttcggtgagccactcaagacctctatctccaagagttttccacacttcaataggtatgttgtctggccccaccgccttaccattactcattcttttcaacgcttcctttacttcctgtttctgaatccgacgatagtacttatagttccggtcctcttctcttgtgtctagactgctagagtcatatccatattcatcattaaataagttgtggaaatacgccttccacctttccttgatatctttttcatgcactaagactttgccttcttcatccttaacacactttacttgatccaaatttctagtcttcctctctctacccttagcaagcctatatatagatctttctccgtccctggttcctagagcttggtatagtccgtcaaaagcttgggttcttgtctcactcaccgcctttttggtttcatttctagctatcttctacttgtcccatgtgtcataagcagagaaccatgattggtctgccaaatttgcaagttcactgtcctcttcgttacaaaacaactcaaattgaccattaacatttttcagcaccttggtgtcatcacaaataggcatgacaaggaggtcatccaaggtaggttgtatttcttcattaggcaaacgtgttttggcaagtagcttattatgtgtgctaatgtctttgtcatttttcttcttcaatttatcaatttgtttgtaggcctttgcagcttcctgctctgcatccatcgcccgcttctgtgcagtaatgacaccttcttctgcttcattaagtcgcacaagaagttcacctgcagcttgcactgcttcagcagtatccttcagttgagctcgaagacctctattttcatctcttaggattttcatttctttttctttttctgtttctgcttttaatgcagaaatttctgcagcaaggtcatttatgaatttagagtctgcacctctaaccccggctccggaagctgcttccttgacatcatcaattccatcctggatctttctatgcctttcaagcaattggatatgtttctcttctaaatcagcatactgttctaaagttcgtgtatgaccttctatagccatttgcattgttttattcagttcctcagcacacttcctctcagtatctagttcctgcttcctcttttcagctagtgacctgctagcttcaagttcagctctcagtttttcagttagagaaatccacctgctttctgcctcggtccattgacttttttcctgtttaatttttactttggcactgtcttcagtcgattctggatttgcatttgcctcagtgctagcctctgttaaatctgaaatggcagtgaggtttgctgccaaactaggttcagatgaataagtaaattgcaatggaggatattgctttcttgtggatttggatgaagagtcaacataaaagtgaagctgatttcttaaactacatatctcttccatcaacacttccctctccccaaattggtaaaaattctgatactcttgtaactcatcttgtactctttttaactctatcttcatcttcagaacttctaaatgatgctcatggttctcctttaaaagctgttgaattttgatagcaggcaagtccttgttttcatgtgcaagggacaccggctcttcatccatgaactccttggtggataaaacaccatcaatatggctctgaaggcgtagaattttatcttctcttatctgtgctattgtggcattgcattccctctcttgcctgtacttttgcaacaagcaattgagctgcattatatcagaagtctgctttgcacagaactcttctagtgccatttctctccttatcgatcctgccaaaaccttctctgctgctttaagaatttgcttctttggtttatcagttgactccgggcgatcaatcagtaccagctgcacatttgagctattggcaatctcattggcatcaagctgcattctgcttttacagttattacaggtaagcatagcataatcttcctttttggcattatcatcaagaaaagtctgggcgggaacatcaactttttccacaggaataattagcctggaatctttggatctcaatgagagattcgataacgatgcaccatgatggtggctatcaataatttcaagaccatggcagatgcttactgctaaattttccgttttagttaggaaatttggagctgtctggctagagagagctgcagacaaacatttctggttaacggtgtttgtacctaaatcactttcaccatgaatattattctcagaaggagactgctttaatgaggtcctcaaacttttcctgctgcttctgattgttggtgaaaggctggaaggacggaatttgaggatgggggatgttttgcatttaaccatgccgccagcagggctgtcaccattcattgcagcactaggagaaccaatagatccattaggggctgaaaaaccagcaaaacctccatttgagttgtggagaactacagcatgatcctcaacaccttcctcatcaatctccatctcctcatcaccatcttcatcaacatgaggtagtgataatgggtgattgagggtaggcttcaataaaatcaaacttcttctgatcaaagctgctgaatgaccccgacttccatcacttggactgtaaccattttctttaattcgatgcagttcatccctgagttggcatatcacgtctcgtaattgattcacatcatcgtgcattacttcattgacaactgctttattcttgatagcctttacacgttgtgcaaatctcaatgtactaagagtttcactcttacaacttagtgctggggaaatagcacaaaccaatgctaattttgcatttccgccaagagactcctgcaataaaaatgtcaacctggagtctctatatggtatatgtcgcagctttcctgtctgagaaacttcagctagaatgtttatcaaattcccaagctgtgaaagtgatctattaatattgccagcttcctttaaacggtctcctgctgcacccgttaatttttgtcgttctgacccagctagatcaacaagatttattttacttgttctaaatctgcttacaccatctgcagtactcttgcatcgagattcaaccacacaagtaaaaacagtatgagagcgtgaactttcagaatttatactggttgcaccaattcttctgtttaacaaaccctttatcaaaagctgagccacatctttcttcgtacacacttgctcctctgtaagattttcaacatagacaccagatttgacatcttctctaatctgtaggtttctttgatttggatctaatagatctgctatttgctcgttgtatatctcgagaaaagagcagtggcactgatacttgagttgcttatcagaatgcttaatttgctcctcatttatgagggaaaagagtctttcaaaaacacgaggcgcgaggccttgttgatcacttgctgaattgtcatctgacaaagcatcagcaggaccccacatggtataggtcttcccactcccagtctgcccatatgcgaatacagaactattaaatccagccaagcaattctctacaagaggcgccccgacaagctcaaaaatatctaattgaaatcgtgcctgagttgcattggagtgagcaacggaatcaaatgtgaagttttgaccgttgatggacaaggaatcactggaaatcctctgagctatggaatctccttcgtccccgtcactgcacgaaggcctcatcctcacaataaccttgacgccggaattggatgcagcgggaacggaatggtcggaatgtttgcgcttgagagggttagggttgggagtggaagagggaggttttgggggaaggagggacttgaaaggaggaggattgttctctttgttcttggatttttgcttgcgcgtgggtctgggttttttgaaagcgtttgcggaaggagtgtcccggcaccggaagattggattttttggaagcatggttgcagttgcagagaacacgacggagcacagaagagaacagaagagaaagtagggtttgggttgagagggggagggaggatgaagaaagtagccgttaggggagttgggaaatggaagggatttgaatgtcagcacgtgtacggttcttgtgtgtac

SEQ ID NO: 115175 - DNA, 1966 bp, Glycine max
  Clone ID: PAT_MRT3847_75011C.1
ttaaaacttttgttggagaataaaacacacatttggagcttggtaccttctacagtctgaggacttgatgcaactatactccctatttgaccctggacatggccctcagcagtgggaacatcgaagattatcttccgaagaactcgatgagctcgaacagaattgcttgacatacctatttcatgtcatggaaaagagcatcttgactcatctgactgatgatcagattgatgtagcacattactgccactattttctaaatcttcccattactgatgatgaatgtaagcttgacaagacacttctgaagaaatattttgaagagcatcatcatttctgttctctccacagtaattggttatatcgctaagacatacttcaccttccaacaaaacatggttcagtaccaaaatttgattacacagtcaatgtatgacaaacaacttgacagtggaaagggtacactttttcatttgtgtgatgatgtcattcaacatgaaggcaaagaggttataatttcattctttattctgatggaacagggcaaagctacaagacaggatcttgatcaatggtgtgaggaactaatcaaagaagagtttgatgaggaatgtaattttgatgtggatgatgctgtgagaaattagagaaattaggaattgttactcgggtgagattccttaaactatccccattctaatcttcggtgattatatctatgtatataatactacctctctttaaaggaaaacttttttattattatttcaatttcttcttacaacaacaacgccttatcccactaggtggggtcggctacatggatcaacttccgccataatgttctatcaagtaccatacttctatccaaatcattaagttcgagatcctttttgataatctctcttatagtctttttgggtcttcctctgccttgaattgtttgcctttcctccatctggtctactctcctcactacagagtctaccggtcttctctctacatgcccaaaccacctaagtctattttccaccatcttctctacaataggcgctactccaaccctctctctaatagctccgtttctaattttatcctgtcgagtcttaccacacatccaccacaacatcctcatctccgctacacctactttagtctcatgttggctcttgaccgcccaacattctgttccgtacaaaatcgtcggtcttaccgcagtccgataaaactttccctttagcttgatcggtacctttgcatcacataacacccccgatgcttttctccatttcatccatcctgcttgaatgcgatgattcacatccccttcaatttctccatcatcctgtattacagacccaagatatttaaaccgtgtgacttgagggataatatggtctcctattttcacctctgagttagataccctcctacttttgttgaacttacattccatatactccgatttgcttctgcttaggcgaaagccatgtttttctagagctcgtctccaagtttccaacctctcattcaactcctccctcgactctccaaggaggactatgtcatctgcaaaaagcatgcatctcggcgctatctcttggatttgttccgtgaggacatccaaaattaaggtaaaaaggtaggggctaagggttgacccttgatgcaaaccaattgtgatgggaaaatcgtctgactctccaccctgtgtcctaacactagtcgataccctatcatacatatcttggatagctcgaatatatgcaaccctaacccctttcttctctagagctttccacaaaatctctctaggcactttatcatacactttctccaagtcaataaaaattaagtgcatagtcttgttagaccatgctacaattgcttccattcacccgcatgtaataaataaattccttttcatggtgcgacctctcttggcattgacaaccataattagatt

SEQ ID NO: 115176 - DNA, 150 bp, Glycine max
  Clone ID: PAT_MRT3847_75012C.1
tcgcggacgcgttcggccacgcgttcggcaaccaccatgggttctctggggttgctccccaaaaaggttatcatcaccaggaccccactcttctactcgcacgtgcgccgcacgagccttcttcccgggaaacaaccaacaccgcattga

SEQ ID NO: 115177 - DNA, 2918 bp, Glycine max
  Clone ID: PAT_MRT3847_75013C.1
ctccaaggcggcaccatccccacccttctcattctttgctcacagataaagctgcccttctggaattcagaaaaacaatcatatcagacccgcattcctcacttgctaactgggatgaagctgttcatgtgtgcaacttcacgggtgttgtatgtgacaaattccataaccgtgtcacacgactaatcctgtacgataaaggtctagtggggctgctttcacccgttctttccaatctcactggactgcactaccttgagattgttcgcagtcacttatttggcattattccacctgaattttccaacctcagacgccttcacagcatcactctcgaggggaacaatttgcatggctcaataccagagtccttttccatgctttccaagctttacttttttatcattaaggaaaataacatatcaggttcacttcctccatctctcttttccaactgcactctgctagacgttgtggacttttctagcaactcattaactggccaaatcccagaagagattggaaactgcaaaagcctgtggagtatcagtttatacgataatcaatttactgggcaacttcctctctcgctgaccaatctaacgcttcaaaatttagacgtggagtacaattatctgtttggtgaattgcctacaaagtttgtaagcagctggccaaatcttctttaccttcatttatcatacaacaatatgataagccatgataacaacaccaatcttgatccatttttcactgctctcagaaacaacagtaatctagaggagcttgaattggcaggaatgggccttgggggaaggttcacgtacactgtcgccggccaactcaccagtctaagaaccctgctcctgcaagaaaaccaaatttttggatcaattcctcgtagcttagcaaacctttcaaggcttttcattctgaatttaacatccaatcttctaaatgggactatatcctctgatatcttctttagcttgccaaagttggaacaactttccttatcacacaaccttttcaaaactccaattccagaagcaataggcaagtgtcttgatctgggtctactggacctgtcatacaatcaattctcaggtaggattccagacagtttgggaaatttggttggactaaattctttgtttctcaacaataaccttctctcaggaacaatacctcccacattgggacggtgtactaatctgtacaggcttgacttgtcccataatagattaacaggaagcataccactggaactggcaggcttgcatgagatcagaattttcataaatgtctctcataaccaccttgaaggtcctcttccaattgagctcagcaaattagcgaaggttcaggagatagatctttcatccaattacctaactggaagtatcttccctcagatggcaggatgcattgctgtttcaatgattaacttttcaaacaattttcttcaaggtgagctcccacagtcccttggtgatctgaagaacctcgaatcttttgatgtttcaagaaaccagttatctggattgataccagcaacacttggaaatccacaactttgtgggacaattgcaggcatatccttgtgctctcaaagaagaaaatggtttcacactcgttcgttgttgattatattcattttggtcatcttcatatcaacattgttgtcaataatttgctgtgtaattggatgcaagcgtcttaaagtaatcatcagctctcagaggacagaggcaagcaaaaatgcaactagacctgagttgattagtaacttcccaagaatcacgtataaggaactttcagatgccactggaggatttgacaatcagagacttgttggatcaggtagttatggacatgtctacaggggtgttctcacggatgggacaccaatagcagtcaaggtgctgcatttgcaatctggaaattctaccaagagctttaacagagaatgtcaagttttgaagagaattagacacagaaatctgataaggattatcacagcatgtagcctacctgattttaaggctcttgttctaccatacatggccaatgggagcttggagagccgcctctacccttcttgcggatcatcagacttgagtattgtccagagggtgaatatttgcagtgatgtagctgaagggatggcctatttgcatcaccattctcctgttagagtcatacattgtgatcttaaaccaagcaatattcttctcaatgatgacatgacagctctcgtttctgattttggggttgcaaggctaattatgagtgttggaggtggggctattgataacatgggcaactctagtgcaaatttgttctgtggatccattggatacattgcaccagaatatggatttggatccaatacatctaccaaaggagatgtctatagctttggcattctagttctcgagatggtgactagaagaagaccaacagatgacatgtttgttggtgggttaagtctgcaccaatgggtaaagattcattttcatggaagggtagaaaaggtgatagattctgctttggtgacagcctcaatagatcaatcccgagaggttagaaagatgtgggaagctgctattgtcgagttaattgagttggggcttctttgcacacaggagtcaccttcgacaagaccaaccatgcttgatgcagcagatgacttaaatcgtctcaagagataccttaatggggacacaacaggaacttttgcctcatcacttggaatttcatcttccactgtaggtggtgactggtgattcatattctttcagcatcagttgtctcatacttctgttgagcccaatggcagatccaatctataaccacagaaggatcaattgaaaatttacatgatgtatgatcagataacaaacaactttgttatt

SEQ ID NO: 115178 - DNA, 3044 bp, Glycine max
  unsure (1)..(3044): unsure at all n locations
  Clone ID: PAT_MRT3847_75014C.1
atgagacttcactgttatcaagcgagtcagagacccagcatgaccatagatcgaccttcactccttatggctcacatagacccgggtatagggcctaatatctcaatgtgtgtgcgaggaagtgcaaatgatatgtggaacaagatgtcccaagagattattaaagtggctaaagagacgttgggtgaatctagaggttttggacctaggggtaaagaatcgtggtggtggaatgaaaatgttcagagcaaagttagagtaaaaaaggagtgtttcaaggagtggtctaggtgtagaaattctgaaacttgggataagtataagatagctagaaatgaaaccaaaaaggcggtgagtgaggcaagagcccaagcttttgacggactataccaagctctaggaaccagggacggagaaagatctatatataggcttgctaagggtagagagaggaagactagagatttggatcaagtaaagtgtgttaaggatgaagaaggcaaagtcttagtgcatgaaaaagatatcaaggaaaggtggaaggcgtatttccacaacttatttaatgatgaatatggatatgactctagcagtctagacacaagagaagaggaccggaactataagtactatcgtcggattcagaaacaggaagtaaaggaagcgttgaaaagaatgagtaatggtaaggcggtggggccagacaacatacctattgaagtgtggaaaactcttggagatagaggtcttgagtggctcaccgaactctttaacgaaattatgaggtcaaaacgcatgccggaggaatggaggagaaacacgttagtgccaatctataagaacaagggggatatacaaaattgtgcaaattataggggaatcaagctcatgagtcataccatgaaattatgggaaagagtgatcgaacgtagattaagaaaggagactcaagttactgagaatcaatttggtttcatgccgggaaggtcgaccatggaagcgatttatttattacggcgggtgatggagcaatatcgcatggcccaacaagacttgcacttgatttttattgacttggagaaagcgtatgatagagtgcctagagagattttgtggaaagctctagagaagaaaggggttagggttgcatatattcgagctatccaagatatgtatgatagggtatcgactagtgttaggacacaggatggagagtcagacgattttcccatcacaattggtttacatcaagggtcaacccttagcccctacctttttaccttaattctggatgtcctcacggaacaaatccaagagatagcgccgagatgcatgctttttgcagatgacatagtcctccttggagagtcgagggagaagttgaatgagaggttggaaacttggagacgagctctagaaacacatggctttcgcctaagcagaagcaaatcggagtatatggaatgtaagttcaacaaaagaaggagggtttctaactcagaggtgaaaataggagaccatattatccctcaagtcacacggtttaaatatcttgggtctgtaatacaggatgatggggaaattgaaggggatgtgaatcatcgcattcaagcaggatggatgaaatggagaaaagcatcgggggtgttatgtgatgcaaaggtaccgatcaagctaaagggaaagttttatcggactgcggtaagaccggcgattttgtacggaacagaatgttgggcggtcaagagccaacatgagactaaagtaggtgtagcggagatgaggatgttgcggtggatgtgtggtaagactcgacaggataaaattagaaacgaagctattagagagagggttggagtagcgcctattgtagagaagatggtggaaaatagacttaggtggtttgggcatgtagagagaagaccggtagactctgtagtgaggagagtagaccagatggagagaagacaaacaattcgaggcagaggaagacccaaaaagactataagagaggttatcaaaaaggatctcgaaattaatggtttggatagaagtatggtacttgatagaacattatggcggaagttgatccatgtagccgaccccacctagtgggataaggcgttgttgttgttgttgttgagagaccaaacccgcaaccttttcccccttcctttctttcttaacgacccagccaaccttatatctccaagagtgaaagattatgttgtagggtttgaattgtataaacactgatttaagatatttttggtctttgcaacattttgctttctgacaacatggaaactttgaatgcagttgataacttgttgggactatattcatatggcgctttttctttatgtgcttgcctttgaatttggtctgtagctaccatccttgccnttcnnnaatnagagatttttggcgtgaggggattgtnnaatagannattgtttggtttgttatnnnggtgtatntnttataaaataacnnttnatgcccccccccccatactttttgnaattcnttttatgattttaaaccgctccgaccaagttaattgtctgtgcttttgggaatcaaataagaagtggtcaaggctcttgttaggcacatattcgtaaataagtattttttctctgtcttcttgccaaaatcctactaatctcaccaaatttttgtgttgaagttttgctattaacaacacttcatttttgaattcctccgctccttgcttagaatttgttgataatctctttacagctacttcctctcggttaggaaggattcccttgtacacttctccgtaaccccctttgccaatcctgcggtcttcagaaaaattgtttgtggctgcttcaattgtaaccaaatcaaattccaaagactccaagacagtgtgttctggcccaactacataacaattcacagaacagttatttgaaatgctcacagcaagtacaaagttaagaaaaaaactcgaggctttactattaagctcaaatgttgaagacaataattcattggcattacctcgagcc

SEQ ID NO: 115179 - DNA, 299 bp, Glycine max
  Clone ID: PAT_MRT3847_75015C.1
cgggcgcactcaatctgcgacatgatgagctctatctgggggtaccctggctatttgcataaactgcaatcgctgatcacttatggttgcaaagacgtcatcgcaccgctgaccatacagaggtcttacgacaacgatccacatcctcatgccatcctctactactactagagaacttccaactgaggccttctcattactgaagcctctggcgtctgtgacacggatcaaggctatccggacaccactggcatatggactaaaaaccatgatcaagcctggaaacccattgtcgatgc

SEQ ID NO: 115180 - DNA, 281 bp, Glycine max
  Clone ID: PAT_MRT3847_75016C.1
ttaataaaacaaccgaaacacaaacggcagaaggggggacaagaaaaggaaaaacaccgggaccaccaaagccaaaaggaacaaaaaccaccgcagcagcccgggggaaaaccacaaaaggaaagggggccgcgcaaaagaggaaccagacacaccaccgccgaggggagcccaaacagccccacaaaggggcacccgaaagaaaaaacgcgggcccccagcacaaacccgacgggccggggaaaccacagggggccccaaaccaaaccccggggaccaga

SEQ ID NO: 115181 - DNA, 461 bp, Glycine max
  Clone ID: PAT_MRT3847_75017C.1
cttggaacctttgggctgatttatgtgcttgcatggtcgtgagaagatgatagaagggggagtctactgattatgtaacctaggcttaagggcgttcttacaataacgacgtctaacattaaaacgtctccctttattcccctctcgctctctagccgaaaacgccgaaaggagaagagacatccgagtaacctgaggtcctcagcctcctcgagttcgcggtcctcccaatctaggaaatagaaagcgaaaaggagaacggaagggaaggcaagggaagcaagaacgacgagacaactaaagagtcgaagaaggcgaagaggtagaatcccgcgatctaccgctcctccctggcgacgaccgcttctaacgcggtccggtaatcactagaggccctctccaccccgaaagctaaagacggatcaagttatttccccagacttaagaattcgacgataaag

SEQ ID NO: 115182 - DNA, 523 bp, Glycine max
  Clone ID: PAT_MRT3847_75018C.1
cccatgcgtctggttgattataagttggaaagccaatctcctgagcgagccaaagatgtggatacttcaagcccacctgtggtccgacctgttagagatattttgggagaaaatgtagtgcctcttcggataagtgaaccacccaaaacaaacagtggaagacctgctgataggtcagcaccaacacaggtgaaattattaatgatggtccatttggttctaccacctaggttctgaatcctgacgctggatgctacatgacctgcctttgctgtggagtttcttcagtgtttatctgtgatctgtttatcattgtttctatgccataacaaattcactgttttgtcagtcaaagctgatatttttctgttatttccttaaaaatgtttttttttttgttttaacgtactgttttgctggtgaatttattatcattgtatacttgaagattttattcaagcatctgatgaacaataggaatctagtcaatcaacaatagcatgaacactaaatggtcattaga

SEQ ID NO: 115183 - DNA, 610 bp, Glycine max
  unsure (1)..(610): unsure at all n locations
  Clone ID: PAT_MRT3847_75019C.1
taatatgaaaaataatattagaaacactttattttttcagctataatattagaaacacttgttaatgacagatatgcataacataatattcttgacacaacaaattcaacatttcaacttttttgtcaacntntcaacatgacagttactattcaacttattctattgatacataacgtttgatgaaaattattattacacctattttagtatgcaactgctccataagtagtcaaccccagatagcgatgtatagcagccaatcccaaaatgntagagcgggatagcaaaaatattgtgaagtttagaaaacaatatacataatttatatcacacacatataaatantcaaaaatagaaaaatacacaattaaagacactattatatgtctaaattctgttattactataatactattattatttaatttaatttattatattatattatattatctgttatgctttatttagtcttttattactattactattactattactattactattattattattattatgtagtttattatattatatgttatgctttaaatggtttattatatttattattattttttaatttattatattatatatgtta

SEQ ID NO: 115184 - DNA, 1004 bp, Glycine max
  Clone ID: PAT_MRT3847_7501C.1
catctgttggatttgaaaccaatgggttatttatagaaagaaagatttccttacctattcttgacctcgaccacaagaactcgaaacttccaattttatgcacaaattcatcaaaaatgctagggatcactttagatgaggctgtttttaactccgcaacagccttatattatgatgcaaaatttatgcactggattgttgaccaaataccagatcaatctctactgaacactgcaggatggagatttattgttccccagctgtacaagaaatacccaaatcatgacatgaacttgaatgtatctttatcgtctcctccagttgtggagatttcaaatcagaaagctggtgccaccatatttgcagacatggcaatcgatgttttggaagaagatgaagtaataccagtggcatgcatatcattggtaattcaaggtacaggtctggtcaaaatcaaaggaaacaacctcgtaggttctatcagattgaatgactttcaaatgtcattgaaatggagcaacattggcaatctgcggatgtacctcattcagccagttgtgtggacgcttattgaaactgtcttcttgccatatgcaaatgcacgtctgagtaaagggttacctttgcccatcattcatggtttcaccttacaaaatgcagagataatcttgtcaacttcaagaattgcagtttgcagcgatgtagcttttgcagattcaaacaagcgttttcttcaatttcattgaagagtgtatggttattgttcatggagtgtaaatagttcaaatcagaaatcaagatgatacatctacttgtgcaatcttatttcatttgttaattgctacttgctgggaaacggggcaatcattatacaaactttgatacaaatacttgctccgccagttatcatgtaagaagtagaggtttataaaaccttgcaaaagaacatgtgcatatttgaattagagttagtatttgaataaatttgatgttacgaaaagctt

SEQ ID NO: 115185 - DNA, 1725 bp, Glycine max
  unsure (1)..(1725): unsure at all n locations
  Clone ID: PAT_MRT3847_75020C.1
agcgcctccagagcaaagatagcatctttttcccacacaacacgcttccgattcggagctacctcttttttgtttcatcttcttctttctttctttgtttctgattctgatgggtatctcatggagtggcagaagaagaaacaattacctccaaaaccgaccaccacctccacccccttcttactactaccatacagaatcccaccctgcaccaccaccgcagccgcaaggttactttctcccttcagcaaccccttacgcccctccccctcccatgccgccgccgccaccaccacaaacccactcaatttctttctattacagctccaaccccaattcctacggcactcccactctcgcccctcgctttcactacccgcagcattactaccacccccagccccagccccagctcgccgcgtggcccgtccctcgtcctgctgcccccactcctccgccctacgtcgaccaccagaccgccaagaagataaggaactacgtcaatgtccacaaagacaccctgcgcctcgaggtcgacgaccacaaccccgatcttcatcttctctccttcgttttcgatgctgtctacgatggcagcattactatcttatactttgccaaggaagaagaaaaatgtaggtttgttccattatatcccgaggcatttcagccggtcagaatcccctttcagaaaggagttggccagaaatttgctcagccttcaggaacaggaattgacctaggcttctttgagttggatgatctttcaaagccctcacctggagaagatgtctttcctctagtaatatgtgctgaaacaagtttgaaaactacctcagaagatgaaactcctggtgattccttgctagacgcatcccctcacatgcaaataactcaaggtgtcttagagaaaagtaatggtgctggtccattcctaataaaagtagttaagcagattttgtggattgatgatgttcgttatgagttgagagagttatatggaataggaaactcatccgcagctgattttgatgataatgatcctgggaaggagtgtgtcatatgcatgactgaacccaaggatactgctgtcttaccttgtcgacatatgtgtatgtgcagtgagtgtgcaaatgctcatcgacttcaatccaataaatgccctatatgccgtcagtctattgaggaacttatagagatcaaggtgaacaatggcgatcattgagattttttccttcggatgctaagttgcatgacagtcccaataaattccttttaagaaaattcaccccctttttacatgtctgcagtcagctattatatagcaatttgtttttttcttttttgtaaattgtagtcaataatctgtttatagattttgtgtgatgtgtttgagggaaaattagatcattagtgatcgaatgtttttcctcccgtatcatctattgtacaggtgatcatttttccatagtttttgtcttaatggtgtttaagagatcatttacatagtaatttgccaaacaagggagaaatgaaataacacctggtttgatgcataatggattatgtttgaaagttatctcacattttatcatctataatagatgtttgaaacaaattccaaaaaaaaaaaaaaaaaaaaaaaaaannnnnnnnnnaaaaaaaaaaaaaaaaaaaaaaaaaaaaaaaaaaaaaaaaaaaataaaaaaaaaaaaaaaaaaaaaa

SEQ ID NO: 115186 - DNA, 1227 bp, Glycine max
  Clone ID: PAT_MRT3847_75021C.1
cattcatccacgatagatgtcaaagttaagcattctcttcctcctagtcttatccttcagttctgtactctcagaactatgcaacccacaagacaaacaagccctactccaaatcaagaaagatcttggaaacccaaccactctctcctcatggcttctaaccactgattgctgcaacagaacatggctaggtgtttcatgcgacaccgacacccaaacataccgcgtcaacgacctcgacctctccgatcttaacctccccaaaccctactctattcctccctccatagccaaccttccctacttgaattttctttccattagcaggaccccaaccctaatcggtcaaatcccctcagccatcgctaaactcacccaactccgttatctttatatcacccacaccaatgtctccggccctataccagatttcttgtctcaaatcaaaaccttagtcaccctcgatttctcctacaacaccctctccggcaaactccccgcctcgctctcttcgctgcccaatctcgtcggaatcaccttcgacggcaaccaaatctccggcgccatcccggactcgtacggctcattctcgaagcttttcacgtcgatgacgatctcccgcaaccgcctcacagggaagattccggcgacgttcgcgaatctgaacctggcgttcgtggacttgtctcggaacatgctggagggtgatgcgtcggtgttgtttgggacggagaaaaacacgcagaagatacttctggcgaagaacatgcttgcttttgatctggggaaagtaggcttgtctaagaacttgaacggcttggatcttaggaacaaccgtatttatgggacgctacctcagggacttacggcgcttaagtttctgcacagttttaatgtgagcttcaatgatctttgtggtgagattccgcagggtgggaacatgcaacgttttgacgtatcttcttatgccaataacaagtgtttgtgtggctctcctcttccaccatgcacttaataacaagtgttttattttcaaccctagcttggattaataagaacggatgggattaaacgttataatagagtcatattcaaaaggtaaatacccaaagtattactgtggcgtgcttggactactttgctaatactattttagattattcattaatatatgcttaacttttataattataattataataaataaatacttttaaatatattaac

SEQ ID NO: 115187 - DNA, 258 bp, Glycine max
  Clone ID: PAT_MRT3847_75022C.1
ggaaaaggttcttgcttatcttccaagaaaaatgtttcaaaacgtttaacataagaggtatgagatgccaaattgagagttgttgcaagcctcatgcaagagacggatgaaaagcgctcggagtggaaagagctatctgccttgcttaaattagaatatccacagtacactgcattacttgcaatgaatttggaagggttagtttctatgagttatgtcataaaccaaatccatcatgaccacaaaggtcattttttg

SEQ ID NO: 115188 - DNA, 264 bp, Glycine max
  Clone ID: PAT_MRT3847_75023C.1
ctgcctgggggacagggacccccggtggtcctatggcaggatgagaagggagggacttggctcctccagagcccggtggaagctactgttctctccagtgtctcgagcgtaccaaaataaggttgggaggctcccggcctgtctgctgtggtctgagctggctgcaagccaggtgggggagcgagtctgggaagattggctttgactctctgttgccggaggagatgccatcccagcactgcccccactgtagtccaggctcgt

SEQ ID NO: 115189 - DNA, 504 bp, Glycine max
  unsure (1)..(504): unsure at all n locations
  Clone ID: PAT_MRT3847_75024C.1
agcttgcctcgcctgaggtccctctgattcatgatggtgtgccagaccataatcngtaaaatagctgacctctgatgtgatgttcgcagtcaataaatatttttttcatcactggacatatgacatgaacaaaaagtgtccattaatgctaattaatgttcttacaacgccgtttgaggactaaaaaagtatggaaaagccttattagcattatcacaagtattcccaacttgattgaactgcacatgcttcaggattcattattggtacagaaaatacaagatcatgttggattctatgtctcattcattggctgattttgaaattagaaactattatcggcgcgactctggagaataaagggcatgaaaatgcaccattttctaatatgtacgggtggagaaactctatctgatattttgcgtcgacagagttcttatatgaaaaagagattagaggatgaatgcaatttatcaagttagaacatcttccatagttgataaa

SEQ ID NO: 115190 - DNA, 315 bp, Glycine max
  Clone ID: PAT_MRT3847_75025C.1
aaattcaagctgtcgtagttgaggttggcaaggttcatgtagagcttcgatgcactagcggtgtgtaaccctttcgcagcaatgatgggttccttgaagaagagagcgaacagaggaagggtgagtagaaatgttgtagaggcttcatcccccaccccactcacttcctcattcccccgcgtggaactttgaatactctgtttacttttttgtttccatggtgtttatgttcattttcttcttgtttgattgtgtgactaagaaaattgattttgttaggagggagaggatttggggttgtgggattgaatatgg

SEQ ID NO: 115191 - DNA, 364 bp, Glycine max
  Clone ID: PAT_MRT3847_75026C.1
gttaagcggacatgttactataattgacacaactccattaggtttactggcgggactttgaggtgcaaaaaacgaattttgtcgatctaacgcctctaacactatactggcgcgagcacattcgaactgaagcaggcccaaatatatggaaggcgagtgttcttttggattggttaactaaagtggaagtttctaccaactcacataaagagcagtactatgtgcagcgagggaggatgaatgttcctgattcaaatgataaaaatgatctactgttgagcattgagggggggggtttacaaggagccaggcttgcttacccaagcatgagtggttttgatgataatattgtgttgcctaacac

SEQ ID NO: 115192 - DNA, 236 bp, Glycine max
  Clone ID: PAT_MRT3847_75027C.1
tacctctgcgaggacacgacagaagggtaccgttcgctagtactgattatactgatcgcaccctgacagaactcgtcacttaggttccacaataagattgccatctgaagttcaccatctcgaatcccaccactgcgatgctcgaacgtacgctcgagatcgacgacgatctgcaactgcgaccattttgggacaagaagatctcacactatgccctctgagattcacttggtgag

SEQ ID NO: 115193 - DNA, 311 bp, Glycine max
  unsure (1)..(311): unsure at all n locations
  Clone ID: PAT_MRT3847_75028C.1
ctgaccgcagaaggtgataaattgtgggcncgccattattaagaaaacggacggggttaatactcaagttcaaaacaacccaaactccatggaactgactggtgtgcccaatatgatactgagcaagggcaaccatattctgggtcgcaaatatgctagatcagatggtttgacaaccaaacaagatatgagcaacactgtactaatgataaacagactctgtggaggagaagacaaatttatgctgcgatctgacacaccctgctgaaggccaagtgcaagcgggtggaatcttggattaaagctcccac

SEQ ID NO: 115194 - DNA, 301 bp, Glycine max
  Clone ID: PAT_MRT3847_75029C.1
gaaagaaggaaaacactaatattttatttttggtaaaaggggaaataatggccgggtggaaaaaaaaaaatttaaaccatttattggcccttaacaccggcaaaaacaaaactatatattccttgtaacctacaaacatgcaaaaactttacctaaatgaattgattaaccatattttatgtacactcaaatacacaaatgcaaaataaaaactatttttttataaagattttacaacttgttacaaaattgattaaaacgctctttatgcttttaaaattaaatacaatttgttaaaata

SEQ ID NO: 115195 - DNA, 930 bp, Glycine max
  Clone ID: PAT_MRT3847_7502C.1
tgcagaatatgtgaaggtcatttctgaatcagatcccagatcacttccaagtattagtgctcccaaggcacttggagatgtagtggaaagtatagtcggggctatactaattgataccaagctcagtcttgaccaagtgtggaacgttttctattctctattatctcccattgttactcctgataaacttgaattgcctccatttcgtgaattaaatgaattatgtgattcgctcggttattttgtaaaagtaaaagaaaattgtgaaaaagtgggatcagcaatgcatgttgaggttagtgtacaacttccaaatgccctattggttcgtgaaggaaagggggcaaataaaaaaactgcaaaaggagaagctgctttttatttgttgaaggatcttgagaagcagggaatttcacatggtagtttcatgtccaagggaaaaagagataatcctgaccatgtctatggttcatctcatctcaaaatggattctagtattctaattgaagaacattcctcagagccagcatcacataaaaggcacatattggatgaaactaacttaactgcaattaatttatcaattaatatgaagaagggaggaccgcggaccacattatatgaagtatgtaagaaattacagtggccagtgcctacatttgattcaacagaatataaagatagatctctatttgaatcctgtgaggggctgcaaggaagcaagggacagaactgctttgtgtcaaaaattaccttgtgcatacccaattatggtaatatagaaagcaaaggagaagctagaagtgataagaagacctcctttgactctgctgcagttcaaatgcttcttgagctgcaaagactgggaaaagttgaaattgatcctctcccttctagttaggggaagagaaaggaaagaaaagggaaggg

SEQ ID NO: 115196 - DNA, 387 bp, Glycine max
  Clone ID: PAT_MRT3847_75030C.1
ggcagccggatcgacctggggacaaaattattagagcccggactacaactgatgagagataggtaggcacagaacatgacggacatgagcccgagcttgggggaacacaaaaataggccacacccacgaagcccctagatgaagaaacccaccctaaggatgcacaagatatggctgaggaacggaacgaacgcgacgaagaggaggatccccctgaggaagcttccacaagcgcagcactcaatggcgtcgagggtccggaccataacgaaagaacaacccttgccacatatgagggtgacccacctgtgcttccacgcaaaaaaggagaaaaaggcaaaaggagatcagcaaccggggatggtgacgagacgaccacgaaaccgg

SEQ ID NO: 115197 - DNA, 683 bp, Glycine max
  Clone ID: PAT_MRT3847_75031C.1
aacaggaaatattggcacatccatctattgggggttctttgtttcactctggttggggttctgtcattgaaaccctgcagtttggtcataaccttgttgtattacccttcattatagatcaacctcttaatgcaaggtttttggttgaaaagggtctagccattgaagtgaaaatgactgaagatggatcattcactagaaacgaaattgccaaatctcttagacaagctatggttttggaggaaggtaagaagctcagaattaatacaggagaagctgctgcaattgtgggaaacttgaagctgcaccaggatcattacatagctgcgtttgttcagtttcttaagaatggaagctagaaagtggaaatagatgtgaagttgatgattgtcacttggttttatgtactgtttcttgtgtttttgggtttaaataaagtcctattatttagggacgtgcagacagtgtttagggtttttctaatcaataagccatcaccacgttgtaggctacaaagtcaacacttgtttttgaattcaataagacatctctctgaaaaattcgtatgctaggtggggtactgttctgttttaacaatttgaacaatcatttattaaaatgtacagtattatggaattggctagttgcaggggagctagtttttcttctgttattttcatttt

SEQ ID NO: 115198 - DNA, 281 bp, Glycine max
  Clone ID: PAT_MRT3847_75032C.1
atttgactgagaaaaaaaaaaaagaaaaaaaagataaaaaaatgggcgggccggccggtgtatccgaaccaagcttaccttcccagccaagccatgtcttttctcttgtgtatagtcaactaaatccaatggcctggccgttgatttacaacgactggaatgggaataccctgacgtaactcaaatgaatcgcctagcatcacgttcccgtttgggcacctgacgttatagagaagaggcccgaactgttctgccttcctatcagctgctgatcatgaatg

SEQ ID NO: 115199 - DNA, 648 bp, Glycine max
  Clone ID: PAT_MRT3847_75033C.1
gtgagtgacagatcattttaatagctatgattagagtatgattgcattatatggcactagatagcaagttggcaatcaatgataagattttctaccttttggttttattaaaaggacatctaacaaaggagttgtttgtatggggtggataccacagcaagaaatattggcacatccatctattggagggtctttgtttcactctggttggggttctgtcattgaaaccctacaatttggtcatatcctagttgtattacccttcattatagatcaacctcttaatgcaaggtttttggttgaaaagggtctagccattgaagtgaaaaggaatgaagatggatcattcactagaaatgacattgccacatcccttagacaagctatggtattggaggaaggtaagaagatcagaattaatacaggagaagctgctgcaattgtaggaaacttgaagctgcaccaagatcattacattgctgaatttgttcagtttcttaagaatggaatccggaaagtggaaacagatgtgtagtacgttgacaagttcgcaaaagtaatttgggttggattgatgactgtcacttggtttttatgtaccatttcttggttgtaatttgcgtttgaataaaatcctattctttaagg

SEQ ID NO: 115200 - DNA, 376 bp, Glycine max
  Clone ID: PAT_MRT3847_75034C.1
gtaaaaagaattgggctttttttaagggaaaaaaaaatggggaccaaaaaaacaaaggcaaaaggacactcaaaaaccaaaaatttgaaaccataaaagggaaaaagaagccgggaaagaaaagggggaggggcactcgaactcaaaatttcattcctaacgccaaaaagaacagcccgtaaagcaacgggaaaaggatcaaccctaaaaaaaaaaacattttgctaaccttacccaagggccgggccaaattttggggggaaatcccgagccgaaaaacgagattacaaacccgggcttgcgacggcataccttttatataggggcacctaaaaaaagtgcccggggggaaaatctacaagggggggacaggaaa

SEQ ID NO: 115201 - DNA, 158 bp, Glycine max
  unsure (1)..(158): unsure at all n locations
  Clone ID: PAT_MRT3847_75035C.1
ttgtagctgnagctctcancacagccattcaggttggatacaggcatattgactgtgcnantgcgtatangantcanncagagattggttntgcncttaagaagctttnngatganggtgtggngaagcntnaggncttatggancacttccaaactc

SEQ ID NO: 115202 - DNA, 346 bp, Glycine max
  Clone ID: PAT_MRT3847_75036C.1
ccacgcgtccgcgaattcgtacgctttgctgatgaggcaaaatcaaacagagtcatggcgagcctcaaggcatctggattacttcatgccgcagggatagcaacttccctgacaaacacgagccaacaatgggatttcccgaatggatgggccccactgcagcatcttatagctgaggggctgctgcattctggatcagaggccaaaaaactagctgaggacattgctacgaggtgggtgagaacgaactacgccgcttacaaagcaacgggtgcgatgcatgagaagtacgatgttgaggcttggggagaatctggaggcggtggagaatacaagccccagactg

SEQ ID NO: 115203 - DNA, 258 bp, Glycine max
  Clone ID: PAT_MRT3847_75037C.1
tttgtctgtcagtgaaggaatccctttcatattttcccttcctcaactaaggatttaaaacaatttaatatttgggctgttgagattaaggctaggatctggctcctctgaagtgtatgtgaactttagagggaatagtgaggggttataactgtttgttggaaaatctagagtagattttaacttcatacattgttatgaatatgcatatatttgatcaaaatttaagcctttgattttataaccaatggttataaa

SEQ ID NO: 115204 - DNA, 328 bp, Glycine max
  Clone ID: PAT_MRT3847_75038C.1
cctcgtgccgaattcggccgaggcctcgtgccgaattttcggcacgaggccttgaaggaatgatagtattgtgtagatatagttgtaaagggcagacccatgtgaaaacaagtctatatgctaataacaaagccaccactcctccaaagctatttgagtaattagagactttcaaattgaaatcttgtgggaaacttaccttatatatgtctgaatttgtagaaagttactcttgaacttgaaacaataagtcttatatttagtcaaaagtgttttcataatatgatttcatcaattcataaaaaaaaaaaaaaaaaaaaaaaaaaaa

SEQ ID NO: 115205 - DNA, 136 bp, Glycine max
  Clone ID: PAT_MRT3847_75039C.1
gactcaatgcaggatatgatcaatgaggaaccgagtattctgggcccatgcactcacaacggacactgtcttatcattctgccagacatctgaaacgaatttgccagataccggattcacagcggaccttaataag

SEQ ID NO: 115206 - DNA, 772 bp, Glycine max
  Clone ID: PAT_MRT3847_7503C.1
ccacgcgtccgggcggaaccggaagcggagtcttttcggatgctccggaacctgacccgaatcgtgatccaaatctccaccctctcctccgccgcatcctttgtgcccatcctcaagccccaatgctgcgacctcgctcgccgaataaggttcctcgctcccctcttccaggaactgcacgacgacatcgtttcgagccgcgcggttcacttcctcgcgctcgaagacgcgctcttcaaggccatggaactgctccgattcgccacacgcgccagccagatactggatagagagcaagttatgttcggattcactgatgttgctgttcggtttgaacatgcattaagcatgatctcctttggcgagcttgatgtttctgaagaaattaaggagcaggttgcacttgtgatcactcagtttagaagagccaaagcgcagtttgatccgcctggttttcagctttacgagcatctgttgtttgtttacaaccagagctatgatgtgaatactgaaactgctgaactacgtgtaatctgtgaaaagctacaatttctcaatgtggatgacatcaagcaagagtcacttgctctgcaaaagatggttgtagacaagggtggctattctcagaaaacatacatgatatgtcattagtagtgctgaaaaaaatcaagatttcttggggatggaatctgggaacaatattgtgtcaccaaggggaggatttctctcatcatactggagagccatatctaaaactatgcccacaatcact

SEQ ID NO: 115207 - DNA, 397 bp, Glycine max
  unsure (1)..(397): unsure at all n locations
  Clone ID: PAT_MRT3847_75040C.1
tggcgctaganaagtagctgtttttacatcatcttctaaatctttctcaaaatcaaacattaattatagcatagaagaaatccttgtccactatcaagctattactcaaactactaaacatctctctattcctattcaaaaatatatatcatacattattaaatacccagtaaaaagaccaatccctccatcaaaattaacatatatatctaaagaactatataatataaattactttaaaatctcacttaaaaacacaattaaagttaatactcccaaaactatagttccaatacttttaactataataactattatgccagcagagaatcttactatccacttccataacacttataaacaatcccttccaaatattcttatatcccttcaaata

SEQ ID NO: 115208 - DNA, 1326 bp, Glycine max
  Clone ID: PAT_MRT3847_75041C.1
ccacgcgtccgaaatcccctctcctctctaactttctgttacacttcactctcttctttttttccctgcaacgttttccatcacttcctcctcacgttttccgttcccaaaccaccaattacacctcgcaccaccttctcccacgcgcaatgtgtctcctccaattccaattcacggaaaacgcgcgtcgccgaagctgattttcgccgcttagggtttcgggttgggggaatgagcgagagctcatggcgtttacttacgcggctccgatcgctccttctctctacggcattgctcgcatcggttactgcgaccagaaggtttcgctcgctggttctcccggcgaggtgaatacgtcgttgttttgcgtttcgtcacacgcgggaaagagtgatgtgctgctcgagaggaggaagctgaagtcggctgatactcgcattgccgaaaacacgcagatgaaatcgagcgttgaaattgaaattccggtttcttgctaccagctcattggtgttcctgatcgagctgagaaagatgaaatagttaaggccgttatgggtttgaaaaatgtagaaattgatgaaggttacacactcttatctaatattgctttgcaggatctgctgatggatgttagggataagcttcttttcgagccagaatatgctggtaatctgagggaaaagataccccctaaatcttcccttcaaattccttggtcttggttgccaggtgctctttgccttcttcaagaggttggagaatcaaagcttgtgctggagattggacagacaagtattcggcatcaaaatgccaagccatatactgatgacctgattctttccatggcattagctgagtgtgcagttgcaaagattggctttgagaagaaaaaagtatctcaaggttttgaagctcttgctcgtgcccagtgccttctaagaagtaaaccgtctctagcaaaaatgacactgctatctcaggcatggaacacaaccctgaggatgcttgtcatggtttctagattgaagaatctcttgaagagcttgctcctgcttgcaccttggaactgctgagcatgccacatgctcctgaaaatgttgatcgaagacgaggtgcaatttcagctttgcgggaattgctcaagcagggtcttgatgttgaagcttcatgccaagtacaggactggccttcctttctagccaagcatttgacagtttgctggctaaagagatagttgatcttcttccttgggataaactagctgtgatgcgaaagaatagaagaccatggatcacagaatctaaggcagtaattgattctaattgc

SEQ ID NO: 115209 - DNA, 292 bp, Glycine max
  unsure (1)..(292): unsure at all n locations
  Clone ID: PAT_MRT3847_75042C.1
tttgatttaatctgattttcgtgtttgtggttttcgtagatcggtgtttcttttcgtgataaatggatcaggaaaattagatgaattccaatttttctntttttgaaaattcttttttgtggttaatttggtaggtttagatacactagttgcgactttngtctttccagttttgaatttttngactttgatatgaaataaatcatatactttgngngtgctcatggtgccaaggaaaattagtctatccttttcggcgggccacttcgtaaaaaaactttggtagatttag

SEQ ID NO: 115210 - DNA, 384 bp, Glycine max
  Clone ID: PAT_MRT3847_75043C.1
aaaacaaatagaacaactgatataacccgatgactaatggcacatcttagggttaatatatgagagatggacgattagatacgggctttagatccaagaatgccagctacaaatgattggcttactccagctcccaatacagacttttatggcagacatgagattattacataagacagacacatgatccgaacttacgagtgcctatatggcttcatagtcatgtgctgcaggggctgggggagcatcagctggagcagatagcacatcagaggcacctaatgacagtgcgataacggcacgcgaagtcagacgagcacagcctcagaaccatatctggccaatcctgagttgtcaagggaagggagcttctacagaaaccca

SEQ ID NO: 115211 - DNA, 885 bp, Glycine max
  Clone ID: PAT_MRT3847_75044C.1
ggccggaattcccgcctcgacccacgcgtccgatcaaaatcccctctcctctctaactttctgttacacttcactctcttctttttttccctgcaacgttttccatcacttcctcctcacgttttccgttcccaaaccaccaattacacctcgcaccaccttctcccacgcgcaatgtgtctcctccaattccaattcacggaaaacgcgcgtcgccgaagctgattttcgccgcttagggtttcgggttgggggaatgagcgagagctcatggcgtttacttacgcggctccgatcgctccttctctctacggcattgctcgcatcggttactgcgaccagaaggtttcgctcgctggttctcccggcgaggtgaatacgtcgttgttttgcgtttcgtcacacgcgggaaagagtgatgtgctgctcgagaggaggaagctgaagtcggctgatactcgcattgccgaaaacacgcagatgaaatcgagcgttgaaattgaaattccggtttcttgctaccaggaaccttacagaaactactgttgagtaaagaaaaagaaacaggaatatcctaattcaactcattggtgttcctgatcgagctgagaaagatgaaatagttaaagccgttatgggtttgaaaaatgtagaaattgatgaaggttacacaattgatgtcgttgcagctcgtcaggatctgctgatggatgttagggataagcttcttttcgagccagaatatgctggtaatctgagggaaaagataccccctaaatcttcccttcaaattccttggtcttggttgccaggtgctctttgccttcttcaagaggttggagaatcaaagcttgtgctggagattggacagacaagtattcggca

SEQ ID NO: 115212 - DNA, 1854 bp, Glycine max
  Clone ID: PAT_MRT3847_75045C.1
ctcgtgttaggaaagttaggaacccaattacctgaacaacaaaaacaaaggattcattttatctggccattttcatttcccttggaaactcaaaatatttcaaatttcactctttctttctgcacaatattttcccatctatttttttcttcttctcaaaactcacatattagtattttctcccacaaaatttcagctcataatttttatttttcgatttcatccaatcctgctaatttatttttaatgacgaaatttacgcaaatggtgcaaaggtgaagattttccacatcttgtttcatgcccagctcctcaagctagcttttaattttgatttttctcatttcctggcttaaatttttcatcttttctaaaagaaaaaaaatcatttcccagcagcatagcatagtagtagaagttttgggtgattgagtttgaagaagaagaaaaaatatgagatattgatgtgtggttttactttatgttacgtgtgagtggtactacttctcaagtgtttgaacatggagaccagtggcggtgttagcggcggcgttacgctggtgggatcggatgctccgtcggactaccatgtagctccgaggaccgacaacccggctccggcaagcggatccacgacgcagattccggcgacgggaggcagggttccgccttcgccacatccgccacacactgtgtcgacggcggcgtatccggcgaaggtgccggcgaaaaagtatcggggccggatgagaaagtacgcaccggatgggtcggtgaccatggcgctgtctccgaagccgatatcttcctccgctccgttgccgccggtgatcgatttctcgtcggagaagcgcggaaaaataaaaccaactagctccgtgagcaaagccaaattcgagttggagaatttaggtgaatgggttgcatgctcagttggtgctaattttactccccatatcatcactgttaattctggggaggatgttactatgaaggtaatatcattttctcagcaagggccgcgagctatatgcattctttcagctaatggggtcatatcaagtgtcacacttcgtcagcccgattcttctgggggcacactgacatatgagggacggtttgaaattctgtctttatccggctcattcatgccaagtgaaagcggaggaacacgaagcagatccggtggcatgagtgtatctttggcaagccctgatggacgtgttgtaggtggtggagtagctggtctgttggtggctgcaagtcctgtgcaggtagtggtaggaagttttctggcaggaaaccagcatgagcagaagccaagaaaacagagacacgaggttataacaagtgtgataccagctgcagttgttccaatctctacacttgatccagtgtcaattctatcagcagcgtcttccatccgaaacgataattggtctgctatgccagcagaggccaagaataagccagctgacattaacgtgtcgcttcctgcagggtaattaacttatagagcttcattccatctgaatttacatttgctgctgacaacattgtaatgtgatggattcctagttgttggctttgctttccgttgtttgttgtgtctgtaattgttgactttctaccggtaccagcattgtattcagaggtttaccagcttcctgttcttgtagaatttgagttggctgattaggtatgcttttaatgctgatgttgtgacatgaacaacactttgatgtgatagttattcatgagaatccatcttccctttggagtgatagattgcgcaatccacgttatttctattaagacaatattcctaatttgagaatgatcatttataatctt

SEQ ID NO: 115213 - DNA, 412 bp, Glycine max
  unsure (1)..(412): unsure at all n locations
  Clone ID: PAT_MRT3847_75046C.1
caggaccggcccggaattaatttccgggacgacgagactacaagacggcggccgccctannntnnngggggggttttaaagaaaaaagcgcccgccacgcccccaaaaagagacaaaagaaggggacacagctacacaggcacaaacggacagaaaaacgaaccgcggggaggacaacaaaaaaagagaacagacagccacaccacggaaacacaaaacggaaaagaacaaaaggggataagagacgcaaacaaatgagaggacgaaacaaacaaggcggaacagggacgacacacaaaaaagagcaggaaaaaacagaagcccacgggcagcgaaacaagaagacaccaccttcgccccgagaaaacaagacacaagggagagggccccacgactcagaaacacgggaggg

SEQ ID NO: 115214 - DNA, 380 bp, Glycine max
  Clone ID: PAT_MRT3847_75047C.1
aaccatgaatttggaatgttttggactgaaaaacccaaaaggcccttctggaaaaacaaaataagccctttgaacaaaaaaagaacttttgttttttttaagggggaattggaacaaaacatgcttaggattgttagcaaaaaaagaaaaaaaatgtggggaacccaaaatcaacagtgtagccgttcaggaaaaaccaaaataattattttggaaaaataaaggtggttaacccaaaaatttaaaggttgcctacccaaaggcgtattagttaatccggagcgggggaggttataatccgaaaaccggggtcccctttttttggaaaaaacgaccacacttttgggttgaaaaaaaaaaaaactgtgggaaaacaaaaa

SEQ ID NO: 115215 - DNA, 224 bp, Glycine max
  unsure (1)..(224): unsure at all n locations
  Clone ID: PAT_MRT3847_75048C.1
ccctcttctcttctctcaaaggactgaacgaaaaactttagggttcctctgttcntctttcggcccaaaaaaaattctcnaggttcaggaaaattnaaacggtttnggcantggcgganntncangcccttggntttnccattttcggccnaaaccntttngtnggaaacngtgtatcggnncanccnttacacaatngggcaaaanncggggcncgggnagnt

SEQ ID NO: 115216 - DNA, 763 bp, Glycine max
  Clone ID: PAT_MRT3847_75049C.1
ccacgcgtccgcaacaaacaagtccaacccctgccctaacgaaccccaaatccgtccgaaagattcgaaacaacaaattagggttccaaattttccaatttcaaaaatcatgctccctttgaaatggtccctctgagtagtaaccccacatcacaaccgcctatcatgattatcatcaaccacaagtaaccccttctgactccaatcccaaatcctaatgaccccaaaacaactcattggggttccaatttcaaacccttattaaaaaatattaggttttatttaattctattttattttattttccttcttcccctaaacacaaaacctcaccggcaccgacccatcatagttttcatcatcaagcttcgattttgactccggaaatggcgacgaggggcaccagatcggagaaggttcggcgaattttcaaccaattcgacgcgaaccgtgatgggggtctcaaccgcgaggaaatggcgttgctggtgggtgctgtgaaccctaggggtgaaattcagcgacgaacaaatcaacgcgatcctcgacgaggtgttccgaacctacggcgaattcattgatggggacaagggtctcacttaccgagggtttgttgcgcacgtacgacgacggcgcccgcgacgtcgaccgggacttcgacgccctcggcctcgacctggtcgccgccgacgccgtgaaggagcccctcgcggcatcggaggcatcgtcctcgtcgattgtcgacgagagaataacggtggag

SEQ ID NO: 115217 - DNA, 217 bp, Glycine max
  Clone ID: PAT_MRT3847_7504C.1
aggggaagatcattattgcggcaattggtaacttggtaatcgggtatatcacgcaatgttcaaacacacaacatttgaatctgtttacttattttatgaaggataaaagttgcagatgccctctctatataaacactgtcgggcctgtttttttttaatttaaacaaccccaccctggaagaaaaacttataggcactccctcattgcccattcaaa

SEQ ID NO: 115218 - DNA, 245 bp, Glycine max
  Clone ID: PAT_MRT3847_75050C.1
cacgcattcaatctcttttcctaattttttccttctatgttttaaatacctcccaaaccttctaggacgggtttatattaatagactttacaatcgtcacatcttcaccaataattaatttcccccacaccccttatatcttaaattgaaaacaacattaagttcacttttttatgaacctcataatataatttcttattttgcaccctattaaaatcatataacttaatttcttaattttttta

SEQ ID NO: 115219 - DNA, 1100 bp, Glycine max
  Clone ID: PAT_MRT3847_75051C.1
ttttttttttttttttttttttttttttttttagaagctacataaaaattccttaacattagcataaaaaagacaatacaatctccaatattcagtaaggaactcaaattacgctggccatggaccaggtggaacagttgcagagtttttaacattaatgcatccaacgttctcaaccagaaagtaaaaaatgtacatcctcttgcccttttccccttattaaataacacaacttaaaaacaggggggcagtttggccacagacattgaccgtagttcatctcacagtcggcaacattaaaatggaaggaaggaataacctgatacattttcatacccaaaaaatggaaaattttgttgtttggcattgccaagagttcctaaattattaaatttagcaattacaaaaaaaaaagggattaaaatgagaacagggctgtgtgtgattaagacgctgcagattccttagcaattttctcggcctttgcaatgacctcttcaataccgccaaccatgtaaaacgactgctctggaaggtcatcgtattttccatccaacacaccctggaagctggcaacgttctccttcaactcaacatattttcctggggcaccagtgaagacttctgcaacatggaaaggctggcttaagaatcgctgaatcttacgggcacgggcaacagtcaatttatcatcttcactgagctcatccattcccaaaatagcaatgatatcttgaagattcttgtagttctgaagtactttctgtacaccacgagcagtttcatagtgatccgcacccaaaataaggggggaaagcatacgagatgtagaatccaaggggtcaacagcaggatagataccaagctcggagatctgtcgtgataacactgttgtggcatccaagtgagcaaaagtggtagcaggagcaggatctgtcaagtcatcagcaggcacatagatagcttggacagaggtaattgagcccttcttggttgttgtaatacgctcttgaagagctccaagatcagtagacaaggttggttggtaaccaacagcagatgggatacgaccaagcaaagcagacacctctgagttagct

SEQ ID NO: 115220 - DNA, 258 bp, Glycine max
  unsure (1)..(258): unsure at all n locations
  Clone ID: PAT_MRT3847_75052C.1
gctaggctaagcgaagtacgaaccaaactctncacgcagattgtggcatgcttagcgacgacatntgcntcnncgttntnnacnaccagaaccacnatgtatcctgnnactgnntnnaacactttcggccatntccacgngttcncttantnagctgtcaccacgcagttccnttcctgtgtatccatgaatctcaggtcatagngacnggngattgaggagtgnagagctgancagtttccatgatcntnagagang

SEQ ID NO: 115221 - DNA, 306 bp, Glycine max
  unsure (1)..(306): unsure at all n locations
  Clone ID: PAT_MRT3847_75053C.1
ggaacanaaaatggggtattagagagtgaggaacgattacactacccttcattcgggcataccaccttcaatcggcatgaaaagctatgaaatactttaaatgctataaacgctaaagaaatatacaccctacattgaatttgtcactaaggaaggggttggcacctctcggtgtgcagtaaaaacattataattttgaatgctttagaaaaattaggcctgtatcgagaatatgcatcgaggctaatatctaaggagtgtttacaagcttatatttattaacagttacattattttttgccattt

SEQ ID NO: 115222 - DNA, 235 bp, Glycine max
  Clone ID: PAT_MRT3847_75054C.1
ctctatctctctctctatctatatgtctatcacacgatcattgcattctgatgatcatatcctcatcatcagactcgaagacactagcgtggtcaatcaagaaacgtaccctcacatgctttatgtaacaaactgcttcatcagatgtcctgtagtgagatatatacaatagccttcaaaaggagtggacattcaattattccacgattccacaaaaagagaaccccactgcggg

SEQ ID NO: 115223 - DNA, 258 bp, Glycine max
  Clone ID: PAT_MRT3847_75055C.1
cacaaggcaggaatcaagctcatcctagagttttaaaaatggcagcagcctccaccatggctctctcttccccatccctggctggcaaagccgtgaagcagggcccatcagcccccgaattcgggagggtcaacatgaagaagaccgtcatcaagcaggccttctccggaagcacatggtactgcccacaccgcgtcaagtagttaggatcaatctctagcgagaccccgttctaactcactgacgagttcacaagtg

SEQ ID NO: 115224 - DNA, 348 bp, Glycine max
  Clone ID: PAT_MRT3847_75056C.1
ctcacgcgtccgtgaactcgggattgaccgggggggatcttctgagagttgttttcagaacgccactacaggtgtttagggagaaaatgatctcaatcatgttaggagggatggatagaactgactaaaacatctagccaatttccggtgtacaaaaaaactgcatatttatttatacagaggaagcgattaaagtaatgctatcatgatgaatactcccaatgctgtgcctacagtgcagcgatatggagctgtagacctagagattgaatgttttgcgagaacatttttctacacaaattgttcagtggttttattcataacatgtgaaactaaggctgaaaacgc

SEQ ID NO: 115225 - DNA, 341 bp, Glycine max
  Clone ID: PAT_MRT3847_75057C.1
cccacgcgtccgttgatcgagagcggacgtacctttatatatatgctttttcctcaatgaggtgtgcttcatgatccatattgtccttgaaagatgatggaactgagacaccattggccactgagttaattaagccacatcctcaaggagaagaatatagtcctgttagcgaagccttcatgcctgccagcgaatgactggaagctcatatttggctactgacaaaggcttatgttctcgagaatgatgcatgcatccatgctattattagccatttggtaagaactcatgcaattgttgagccattcgtcatatcaacaaacaggcatcttagtgtggtt

SEQ ID NO: 115226 - DNA, 503 bp, Glycine max
  Clone ID: PAT_MRT3847_75058C.1
cttgcctgagtgcacatccaaagagcagctccaggagcggttactattggcaatccacgaagcaaatgaaggtttcggatttggctaatcagttatactcgtttgtccgtgccctgagaactgcaataggcgagcagcacgtgtgtggctgatcacattatgaactccacgtgtgtgatgagagatggccggagagaacatgtccaggatagacgaatgcccgtgggagaggtactactgttaagagagagagcgactattttgtgtttataatctttgtctgtttgtagtttttgccttacattggtcgttgctccgaagtttttccccttcttttcgttcatagactggtgtaagttgtaaccgaacattatgtcaaatgcaggtcatcttacgctggaatgttatacctcccctaatctgttaaaacaactgtaaattccgaaggactatttattctaatattattagagcgaaaattctctctttcgctctcccaatcc

SEQ ID NO: 115227 - DNA, 127 bp, Glycine max
  Clone ID: PAT_MRT3847_75059C.1
agagctacagcctgagagaaccagagccattcacagcaagcttactatgcaccaggcatctttgtattctgttagttagaagaagaaagagctatatttcccactgaggtaatatgctatcatggtg

SEQ ID NO: 115228 - DNA, 382 bp, Glycine max
  unsure (1)..(382): unsure at all n locations
  Clone ID: PAT_MRT3847_7505C.1
gacggggnncccaatgcatgaaacaacaactgtcggaaacatttttagaggggggactcactctttctttatggcaacacaatggggcagccgcatttttagttattattctgcccctaatgaataatacccgaaaccccagccaaagtaaatattgcttttgagcaagctttaattggccaaaacaagtaatacacaagcttttttcatcatacacaacacaaataactcttgttttctggcccaaatgacaaaacttattactcatcagcccacaaaagggccctcaacctgggcctcactggaataaaatcccggcccgtttttaaaaccccccctttttaagttttcccttggcttaaaaacaattttttgatttggg

SEQ ID NO: 115229 - DNA, 384 bp, Glycine max
  Clone ID: PAT_MRT3847_75060C.1
gacatgacgtgccacgcacgcgtgcgtaagctcgctagagcgagagcgcgtcgtttttttttttttttttttggaaagatcgactatttgttatccaactcatactggcatgactcagaaggtattgacattatctcagcgtaatctttaagagtagtttttcataagctatatggccaattacagtgtgattatgggcttcaaccaaggaagttgtttataacttttggcatggacgattgatggatctaacttagcctgcatccgctgagttggagagtgccctgcattagcttaagtacaagagggaggtcttaggatggcccgtaggccaagtatgtaaaagaaacttgactttgcctgacatggatcagatttgagctt

SEQ ID NO: 115230 - DNA, 812 bp, Glycine max
  Clone ID: PAT_MRT3847_75061C.1
aaacaggccaggtgtcttgataggcagttactgatcgcattgatgaagtgattgaattcccgctaccaggagaggaagagcgtctaaagttgttgaagctctatttgaacaagtatttatgtgatgacaataatggctccaaggggggtttctttctgaagaagcagcctcagaagatttccataaaagatttatctgaagatgttttcagagaggctgccacgaaaacagagggattttctggtcgtgagatcgccaaactcatggccagcgtccaagctgctgtctatgggcgcccagactgcatcttggattcccagttgtttagagaaagtatagattacaaggtcgtggaacatcatcaacgattaaaactagcagctgaaggtggccagcctggccaaatataatttgtttgagcattttatttgcatccccattttgacctgctatgtgagtttttttgttcatgttatttgggccattgtggctgatgaagcatatttttgtgagccgaatttgcaggatacttcggctttattaattattactttattaggaataggaagcttttagccttcagttacttggaagcagcattcaatcagaacctttccacttcatgctatagagcaagaagccaggtttttaagagcatagaagtcaaattacacttattaacaaatatatagaatatgctcaaagttgtaatttaaatttttatttttttgtgaatttcatttcttctaaattcccccgtaaaaaaaaaaagattgtaccaaatttgaatgggaaagaacaaagggtgagga

SEQ ID NO: 115231 - DNA, 1235 bp, Glycine max
  Clone ID: PAT_MRT3847_75062C.1
ccacgcgtccgattgttactgtgccaacgcattgtgaggccacaagtacctaacacccagctaagcttttggaacttagagttaagcagttaccttcctccaactataatatctcaaccaatcaaaatcctttttctcaattctctctctctctctctctgactctctccacaataagtgttgattttttcctaaataagtgaaagtgtagttacacctttttttagtgttttaccacttttgagtgccacagagttctgagtttcataggagaaaaaaatgacagaagaacaaaccaaaacggctgagtcagaatcagtaacaccaccacctgctgctgctccttcacaggctcctccagctgctgaggctgaacatgttcctgaggctccaaaggatgtgactgaggagaaatctgtaattccagtgccttcttctgatgacaaacctgatgagtccaaggctcttgtcttagttgagaagactcaagaagttgccgaagtgaaaccaactgagggctctatcaaccgagatgcagtgcttgcaagagttgcaactgagaagagattgtcactaatcaaagcatgggaagaaagtgaaaaatcaaaagctgaaaacaaggctcacaaaaagctttcatccgtttctgcatgggaaaacagcaagaaagctgcagtggaggctgacctgaaaaagattgaagaagaactggagaagaaaaaggcagaagctgcagaaaagataaaaaacaaaattgctgcaatccacaaggaagctgaagaaagaagagcaataattgaggcaaagaaaggggaagatcttcttaaggcagaggaacaagctgcaaagtatagagcaactggaacagctccaaagaaactccttggttgtttctaatgcttcaaatctcaagcattgtggggaaagaaaaagttattttttattgtgtatctttggttattaaatatcattaatacaagtgtggttttagtttacatgttggagatttagcccatgttcatttattatgtgtgcaaacctgacacattggcgtgtatataccaactactttgtggataaagaaattaaattattcaatctgtgtattagttacttgtcgcttgaagtcattgacctacttcagcctctctgcactagttagttctttttcattatccgaagaattatgtaatgatataaaattctattgagttgtatttacatgtaagaataat

SEQ ID NO: 115232 - DNA, 734 bp, Glycine max
  Clone ID: PAT_MRT3847_75063C.1
ccacgccgtccgtatatatatatatatatatttggtttctttaattttcttcttctgtaatgcccttttgatcaatccatcattccagggcacccacgcccggcttttactagcatggcatcaagcaatctattctttgatgatatacggagcaaagttgatgttgatcctcctcaaaatgatgagtcaacagatgttggtgaattagtaaatgatcctgcacaaactgctcttaaacctaatgggactgtttcaagcagtgttcgtgagcttttagagtgccctgtatgcctgaatgccatgtaccctccaatccatcaggttgtttatgtactcatggatcattgttgattttttgggttctttgagaaagcatgcgattgtaaattagttactggggcgttcaaagtgcaatttgataaattaattgtgacaacaaagtgaaattgaccagtaccgggatcatggcatggtgcatcttattattaacaagattgaacgcaaggaaaaagggaattctcattctaatagcaagttaaactagaataatggtttatgtgacatgccataagcaaaaaaactgatgtggggtgtgttgatttcctcattcaaaagaaaatctctcgtctcacctagctgatatattctgaaaatcttgaatgttttttctagcaggaactcagtcaaattttctatatgtaactctttggggttatataattattgctgggttc

SEQ ID NO: 115233 - DNA, 351 bp, Glycine max
  Clone ID: PAT_MRT3847_75064C.1
ggcgccttttttttttttttttttttttttttttttttttttttttttttttttttttttttttttttttttttttttttttttttttttttttttttaaaaaaaaccgcaaaatttaattgaaacgaataggccggcacccattaaaactaaaaaacggggcccggaacaacattccgtaccggctttcaaagcgattgctgggcccctttttgccaaacaacccggggaaattttcgtagattgcccccacccaggggattaaaaatcgattccccctggcagccaggaccgaccaaggtgacgccgggaccggaccagtagggcccggagggggccgcccggggtacc

SEQ ID NO: 115234 - DNA, 316 bp, Glycine max
  Clone ID: PAT_MRT3847_75065C.1
ccagggttaactttaaacatactaactacttgcgctcaatcacgtaatttgtttcacctcttatcctgcaagcatatgacacgacatatagctcacattataaagccagaacaaacattggagatattatattttcatatatctatatatatatattcatcgtcccttttttcatttttgaagtccacatttacagtatcattctaaaatcataaaagtgtttccattagaatatatcaactttgctccctgttctattattttcttcggcccttttctactaataaatattttcttctttctccttattcaccct

SEQ ID NO: 115235 - DNA, 422 bp, Glycine max
  Clone ID: PAT_MRT3847_75066C.1
ccctcaccgaagaagaacgtcataagcaacaactccagtcaatcaggtatataatactttttccttttctttaattaaccaagaaggtatataatatatttctttgccacgtttataagttataacgtttagtaatagtacttggtctctgtaaaataaggatgtgtttgatccggagcatcttcaatagtttgaaatttaattaaataatctattttgaaatttttttattttatattaattcatcctacaatgctatatcataaataatttatatatacatatattttatttcaatagtataattttaagttatttttaaattttttttaaatgataaaaaatatttttaactcagaagcaactgttatttgttatttatatgaacgattgaaacttaattttaaccaatttaaaatgac

SEQ ID NO: 115236 - DNA, 155 bp, Glycine max
  Clone ID: PAT_MRT3847_75067C.1
agcatttataggaaacacaccatatcttctatttcacagaaaatgtcttcacattagtagtgatgcttttgctggaaccccttctatattatcatcacaagcactatatcttcaaatcgaacttgacttacttaccagtttctgtcttatcatta

SEQ ID NO: 115237 - DNA, 298 bp, Glycine max
  Clone ID: PAT_MRT3847_75068C.1
gactcaactttcattaatatattggattgaacggcaaaatgagttaatacaatgacaacaaagttaaccattgattctctaccataccactacaacatcccataaatggaataccactacataatcctcaattcactcattcctaaaccaatccaccataacatctatcgataaatattccctactcccatcttcccaattctaatatctcagttcctcaacctttttccaatactatgtcaaactacccttgagaccccccacatccattatgagctatcatcccctagacaatagt

SEQ ID NO: 115238 - DNA, 341 bp, Glycine max
  Clone ID: PAT_MRT3847_75069C.1
caaaaacgagatgaatgccttcaaatcatacccactttggatgaatttgtgcaaactttggacccgagaaaaatgagtgctagctcctttgtgtgaccaagaagaagtttaagcttatgtcaaaaccaggaccaaaggtgagatgggagcaactaaaactctttgcaagccctttgatcaaccaaaactcccagaaagcaccaagtgctttgcattaaggaagcctgcaacaaagtggacatactggggaagaaggtactaggctactggctgctgattgggggattttctggaaataaattggtatttaatggcaccttgtaccaatttgggggacacac

SEQ ID NO: 115239 - DNA, 2028 bp, Glycine max
  Clone ID: PAT_MRT3847_7506C.1
cacgcgtccgctttttcctcagcatctaagggttcattggagtggaaccctaagaactcgcagcaccaccaccagcaccaccaccagcaccgttctattcttcttccaaaatgggtatctctcgtgattccatgcacaagaggcgcgccaccggcggcaagaagaaagcttggaggaagaagagaaagtatgagcttgggaggcagccagcaaacacaaagctatcaagcaacaagacggttaggaggattagggttcgcggtgggaacgtgaagtggcgcgctttgaggcttgatactgggaactactcttgggggagtgaggctgcaacccgcaagacaaggattcttgatgtggtgtacaatgcatccaacaatgagcttgttcggactcagacattggtcaagagtgccattgttcaggtcgatgcagcacccttcaagcagtggtatctgcagcattatggcgttgaggttggccgcaagaagaagagtgcagcagcttctgccaagaaggaaggggaggatggtgaagctgcaactgaggaggtgaaaaagagtaaccatgttttgagaaaattagaaaagcgaaagcagaaccgagttcttgatcctcacattgaagaacaattcggaggtggtcgccttttggcttgtatctcatctcgacctggccaatgtggtcgtgctgatggatatatattagagggcaaagagctggaattttacatgaagaagcttcagaagaagaagggcaagggtgctgcttaagatattgtctatcttcctactcgttgtatcagaatttcttgaagctcttaactatccaccaacagattatcagttttgctaggaactctattttctttgggaggggtttatgggtgtaaacatgaccgagaacttttatttgtttacttatagtgagtcctgtttaaattgattatttccaccattacaattttctagtgcattgactttctttccttacatttttttagagcagacagagtctttggaatattttgcttttgccttttataagttttaatatgtgttattcaagttcttttttaattgcattttttttgatattcttagactgtttcttacatcattcagtatctgtgttttaacaggatggtgaagctgcaactgaggaggtgaaaaagagtaaccatgttttgagaaaattagaaaagcgaaagcagaaccgagttcttgatcctcacattgaagagcaattcggaggtggtcgccttttggcttgtatctcatctcgacctggtcaatgtggtcgtgctgatggctatatattagagggcaaagagctggaattttacatgaagaagcttcagaagaagaagggcaagggtgctgcttaagatattgtctatcttcctactcgttgtatcagaatttcttgaagctcttaactatccaccaacagattatcagttttgctacgaactctattttctttgggaggggtttatgggtgtaaacatggccaagaacttttatttgtttacttatagcgagtcctgtttaaattgattatttctaccgctcccgtgccggtgagttctccaaccgctcccgttccggtggcggcgccgtccacccctgtggctcccgctccggctccgagcaagcacaagaacaaaggtaaaaagcgcggtgctccggttccttcaccgtcgttaatagaacattttgcgccacccactggggttaaaggtccaaacgagaacgcttcgtcccctggacctgccgcttcttcctacgatgagagtggagcacatcccttcttgagattaaaaaaggatctacgagggttaggtttgggttaagcgacccttgttttggtattgtagactaggctttgagcctgcctatgaaaaaaatgtaaagaatcctttacatgccctgtacgtttcattatacccggaccctgttcagggttcaataacatttaatggctttgttactttcagtcccataatattcgaataaagtcgttgtcatc

SEQ ID NO: 115240 - DNA, 381 bp, Glycine max
  Clone ID: PAT_MRT3847_75070C.1
gttgccttccgctgccgttcccttggatcctagcttcaccaaagcttaagcttaaacttggggatcaaaaaaaaaaggcgtacgtgcacgttaatttgcatgggcatgttgagcgttataatctctttttagcttacgttaatatgtactcaagagcggggaataaaactgctccctaatttcaatgcagtgacatagctaatcgatccctgcaactggtttgaggatgtgatttgtaatcgttgaaaagcttttcattttatgattggtctctttttgtatcaaccacttgatcagtgtgcatgtaaaatagactgatgatgtgagaagaagcaatagaaaaattctttttgttatttaatagaaactacgtactttgcc

SEQ ID NO: 115241 - DNA, 366 bp, Glycine max
  Clone ID: PAT_MRT3847_75071C.1
cattggaaaaaaaaacttaaatttcttattcggcggggtttttattttttacactcaaatgccagtattggtctgacctattgataaaattggcccacccagactcactgctaccttataaaaaggcagggcacaaacatccggggtctttaaactagggtactcataacacagagatgcccttaaattactgggagaactaagctgattgaggaagtctgctatcgcgcccaattcaatagtgggaccaaatgggatcaacttgttttaggatggaacaaatatttcgcgctttttttaaatttagtaggagcccttttaaatgatgacctaaagcttgggtattcatacctggggtctttaagg

SEQ ID NO: 115242 - DNA, 724 bp, Glycine max
  Clone ID: PAT_MRT3847_75072C.1
gacgtgaaaagacttctaactatgtatttgtttgcttaatgatctttattttcatgtaacacttattttcaaataaccaagtgaaaaacttataacgatatattttgattgcacaatgatcattattttcatttacacgcttacttcaaataaccaaatataataacagcgtttccaatatgaacataaaacaaaacctccatgcacggggataatggaaaattggagtaacattggcaccaactggctgtgttgaccacagccattattagtcgctggaagcaaccaatatcttcccagaccaaatcaggatgctattttcttccacaaaaacataaatagcacgcctgagaatttgcacaattgatatatactagcctctttgggatatgatcaccaggctcactaaaacaatggtatgtgccacctgaagcagatcaagaaagttcaaatccggcatttgaactgatggcatatagaagctttgctctcaaagtgcctggacgtttgtatgttggaagcttaagggtattgtagcaggttgaagctgatggaagccgatctacatcttgtcctccaattgttgcccaaagaggaacatcacatgcaaccttgtggatggtaaaaggtggctgcaagtatttgaacccagtaatggggcacgagaacaactggtgacaatttagaagcatacagcgctctttaaggtcaaagcctttaatta

SEQ ID NO: 115243 - DNA, 358 bp, Glycine max
  Clone ID: PAT_MRT3847_75073C.1
gttaaaaaaaaaacaatttgccgatttaattaactccaagaccccaattccaatattggtttggaagattaaaacctcaattccatttttttttaaggtttagatttttaatggaaaaaaaaaccaccagggggaccctccttaggttttaaggcttaattggtttaaccttacaaaccttttttttggggatcttagccagggccctagggtggcaggctttgatggttttagcaaaggggcacgtatggtggccgttactcccggcggggacatccacggggtacgattttatggccaccgttttccaaccgtattccttttcctcctaatgcaagggaatcgtggaactataatt

SEQ ID NO: 115244 - DNA, 1752 bp, Glycine max
  Clone ID: PAT_MRT3847_75074C.1
gtaatagaatctcggtttccattggcacatagaaggaagaaaggtcttggttctagaaatagggattctgggaaagaattttcaattggggtggtgccacgaataagcagcatctgttatcctcagtgtggctattttccatcaagtgggggtttcactgccaaaaggaggaaatgtaatagtctcctaagactgaaggattgttcagaaaacataagacaacatgcttctattttgtttgtgcggctggttactggagtgatgttggtcatggctgtttctttggcttctagtgagccatcctgggccctgtctgaagagaatctcctctttctggaggcatggagaacaattgaccgagcgtacattgataaaagttttaatggacagagttggtttaggtatagagaagatgcactacgcaatgaaccaatgaacaatcgagatgagacatatacagcaataagaaagatgcttgccacattggatgatccattcactagatttttggagcctgaaaagttcagaagtttgaggtctggaactaaaggcgctctaactggagtggggttatcaataggctaccctaccaaagctgacatgcaacctggtggacttgttgtcatttcagcttctccaggaggtcctgcatatagagctggtgtttcgtctggagatgttatcctggctattgatgatacaaacacagaaaacatgggactatatgatgcagctgaacgtctacagggaccggaaggaagctctatagctttgaccattcgtagtggttcggacataaaacacctggatttgacgcgagagaaagtttcattgaatcctgtgaagtcaagattgtgcaagctacctgcttcaggaaatgattccccgacaattggttatatcaaactaacatctttcaaccaaaaggcatctagtgctatcaaagaagcaatcaatacattaaggagtgataatgttaatgcatttgttttggatcttagagataatagtggtggtcttttcccagaaggaattgagattgccaaaatttggttggacaaaggggtgattgtgtatatttgtgatagtcgtggtgttcgagatatacttgatacagatggaagtagtgcactagcaacttcagaacccctggttgtactggtaaacaagggaactgcaagtgcaagcgaaatattagctggtgcattgaaagataataaacgagccgtattgtttggagagccaacatttggaaaagggaagatccaatcagtttttgagctctctgatggctctggattggttgttactgttgctcgctacgagacacctgcacatacagatattgacaaggttggtgtcattcctgaccatcctctaccaatatcatttcccaaggatgaggatgcattttgcaattgcctccaggatcctgcgtcttcttgctacgtcaataggatccagcttttttcaaaatcatgattttttgggggttgttgtacattaattctttgtaaaatattactattcattaacagaacataatgttttctttgttttgggggcttactgattgagcaagggaacattgttgccacaaatatttggatgtatatgaaaaccaaagactagagatttttgttcctgaaaatcatcggaacatgggcaaagaaaaccaaaacaaatggatgtacctgaattagaattgttcgcaataaaaaaaaaaaaaaaaaaaaaaaaaaaaaaaggacg

SEQ ID NO: 115245 - DNA, 242 bp, Glycine max
  Clone ID: PAT_MRT3847_75075C.1
gttaaagataaaggcagctgcggatcatgctggaccttcagctccactagggctttcgacgcaggctatgcacacgtatttaggcgtagagtatctctcttaactgagtagcagctatctggactatgctggtcctttcaagaacttatggctgtcatggtgggttgccatcacaagtctttgaatacattaaatacactggtggactagagactgcggaagtatattcctagacaggagaa

SEQ ID NO: 115246 - DNA, 287 bp, Glycine max
  Clone ID: PAT_MRT3847_75076C.1
cttgaatggatcaaactgtacgtgctaccattctgattctacatctgttgtaggaggcgggggcaattcttcttgacggaatggcaaaccatgcactatgtaattacaaagagtatcacacacatttagaccattgtcgtattcatcaacaacatggaatcaaacatctactttagggccgcatatgctctgacctactgaaggaatttctaactcaacgattgaataccatggatatcttgcatgctcttacatacctgaaaagatgattcatacaccatctacat

SEQ ID NO: 115247 - DNA, 253 bp, Glycine max
  unsure (1)..(253): unsure at all n locations
  Clone ID: PAT_MRT3847_75077C.1
agacatgccattgacaaagaccaatttgatcaggaaaaggtgcatgacgtgagaagaaaaaaacatattgcaatcaatgatcctttagtttttaatgaccgggaaagccatgaagtccaaggaagttctgctatagatatgcatagcattagcaaaggattgactcacatgcctaagacatccaatgatganttattgttatctgcaagtgcaggacagtctggtgatggttggtctggagatgatgtacaat

SEQ ID NO: 115248 - DNA, 1813 bp, Glycine max
  Clone ID: PAT_MRT3847_75078C.1
ctctttttttttttttttttttttttttttttttttttttttttttttttttttggccacaaataaaaaaataacttgtacttcttgaaattactctaggccttgctgatatttcagaggatgattatccttattgacagaataattcaaaatttggcaaaagaaaatatgttgctgcccttaacaaaatgtactctaccagattgccaccaccaatggcttggtttttcgattcagtatccatcaagtgcacaatatatgattgcaatttactaatacagaacagctacaatactcaagctgcttaatgaattttattgattaaatgcaccaaacgaaaaatgttctttttttgttttgtttcctttcagagacaaagggggactactctgcaaatctgaactagagaatctcaatagacttcaacatgccattgtttgttcttcttaagttgagaaagcttctcttcccaactttctcctctttgctcagcaaccttcttcagcgtatcttggatccctggcatcatccctttcagaccacagaaatatatgtgggccccattatccaggagtttgaagatttcatcactgtactcctcaatcttatcctgaacatacattttgcccccactcttgttcttttgttctctgctgagggctcgattgtagcggaaattgtccggataatccttgaggtatttgctgaattcatcatcatagagaagactgtcagtgttggcaactccaaggaaaagccatgctaatccaccaaacttgtatgcagggactgattccatgaacattcggcgtagatagctgaatggagcaacacatgccttcaatcattatatgggtagcatttgggtcatcctcgggtaaaagcattatctggcctgtgatctgatttgctccaggctttgaattacacaaaaaattgctacaaatgccattcttggaaggatcttcctttcctgtctcaggatcataataaacagcacgacgcacacacaagctggcagtttttccatcaaaaaagtctccataccttgtagaagcaattgaatatagtcgaacattatgaggagccccaggtttcttaggattttcacctggtggaaataacaccataactctgtccttcccagtagggaacatttccaccgtgatcaatcacaatatgacaagtttccccaggagcctttggccccactagcctatcaacagaaacaattgttgctgtatagggttctttaggcttgtataagttcaatggaggttctttagcatcttccaattctaaaggtgagacattaactttggatacacttgcttgttgcacggacatgcataccacatgacgacttcttaaacttgggttgtttggcttcaagtccaaagtaaatactggtgcccatgatttatcccaaaagttcaagttaggggccttaactgcagatcttctgagagacaaatcgttgccaacaggaacagttacagccatctgagacagggccaaatgagccatcgtgagatcgagaagaaagaagttgttgaagttatgacaacacaagaagaagtgattggagattgaaaaggccttaaaaggagtttataaaagggtcttatataactaacggaggtagcacaccaataactgtgacaaagtttgattttgatttggtttagttcgatgatactttggagaaagggaaaggtcaggttttttgtttttcccttgcttccttggagggtcactccctctctcactcaccctccccttcccccttctgtcgtctcatcgcagaagtctg

SEQ ID NO: 115249 - DNA, 1201 bp, Glycine max
  Clone ID: PAT_MRT3847_75079C.1
ccattccaggtcggtataaagtcacccttttcggaccagttggaataactccttgcactaagcaaacaagagattcccactgatttctcattattgaatcgcccaccagcattattctctttcttctcattcttcctagaaaccttagtgcatcaaatcttggcatggtacaaccacttggcttccacttccacttctcatagtcagaatcaggtctcccattcctttgacaagtaactgcagagctgagatatggacaactagagtcatagagagggtaagagtcatcataaacccattttccaacagaaatgtcacatctcttcctagaatctctgttgctttgggccatgctaacatcatcatcagcttgcaccagaatgccaaccccatcctcagggttcagaagggacaatgtgcagtggaacaagctcaggaaggtaccacacaacaagaaagacgaaacaagcaagtgaatcatataagattactattatccattcaaaggggttcaaaaaataaaaagaaaattaactcaactttgtttaaaataatgtgcagacaaaaacaataaactcaaaatttgatccaaagtctaatatttctgagtaataaacacactatgcagtagccctagacaaaaaggctcttcctggttggcagttagccaatggtccatggcacccaagaagcacttcatgctaactataatcttttggcatccggggaacttaaacttagctcgatgagggcctcttgtgcatgatggctgttgcagtccatacggcggacagaaaggaggacctggccaatagccactgtagcacaagtacccagcggctttccaaattcacctcgcatcccggtctggagcgtatcggctctggcacatgaaagcattttgttgatcctaagaacatggaagtgatgcagcctgactctcaagtggaatgcatccctttccagcgaatttcgtcatgtacttgttgcaagcaatcctggcagcctccagcgcctcactcaagacattctacttctcccaactaaccaaatgcacacagaaaggaaactcatcaacacctttcttcttcatgccaacatcataaatcctgatcttgggatcaggaacaccgtggcaaaaccgcgatttctggtatggtttgtttttaatttgtcggcaacatcttgcaggtcttcccgc

SEQ ID NO: 115250 - DNA, 220 bp, Glycine max
  Clone ID: PAT_MRT3847_7507C.1
gaagaggattcgagagagcgagctcatccatcgcatgtgcttcatgctccccactctcgtaggtatcattagtgagacgctcactggtgttacatgctaggacactgatacggtgtagctagtgcgacgtgcagcatacctaggatagccactgacattctatatcacaacactgatctgcgtcgacgcagtggtacttcgctacatagagcgacacaga

SEQ ID NO: 115251 - DNA, 580 bp, Glycine max
  Clone ID: PAT_MRT3847_75080C.1
ccaatattcagtaacatattataccaaacttcattgaatacgtccacttgttcatcagatgccccaatgatcttcacaccaatgtaattttgatattgtaagttccaaaatcaacaaaagtgaggccaaaatacagtaaagtggtttgattagtacaaccttataatcagtggcatcgaaatctggatcaagtaattctagcccacgcctatcatcagctattccatacgcataaagtgcttctgcaagctaagttaaaaaagagaaatggagggaagaattgtaaccaagaaagaaatatatagttcgtgtgaagcaaagcatgctaaatagaacactattctaagcaacaacagcagtagaagactatgcagttgtataagtcttcaaagccagttattttttgcagggaaataatctgtttgaaccactcaaccacccaaatatgaacatgaaaaactactgttaggccacacacaatatatctcaattttctttcaactctctgcaaaatgcaagcatgtgatgtgatgtcaataggtaaagatttctgcactccagcattcgacttttactttat

SEQ ID NO: 115252 - DNA, 1635 bp, Glycine max
  Clone ID: PAT_MRT3847_75081C.1
ccggaaccatcgggtcgacccacgcgtccgcgcacgtccgcgcgtcctcaaaaaccatcatcaatatctcttctcttcattcctcttctccctctcccttcaattttttctctttttttcccctcaattttttctcttcttcaattttagccctacatacaacataaacaacaacaattttagccctcactcacaaacccatttctctcaagttttagcaacacttttgatgaagtcgtcacaaaaagcaactgttttggcttaattattagtattattgttgttaattttttacaaggatggagataataacaccagtaccagcaacagcaacaacaacagccaaaaacgcaaccgcgaaatcgccagaacccgacgtagagacgccgacccggatccaccaaaacccgaacctgaatccaaagccggtgtctttctccaacggcgtcttgaagcgccaccatgcaaaccaccgccccaacgcggtggtttacaaggaatgcttgaagaaccacgtggcgagcttgggtggccacgctttggacggctgcggcgagttcatgccgtcgccggcggccaccgccgacgaccccagctccatcaaatgcgccgcctgcggctgccaccggaacttccaccgccgcgaaccggaggagacacccatttctccggcgacgcaccatgttctagagtaccagccccaccaccgccatcaccctcctccgccggccccgtcgcaccggagtccgaactccgcctccccgccgccgatctcctcctacccctacgcccgccacatgctcctcgccctctccggcggcggtggcttctccgtcgcgcgggaaaacaccggcgcgccggcgccggcgcacaaccactcgcgtaaacgcttccgaacgaagttcacccaagaacaaaaggagaagatgcatgagttcgccgacaaagttgggtggaagatgcagaagcgcgacgatgaaatggttatggagttctgcaacgagattggcgtcgaaagaggggttctcaaagtgtggatgcacaacaacaagaacactctcgcgaaaaaagacaaccttaacaacggtaacggtagcactctgagtgtcagcgccaacgggatttctctggatggcgctgttgggagtgccaccgttagaaccggtgttcatgtccccgaacatggacatgaacacagcggaattaatggtaacggtagcggcgacaacaaccacaaccacaatctcgcttcccatgatgtgaacgagtacgagaatgatagtgggactaacgggggtggtactaatgggtcttcttcttcttcttgaaaagaaaaaaaaaatgagagaataatgatatgtttagatgatagagtaattaagaggtggtaccggttaattacttaattagtcgtttttcttccttctttctttttattttgatttaattgtttagtttttgttaattaatgagatgctgatgctgatgaagaagataatcaccttcttaacatgggagagagatttgattttgatgatattgatatccgcagggaatttagttttcttgtttgattctgctgcttaattatagttaaatatagtgttaattaataattagtgctttcatttcccc

SEQ ID NO: 115253 - DNA, 253 bp, Glycine max
  Clone ID: PAT_MRT3847_75082C.1
ggccataaattagctgaaacttttttaaaccaggaaaaaagattgggaggccccatcagctaaacctcgggggtacttttttttttggggacataaaacaaacaacctactttacattcaaataattgatgccgaggggggggagaataaaaatacataggcactggcttcccgggacagttttaaaagttaattggctctaatttatggggtattcaagccctaaacaagcaaatggtaatttcatttttta

SEQ ID NO: 115254 - DNA, 559 bp, Glycine max
  Clone ID: PAT_MRT3847_75083C.1
attgataagaaaagtaaaaaagggaacgtgaagaaaattagaataagaaaaaggaaacgagtaaaaagttaatcacaatcagaaaatggaaaagaaataggtaggaaaaatgtctaaaaggaaaatctccaaaaatgtgagcaatgacaaaaaaaaatgtgagtacaataatgaaagacaagagatgagaagaagaaaagaaaaaaagaaaaaagattagtgaaggagaaccaacaatataaaagaaaaacggtaaggggcaaagaataaaagacattgtataaacaagaagaaagagagaaaattggttaaagaaataatagaaaaaaatgaattgaaaaaaaaatagaataagacctttttttcccaaatgggaggaaggaatttcttaataaaaaaacctaaatgtgatgtattttttaaaaaccaaataacatgtgaacagaaaaaaggtttaataaaaaaaaagaaaacgggaccggtttgttaagaggaataaggaaaaaaaaaaggattttaaccacagtgaaaaacccaaaagaaaaaaaaaagggcggcc

SEQ ID NO: 115255 - DNA, 501 bp, Glycine max
  Clone ID: PAT_MRT3847_75084C.1
gggggcctccgagggagcctgttaagacggcgtcgcggaagacgtgggggccgggtttggagaacaagcgccggaggtcggcggcggtggccttcccggtggggagcatggttgctcggacggtgatggcgtcgggagggtcggagagagggggttgatcggagggctgagagagttgtagtttgtatgatgccgtagatagtgggggaattgtggagaagggtttgttgatggagaaaagagaagagtttgtggtggttaaagacactgccactgacatggtgtgcatgaggttggtgagcttgaaggaggagctgcacttttggcccttcagaaaaatcatctccacttcctttgtgtctgctttcactaacctgtccatgatcaacctgattgattatttgattaattgattgattctgaatttgagatttgaagggtgcttgattacttgaaggaggatgattgattctttggctgtttgtttagttcatgtttatc

SEQ ID NO: 115256 - DNA, 318 bp, Glycine max
  Clone ID: PAT_MRT3847_75085C.1
cggatccgaatctggttgttgctccttgaattggatcagagcatacccttttgctcaaatttgatttttttttggcacacttttaccctttcaatcaaggttgtttcatttcctgttttcgtgaattttgcagatggttctgtctctgtagctcggaatcagacgacaggagaatttgctgggggagagtttcaatttttcaaatcctgtcgttgattcatttggtattgcactcgcgtttctctctttctattttcgtcagagattatggtttttcgtttctagagggaggggtgggttgtttttattaagtttaga

SEQ ID NO: 115257 - DNA, 318 bp, Glycine max
  unsure (1)..(318): unsure at all n locations
  Clone ID: PAT_MRT3847_75086C.1
aaaaaaacagtagtttttcagaagttggggcatgccccaaagaagcggcatggatataacttcttatctctgatgttgatttaaatagtcatccgaagattcccccatttatagattactatattacagttgactccttcgtgattacatgcccacctaacatttgaaaagttaattttatgcaacattagttagctaactattggtntgaatattgctacagaaatatctgcaatctacaactgtaagagtggatgagatgagagtgaagagacaggacgcagaacagtggatgttccaccgtatgctacctgagaa

SEQ ID NO: 115258 - DNA, 321 bp, Glycine max
  Clone ID: PAT_MRT3847_75087C.1
aaaatggaaactcattcaattattgataaaaaaaaaaaaagtaacagcaccaatacccttaaatttttgtggcggccatataaatgatgacccatgggactggccaaagttacaagacataactcgtttaagaagatacaagctctgataaatacgtccatgaatagtaatggttactatttgctgagacactgcatggagagcttgacaaactcaagccaccggtataaacaatggtaacccctgcagtgagattagaacgcctagctcttgcgaaccaatagtcggctgctcttgagacacctttacttgaaactagca

SEQ ID NO: 115259 - DNA, 644 bp, Glycine max
  Clone ID: PAT_MRT3847_75088C.1
ggctcgagattatttaatatatttggcatctccgtttgtgacgagactgctaaacggcttgcctgctggatctcaatccagaagtgtgacaaggatggagacaacaggcttcgagtgtgccattctgcatgccaatcttataatctagcatgtggagcttctcttgactgctctgatcagacgcttttcagcagtgacggggaaggggagggtcaatgcaccggctcgggtgagatgaaattgtcatggtttaatcgtctgcgaagcagtttttctttgagaaatagttccttgaaaggaatatctgtaaaatataggcagctataacttttttttttctttttcttttttatcttttggggattcttggttgtaattttttaatccttagatttagggggttgcctactcatccaaaattgtttaggaaaaaatggatgaggttgcagaattggctttcaaagagtagccttttgtagagaaaattgggaatctagagatagataaagtagaggagggtaaagaagaaaaggaggaaaaacagaagtaattgaaatgttgcatggttgggccaagcctaaatgaaaagggaaaaaatctgtcggtcataccgataataatataatcattgactctacttcctt

SEQ ID NO: 115260 - DNA, 274 bp, Glycine max
  Clone ID: PAT_MRT3847_75089C.1
gggtccggcgccaaccggggggggataaaaaacacaagcaatctctgcccgaaaaaggttcatgaatttacacctgccctatttcaggctgattgggaaaacattaccatggggcattcaataactggtaatgcccaaatttgttctttaaaacttgccttgaacgggcctaatgtaacttctgtcttgtacccaatggcgaggggggaactcccaccagttttataccaatgctaaaccgggtgatgaacactctattgtggacccccgacca

SEQ ID NO: 115261 - DNA, 103 bp, Glycine max
  Clone ID: PAT_MRT3847_7508C.1
cgctgatggcccgatgcctaatgacaacactcgaggtggaggtgacgacgatgtcaacaccacgtatctcagcaaaactggagaacgacctgtatcgcgcact

SEQ ID NO: 115262 - DNA, 328 bp, Glycine max
  unsure (1)..(328): unsure at all n locations
  Clone ID: PAT_MRT3847_75090C.1
ttttcttcccctatcacattgtgtgtcggcaaatacaagctttcatatgactgcgtggggacaagttgcgccccttaaatatataaagggtatataaatcatctacttacagtagtgagccatctatacctcaaatattttaagaactcataccagcgaaatgttgcgctcgaactcttattctcctgcgtcgccgaggaaccgacanctgcgctccttttcaacctattatattctacctatgtaccaggctaacatctctgactataaaatacggtggcagggggatgattcaaaccgggctaacatgtatgccaggttaatcata

SEQ ID NO: 115263 - DNA, 607 bp, Glycine max
  unsure (1)..(607): unsure at all n locations
  Clone ID: PAT_MRT3847_75091C.1
tacggctgcgagaagacgacagaagggtatctcacgtactgataactttctatctcacgttctgataacaagttgagagctctgtgatgaacagactctataaataggatggagtgctttcagttttgtatcaccaaacccacttctctattcagaaaaaatacaccatctattcagagtgagtaagggtctggaagaacaaaactgtctttcaggttcatgtgtgcgccgcttttcattcaatttgcaatggctggaggtacgctcgtaatatatttaatttctgttgtttgatctaaatatgtcatttaaattgatttgcatgtttagatcagtatatgtatatttttacattttaaggtcattctgtaccagaacaaaaatcaaactggatcatctgacagacaactattgtaagattgataaactagttcgtatgctttagacttacagtccatgaaatttaatgtcaaacccatcatctataaagttcctatcatccagaacaggaacggacacataaataaaaattatgaccaaagaaataaaatatgctgcanataagaanatatagatagaaaatggggaagggggggagaggctaaca

SEQ ID NO: 115264 - DNA, 1386 bp, Glycine max
  Clone ID: PAT_MRT3847_75092C.1
ctgaattctatgacttagttagttagcacccatcttagtttcattcgcctagctccatgactaatgcctttgtttgttatagcttagagccaaatcagcatgcagcttttataatatatgcttttgttcttggcctatatagtacttattcccagttatattagattgatatttgaatagtgctagtttttggactgttatgccatggttccacactttgtgctacatacatgaaaatgaacttatggaacaaactagtgatgacaaagagattagacagtaatttgctattgtacactggacttattgtgtgtgtaattctgaatggctaatttttgtcatgttctcccactggacttatttgaaatcatttttcttttgaatatatgtctggttaatagattaataattctgccaatcgctaaaaatgaactagcgttcatcatgactgctaattcaatatcaattttgttatatcattgtataataatctacttaaatatcatgcttgaaagtgaattatgtcagaattaacaaatgaagaacacgaacagtgctgtgaaatggccaagatcatgctgaaggtcgcgattgcaccagacccgattttaaacaccgttaacgccacggatgggtcatcttcattttgatttaattaacatatcattattctgttattttgtgcaactaaccaacctatttgtctcattctaatggtttatctatttcaaatgtagatttacggtgaagttagtagggtcatttgttgtgaggtggaaagacgtatttgaccgtttatggcatttcgttgacaaggatggaaatttccatatcgttgtctacaaccaagatttggacaaaccagccattatatcagggtgaacaagactaagagatttctatcacctgatcggagatcatcaagcgttgttaactcattatggtaagagtgtattctttctctccatattcaagagcagtagccatccaaaatcattcccaagatgacactcattatacaatcaagtgccaaattctgtcactttcaaggtgtatctcactctgcacaaaattacttgcagcaacctggacatttcaagcacgatgtattattttcttaaagacaaaggctggactcatttgaatttagaggacattgcagaatgtcggattatgtcaatcactagagaaagacaactaaaattggagttgaatggaaatatttttgtgaaacccaatccttcaaagctggcacggaaattgtcttcgaattccctaatccaacagttaaccatgttttattttgcccatgtttatgaattaaatttaacattattaggacttggaacattattccttttaattattaggaattctttaactatg

SEQ ID NO: 115265 - DNA, 762 bp, Glycine max
  unsure (1)..(762): unsure at all n locations
  Clone ID: PAT_MRT3847_75093C.1
cggctcgaggtaacgcactccactgcactgttgttctctctcgaacttatcagatgagcagagaaaatacgccagcaatggcaaaggaagaagtctgtgatgatggttcctccagtgttgagaatgtggatttagaatctcatgctcgaattagtctcgacaaggataatggcttgggaacctgtcgtgtgtgccaatgtaccgaatctgataaaaaggcagatgccgcactagaatttttgggcatcattccaggttcagaaatgtgtaaaaccaagggggaagtgggatctgatggtggtggcgatggaattcccgaaaatacgtctcttgacagaaataatgagaaaaatgctggtatggtggaatttgtaagccctaatggggaggttttcatttgtaaaagcgatttggaacttggtttgtgtcatcaagataaattagttgaacttggatgttcttgtaaaaacgaccttgctttagtacattatgcttgtgcacttaagtggtttgtcaacatggatctaccatttgtgaaatatgtggacatatagcaaataatatcagaatttctgacttcaataaggttgttggtgctttgaaggagtatgaagtattgagggaaagaactgctagtggggatcctggtgccccacatgttcatgcaaatgcttgttgnggatcctgaagctgnggctgctatccggaggcaacggntaagtgaagatgcactatgggnttggncttataataacaggnaca

SEQ ID NO: 115266 - DNA, 820 bp, Glycine max
  Clone ID: PAT_MRT3847_75094C.1
ccacgcgtccggaaggtgacaacttgtgtcgcttgagtcccataatatgctcatctatggtaatagatctccaaaaggctcaacttgcttacaattttcccctatcaagttgtcaacatgtaaacaattttcatccctcaaagtactaatttgtatatattaaaaaattcaagcaaccctagttgtcattttgaaggaccaaattgtatattaactccatgtcgttataagttattttcaataaagctatggttgcctacctagattggtgacttccccttgttcctcttagacaaactgcggccttgttgggggtgatctagctaaactaaactagtgtgcaataagaaggtttattatgaaaaagtaatgaacattatgatgcagggccagttcaaaattatactcacagctaaaagagaaacacactttattaaactgaaaatgtaacagtaatggaagaaacaacaaaatgtcgaggatgacaaaacaaaataagactacaagaagaagctaatgattgctactccttgcccaagccaaaaggtcgaaccataaaccagagtatttttctccattccccctcaattcatgttcctccccttttcataatcaccttcctcctttccttgctattggaccccacaccttttccattgagcataaccgactctcccatgtgtccctctttcccgtttctttgaatataccttccatatcttagggccatggctaagctgcttctgttgggcccttactctccgtcacactatcaggccccataatctcatcaatgtcattgatagaatggaatgcaatc

SEQ ID NO: 115267 - DNA, 149 bp, Glycine max
  Clone ID: PAT_MRT3847_75095C.1
tttctgctttggaagcgatcaggcagaactctgctggagagaggactgccagattggagtgggcggggagacactgtaacgatgaaccaatggtgcaacattaagaacacgactatcaagcaaatgtgaataggcttgagttagcactt

SEQ ID NO: 115268 - DNA, 336 bp, Glycine max
  unsure (1)..(336): unsure at all n locations
  Clone ID: PAT_MRT3847_75096C.1
angcaannctnaagnannnnnaacnnctaganncngagagcgtantcgcgagantnagngganaaganagnnaccnntntnttgnanggagaannngccgnagancatgtcatagtgcctncacattaagngngccttnaacccgtnngacgaggacnagcttcnncgnngcctgggntcactgtatagcttgtncgggctntcagnnantnctcnantttcnnctgggacganagtanccgnnggccacgncgcaacngcnggtngacnggagntnttnggantcagnggnnngagtncatggtnctccccgnnncgnttngagcagtgnacnag

SEQ ID NO: 115269 - DNA, 193 bp, Glycine max
  Clone ID: PAT_MRT3847_75097C.1
tcgtgaaattgcccacgatttcaagactgagctgcgttgccagagccatgctgtgcttgccttgcaagatgctgctgaggcataccttgttgggctctttgaggacactaacttgtgtgccatacactccaagcgtgtgactattatgcccaaggatattcatctggcaagaacgattcgtggtgagcgtgct

SEQ ID NO: 115270 - DNA, 432 bp, Glycine max
  Clone ID: PAT_MRT3847_75098C.1
ccacgcgtccgattttttccccccgcatctgatctcttcggtgctagagaaatataggccgccgccgcctcctccttgttcggtgaaaggtgggcagttagggttgggagatctcttgactcacgacacgagcagcagaattcgtcgagggccgctggttgctgcgagaggtccgggccttcgtgggatcttgaaaattgaatgttctaatggagtccaagggtggcaagaagaagtctagcagtagtcgttcctccctgatgtacgaagctccccttggctacagcatcgaggatatccgccctgcaagcggcatcaagaagttctccgctgcttactcgaactgcgcgaggaagccatcctgatatctctgtcgtcatccccatcctagtagcgtagaaaccttctgcattttcattttgatctccctaa

SEQ ID NO: 115271 - DNA, 161 bp, Glycine max
  Clone ID: PAT_MRT3847_75099C.1
cctcacattaccaagttctatcaatgacatcattggatttatgagaacacctcgacccaagggggaagtccctactaacccactaactatataacttgatcatatcgctacagattttaacatccgatgaaccatgatacactcttacaaatgacattcta

SEQ ID NO: 115272 - DNA, 336 bp, Glycine max
  Clone ID: PAT_MRT3847_7509C.1
cgcaattaacacgagatgactctggctccgcagctgcagtaacaccaagccttgagttctttcagcatagctcggcgccattagctcgcgggtctgccaaatcgcaatggtactggtctgcgaactgaatatacaccaaggctaggcttctgagttccatcagacctggggatgcatacaatcgctgccctgatttgaacccttgatcatacttgacaacaggctgtgatttatgttatacaacaaaagggctcaacaagccagacccctcaatctcgcgtctattccgctcacaccaacccagcactctactctaagtcgtctagggaacaacat

SEQ ID NO: 115273 - DNA, 482 bp, Glycine max
  unsure (1)..(482): unsure at all n locations
  Clone ID: PAT_MRT3847_750C.1
ngnanatagannancnccttcaacntccccctgnccagctgnaangccnnnntgaganacnnnanctnaaggngtgngtgaangaaatntacangngnanncgtaacagcctccacaacnccnncganacananncacagncganctcnncnatnncaggtnnannnccngacngtacacgngctcangtccacantntanantgtgagacnagccangccaangaagcgcgatncanngcagnnnanaanaggancannnagtgnanacagagncacgncngcagntcgcgacngnantcatntcncatgtntgtcngatanangctcnananggcnaacggcangcnnaggnnnancnnnaacnatggntagnncnncgaacaacnaagtgacanttnagtagantgcnngnnngngncggcatgtgagacntgangncnanannacnntngnggangngaatcngagnnanagngnact

SEQ ID NO: 115274 - DNA, 399 bp, Glycine max
  Clone ID: PAT_MRT3847_75100C.1
ataaaaaaaattgcccccctacaaacaataaatctcaatttcatttggaaagggcccctaggaattgccccttaggacatttattcccaggtctatattggttttaaaaattttggtttaacgccttgaaatttttggaaaaaaaaggccccctttcctttttcaccttttggggacgcataatcccctttaatggccaaaaaatttaccttattctttgaaaaccttgggtgcccaaacagttgtccaagggtcgctttctgcaatgacttcaaaagggtcataaaccttggggtttgaactttcttcacttgggcttggatcaacagttttaacagaagcatttccctccctcttttctgagctaccccatttttcctccaagggccagggccctat

SEQ ID NO: 115275 - DNA, 525 bp, Glycine max
  Clone ID: PAT_MRT3847_75101C.1
ggcgccgatgatggtcaccggcacggtcgttgccggcaccagcatggcgcgccagtcctgcaggaacaccagcatcacgaccagcacgagcaggccggcctcgatcagcgtcatgtagacctcgtgcaccgaggcctcgacgaatttggttgtgtcgaacggcgtgtcgtatttgatgccttccgggaagcgcttggcgagctccgccatcttcttctcgacggcctgctcgacctggagcgcgttggcgcccggcgactggaacacgccgatgccgacggcgggctgcttgttcagcgaaaagatctggctgtaggtctgcgcgccgagttcgacccagccgacgtcgcgcacccgcgtgacgtcgccgctggtgcctgacttgacgatgatgttctcgaactggctggtgtcgtcgagccggccgttgacgttgagcgtgtattggaacgcctggcccggcggcgtcggcggcgcgccgacctggccggcggagacctgctggctctgctgctggatcgcctg

SEQ ID NO: 115276 - DNA, 1047 bp, Glycine max
  unsure (1)..(1047): unsure at all n locations
  Clone ID: PAT_MRT3847_75102C.1
tccggtccggaattcccggngtcgacccacgcgtccggccatttcaggattataggttggctgaattgagttctaagcaggtaaaactttttcatgtcattgttaaatttggaaagaaatatgtgattgtcataaacattcgtgtttcttttatttcgaaaaaattgaagtgctagaatgatttggtatgcatgtaagatcttggtatgagaattgtcactctggtcgatacagctaaagaaaatactgatttcgttgtggttgcaggattatgcaaattatggattgtcatatctcatcgactatgtacacggaaaaagccagaaaaagcctgaattgttgcaggagcaactgaaactttcagggaagtcccctaatttgatcacatataaaggaactccaaatctaatgggtcttaaagacattgcggaaacattgtctgcttcagataggtctgcttcagatagtgtcatgccagatggcatggataaacgagagcaacaacgaaggccattgttgaggaatggcattgctaaaactttgtccggtttagacaagtctgctttagacagtatcatgccaaatggtgtggataaactagagcaactgtgaaggccattgtggaggtttgaaatagctcattttttagttctttgaatcttctccctatgtagaagaacgcattgcatgctgggcattctaaattttgatcctgacagttgtttccttggttgtgcctatgctcaatctgtttgcatttttgattcaaacatgctttgattttgcagtagtagttcaaccaagcgttgatgacaaggtcttaaatcataattaccaaccttttaagcgttccttcctcccttgtttttattcagcagtaactttgactttcagttcacttgtccataaatcacaatatattttgtgacagctattgtgattttcacattaaattttatcctacatagtatattaatagactggataacattatatattcaagctggtgaagtgtgattctaaaatgtaaataaactttttgctgtc

SEQ ID NO: 115277 - DNA, 2324 bp, Glycine max
  Clone ID: PAT_MRT3847_75103C.1
gaaaaagctggcgacgatgttcataaatcattaattcatgaggccacatccacctcatagtcgaaggcaatcacaattttgggaaaacaaatacaacagaagtcataattttgcacaccaaaagcatttggcataaactgggagcaccaaaccaacacacaccttgacagcaaaaagtttatttacaatttaaaatcacaactcaccagcttgaatatataatgttatccagtctattaatatactatgtaggataaaatttaatgtgaaaatcacaatagctgtcacaaatatattgtgatttatggacaagtgaactgaaagtcaaagttactgctgaataaaaacaagggaggaaggaacgcttaaaaggttggtaattatgatttaagaccttgtcatcaacgcttggttgaactactactgcaaaatcaaagcatgtttgaatcaaaaatgcaaacagattgagcataggcacaaccaaggaaacaactgtcaggatcaaaatttagaatgcccagcatgcaatgcgttcttctacatagggagaagattcaaagaactaaaaaatgagctatttcaaacctccacaatggccttcacagttgctctagtttatccacaccatttggcatgatactgtctaaagcagacttgtctaaaccggacaaagttttagcaatgccattcctcaacaatggccttcgttgtagcaaaattttattcacgatttctaatcacaattcacaagcttgaatatataatgtatccaatctattaatatactatgtaggataaaatttagtgtgaaaatcacaatagctgtcacaagtatattttgatttatgaacaagtgaactgaaagttactgctaaaaaaacgaggaacgaacgcttaaaaggttggtaatcatgatttaagaccttgtcatcaacggttggttgaactagtcctcaacaatggccttcactgttgctctagtttatccacaccatctagcatgataccatctgaagcaaatttgtctaaactggacaatgtttttgcaatgcccttcctcaacaatggccttcgctgttgctctcgtttatccccgccatctggcatgacactatctgaagcagacatgtctaaaccagacaatgtttctgcaatgtctttaagacccattagatttggagttcctttatatgtgatcaaattaggggacttccctgaaagtttcagttgctcctgcaacaattcgggctttttctggctttttccgtgtacatagtcgatgagatatgacaatccataatttgcataatcctgcttagaactcaattcagctaacctataatccaatgtttccactgtttgttgcaaataacccaagtcttcatggatattagtaatagtacttctaactccagcaacttcatccttagttgacctttgcaactcattcagcttgagcattttgtcattcaaattctgaattctctgggtcaaatgcttcttggtatcagcaatgacatctgaggcatgctgcaactttttggttaaatctgcaacagctttttccatattccgtctagtcacatacataagatctgagaatgaaattcccttccaccacatgtagccataacccagagcgcccaaggcagcagctggaacgacaagggatgataaattactttgttcagaacccccattcagtactgtgattggcctgtttgatgctagctgccgaacttcattcgccaggcgacgcacctgagcagctatggcatcagcatattcaccttcaccttcagcatgctccccagatttttccaatcccttcaccagcaactgaagctcgccgattaaatccgagagttttccgtttttgatgaggacggtgccggtgtaacctgctcctgctatgatgaggatcttggagactccgattccgctttgcatagccatagccatggcgagagagagagagagacgtgcgtgatgtcggtggtgttaattgttagttaggtttggttgcactatcaaatgctttgaccactgacccaaacacaggaacaggggaaccgccttcctaaacgactgtgtttcgtttgcctctgcaagactgtgtctctactctcatctccgaattttccctttagttgtatggttctttctccaggattgtcctcgatgttaacaggaacttcgaggactgacggaggcggcgacaagaagcgatcggcaagcggcagcgacgacggcggcgcaccagacggagagggagatcggcgcacgagagaggagatagagagcgtgaaagggaaggggctgtg

SEQ ID NO: 115278 - DNA, 413 bp, Glycine max
  Clone ID: PAT_MRT3847_75104C.1
cccacgcgtccgaacagacgagctccaattccagacagagtcaagttcacccagagatagcggacgtctatgatagcttacctgtctgctgtgttacttagatatagccggatgctccctgcaatcctaaatgcagctattgatctcaatttgtctgatatcataacgtaggcacatagttcatgtgactcaggtttctgaaactttgagatagcttctttgctatcaaatcaacacccacaattggctaactgtgctgaacgcatatcacctttggcggccatttatactcttgtaacatgctccattcgcacaaatgacgatggttagagagaaagagtttatgctatgtcacacgtatgtgcatactctgcatgagattacgatgaaggaaagcctttggatcctgtatg

SEQ ID NO: 115279 - DNA, 892 bp, Glycine max
  Clone ID: PAT_MRT3847_75105C.1
acccgccgtaaccaagacgaggtcgggaaaaggggcaaagggattgataacaggtaaaacctcagcttcagccaaagacaaagacaaaagacaagaagaaacccgtttctcgttcttctagagctggtcttcagtttgctgttggacgaattcaccgtcttttgaaagcctagaatagaaaaagctgtgctgtggctgacacagggaaaggcgcggttgaaagattgaaagctcgacatgtcagggaaaggcgcaaagggtttgataactgctaaggacaaagataagaaaaaaccaatttctcgctcctcaagagccggtcttcagtttcctgttggacgcattcatcgtcttctgaagtcaagggtgacagcacatggaagagttggggcaacagctgcagtttattctgctgccatcctggagtatttaactgcagaggtgttggagttggctggcaatgcgagcaaggatctgaaggtgaagcgtattaccccaagacatctacagcttgccatccgtggagatgaagaacttgataccctcatcaaaggaacaatagctggtggaggtgttattcctcatatccacaagtcccttatcaacaaatcttcgaaggaatgaggaaggtttataacttataagttatttgaatcaaagatgaaaatcactgtaaatttaattatatcttttacctgtggataatttgccccttgcattattagtttggttgaactagaaccatccttcaaaagaaatctgaaaatttctgatttcttcatttgaattttgtgaactgatgtgctgacttttgtgctatggtactgcatgttagatgatactgcctgtctgtctagtctttattgtggaagatggttcttgtgtctcgttt

SEQ ID NO: 115280 - DNA, 436 bp, Glycine max
  Clone ID: PAT_MRT3847_75106C.1
cacgcaaaacaaataggcagtataatggtttgaataaatgtcctccccacactgaaagcatggtccctgtgcgagaaatagagaaataaaaaatgaagaacaatgaaacaaaagtaatactcctaagaaacaacacataaaagaaacaattaaaaactaataaacataaattcacttccccaattgaagaaaactaaagaagtccagatgtgaaaaagaagtaggggtgacagtggtcctaagacattcgtcattataaatgtcaaacttgcaaagaaagcaaaggtccaaacaaaagaggtgacacaaagcaacatttttttttactctctctgaccttcttcgtgtcatccccgacttccaactcttccattttcgttctgaaacaatgcttcaatttcacagaggcgtagttggctcttggctaacaaagcgt

SEQ ID NO: 115281 - DNA, 627 bp, Glycine max
  Clone ID: PAT_MRT3847_75108C.1
gaacacaaccaagagcttgtttttgagaagtctcttactattacacaattaagaatgaagggctctctctttcacctcctgtttgtgattctttttggactctctcattttgtatgcctcaaagcagtcccaattacaagaactgaaagccttatgcaagatcccaaagttattcatcatgcactggataatatccacaaccacaagattatcactgagataaaggggcagcaggaggagccaatttttgctgagaggatggacttggaactccatgactacccaccgtatggggctaatggtcatcacactccaaaaccaccatatccataatatgtgtacaaatgcttcgtgtttattgttattaccctatgaaacataatataatcttataatgtggacgcagttataagtaattaacatattgtctaagtatatataactgcttatgtacacatgataagtggagtccagaagcaattatatgtatcgtgtgaaagagaaaagaccaagtaaactgaattcaagtattcagtgtgattaatgtgaaaaactagatccttgttactttaactgaccaaactagtattaatattttttcttttattaataaatattaattgttaa

SEQ ID NO: 115282 - DNA, 335 bp, Glycine max
  unsure (1)..(335): unsure at all n locations
  Clone ID: PAT_MRT3847_75109C.1
ggcatatatcctttttccagtccgtgactttttgctgaccctgtaggatatggtttaaagagctcttgcacagacccatcaggatgagatactgacacgcggctgctcgcaccatcgattcatccttcagaaatgtatcatgctgactcctatgtttctgtcttgattccaaactctttgcttatgcctacaggaacataatcatgacctgaggtactacctagctacagcccgcactcggacccatattgaaaattgctgagatgctttccctcactgtntgatctgcgaattcaccatgggaagggtcactctttgccggggctgaggcctat

SEQ ID NO: 115283 - DNA, 183 bp, Glycine max
  Clone ID: PAT_MRT3847_7510C.1
ggcaaaccggggggtttaaaaaatttccttggggaagggcttggtgaaaaaaggatttaaaaaaacacgcggtggggccacaaaccttgccacaggggatttattttttggggctcgggcccgaattccaagggttacgtacccggggcttgcgaaaggaaaaatctttttttaagggggccc

SEQ ID NO: 115284 - DNA, 813 bp, Glycine max
  unsure (1)..(813): unsure at all n locations
  Clone ID: PAT_MRT3847_75110C.1
ggtccggttacgcattcgacccacgcgtccgccctgcttttccgttttttctcttcttctcgtgcttcggcggaaatcggcttagctcttcgaccgctttgctttttggttcaaggacataagagctcaatggcaccaacaaggaaatctagaagtgtgaataaacggatgtcaagttcaaatgacaattcccctgagagagatggaattaattcaaataaaaacaagctgcggaagaaaaagttgaccgataaattgggatctcagtggagcaaggaggaactagagcgattttatgaagcatataggaagtatgggaaagattggaagaaggtggctgcttttatacgtaatagatctactgaaatggtagaagctctttacaatatgaatcgggcatacctctctctgccagaggggacagcttctgttgttggcctcatagcgatgatgacagatcactacaatgtgatggaagggagtgatagtgaaagggagagcaatgatgcaccaggatctcaaaaacctgtaaaacgaaagcatgaagaagttcagcttagtgtctctaaagatcagtctcattcaattgcttctagagatgattgcctctctatattgaagaagagacgctntgatggtatgcagctcaagccttatgctgttggtaaaaggactcctcgcgtnccggtttataagaaagacgatacagaanattatgtttcaccttatagaagaaagcctgaagtcgactattgatgctaatgatgaatgaaagtgctcatgnntgtagcttttggcattaaactgaggctg

SEQ ID NO: 115285 - DNA, 479 bp, Glycine max
  Clone ID: PAT_MRT3847_75111C.1
caaaatgtcatctcgacgtggcggtggtaataatgttgagggaaaggtttacgttggcggtctgccagaggacgcaacttccgaagagctcgacgacgtttttcacaagttcggcagaattcgtaaaatttgggtcgctcgtcgtcctccaggttttgcctttgtcgaatttgaggacacgcgcgacgcggaagacgcagtgcgatcattggacggaacacgcatttgcggtgttaaagctcgcgttgagttatcaacgggccgttctcgccgcgatcgcaatgaccggggcggtggtggtggcggataccgaatcggcggcggcggtggcggcggcggttaccgtggcggtggagggaaccgcgactattcaagatctcgttcgcgttctcgttcgccgtaccagcttctcggaggaggaggaggccgttctcgctcgcgttcccgttgaaaaatgggagggatctacaatttccgaa

SEQ ID NO: 115286 - DNA, 316 bp, Glycine max
  Clone ID: PAT_MRT3847_75112C.1
aagaattcgcggccgcaggaattttttttttttttttttatcagcaaacataatatcatatattaattgagtaccagaggtactggaaatacatattacaatccagatttggtcccaagacatatggttttcattgaaccagaatctgaggtataatttaggttattacagacatttgctctaatgttctatcctgctctattgagaaaccctgctctaatgttagaagaccagtaattgtagtgagtgttgaaatccttctccaaatttgctggtgccgattcggcaccagcggcacgaggagatgggagtggag

SEQ ID NO: 115287 - DNA, 251 bp, Glycine max
  Clone ID: PAT_MRT3847_75113C.1
atgcggccacgcgtccgcccacgcgtccgcccactcgtccgctacaacggaagaagaacttacctgcaaacttgggaaggatcaaagagaatggctcaagcaatcgcatcaatgactagcttacgtggttcctctcatgctgagttgcaagttacccttatctccacacccttgaatgttattgagtccaaacagttcgctctcaattacacacgcaacatttacagaccctgcacacaaacaacattttt

SEQ ID NO: 115288 - DNA, 226 bp, Glycine max
  Clone ID: PAT_MRT3847_75114C.1
ctcaatataatgacttgaaaagttatcttcttggggatgaggctgagaaagaaaatctgagaaagcaagttttccagctaaagggtgaactaaagaaaaaagacgacgcattaatcaacattgagaagaagttcaaggatagcaatggacgcacacagctttctgagggaactaaaacaaattcaaagaacaaaaagggtgcatcaattcctcagagctcaaaaga

SEQ ID NO: 115289 - DNA, 174 bp, Glycine max
  unsure (1)..(174): unsure at all n locations
  Clone ID: PAT_MRT3847_75115C.1
tacggctgcgagaagacgacagaagggatccaacacttcttattaggtgtntgatttcagaaatactttttgttagcttgaatacttagattgtcacctttatataactaatacacttgaaaaatcctaggagataagttaacaaagatgattataccttcatttaaataattt

SEQ ID NO: 115290 - DNA, 463 bp, Glycine max
  unsure (1)..(463): unsure at all n locations
  Clone ID: PAT_MRT3847_75116C.1
tttaaaaacgtttatatataatcacgattttaaaccacagaatatgaaaataattgcattacatgttaccagctgggnaagatagtctcacgaaaaagtgatgattcgcgaccttgaagagcagggaggaggccatgacaaaatcgcgctttcattagagaatggggaataggccttacatacggatttgatactgagcacgctcttgtatctccaatcagggatatggaatattggccacattcaagattctgaaagcaacctctcgaaattgcgagttgatgaaaattaggaagctacatgcacagtcactcttaatagatgcctctgggggctcagaacgaccaactccaggaaagtgacaccagctaaaacctttaggctagaacttgcattataaatcgaatcgagtaataccttcaacaggattgtagttagcgctagactgcgataggagtttaat

SEQ ID NO: 115291 - DNA, 367 bp, Glycine max
  Clone ID: PAT_MRT3847_75117C.1
catgttcaaccctcggggagggcaaaaatgtctgcaatcaaaatcaacaaatacccgggtcttcagcaagtttttaatagtccaaaaactccatcccctacatttgaagagacaccaaaaaaaggcttaatgctcctaacagggtaacaacaccagttcccaaacccgattaattcctacttttaatttgggccctagcaagaccctaattcccactttgacaccaacacataatttctatacaagctccttttttttcatgaccaccttaaaaagacttcttggcagctaatacaagcgggtcattgacccgtgatctgtatccccactcgttgacttaccaagaaacaggcttaacaaagttttt

SEQ ID NO: 115292 - DNA, 374 bp, Glycine max
  Clone ID: PAT_MRT3847_75118C.1
gaacttaacacggtttacacttttcaccttcatccatacgttgttcatctgggttatgcctcctataggcatctaccctccttttgttcttggcttacagcaagtactttagcttaattatctccagcattttatttgtgcgtcatgtggtattcatctctcgatgagttaacacatccgtggatctcaacattaatctcacagggatcattatcaaattctcatataggacgtcgaaaacaactttttgtcaataagtttgcatgtgacgaaatcttccagtcataaagtctctgctgcctttttggcgtatgacttaatgtgtgtaaattcatgctgctctaagttaaccgaaatgctcacagatatgtatg

SEQ ID NO: 115293 - DNA, 433 bp, Glycine max
  Clone ID: PAT_MRT3847_75119C.1
aaaggggcccttggaaaaaaagcatttttttcagcgtgtccaacttttaaccaatttacaggggccatcaaggggggcccaaaattcttttggaagctttgccaacaaaacttgttttccaatgaaacaaaaaccccctactttttttcccaaaacaattccaaagctccaaaattttttagggggagggggatatcagggtttttcacttaggggttggggggggcttcaaaacagggaaggggaaacagggctcaaaggggctttcaaaggaattaattcaggggaagcccttttgggtaggggcttataaaaacaaaattccctaaatcatttccaaatatgcgggggaaaaggggagcctccccaaaaatgaacccccggcttttgggcaaccaatcaagggggccaaacccccccaatgttttttatg

SEQ ID NO: 115294 - DNA, 147 bp, Glycine max
  unsure (1)..(147): unsure at all n locations
  Clone ID: PAT_MRT3847_7511C.1
acacaactcccaacttccaattcacaaaaccgtnacnatttaccaanccacttcacttcgccnantacaacaacagtcgattccattncanaatgcattttcccncagtttcccagcgaccaaacagggctagttncngnccnncnc

SEQ ID NO: 115295 - DNA, 704 bp, Glycine max
  Clone ID: PAT_MRT3847_75120C.1
cacaaagccatcatgaagaacttacatatgttcattgtttcaacacataatttaacgtactcctcttatctcattaatgtttattggttaccaaaaaattacaaaattatatgttcaataggaaataagatcttgtgatttttaataaatttcaattaatacctcaaaagaaataagatcttgtgatttttaataaattaaagaatatcttaaaaagagtgtatggttggccgcctctcgctcgccagttagtcaatttcttgattgtccaactactgcagcacaaaggataattcgatacatcaaaatttcaccagctgagggtctttgttttcagctagcactgacactaaactcaaaaaggtttagtgattcagactggggaacatgtttggataccagaaggtcaatcacgggtttttttttcttggattttcactggcttcttggaaaagcaagaaacaacctactatatctaaatcctcttcggagatattagatgagtttgatgcttaagggagaaggaaacaaaaaaaaataaaaatcgtgagttcaattttctttgctaacaaaactaacactcagacaaattaatattagctgataaaaaaaatctaagtcctcctcggaagcagagtacaggatcttagttcaaatcgtatgtgaattgcacaatggttgacaatgagtaagctgtaatatgt

SEQ ID NO: 115296 - DNA, 677 bp, Glycine max
  Clone ID: PAT_MRT3847_75121C.1
gcaagcaacatgaaatttgcaatgaatggatgcatagttattggaactcttgatggagctaatgttgaaataagagaagaggttggagaagataacttctttctttttggtgcgcgagctcaagaaattgtcgggctacggaaagaaagagttgagggaaagtttgtaccagatccacggtttgaagaagtaaaggcatatgtaagaagtggtgtttttggcccttacaattacgaagaattgatggggtccttggaagggaatgagggctatggtcgtgctgattatttccttgttggcaaggacttccctagctacctggagtgccaagaagaagttgacaaggcttatcatgatcaaaaaagatggacaaaaatgtcaatcttgagcacagctggttcattccaattcagcagtgaccggaccattcatgagtatgctagagatatatggagaattgaacccggtgaattggcttgaaaagttactcacaagctggtgagtttttggcatattcagcttttcatgtccctcaaaataaaacttcgcgagggcttgcaactttgagaactagttgaattaattctcttttaaatcacctagcctgttgaatataaagtatacaagtgaacctccttagttattctgggagtgttaatttattttcattcattttg

SEQ ID NO: 115297 - DNA, 752 bp, Glycine max
  Clone ID: PAT_MRT3847_75122C.1
ttacgaattcgagctcggtacccggggatcctctagagtcgacctgcagatgacttgtggcgaaggagaaattatgtagtaactggtaagaatacccaacactttccaaaaccaacatgtttgactacaacacaatctaaaaggacaaaagaagcttattagagatatacccgttgcattccataaacatttcatgtgcatttgtaatttcaactaatctacaactgtaatcaatttagttctctagttttctgttaggaaacaattactgttataattatctgctgagtcagcagttagtaacacggttgtcctatctaattcctcctcttcctctacccatccaactttatcctctccaaatactacttctccctctacacaatctccttcatctccaccatccagaccaacaaatatatacaccaaaacaaaacacatggaacttgacattttctttcttagggaggtcctcaacaaaagtctcatagatcaacataccccagcccctgatccaaatgcggactttctcatcaagctcctctctcctcttcagtttctggccatacaagacaaactcagggttgttggcaagttctccctcactcaaccaccctgagtttgggatagttgtatattttgttgatatttcaaaaggtaacatgtctatttaattaaatgtagaaaatcttttttaattaatctattgtttattttaaaaaaattattttgtttgacttggtcttattgaa

SEQ ID NO: 115298 - DNA, 320 bp, Glycine max
  Clone ID: PAT_MRT3847_75123C.1
ggggcacgaggcaagatcaagattatattgtgtgcttaacccatgctgcttctattactccaatggcctccaaagagcttgtaaatagttataaaatcagatatttggattcccaataatctctatttatttttatgtatctttgagtaatacaatataacaattgaacaataatcttttatgacatgagaaaaaattttgcgatatagttcttgataagataacatgaatgtacacaattattcaattcaaaaaaaaaaaaaaaaaaaaactcgagttttttttttttttttttttttttaattcaataaaggaaatta

SEQ ID NO: 115299 - DNA, 461 bp, Glycine max
  Clone ID: PAT_MRT3847_75124C.1
gctctttcaacccgaaagcctcctcatttatgcttttcagtgtttttggttttgagaaatggcttttgctaagtggttttgttaggcttgacggctgtactgattcatttaggatttaacttacctaaatttttcatataaaaatgagagcagacatgtattgattctagtactcaactcacttaaatttttctttataaaaaaacgatgacttttacttcttttacattctatttatctggcccaacttttacttgctgaaacaaaagaaacaattcttcaaacactagtttgtacttggaaaagatactactaagtaggggctcaggtaggtctggaaaatgtgaaagttttttttttttcctttggttaagccaaaacttttcacatgtgaaaaatatggtagacgaaacattttctatattgagacaaactaccctatgattgtaggctacttctct

SEQ ID NO: 115300 - DNA, 298 bp, Glycine max
  Clone ID: PAT_MRT3847_75125C.1
aaagagaaaaaaagttttattccccttaaaaagacaagagaggggaaaaaatcatcgggtaaaacaatattaaaacaatattataacaaaaaaaccggtttttcctttttaaaaaaattttctccccccaaaaaaacatttcaaaaaaatacacaaggccaggaacattttaaaaaattaaacaagcccagaaacctcttataatattacacaaatcaggggcaactttggggtgccaaaaaaaattttccttggaaacttgattaaatcccccaatccttttataactaacggaaaa

SEQ ID NO: 115301 - DNA, 733 bp, Glycine max
  Clone ID: PAT_MRT3847_75126C.1
ccacgcgtccggtcagcgagtcctagtagtattatacctgatcaaactacccttgtctcaaggacagttgagagtggcagctcttctagtaaatattcatttaaccattcaagacatgttcagtccactcttaacaactttgtttctgtaaataaaagaaatcgtgatagtgtcattagagccttatctgaagtgcctgttcttagaaatcaagctcctcattgtcaattgaagactgcaaatactgaaacacaggacttgattacaagatcatcactttgttttgaccaaagtgatgaacctgctagggcgagtgagattgaatctttgaagcaacttaatcctgataatgtcttctacaaaaatgaaaatgcagtttcttttaagggtgactcctctgttagagaacctaaatctaatatggaattagatctaaagaataatacacctctaggggatacagcatcaattactccttctagcattgatatgatcactacggatgttttggcctcagaccctccattacattcatcacctgtgtggttaaattcttgcaagtcttccagtaacaagatatgttccaacatgcaattttcttttcaagagcttaagaaaaggagagagaagaggctttctctgttgcaatccagtaaatttggatgtggaaaagctaaagtcaaaagtcactatttcgctgcaactttggaagattttacatcagaaattggag

SEQ ID NO: 115302 - DNA, 152 bp, Glycine max
  Clone ID: PAT_MRT3847_75127C.1
tcctcagtgtctctatcaattcaagatttggcagcttatgaatccagaaccctgcctcctcttggatgattttttttttacatttgtaccagggtagaactaataagcctttgaagaaataacactgatctgtatggctttttttatttttc

SEQ ID NO: 115303 - DNA, 432 bp, Glycine max
  Clone ID: PAT_MRT3847_75128C.1
caatctgcttacgaactggactgctatgagtggatactttgattctgtattctctagatatgtagacaggtatccagtcgctgcactttaggcgctcgagatcgagcgtgtgcttgggcctggtggaatcggtgccgttattgtgtccacgagtgactcaatgccaaataatactgattagagctagtaccccagtttcatcttggctgaaaacttgcactgtgatgcatgtgagccatgttaacaacttaactctggttgcatataagaagaacactcgaagaatatcagcatttggaggagccttgcctatcgtatgaatgtcgctctgtgacatggaacaagcgtgcgattccaaagctggagcctattgtgaaggaaagacctgcgggatttgacaaatacgtggcttatttaccaatgcttgttgat

SEQ ID NO: 115304 - DNA, 281 bp, Glycine max
  Clone ID: PAT_MRT3847_75129C.1
ttcccttacaaagctaacacctacacaaaaatgcttaaaatcaataaattcttttggttggccaacttttttattttaacgatacttccttgattcacttgcctgcggttgtaagatcgacttaatgattctggaaaggtttaacccttcataagttgctgttttttcattaccctactatttttttggtttgaattgacccttgattcttaagggagcctcttatttaagtgtcctttgtaccttgtgtgcttgaaagtccatgttaaggtttgaagggg

SEQ ID NO: 115305 - DNA, 1029 bp, Glycine max
  Clone ID: PAT_MRT3847_7512C.1
aattcggctcgagggataatggaagctagtcttaggagggcgaggcagaggaagcgataatggcaataagaggcataggaatgtcgttctctgctccatcaacaacaagacccatactttccctcaacccacgattcctttcagcgtcatccacaatcccattatttctcgttcccagcagaagcagttatctgttattatcgttctctttcagcaggcccgaaacagagtgccctgttccgcacgagcagcagcccatcaacgagtaccagtccctctcgacttcgttcccgttctcgtgggccgccggcgacgtggtggagtacgcctcgcgcctcttcgtgacgggggcgtccttcgcgctgctgctgggcctccccgtggcctggttcgggtccgccggggcccaggccgagcccgccaagcgcctcctctgcgccgcctccagcggcctctttgctgtcacgctcgctgtcgttaggatgtatcttggctgggcttatgtcgggaatcgcttgctcagtgccaccgttgaatatgaggagactgggtggtatgatggtcagatttgggtgaagactgctgaagttttggcccgcgatagactccttggatcattttttgtcaagcctgtactgggcagattgaaaattactctagtgagtcttgcaacttcattacttgtatgtgcacttatcctcattaacattgatggggaccaaaacctgacatcaaaagaacctagagttcgagttgtacctggagtttacaatgatgattctgcaagattatttgaaccagatgcctttcgtgatgaacttgatcttcaataatacatgttgaccgcttatactaaagaattatcaacgctggaccctccattcaatgacagcatgtagttatttgggaggaacgggtgctccatatgttcagtatcaaattctataatgtacatatcttatatttgcctttttacacaccatatgtttactgtaaagttgaaaataaaatgaacatatgtacattttc

SEQ ID NO: 115306 - DNA, 472 bp, Glycine max
  Clone ID: PAT_MRT3847_75130C.1
aacagaaattggaactttttaaaaagtaacagttgggcctagttaacaaaaatctttttgcttttccacaaataaacttttttaaaaatacataatccaaaaaacgctccacagtctatagcacggaaaaggaaaattacataggcgccagccatatctggggaaatctttttttttgggaggagggggctccaaaatcttctacgtttaaaaagaggccctacgagcattcgatatcggattcatcgggcccatcgaggaaaagttaaaactcatggggactccatctgcaaataaagctaagccaaaaggtacccattttgattcccattaaacgcagtatacaaaaagcctggggggacaaaggctttctttcctcacaaacaacaaaatccgaaacaagctccacaactcctttattaaaccgaacaggcatgccttgtttcctgaaaaaaggttccatctcaggggg

SEQ ID NO: 115307 - DNA, 265 bp, Glycine max
  Clone ID: PAT_MRT3847_75131C.1
gtccatggttgatcgcaagttcgtgaatggtgcatatgggctgttgtgttatcagttacaaagggaaagatcagtgaaaatcgtaattcacaagtgagtcaggtcagatcagatcagatccgatggaagagtacccggaagagttgcgcactccgccggtgacgctagcgtctctggtggggtgcccggagctccaccctctgatctccacccacttcctatcggcgcagctcccatcaacaccctcgccctccccgatttctcc

SEQ ID NO: 115308 - DNA, 446 bp, Glycine max
  Clone ID: PAT_MRT3847_75132C.1
gcagattaaatggcagaccgtacagttcgacatgttcgcaaggggcgtataattctttgccgcccaaagaggacactaccactcacattaattccccaaacattcaggagtcagggattcatccaagacacgcgttaagctcaaaatcaacatccactactaaattcctaatcttctaacgctactacctcagtacactggtacacaagcatcgtacatttcgtactggctgtggctgataagcgcacgtttttttttcaccagtacaagcagggaggcgacgccctgggtcgcttgctgccggcgccccactccgcgttcatctgcggcacccaccgctcgcggctggcccgctcgtcggcggcgacagcgacgccactgtgcagctgctcccggccggcccacgccgcgtaaccgtccggcaccccaccgatctgagccagcag

SEQ ID NO: 115309 - DNA, 1231 bp, Glycine max
  Clone ID: PAT_MRT3847_75133C.1
gagaaattgaaacaggagttgaaggaggccatcaaaattgagttttcgcaaacgggatcgcaatactcatccccgattgaggcaaatatacatgtgttaggttcacaggcttgcacaaaggggagcaatgctgaaactaatgcgaacccatctagggaagaacatgtttctcatgtgataccaactatggggttgtatgtgcaacgtcagcattctacacacttggtagccttgggaaaaatatatgagggagggtctaccatacacaacatggcatatgcagatgatatcgtaagggttagtgttgaaaaagttattgatggtgatgctcaagtctcgttgccgatgtcagaaattcagtatgtcaggcagacccttcacacattcattgcatggccgaaacctcttgtaaaactggtatcaaatgaggattcaactattactccaaataaagtgattgaaattgttcaaaggtcaaatgatgctactgtagatgatcccttgcatgacttgattaagatcgtgtatgacatttacgagaagcctattgagttgttgtgggatgcgactaaatttgggattccaaatgtagatgccttcttgttaacatatgctgatgtcaatgaaataatctcaggtgacaaatgtttgaacatagttatactatagttgtggatgatgtttatggatgagtggagttctagcttgggtcatggttcgatgtatggattccttgagcctcattcaatacacaatacaaaggatagacgtggtcaatgtcaagattacattgaaagatgtgttaaggaatcccaacgagaggtctacctaggagtttatttgaatcgggcccgttggcaactggttgttttgtgtcctacaaacaatgttgtcgtgtggttttgttcgttgtgtaagaagcctgatgttcatatcaaacctgcaattaataagttaagttttatattataagtcatttaatgtattttaaatatggatacatgaatagttttgtcctcatttatacgtccaaatctttctatcagtgcgttgaagacattaaagactacttctaacgagccacattcaaagcggggggctatgagtgtgactattatgtcgtgcattggatgtggaacatagtaagcggggagttaaaggatgattggagcatgtggtttggtgatgacacactcctaaacatcgagaccacaacatcaatactcaaaaa

SEQ ID NO: 115310 - DNA, 412 bp, Glycine max
  Clone ID: PAT_MRT3847_75134C.1
cattgaaagatgtgttaaggaatcccaacgagaggtcgacctaggagtttatttgaatcggttagtaatatttattatatccctgtaaacaatgtttgtgttattgatacctaattattgtcgaattcagggcccgttggcaactggttgttttgtgtcctacaaacaatgttgtcgtgtggttttgttcgttgtgtaagaagcctgatgttcatatcaaacctgcaattaataagttaagttttatattataagtcatttaatgtattttaaatatggatacatgaatagttttgtcctcatttatacgtccaaatctttctattcagtgcgttgaagacattaaagactacttctaacggtaagattgatcaacctacaccttagtggattgaagtaatgggtagtcata

SEQ ID NO: 115311 - DNA, 579 bp, Glycine max
  Clone ID: PAT_MRT3847_75135C.1
gcagaagctgaagaaaagtgtattgcagaacatcaggtttacaatgttttccctcttagatgactactgtcatctggactgatgtttcatctcaaaagtgaatctggaaaacatgcttgcatagttatatggtaccgttgcataaacacatttataaacaagtatgctagcctgtggttgaagtttaataacttgaccaccagaagcagttccagaatagaatgcacccactttcatccataaaccgcaagcaaattgttccattaagcaatatgaatctatcaacttttaccaagttatttgtgttaatccctatcaagtactcttattcagacaaaaatctcctctcttgatttccactagtaattatcaaattttatgtacaagttaacaactttagccttggaaatatgcataccataactccagtaaagccttatctcactaggtagggtcagttacatgcatcacattacactcttggttctattaaaacaaatttcaataaatccaattcatcttgagtgtgacaggtaacagaaagtgctaaggaatttgtcttgtatcttttatttaata

SEQ ID NO: 115312 - DNA, 898 bp, Glycine max
  Clone ID: PAT_MRT3847_75136C.1
tgatagttgtggttcagcgatgagtggaccgatgtagaaaaccggaggtgcttctttcgcgtctgcaaagcggctcgagccggctacggcgttaaccgccagaggctcaagctccggaaacgtgttcaccacaaccccactcgcttcaccaaggtgcgtgcccagatacagcatgtcccagtacgcagagtcgtccctgtccaacatgggttgcggcatgttcacggccttcagcggcgcgttacccggcacacgcacttccacaccgaccatgtccttaaacgacacgttcgtttcttcatggagtttcgggaagtacgagacgattgcgagaccggcagcaccagaagcgaagaagtagtaaactgggattcccattgaggaagttgtttccgtgacagagaagcaaaagaggtcggttatgaaggcttttatggtggtgctggtggatttggagattttggcgagggtggtggcgacgttgggggtgtttcttttgatgaagttgaagccctttgcggcgaagctaaccgtggtggtggtggggggggcgatgtgggggaggcggtggaaggagatgtaagggtgggaggtggagatgcggtggacataggcgtcgacggagggatggtcgaggaagccggtggaaaggagcgttatgatgggataactgtgtgtttggagaagcttggcgagttcaaccatggaaacaatatggcctatgcctggtgctggatacaacactactgtgtcttcttgttccatttttggtcggtgaaccctttctagttaattaatgttgttttataaatttgaactgcatgtgcttaaggtcttaaattttgttggttgggtaatttatatgagtagtgattttctccaaggataaatatattat

SEQ ID NO: 115313 - DNA, 466 bp, Glycine max
  Clone ID: PAT_MRT3847_75137C.1
cggctgcgagaagacgacagaagggcccctgaatgttcattcaatagctataagttgacatccttcctttcattttcgggcacaaggaagattacccttagcataagtatattgtttttctaagacatggtgttctcgcgaatgatttatttttctttgcaaaaagcatgtttgcctttttaggtggaaaaaacccggtggaccattcggtcctgctacccctttttcggagccccatgaattgcgttttcgttcatgcatcctccacccacgagtttggagccatgcgtagtggttgcttagtgcaattctccattctctacccctttttcggagccccatgaattgcattttcgttcatgcatcctccacccacaagtttggagccatgcgtagtgattgcttagtgcaattctccattctctacccctttttcgaaccccatgaattgcgtttcgttcatgca

SEQ ID NO: 115314 - DNA, 470 bp, Glycine max
  Clone ID: PAT_MRT3847_75138C.1
aacgcatgactttattgaaagaatgacgcgggcataaaggccaacaagtgtacatgatcaggccaaactaataccatacacgatattaaacaaagacaataacaaagcccctcgtcgccgactcatccttaggcacacacactaaaggatctcaggttatcaccacgttcaacaccaaccaactaagtagactctacagctgaatgcagctcaactgctataagtcagtaatcaaaggccagtactgtgtgccttcgggcactcacgctctttagggttcagcacgtgccagctgctccgatcacagtgaggtggcttctgcgatcaagaaggatcggacaccaggagagataactgggtatctgaggctcgatgactgatcacaagaatgaatgactagtttcaggcccatgtgccgaaaaacgagcacacctaccaatgcctgcaacatcacagctatcttcaagaga

SEQ ID NO: 115315 - DNA, 1256 bp, Glycine max
  unsure (1)..(1256): unsure at all n locations
  Clone ID: PAT_MRT3847_75139C.1
ctcggaggtgcgaagagtggaaaacgaagacggaacgtgggaagtgaaatttttttattccaaagccgcaaggttgatcaatgtagacgatgttttgaaaacggttaaagaaaggaaaagttgtgtcgaaaggtcaaactgggtttggtacgaagggaagtgcatggaaaacgacatgcagttcgtggtgaaggaaatcagcgacttgaattcacttccaatgagtatgtgggaagagacagtaaaaattagaaaggttcgtcacccgaatatcattaaccttattgcgacgtgtaggtgtgggaagagagggtacttggtgtacgagcacgaggaggggnaagaagttaagttaaactgttgacaatttaagttggcaacggcgttgcaaaatcgccgttggcgtggcaaaagcacttaagttcttgcattctcaagcttcatccatgcttttgattggagaggtgtcaccggagatagtttgggtcgacgctaagggcgtccctcgccttaaggtcacccctcccctattgccgtgtttggatgtcaagggtttcgtttcttcgccctacgttgctcaagaggtaatagagaggaaaaatgtgacggagaagagtgagatatatgggttcggagtgatgctggttgaattattgacgggaaggagcgccatggacatagaagctggcaatggcatgcataaaaccattgtggagtgggcccgctattgctactccgattgtcatcttgatgtgtggatagatcctgtgctgaagggtggagatgcattgagatatcagaacgacatcgttgagatgatgaatcttgcactgcattgtaccgctactgatcccaccgcaaggccatgcgcaagagacgtactcaaagccctagagactgttcacagaaccactttttgttgagtttcaccactcaaaaacctcaactctctctgattttccatattatctgctgagcattctctgaagtctgacctatggttatagattttgttttttcttgttttctttttcttttcttttctttttttaatttgagttgtcactttttgtttaatccttatataatttgtttaaggtttttagtttagcataagtaagttgttgatgaagggattgctagggatatgtttgcttgatattttacataagggtatgttgacatcatactgctgatgagtgtaaagtaaatgtaaataagttgaatgtgattaataaattaattatatgaaagca

SEQ ID NO: 115316 - DNA, 341 bp, Glycine max
  Clone ID: PAT_MRT3847_7513C.1
ccaggaaaggatgggccgtccattttttggggtggaggcccaaaaacgggggggaccacttttggtacatggtccatatttggcaaactaggggaagattttttgatctaccaggggacaggttacccttgcattggctttgggagcaaaaagattttaaaatacaatcccccccaacaaaaacacaatttttttaattaccttttttttttaggtggaaggaacaatacccgccggcataaaagggtgttaaaacaaagatgaggggggggcaacttttgtttttaccttttcaaaacattcggggttttgggtgggggggataaaatggggggcttttt

SEQ ID NO: 115317 - DNA, 230 bp, Glycine max
  Clone ID: PAT_MRT3847_75140C.1
cagggatctggagctttcaacccatcatagtcgtactacatcatctacagcccactgccatactttgtcattgctctatagtcatttttagtacctattaacacttttacctgaagcatcccaaaacacttaccctctacacatcaccatttgctatctttaatcaatttgcactaaagctttcaattctataggactcaattctgctacttctacataaatacctgctc

SEQ ID NO: 115318 - DNA, 895 bp, Glycine max
  unsure (1)..(895): unsure at all n locations
  Clone ID: PAT_MRT3847_75141C.1
agggggggatccgtgtcccgaaaacgcatgtttaatgggcaactaaacagacaaacccttgatccttttttgcgactactccagtccggttctggtattctctcactcgcgatttcgtctattcttgtttggtgaaggggaaaagctcgctcactttgatcttcaaatctcaaaacgcgttttgaggctattgataaatgaagcatattgtgaagattttgacattggtaatggccaatactgcgttatgggttggccttctacaaacttctatgattccatgcagccatacttggttgttacccatatattttgttgtgtctttaggatgttatggtcttttaatggttggagttggtctagattaattttccaacctgtccttaagaagctatattattgccttaggacattttctaggccaaggaatatccgaaccaaaaaggagttgatgttagttccagttgatgcagtctcatatctcatgatcttctgaattagcttctgaaattacctgattgggagttgcgaaagatttttggcttttaacttcatacacaaaatactaatgtggggtttgttttcgattttggcttatgtacatgaacttttcagtataatcaatggatagctttttctattggtaaaaaaaaaaaaaaaaaaaaaaaaaaaaaaaataaaaaaaaaaaaaaaaaaaaaaaataggaaaaaaatttggggaaaaaaaaaaaaaaaaaaaaaaaatataaaaaaaaataaattaaaaaaaatgaagggggggaaaatattaataattaaaaaaaataaatagaaataannggggggggccccccttttttgtggcttgtccccccggatattatttttggcccttgcttttgggggttacaatttt

SEQ ID NO: 115319 - DNA, 1288 bp, Glycine max
  Clone ID: PAT_MRT3847_75142C.1
catgacttgattcaggacatgggcaagcgaatagaccaagaatcctcagaagatccagggaagcgaaggagattgtggttaacaaaagatataattgaagttttagaaggcaactcgggaagtagagagattgaaatgatatgtctggatttatccttatccgagaaagaagcaacaatagaatgggaaggagatgccttcaaaaagatgaaaaaccttaaaatacttattattagaaatggtaaattttccaaaggtcccaattattttccagaaagtttaagattactggaatggcatcggtatccttctaattgtttaccatctaattttcctccgaaggaagtaaatttacgcaagttcccaattattttccagaaagtttaagagtactggaatggcacgggtatccttctaattgtttaccatctaattttcctccgaaggaacttgtcatatgcaagttatctcaaagttacattacgtcatttgggttccatggctcaaggaagaagttcaggaagctaaaggttctgaaatttgactattgtaaaattttaacagagatacctgacgtatctgttctcgtaaatttggaagaactttcatttaatcggtgtgggaatttaattacagttcacgactcaattggttttctaaataaacttaaaatattgaatgcttatggttgcagcaagcttaccacatttccacctttcaacttgacctctcttgaaacacttgaactttctcactgttccagtcttgagtattttccagaaatattaggagagatggaaaacataaaggcacttcatttggaacgccttcccataaaagaattgccattttcatttcaaaatcttattggactccgtgagataaccctgaggaggtgtagaattgttcggttacgatgtagcttagccatgatgcccaatctgtttcgattccaaattagaaattgcaacagctggcaatgggtagaatcggaagcaggtgaagaaaaagtggaggttagatatccaaatgtgttagacttagagagctctgcatcagaaagcccctccttgctacaaaccatagctttggggacacgcaagttttccgtagcttttttcttatttttttcatgttttttattttattattttggtttaagttgtcaaaaattcacttaacccaactgatgttcaccctattttcatcacgtacttttgattcatttatattcatctttcacgactttatgcattttctatatataacctttcaagttttatctttc

SEQ ID NO: 115320 - DNA, 411 bp, Glycine max
  Clone ID: PAT_MRT3847_75143C.1
cccacgcgtccgataaaagaattgccattttcatttcaaaatcttattggactccgtgagataaccctgaggaggtgtagaattgttcggttacgatgtagcttagccatgatgcccaatctgtttcgattccaaattagaaattgcaacagctggcaatgggtagaatcggaagcaggtgaagaaaaagtggaggttagatatccaaatgtgttagagtatgaaaaagaaaagaaagaagaaggtgtgttagagttagagagctcactcatcaaaggaagtggaatccatatattcagagaagaaggcagtatggaggaagatattcgatttgatgatccatatctcagcagctctgcatcagaaagcccctccttgctacaaaccatagctttggggacacgcaagttt

SEQ ID NO: 115321 - DNA, 617 bp, Glycine max
  Clone ID: PAT_MRT3847_75144C.1
aattttcctccgaaggaacttgtcatatgcaagttatctcaaagttacattacgtcatttgggttccatggctcaaggaagaagttcaggaagctaaaggttctgaaatttgactattgtaaaattttaacagagatacctgacgtatctgttctcgtaaatttggaagaactttcatttaatcggtgtgggaatttaattacagttcaccactcaattggttttctaaataaacttaaaatattgagtgcttatggttgcagcaagcttaccacatttccacctctcaacttgacctctcttgaaggacttcaactttcagcttgctccagtcttgagaattttccagaaatattaggagagatgaaaaacttattgatgcttcaattgttgggccttcttggcgtaaaagaattgccagtttcatttcaaaatcttgttggactccaaagtttaatcctgcaagattgtgaaaattttttgttaccaagtaacattattgccatgatgcctaaactgtcttcattgctcgctgaaagttgcaaggagttgcaatgggtgaaatcagaagagggtgaagaaaaagtgggctcattgtatgttcagatgtagatgac

SEQ ID NO: 115322 - DNA, 209 bp, Glycine max
  Clone ID: PAT_MRT3847_75145C.1
aggttttggctttttttttatgtaacatcctcaacaaatacgagacgtggcattctcattattgcgccccccacacaatgggggaaccattttgcaacacaactctatcatattaaaaacctaactcctacaaggcctgaaaccaaactatatcaaatttaaaactcgtgttacaacaagacaatctatcccccgacttataccataca

SEQ ID NO: 115323 - DNA, 378 bp, Glycine max
  Clone ID: PAT_MRT3847_75146C.1
gggactgcatagggggagattgtcacttgtcagcactcaggagtgatatcaggtgaagaagcagaagcagacgaaagaggcagaagatggtgagggtggacatatatcggccaatgaccctggagcaggttatggtccacaccgacatcgctggcaatgccaagaaatgggcaacggctcaggattgaccgcatttactattatatggaccatgtggctgcgactagaaaacgctaatgatggctctgatgcggcaaaagttcggacctggcgccgaaaaggtgaatgcggatgataggacctgtgaagcggatgctgggagtagagctagtgatgtagagctagcagcagtatcaagcgccaatcacattgaaatga

SEQ ID NO: 115324 - DNA, 675 bp, Glycine max
  unsure (1)..(675): unsure at all n locations
  Clone ID: PAT_MRT3847_75147C.1
gaacactaaaaattggcattgcattaaatagataataaggaaagattacattacaaggacatttgactgctagactctcaacaatagatgtttagtttctgattgttatgagggactttacaatttatgaattaacgtgaatagaagaagacagatggatagaagggaataaggggataatgaacatagaggatttctcctatttaagatactcaggcttaagatgtatttactagagagttcttagtctcgatttctcgggattggtctttctcctttactttctactccttttataggtctaaggtagctgagcgaactgtctcgatcttcaactttttcttcaaggttttttttcacatttttgcatcaattttccttcaaaacacatgaattttttttttgttggtaaaaaattacaatgatgttaatttctgtattatttcattaaaaataacgataaagtgaagaaattgtgatcatttttaatcaaaattgactatcaaattaactcaaattttggagttatcaaatatgatccaataaaaattttgattntgtaagttttgtatctattcgctttttgatttattcgattttcagttttttagattgaatntttttatctatccacattggattgaaccggnttatggagtgcatgtaatgtgcatg

SEQ ID NO: 115325 - DNA, 854 bp, Glycine max
  Clone ID: PAT_MRT3847_75148C.1
gggtacttctgcttctggcagaggtggaggccgtgggtttgactatgagtcccagaggaatgatagggatcggagcccagacaagggatcaagttggagggatcgcttcaaaagcgtcaaccgggatcgcagtcgtagtcctaacagggccgcattacctcaacattcccaaggtggcagctttcacaaggcaatgatggaacgtggtggatgggatagtgatcgcaacaagagctttaaccgggaccgaagccgcagtcctagccctcatagacaggtgaagggcccagcagttcgcgaacattccccagtttacagttttcatcgatcaatgatgggacgaggtcaatcatctccgtcatctcaacggcagcgtgcatgcagtcctcaccgaaactcaaccccctcccagggtgatggaagacatggtggatctcattcatcttacaatggagaagtggaggaagggatgattcccgaggaagaaggaatgataggtcaagatgatcctgtaaatgtggattaggattttggttatccagacactatctacacataaatactaaggttgttttggtcttattacattagtggaagggaattgttattggaacatgagcaagttaggatttggtagtggaattcatggcaaatatatattttgaggggctttgtagaagcctggaaattgcatagatgaacctagtaagaatattgcggggttttttttgttattttggtaaaactcgacttcatatagatgaacagaaattattcaactactatcattttgatgttgtattcctccacttttctgagtggcagcatgttattattgaaatctattggatcat

SEQ ID NO: 115326 - DNA, 170 bp, Glycine max
  Clone ID: PAT_MRT3847_75149C.1
ttcggcttgaggctagcaacaacgcgatcggactcgttaacttgctgaccttacttctctccatcccaaacctggtggccggagtgtggctgaccaagcatggcaccaccaaacgcaagcaactgctgtaaaaacaccacatctcactcgtacgtacttctcatgctcaa

SEQ ID NO: 115327 - DNA, 464 bp, Glycine max
  Clone ID: PAT_MRT3847_7514C.1
ttgtgaaataagcattattatttattcaaaaggaaactctcttccaaccattttacatatctgttaagtcaccaaacattttgtcacaaaggtcatcaaattaaaatcataaaaaaaaaatgaaattctacatagattgcacaacttcatagtgcccgaaatagataaatttgaagcttgacttagcaacttagcgtccaacactttgaaggctgttagtgaagggtactgattgcaaggaatcataagggggttgtgcatgcgtatacgtgtttaaagaaagaggaggaccatcatgcatatcaagtggaagcgtgggcaatggcgcttcaagctgaagaacttttattacttgtgtagcggtgggcctttccttgttgttagggttagtacaccacaaccctacaacaatcaagcttgtcatttcatcaacatcaaactccttgtttaatctctcatcaaca

SEQ ID NO: 115328 - DNA, 175 bp, Glycine max
  Clone ID: PAT_MRT3847_75150C.1
ctcaattatcacttatgcttcttagtgcctcatataatttcaatttgatttcaattggtaatttcaatcgacatctatcttgttgggcctatgcttcgtcgccgaaggtcttacagggagaagcagtcttcggcggaagttgtttgtataaaacggccgaagttcctctttgtga

SEQ ID NO: 115329 - DNA, 443 bp, Glycine max
  Clone ID: PAT_MRT3847_75151C.1
ggctcgagttgaattgacctggattcaaactcttctaacagaattacatgtatattttcaaactcctttgatttactgtgataatcaaagtgcagtgtccatagctcacaatccagtgttccatagtagaacaaaacatatagaaattgatgtcttttttgtaagagaacaagttttggccaaacagctctcagttgtgcatcttcctgccttagatcaatgggtagatgtcttaaccaagccactttcctcaacaagatctgaagtactgagggacaaactcaatgcgaagtatttttctttagaaaaaccttgcccttgcgtttccgggggttttagaatgcatgtctaaaaataactgttacaaatagttattgtgggactgtcaggacagctctgttaagctaactacttttttttgactaacagaattctgttagtta

SEQ ID NO: 115330 - DNA, 134 bp, Glycine max
  Clone ID: PAT_MRT3847_75152C.1
gtgagccgtattacagccatggtctaactcgattacgtagaacagagtcttacttatcctagagtacggcgtgcatgctatattaggaataggccatttaatgctttcctacgctatgtgctggtgcgagaacg

SEQ ID NO: 115331 - DNA, 1349 bp, Glycine max
  Clone ID: PAT_MRT3847_75153C.1
gacggatgcgagaagactacagaaggggggagaagagaatgagaggagacaacagatacatccttggttggctctgggtttaaatcaatctgatcgctggaagagaggaagtaataatggaaatggggatttccaagacaacaacaagcactgaggttaccgacgacaattccaatagcagcagcaccactcatactcaaactccgcaaccatatctcccttgctgctccctacgccgtatgagaaaaggtcttaaccgatcaatctgattgtctttacgaagccatggtgaggcaagttgcagtacgcaacacgaaaggatggcaattcctcgttcactatcttggttggaagaagagatgggatgaatggcttgacctggatcgtttgatgaaacacaccgaggaaaatatgcgcaaaaaacatgaccttgacgagaagcttggcaatgataagaatgcaaaagtcccgcgtggttctctggcgaagtccaagcctactaacgtttcaagaggcaggaaacgaaggaatgaatctgtcatcaagggaaaacctgcagttgatcctgacaagcttgttaacattcaaattcctccaacactaaagaaacaattagttgatgattgtgagtttattacccatctcggcaagcttgttaaactccctcgtactcctaatgtgaaaggcatattgaaaaattattttgattacagattcaagaaatgtggctcggtgggtgattcagttgaagaaattatgaaaggattgtcttgttacttcgacaaagcactgccagtgatgcttttgtacaagaacgagcgccaacagtaccaagaggcttgtccagccaatgtctttccttctgctatatatggtgctgagcatttgttacgtctctttgttaagctgcccgagttactgtttcatgctagtgttgaagaggagacattgatggaacttcaagcacacttaattgactttctcaggttcttgcaaaaaaaccagagcacattcttcctttctacttatcatgttgcagaaggtattgagaacagcaccaacaaacaagtgtgtttgccttgttaagcctgcatatgtttatgtatggacgcaacctgttcatgtggaagaactcaagaatcaattacatatgcttctaagggctgcaaacttttttcctagccaaattgatgtcattcctggagttctgcttctggttagtctagtgactatcacttttcctggttatttataagataaactagcttagtttgctttaaacttgggaaagtaatttgtaaacacgatactgattatgaaattccattttcagtttttcataaaaaacc

SEQ ID NO: 115332 - DNA, 1320 bp, Glycine max
  Clone ID: PAT_MRT3847_75154C.1
tacggctgcgagaagacgacagaagggggacaataaaaggagaaccaaaccagggacccaaaacattgaggtagaacaactgaagaaccaacaagaggggtattgagattgagattcaagtaatggggaagagcaaggttcttgtggtggggggaactgggtacatagggaggaggatagtgagggcaagcctggcactgggccatgagacctatgtggttcagaggccagagttgagcctccagatagagaagctgcagaggctcctctccttcaagaagcaaggtgctcatctcattgaggcctctttcaatgatcacaagagccttgttgatgctgtgaagcaggttgatgttgtcatcagtgccatctctggtgttcacatcaggagccacagcatcactctgcaactcaaacttgttgaggccatcaaagaagctgggaacgttaagcgtttcttgccttctgaatttggcctagacccagcaaggatggggcatgcattagaaccaggaagggtaacatttgaagacaaaatggctgtaaggaaagcaatagaggaagctaatatccctttcacttacatctccgcaaacctctttgctggatactttgctggcagcctctctcagatggggtcttttgtgccaccaagggacaaggtgcatctctttggagatggcacactcaaagctatttttctggatgaagatgatgttgcaacatatacaatcaaggcaatagatgatccacgaacccttaacaaaacattgtacctaaggcctccagaaaatattatctctcaagcagagcttattggaatttgggagaaacttattggaaaggaactagagaagacatacatacctccagaaggctttcttacaacactgaaagggttggattataaacttcaagtagggattggacacttttatcatatattctacgagggatgtttagcaaattttgaaattggagaggaaggagaagaagcatccaagctttaccctgaagtgaattacacacgcatggacgagtacctaaaaatttatgtgtaaaaggaactcattcagtaggagttcagtgattcaaacaggaacacggtttttagctacaataaccttaatttaaggagatgattttgtgcttataattcgatggggaaactggatttttcggatcttgaaatgtgaacgagtttaactttatcattaatttaagctctgttgtttttgaaagggtacggagactttacttataattcgatattgtcctcatccaagaagacgttgagaaacgagtttattgactcttaag

SEQ ID NO: 115333 - DNA, 292 bp, Glycine max
  unsure (1)..(292): unsure at all n locations
  Clone ID: PAT_MRT3847_75155C.1
gaaagacanngaaattgaggtncaaagngggntgnnanacaaggactacaangacccacccgncgncgaattatacgaccccgncgagctccgaaagggggacttntacagggccctcatngccgagcggggcgncactctcctntgcctctacggcaccatcctcaccgccctcggctacaatnactaagaaganaaggggagacaagaagtatgaaaaggagtaggggnaatnggaatagatggggacttgggagggatgaaagtngnncttgnntatagaaatggtggg

SEQ ID NO: 115334 - DNA, 566 bp, Glycine max
  Clone ID: PAT_MRT3847_75156C.1
agaaactcaacacttgggggccaaccggaattttcacggaagccatttgtgactgtaccgaaactttggaaggtccccggggccccaccttcgagaaaacccgggggggcttaaccacccccccaaattcaaacaacaccgcaaacaaaggggcgaggaggggggcaacactgtgctggtcgccccggagacaatggaatttttctttggccaatgggttgatcccggaagctgagtattttaacccgcaaaaaaaacccaaaaaaccctcccccggttaatcgctgaccagccctggattaagggcaagcacggggcccacgggtccggaaccgtgatcgaacgggggggagggctttcccgttgccctgttttagatcttctcaccgggttttaaaacggggtaaccccgtgggataaaagcccatagaaccgggggtgggccccaatgaaggtgagcccacttgataaccgcggttaagcccgtcacgtgagggcaccacatggacccgccaaaaatgatgcagaaatccacccccctgtgatcaacgggtaacccggggggt

SEQ ID NO: 115335 - DNA, 464 bp, Glycine max
  Clone ID: PAT_MRT3847_75157C.1
gtactgactgcaacatagttggtgcactgctttaggttgatacttatcataccagccctgaattgcagttcgttgatttttgttgcgcctttcagaagctgctggcccattcgggtggttacatttcctaataccattgtgctgattgaaccacacttgaattcaaggttccagcttttgagtaccagtacgaatggtgattttgtcaaactggaatgatctcgcaatggataacgataatgaaacatgtgctgctgttggcttgacatgaagttacactccaactccattgataggaatctcgatctgcaaatagacagagcggctaatcgtgtgagcatcattgaaagatgtgtgacgctgctcataactgttaatcaaccccaagagaaagatttgccagagggaaaaatttcctttgatattaaatctcgctctagattggataaagtttcctctacaaa

SEQ ID NO: 115336 - DNA, 140 bp, Glycine max
  Clone ID: PAT_MRT3847_75158C.1
attggacaggcctattatcgtttacgtgaatgcctagaaatggttttggcatgccttgacagaacttgcaggaaacggtccttacaggagatgacatggtgtcgcaacagtggagagacgagaatattgcatgctcgctg

SEQ ID NO: 115337 - DNA, 212 bp, Glycine max
  unsure (1)..(212): unsure at all n locations
  Clone ID: PAT_MRT3847_75159C.1
cgcccacgcgnccgngggaatggatgatcatcagcatcagcaccaccatgggcacggtttcatgaacgggcggaggcaaccantaaataaccgncccaggccttcccataccaccttccccttcatgcctccctaccccacggaggagctnatcccctgccaccaccacctgaatctcactcccttacctactcatcattcccaacaacaac

SEQ ID NO: 115338 - DNA, 282 bp, Glycine max
  Clone ID: PAT_MRT3847_7515C.1
aaaaaaaaaaattggaagccccattttttaattccagggctcccccaaattaaaggggaccccaaagaaaccgaattcttacccctttaggtgggggttggcttttgcttttccacccccttttccaaaggggagggggttttccccccttaagggaaatcccaatttttttcccaaaaggggggtttcccttaaaccaaaggttaaggaataaattggtttttggcccctttttccccagggcaaaacaaaaccttttcatatagagaaaatcctttttta

SEQ ID NO: 115339 - DNA, 1067 bp, Glycine max
  Clone ID: PAT_MRT3847_75160C.1
cccacgcgtccgttaaaagcatctctttatggatggtaaaaagcttgttgctattatctctgaggcgggatcagttgacgtttgcgtccgggcagatagacgagctgcaaatcagaaaagaagggttcatttaacacttgaactgccatggagtgctgaccgggcaatccagcagtttggaagaactcatcgatcaaatcaagcttcagcaccagaatacaggatactatttacaaatcttggtggagaacgaagatttgcatcaattgttgccaagagattagaatctataggtgctttgactcagggtgaccgcagggctggaccttcgttaagtgcttataattatgatagtgcctatggaaagaaggctctgacgattatgtacaaaggaataatggagcaggattctctgcctgtggtacctccgggatgttcatctcacagaccagatacaattcaagattttattgtgcaggcaaaagctgctcttgtatctgttggaatagtaagggacactcttggtaatggtaaatctggtcgtattattgattcagatatgcacgaagttggacggttcctcaaccggattttgggactacctcctgatattcagaatgggttatttgagttatttgtgagtatcttggatcttcttgttcggaatgctcgcattgaaggtaaccttgacacgggcattgttgatttgaaagctaatgtaattgaactacaagggactccaaagactgttcatgttgatcaattgactggggcctcaacaattctgtttacattcatcttagatcgtgggatcacatgggagttggcaagtacaatgctgaatgaaaagcagaaggatgggcttggttcagccaatgatggcttctatgagtccaagagggagtggttgggaagacgtcatttcattttagcatttgaaagttccgcttcgggtatgtataaaacagttcgcccccctgttggtgaatcgaacagggagatgcctctttctgaattaaaaagtaaatatagaaaaatttcatctctggagaaggctcagtctggtt

SEQ ID NO: 115340 - DNA, 108 bp, Glycine max
  Clone ID: PAT_MRT3847_75161C.1
gcagtaacccacgttgtggctgagatgatgtcgaattgagacaagcattaatttcagcgctgaattgaatattgagctgagcagagtatcggcatagcgtagccatgg

SEQ ID NO: 115341 - DNA, 186 bp, Glycine max
  Clone ID: PAT_MRT3847_75162C.1
atgaattttaaggttgctaagtccaatgattatcaccaacacaacattacctcaaagaatgttgcatgttaacagtagtcgtatctttgtaaatgtgtgtttcaaattcaatgtagcaatcatgggacttatgtacgtttctaatcgtagtgtgtgatagtagaaagatttgaatttctcttcaag

SEQ ID NO: 115342 - DNA, 267 bp, Glycine max
  Clone ID: PAT_MRT3847_75163C.1
cccacgcgtacggttcgattcagatttcatttaaaataaaattcaaatcataccacgtttgggttattaaaaacgaggatgtgcataattaaacaacgagactcatccctatattgaacactcccttcatttattcctatgacagactcatagataactgataatggggacccatacgcgtaaaccggtttaccctaaaccttctttgtccttctcttatttaatcctgctgcatcttcttattctgttgcgcaatctttattattc

SEQ ID NO: 115343 - DNA, 250 bp, Glycine max
  unsure (1)..(250): unsure at all n locations
  Clone ID: PAT_MRT3847_75164C.1
aanncggctcgaggtttaggatgtatacattcaaagtgaagccttgtcacacggcgtcttctcatgatcggccatagcgcccctttgctcatccatggctaaatgcaaggcggcgagacccatggaagtatcattacagctgactccgttgatcatcgtttaggaaggtatctcgcagtcagggccatgactccaagtatgcatatggcctgtttgagcgctggctacacactgcgcagtgacgatcttg

SEQ ID NO: 115344 - DNA, 197 bp, Glycine max
  Clone ID: PAT_MRT3847_75165C.1
ttgacacccgccagaagacgacagaggggggggcaaaaggaggaacgaaccccccgagccccaccagcaaaagaagcacgagggcgaccaccaggggacagggagggacacaggcaaaacggacgggcacgagcaagagcaggaccgcaagcacggacgcgcaagcccagaagagagcaatggcaaaggcccacgca

SEQ ID NO: 115345 - DNA, 505 bp, Glycine max
  Clone ID: PAT_MRT3847_75166C.1
gtttggttcagttggggctttgtgttaatctgtttttcacttttccgattatgatgaacccggtgaatgaggtgatggagagacggttcttcgggtccaggtactgcttgtggctgaggtggatgatggtcttgatcataagcttggtggcgcttttggttcccaattttgcggattttctgtcccttgtgggaagcagtgtttgtgttgttctgagttttgtgctgcctgcgatgtttcattgtttggtttttaaggaggagttggggtggaggtgtgttctctgggatggggctattgtggtttttgggtttgttattgctgttactgggaccttcacttctgtgatggagattctttggcctacccctacagcatgattcagcacaaaaaaaaaaaaaaaaaaaccttgttaatacatgtttggataaccattttggatgctgaatgtactcttgggagaaaaatactcttttgtgtggggttggttttccggtcaacaccc

SEQ ID NO: 115346 - DNA, 2203 bp, Glycine max
  Clone ID: PAT_MRT3847_75167C.1
ctcaaacataagcaaaggggaactaactttgtcttatttattgatagtatcttcaaaacgtccttcatctaataggactaaagactttttctatgtttaatatcaaatttcaacgagaggggatttaaaaaaaaaaaatacttatttttgttttgggataacaatttaatgaaattaactgttttcttaaatatgtatttttttttcttataataaagactagagggaggagtctttaacacactttgttattgactaaatttattggataacacaattttgtagctcctacttatttaatgaggctcactcataattttgggattttccataaattggggtctatagtagcgtgttagtagcactccaacaccaattaagccttctcctcttgggaggatgggcgacatggagctcttttaataatatattaaatattatgggtttgggaaggcattttacttttcgaatgggacaattatagcgagaagacgacagaaggggggaaaaggatcgataatccgcgtctttttctgtgtatcccaagtaagcatcttcaagctctgaatctgcaatggcttctctactcaacatggtttcggttccaccaagaatatcaccaacctcacacaccagaatcgcttcgcttcaagctcgacccgttttgccacccttttctgtctcattttccaggaggagactatcaattagagcaacagaaactgataccaatgaagttcaatctcaggcaccgggtgcagcgccatctaaagatggttcaagcttcaatcagcttcttggtatcaaaggagctgcccaagaaacaaataagtggaagattcgtcttcaacttacaaagccagtcacttggcctccattagtttggggtgtagtttgtggagctgctgcttctggaaattttcattggaattttgaagatgttgctaaatcaattgtgtgcatgatgatgtctggcccattcttgacaggatatacccagactatgaatgattggtacgaccgagaaattgatgcaataaatgaaccttatagaccaattccttctggggcaatatctgagaatgaggtaatcactcaaatatgggtgttgctgcttggtggtctttctctggctggtatattggacatatgggcagggcatgatttccctatagtattttaccttgcagtgggcggagccctactgtcttatatatattctgcgcctcctttaaatgttaaaacaaaatggatggattggaaactttgcccttggagcaagttacattagacttgccatggtttgggcgactggtcaggctttgtttggaactcttagaccacgatagtttttgttctcaccctccgatatcagcattagcagaattgtaaactgcctattgtcaatggctacaaatgttttgaatgggataggactttaggacttcaatctggctctagtgcttcagtctcttccagtggattttggtgctgtaactgcaaagtggatctgtgttggcgctattgacattacacaattatctgtagcgggatatctacttggggctgataaaccgttttacgaataagttctaattggtcttataagttcaaatatttcttttaggaccctgtgaaatatgatgttaaatatcaggctagtgcgttgccaattttggtgcttggtttgttggttactgccttagcaactagccactgatctttgatgtgcaaaagttgccaaaggggcattaaattcatagaataaagatgaagggagccaccggttagaaggataagagtggcttctcttaggtacctgcattcaagatttgtggcatagcttttgttggccaccctacattcaaggaggagtatgacctaggcttgtccagtattgtgttttttttttccttatcttgttatcctcttttccacttgttcaagttttgattattttaggatgagaaggggtttctttttaggaagctttaaaagacaataaattgtacaaagggtagacacatacatgttattgttcccttgaatctgggacccttatgtttggcccatcattgatttgagatgaaaacgtgaaactttagttattgttctcgacaaaaaataagttaaaagctttcattaaaaaaaaaaaaaaaaaaaaaaaaaaaaaaaaaaaaaaaaaaaaaaaaaaaaaaaaaaa

SEQ ID NO: 115347 - DNA, 755 bp, Glycine max
  Clone ID: PAT_MRT3847_75168C.1
catatttgtattgggaattgctattgtcaatgacttcaaaagtgttgaaggggatagggctctagggcttcagtctcttccagttgcttttggtgctgaaactgcaaagtggatctgtgttggcgctattgacattacacaattatctgtagcgggatatctacttggggctgataaaccgttttatgcgttagctttactttgtctaataattccacaggtcttttttcagttcaagtatttcctccaggaccctgtgaaatatgatgttaaatatcaggctagtgcacagccatttttggtgcttggtctgttggttactgctctagcaactagccactaatcttcatgtgcaaaagttgccaaaggggcattaaattcatagaataaagacgaagggtgtcactggttagaaggataagagtggcttctgttaggtaccagcattcaagatttgtgacatagcttttgttggccaccctacatacaaggagtatgaccaaggcttgtccagtattgcgctttctagtttggtttttttccccttgtttttcttgttctctactcttatccacttattcaagttttgattattttagggtgagaaagaggtttctttttaagaaggttttaaaggacaatgaattgtacaaagagtagagcatacatttcccttgaaccacggacccttatttatcaatctatgatttgagattataaaaaaataatttaaagctattgtcattaaaaagaaa

SEQ ID NO: 115348 - DNA, 164 bp, Glycine max
  Clone ID: PAT_MRT3847_75169C.1
tgccagtctggaacgagcagacttgcttcatgtatggagttatccccctgcggggacgattattgcaaccaactgattcttatgatgctgcggtgttatcaatgagttgatgctcagcagattttgcgctgtccgctacggcacccaggtggaggaagaagagg

SEQ ID NO: 115349 - DNA, 245 bp, Glycine max
  unsure (1)..(245): unsure at all n locations
  Clone ID: PAT_MRT3847_7516C.1
tttaacctccgacatctaaaacatcccccccctttttaaacacgcgcggccccccnnanacacttaanctnatttaaacattctttgataacccaaaaaaccaaccacaaatttttaaacaatctccgcccccatttttttatcctggncnttaaaaaaacaccaccaaatttcctcatccaatggaaataaaacttttttcacttttttcaacaattctaaacaaatataaaccttcaattatt

SEQ ID NO: 115350 - DNA, 204 bp, Glycine max
  unsure (1)..(204): unsure at all n locations
  Clone ID: PAT_MRT3847_75170C.1
aaaaagtcatgctgcggtggtaactttgtttgcggaagctcctgcaaaaacggcaacgggtgcggaggctgcangatgtncccagacttgagctcnctgngtcnctcccaccgtgaccttggtcttgggagtgtttccttgtttggctcatttttttttaaaaaaaaaaaaaaaaatttgttttgttctgtgnccctttttttt

SEQ ID NO: 115351 - DNA, 448 bp, Glycine max
  Clone ID: PAT_MRT3847_75171C.1
tagtgaaaaagaagggaagtgttgtcatcaaatattgcttaagaaagaaaacggtctgcctggttggatgtggggggtccattagcatgaaatggtggtttgaggatttggacttcggagatttgaagtgtgtagttgcagtcattagttaaagctggagaagttggctaatgaagtggaagaagttgaccaattaaattataagttgttaaaaaaattgttatgtgcatcacttgttaatacaaaacctgatagcaatggacaaagtactatgtctaagatttgctctaaatctattagtcggttgaccacatgcatttatgatttatgaatcactttttaattatatatacagggagaccttgcaacattaaaaaagtattgtgcccctgagctgactgaaccttgccaagcagcacactatgcttaccaaagtcatggtctcttc

SEQ ID NO: 115352 - DNA, 825 bp, Glycine max
  unsure (1)..(825): unsure at all n locations
  Clone ID: PAT_MRT3847_75172C.1
ngattcaggatgagatatctgagcctcactgatcaaaaaagcttccaagaagcgatcatggcccgagagtatacactttcagacccgccgttgggctttctcgctgtggaagttgacatttaccgtcccccaggcgatcccttcaatcagagtacatggccctttcccctcatccgcgaaaaggtgataggcacttcagaggctcaaattgtcaccaatggcaactacgaagatgcttttattgatcgttttgtgcaagccgcgataagactcgcagagagaggggctgtcggcatcattaccagctgcggcttcttggccgctgcccaaaccagattagcagccctgtcccccatacctgtagctacgtcggccctcgttcaggttcccagcctcctggccatttctcctgttaatagacctatcggggtgttgacctatgacagtgcgagattgggaagcgctcacttgctggagctgggcattgatcctagccgtgtccgtgtatggggactctcggatgacagccatctaagggacatttgcgcgcgtggagcgaactatgacgccgatcggcttgagagagaactcgttgccgaggccaaatcgctggtacttcaacatcctgacgtcgccgcagtggtcttggagtgtacaaacatgccaccttatgcagatcggattcatgatgcgattcaaatcccggtatacgacgtttatacaatgggtatgtggttctactccgggctgacgagacggaacccgttgtcgtggaaagcgtcagatgcgagagacacattgaaatgaggactagtaatccctaat

SEQ ID NO: 115353 - DNA, 169 bp, Glycine max
  Clone ID: PAT_MRT3847_75173C.1
gccttctgcgcaatttactgacatggacctggattaatgtgaggaaactactctccatgatgtcaacatggaagaagaaagtaggtggacacgtcgtcgttctcaggaggcttacgatgaggatgatgacatgcctgctggtgcacattagggtcagcgcgcccagcat

SEQ ID NO: 115354 - DNA, 1749 bp, Glycine max
  unsure (1)..(1749): unsure at all n locations
  Clone ID: PAT_MRT3847_75174C.1
atacatatacttggtttgcgacaatgtaaaacaatttgattaattaatacaataaaacttcaacaattatcagcctcagtaaaatttaaattaagcaataatatttctataaaaaaagaaagaaaaaaaaacaagagtcaatgaaatctatnaagagaggcctgaggataaagagaagctttatgattgtcttaataataataataaaagctttatgattgtcttttctaatttgactagcaagttggaatacttttcaaaattatacatcatatattgcttaaatgcaacaaacaagaccctttttatgtcatcaaaaaagaaaaaggagaaaggagaaattgctaaaaagggcaaaaaacataaatttaaaaaacattaattcctattcacattccaaattgcttaagcttttctctcttggttagctttagtgggaggctctggaataggaatggttattatgagtgaagagagcttgttgttgttggcttctcctttctgaccatatttttcttcagtaaaattatcagtggcatcaattattggccctgcaattacagcaatttgagaatcctttacaggcaagggaatttcatctgccactttgctctctatttgttctttgtgttttccccacagaactgagtataaacctataacaattaagatggcaccaatcacacctccaagataaatttgttctgcaaggatgaaggagcccatgatggcaacaatgatcatcattaaagggctaaaggcagttgcaaagacaggtcctttcatcttaattaccagtccttgtacatagtatgatatgcttgatgtcacaatcccagcatatgcagcagcaagtaagctcacatcccagccaattctccatacagaaggattgtgttcaactacaaaagtaacagcaatagcttgaagagtgcctataaagcacacaagtgaagttaagcttagctgatgattcttgtacgtctgtatagctttggcttgtaaaacaaatagggaagcccaagcaagggtggcaatgataagaaaggtgcatcctaagaaccaatctttgtccaatgatcctgtggtggttgttgcattggttttattgtgtggatgtttggcccacaccatctccactataggacctctgtataaggtcatcaacattgcccctgccactgtgactaatgttcccactatctttgctatgcatctcaccttctttatgtctatcttctccatccggcaaaacactgccatcacaaaagtcatggctggaagcatgttgctcattgcacaggagaaggttggggatgtgagcttcaacccagcatagtagaaattttgatcaatcacaggcccaagaagagctaggataaaaatttgcatgaaaactgggaatgttatcttcggttgacctttcctttcaaaaataaaggcaaaaggagcgatgacagcggtggcaaaagcgtggcgataaaccacaaggacatagtggctcatgccttggttgagggaaaccttagtgataatgttcatgccagcatagccaaattgtaaagagatcatggccaagtagggtttagagcttgcaaaaaactttgcacaacctctaagcttttcagttgccattttaattttcttcttttgagaaggatcgagaggttagtcttgagaaaagggtaagtattctatagagaaattaaagaggaagaacacttgaagaaggctagtccaggtgtccgg

SEQ ID NO: 115355 - DNA, 279 bp, Glycine max
  unsure (1)..(279): unsure at all n locations
  Clone ID: PAT_MRT3847_75175C.1
ctctctctcaccaaagccttcctaganccgannaaaaanngangagcaatttgcccttcaccaannnagaannagcaaacaatggccgatcaacttancgnttaacagatctccgagttcanggaagtncgtcancttgttcgananggncggcgatggttgcatcacaaccaagggagcttggaattgttatgcngttcattggggnnaaacccaactgaggcagagctccnggacntnatgcaatgacntggatgntgntgggantgtgtancattt

SEQ ID NO: 115356 - DNA, 283 bp, Glycine max
  unsure (1)..(283): unsure at all n locations
  Clone ID: PAT_MRT3847_75176C.1
gctacttcctaactccaaccgcacttctgntccgcaattatcatgggcaaggtcaagatcggaatcancggatttggaagaattngncgtttggtagccagagtggctctgcagagagacgatgttgaactcgttgccgttaacgaccctttcatcaccaccgattacatgacatacatgtttaaatacgacagtgttcatgganactgnnngcatcacgatgtcaccgttancgnnnagangacncttctcttcggtgncaagcccgtcactntttttngag

SEQ ID NO: 115357 - DNA, 456 bp, Glycine max
  Clone ID: PAT_MRT3847_75177C.1
atcataaaatattattggggcacgaataggtttatttaatattcaaatcaaatggcttcattacaatccatagttattttgcaaatcagctgcaaacttagatagataaatgaaaaatccaagagataaagatgtgtaacgttttaaatatgtattatgtacccaattgtaaaaagtaacattttctcatctccaaaacaaggaaaaaaatcttcttcaaaacaaatatttagataaggggcagaaaattcacttcttacatgtatgggaagatttgtaagatgggaaggatcaaacaggaaataaacttagttttcccctccatacttctgatgacttgagcaaatcatgccttgaaccagatagcacatcttataatgataacaaaacctatttgcactctagcatctttgttgataacttgcactgttttcattggggctactagttgcacca

SEQ ID NO: 115358 - DNA, 349 bp, Glycine max
  Clone ID: PAT_MRT3847_75178C.1
gagtgtgcttttgaaagaagcttcctacgatgaaataaagattgctttcaaggaggaatacactgggcacgtggaagggaattctgggatacactgcagatgatgtggcctccactgactttatcggtgatggcagatcacgtgtttctgatgcaaaggctggtattgcatagaataagaactacgggaacattgtttcttggttctacaacctgtggggatacagtgtacgagtcattgatcattttgtgttcgttgacaagacgttatttgacggagttacttcagaggagcgttgtcttcacacgagctccgtatgttcatggttagctggcacctactgcttcgc

SEQ ID NO: 115359 - DNA, 217 bp, Glycine max
  Clone ID: PAT_MRT3847_75179C.1
gcgcctgtcgggcgccttcgtcttttttttgtcgaagatagctgaacagacatggacagggcaaatgatcacatacagcatcactcaaaagggaagggaccctttccaatgacgtaaactcttgtaaacacaggattttatacaaacgtggttgattctgcaacatgacagatatgcctccaccactcctgggggtatgaggagaacctctacacgt

SEQ ID NO: 115360 - DNA, 860 bp, Glycine max
  unsure (1)..(860): unsure at all n locations
  Clone ID: PAT_MRT3847_7517C.1
cggctgcgagaagacgacagaagggcaccccttatgagtatgtgacttgatgctaattgtatctgcttgcagcttgctctaacatataccgtgttattgatgactggaaaattatccgctccaaaaggaggaattgtgcaatcatcatttgttggttcacttcggaagcatgtagaggagctcctaaattgttcccaggaattgaaggatgattaccttaactatttgaaattgggaaaatggcctgatggagaatcccaagataaacgttccatacttctttcttggtgcgtacagtggattgatgtaccatcttcatctgcaattaggacagctgttgatagagtcaaacctagtcttatgtcgtctcttcatctgcccttcttacagctgctgatagaaagaactcacattcatgtgatcagtgatatagatagatgtttgtcatgattgtataatcagcagtaatcttttgattttgcaaaatataatgtatagcgtcatgaacatctatcagccgtaatcagcatttttgctcatacaagtttatccctttgcatattttctttgtccacaaaccaaattggcattgagacttgagagcatgtccctggaaaccacgtacgcaagagaacatacagctgaactcatttgaaccagtgtccctggaaatgcatgacacatgtgtacttacagcgcgagtcttggttagtcgttatgatgcccatgcatgcgtccgtggaactgctttgggcgagtacaagcaagtcgtgatgattctgatgaacactagttgcttctatagccggtacaaacaactcgacttttttttcatgtttcttatctatcaatttnntatc

SEQ ID NO: 115361 - DNA, 358 bp, Glycine max
  Clone ID: PAT_MRT3847_75180C.1
atgctaaaaactgagaagagactttcatttttttgaaccgttttcagttatgaatgggtctacaactttgatatttctgcctttccggatgtgacaaacgttccagatctatacgtacacattgattatgataccaatatcataattgattttgagaaattttaaaagggcattatttgtgaggaattgatggtgcacccggcacaaagaactctcttaaaacttaaaggtgaccagtctgagatctccatgccaaactcgattgatgattgagggtcttatgtgtcccattacaccaccctaaagatgttcgcccagaaagatatgtttaaaacttgacaaatggtagatgatgctt

SEQ ID NO: 115362 - DNA, 305 bp, Glycine max
  unsure (1)..(305): unsure at all n locations
  Clone ID: PAT_MRT3847_75181C.1
acttcgcgcncgnntncgtnagctcggaatncngctcgagctatngctcnntngnctcgctagcttatgcacngagggangttgatnccntnctcngatgnntntcgtncggtatcgnccgctggngctcgtnctcncgtattgggccgtaggcgnctgttnanngccngcnagtnncggggngtcgcancccgcnggngttggggngncngncgttnacccccgcntcgtgnngagtgtggttngnnngtcccgcggtgnttgagcgctnccngctncnncgnnntnntgtgtngcnccnnntt

SEQ ID NO: 115363 - DNA, 376 bp, Glycine max
  Clone ID: PAT_MRT3847_75182C.1
atttggagaattcaataggaaagtaaactcatacaataaacttacacatgcacaacaatgacaaggaagaaaaagagttgaaaaagtgtttatacacaattacgcaccacagcacttacttattataccaaattaaagattttttaacattaggtttgagttctaatttcattgtgggtgtaccaacaaaaaaaatccccttggcttgatcttgccaggatgactctcaagcacaataattagtgggaactgtgcaacagttatgtgcctttcaagtgtaactatagaatttggtggctgtgccttggatgttcccaatttactcactttggcttttccctctatcaataggttgaggttcttgtgagccacttga

SEQ ID NO: 115364 - DNA, 422 bp, Glycine max
  Clone ID: PAT_MRT3847_75183C.1
ctctctctctctctctctctctctctctctctctctctctctctctctctctctctctggaagaggaggagcagggggaacattgtgagtcagcatgagacgtgggaacgcatgtgttctgtcatgtagggggtctgtgtcaagaaggtcgcgagctccgtcgaaggctacctcatcctggcttgtaatgctcaaccagaacaggaaatgagaccccgaggagaggagactatgggatgtgaggctggaaaagtttctccttcatataggaagggctatgcgcgcgtatattaccgttgacatgctctatatgatagagcgtgatgttgtcaaaccgagagatgactttataaaaagagggcccttaattataagtaggattttgtataaataagaacgtgagacatcatcataatttctgt

SEQ ID NO: 115365 - DNA, 658 bp, Glycine max
  unsure (1)..(658): unsure at all n locations
  Clone ID: PAT_MRT3847_75184C.1
gccgcgtcgtagcttgttcctctagagcggccgccctttttcctttttttttttttttcccggtatacttcctgagaggtgtccttgcgagagcgaccctgcgtatagcttatgttccatcgctcctcgttagatctgggaggcgcgcttgtnttacattttattctttaccgcataggtccggtctagggtgggtgtgcatgccttctacatatgctcttgcaccgaacgtatacgtaccggtttcccgtcaacaaatgatagtcacaagcgctgccacatgcactctgctctggtcacacctgcttctagcgtttaatgccaccatcaccgctacttggaataacaaccattcttgcgaattggtgatattatctcactcaaatactgcataaaatggctgtcccttgaccggcgcactcacatgcaattgagtagtagttcacctgcgccaagctattaaactgtttttgctagtgcataaacgccaattgacccgacctctcgtcccccattaactgaacatgtgttccatgcatattcctctccgttggaacctggacttgaaacccttatggccttcaactgctcatcattaggatcctttacgtacgctttacagggatcgatcctaacaaccactgtctgattgccataa

SEQ ID NO: 115366 - DNA, 210 bp, Glycine max
  Clone ID: PAT_MRT3847_75185C.1
acttgtattgtttaaatctttaatgtgtttttattgtaaaaaatgactgtatgacccgtcaatgtgcccacccggaaaagccgaaccgcacacaaaaccgttgcggcttaaataatgaaaacaaaacgggcgcgtgggcggacacgagggaaaaccggggaaccgggggccgggaccggcgcgcgaccagacccgcaaaaagcgaaccgg

SEQ ID NO: 115367 - DNA, 268 bp, Glycine max
  Clone ID: PAT_MRT3847_75186C.1
cctcgagccgattcggctcgagaaacgagccatttggcagttaggatctgcacgatctgcttaccgcgagtgttctgtcttcactacgacaccttaatttgcacacgctgctacttccgcttgagatatggcacaagaaacgtttctattcacatctgaatctgtaaacgatggtcaccccgacaagctgtgcgaccagatctctgatgcagtgctcgatgcgtgccttgaacaggaccctgacagcgaggttacctgtgagacatgc

SEQ ID NO: 115368 - DNA, 397 bp, Glycine max
  Clone ID: PAT_MRT3847_75187C.1
ggatccagaaacacaaccatggatcaaaggttcataaactatgataaggaaagccaatgctgtttggaagtacaacaatgcgaccaattagattggcaggacccaattggcagaattggtaaatgaagagtataatgttgaaaaacctaacacaataggcacaagtgggacctcagttttcaatcgacaaatctgccgcacacttggagaaaatgccattagggcaaaacgcaattttgtgaggaatgggacaatgcttgcgtcggaaaagcaaagaaacaatggaaaatgtgggatagaaagagaaatctgcacaaacgattaaaaacattattgaaaacataagtgacaaatcgtccaaaaccaatgaaaatatttccggaaccattcttgctac

SEQ ID NO: 115369 - DNA, 919 bp, Glycine max
  Clone ID: PAT_MRT3847_75188C.1
aattcggctcgagctcgagccgaattcggctcgagcggctcgagatagtggagacagaaacaggtttatatccagggaaatgccatatagtacttgtgataatcacttgggttctttgtggttgattgaagccaaccaaaacaatcatccttatcttcttgattggtactatacatcccgatcacatgacacaaatctgggagatgttcctttagaagaaccatttggatctcatgatgtgaatctgggagatgttcatttagaaccatttggagcaatagagcatcgttctagagagtatttgatgctctccaacttgacacagaatgaaagtgggtatgaggaatactcaaacgagtttcaggatggtcgggctgcatcacatcttggagcttccacatcagctcccatcttcagggaaagcatgattcaggatcaacattccattgatatgcccctcactgccaggagtcgttggtgggcaagaagtgatccccagagtggacaaggtcagacaagcttttttgagccaccagatttcaatcaccaaccagtatacaattaccatgataatagagggtcagaggatcaagatcaagaacatcacttgtactggggagattatcacaaattatctagtacagcacatgcagatgatttatatgcaggagaattcaatcttctttttgatgatgtttatagcagtcctccagaaaatcccactgtaaatcctagcactgcaaccttttaagtgtgatggctttgtccttcattatttgttttggctggttcttgcctttggaatgcaagagttcccaagtcatgattgtcatttctatgttatttgtgtggaaatggaaactattctttgctgtaaatagatagattctttgacataaggcagttcagattaaaataa

SEQ ID NO: 115370 - DNA, 393 bp, Glycine max
  Clone ID: PAT_MRT3847_75189C.1
aggagccggaccggaaaacctgggccgtcccacgcccccgaaatcataccggacggaaaaaacacaaagagcaacggaagacataaaaagacaaccgccggacataacgcggcaacagcaaacccaggcgacaaacacacacccagcacaacccacggccgaaaagaacaaaaagcggaaaccgagaaacaaccaaatcaccggccaacaccacgacggcagagacaaacacaggacaaaacacgagaaacaacccgctaagacagaagaggaaaagaaggaagcgaaaagaaacaaaggcacgcacgccgatgacccggcaaagcgagcccaagaaacagaaaaacacgctgcccacgaaagccccaaggaacaacacccggccgacgacaa

SEQ ID NO: 115371 - DNA, 394 bp, Glycine max
  Clone ID: PAT_MRT3847_7518C.1
gggtttaggatgtgctgaactcgtgagctacaatcacaattttaacaacattgatgtgtacggctcagaaatttggaatacactattaaaattttgttttcctatttgtcctctcagatgatctatgttgcttgcttcacatgtggcatattcttctacataaatcaatcttagtttttcttatcatgtctccaattttgttatggtattgatagttacctttatgtttgaaaaaatagaagggatgttttggtaaaaaaattataataaaagtatttttgttaattttttagttaaaaataagggttttgggtttaagtgtatcatatttataaataggaaggattttgtgtatatcttataaatagaagggattttgtgtaagataagaatt

SEQ ID NO: 115372 - DNA, 541 bp, Glycine max
  Clone ID: PAT_MRT3847_75190C.1
ggaattgtgtggatcaactatgatgatattttattctaaatatagtttagtcagctctacaatttgaaaattgccaccagacattatttattatatagttgtctaccacaggctcaatccaactcctatcacttgttatgcgttatattttagcatttatgtttaaatcatatccataacgtgcataacacttacaattgtccactatatgctccccacttgccccactatgctttgcaattgggagataactacccaagacctctaggtgtgggaaaacacttgtataggctggccatacccgggagtaagcaaatttcaccaattccctgatacacactaaggctggccaatgatggatgagaagttttgaaggaaaaaagttacggaagtgatatctttgctaaaggaaataacaaatccaaaagttggatatcttagacttataatatttctgaaactttgatttttagcgatgccgaatggcgtcatgtgatccatgtagctgatcttacctggtgggataaggctttgttgttgt

SEQ ID NO: 115373 - DNA, 1963 bp, Glycine max
  Clone ID: PAT_MRT3847_75191C.1
tacggctgcgagaagacgacagaaggggctgaaatagtgaaactaacgaagcaaagatgtcgtccatgctgcgcttccctttctcgtttcctcagccccgaaggcctcaattccctcgcccattcaccgcattcgccgccgccgttgccggagcctccgccgccgtcgtggccgtctcctcctccgaccgctcctttctccggaatgctctgaattccttcttctcttctgacctatcaatgcctctctggggttcactgagtttggccgacagtggggtttccgtggttgagtcaaaaaccggaacttcgttcccttcggttttagacagttctcagaaactctgcggaattggcttgcggaaaaaaagcattttgggattgaagaacattgatgtatacgcatttggtatgacattttattttcctcaaccctcactagtttaaatttaaatgtaaaaataattacaaaaaaaaatgattttttcccaatttagcatctcactttccaattaaagaataatttaggatcttttaactttggctttaccaagtggaaacaactcacataaaaaaaatctgggtagattcccttttgccttttggatatagtatgccagtatctgattatggttttactgtaacttaagttttgtgtaaagtttgctaatttgggaaactaaattgtttgtttggaatgtacatcaaataatgattaggggacaaactaaacttttatggtattgacaaaatttgagtcatttgttgtaggtgtttacgctactgatgaggacataaagagacatctttctgagaaatatgggaagttgtctgcgtctgaattgcagggcaataaggagtttactgaagatcttatggaaagtgatatatccatgacaattagacttcaagttgtctatgggagattgagcattcgttctgtacgtagtgcatttgaagtgtctgtaggaagtaagctgcaaaagtttgggggatcggacaataaggaattgcttcaaaggttcacttcacaatttaaagatgaattcaaaattcctcgtggatctgtaattcatctctcaagagacaagggccatgttcttcgcacatcaattgatggacaggaagtgggaagcatccagagtaaactcctatgtaagtcaattctagatttatattttggtgaggaaccatttgacaatcaggccaaagaagaaattgagctcaacatggcttcttacctgtagagttataatgttaaattaagaaatcttctttaagacatgaattctatacccttgtcaatttcgtgcttcgagtaattttggtttgctgactcattattattaatttaaatgagggcgagccctggtgcagcggtaaagttgtgccttggtgacttgttggtcatgggttcgaattcggaaacagcctctttgcatatgcaagggtaagactgcgtacattatccctcccccataccttcgcatagcgaagagcctctgggcaatggggagaaggaactagcattggctgctagtaaatttgcagaatgccgaaaaaccatcgaatctcttggactgcagttaaagtcccttgcaacattggaagactttctacttgattcagagagccctatggagttagcttgtgaagttacacaaccaggtttccaaaatggtggtgagcagttgaagaagttacataaaggtgatttgagtttgtccaaaagagattctaaggcatcagtttcactaaacccatctattactcatgaaaaaacccgttatagttttggtaggttcaacttcaacccaagaagcaagagtgtaagcaaaacaagaagtcactgaaaaataaggtgaagaaaaaaaaaatgaagttgtaaatacgatctataattattcaacgtgtctaaatccaaagttacttgtttacatatcaatagcacatcttgcagaact

SEQ ID NO: 115374 - DNA, 615 bp, Glycine max
  Clone ID: PAT_MRT3847_75192C.1
cccgcgtccgggtttctgatcaacaaacttggttgtgctaaagtggtgattgacaaggtttatttgcatttagcaaaggaaaagaaaaccaaatttatactagcagtgtcaactattaagcttagtatctataatcatgttatcaaattcttgagttaactcgctaactcttacacggtttatgaatccacttaccctctgcaagttgactcgtctgtaaactctctttttagtagactttgggtagactctataaactctaaagtaaactcggcagactctcgaatttatcgtcgagtcaacgagttagcaagttaaaaaaattagactaaaatgtaagtcattttggattgtcttctgtctgtttagtgttcaacataacttcatttaatgtgttgttcccaaataaaaaacttctcacctttaataacatcaaacccttgttctttaataacatcaaactctcaatgagaatgatctaccactattataatatctataagttattatcttgtagtgatgcattactagacttggtaatttaagtattatgaaatttatgatttactattttgatttattatattggtgaaatgcttaattggtatgttattt

SEQ ID NO: 115375 - DNA, 147 bp, Glycine max
  Clone ID: PAT_MRT3847_75193C.1
gtcgaagcaggttcaaacctcaaggatgaaccgttcggctgttgtactcttcgcgctctgtagaggctctcttagatgcgcaatcaggggcattggtacaggtatccttggagttgagaacttgggacaattgaatatcccatacaa

SEQ ID NO: 115376 - DNA, 408 bp, Glycine max
  Clone ID: PAT_MRT3847_75194C.1
tatgggacgttgtactctactcagaagtaacaaatcatttaacccataacttcatgtgattcatgtcatatgggagtcaaaattaatgggcaatttgtagcagactatgatgcatgcatgtagcccatggattatggatagcaatgagcagctagtattttccaaaacaggggaaagaaaaatatgcagctacacagtgtcctttttatcacttttgaacttggactctcatttctttcaagtgatatagatgttgcattgttcagctcaaacgataaaaattattctaacataattttaaaaagctaacctaggtttctatcccttttccaaaagttaattcgaatggttggctttgaccaataagtatttcttatttttttaaaaaggccaaaaataaactttaag

SEQ ID NO: 115377 - DNA, 129 bp, Glycine max
  unsure (1)..(129): unsure at all n locations
  Clone ID: PAT_MRT3847_75195C.1
aattcggcgtcgagagctttatcttgacaaccaatattgtgaaaacctcaatatatctagtttcattaccctttttttnncttcttctgtgannaatggctctgccaggcgtgcgttgcgtcgttgttc

SEQ ID NO: 115378 - DNA, 234 bp, Glycine max
  unsure (1)..(234): unsure at all n locations
  Clone ID: PAT_MRT3847_75196C.1
ggttaacaaggacccagctttcccaccgccaggggagcctttcccgggcggggacccacacgcacaccgacaccccaaccccgaccaacacccgagcggaaggggaccgcnccccggcagcaccaacagaggagccggacgagaaccangcaccaccaccnacagagcaccaccacgccgacccgcgagagggccgcccgcccacgcccgcaggcgccaccaccaccgaagaag

SEQ ID NO: 115379 - DNA, 1367 bp, Glycine max
  Clone ID: PAT_MRT3847_75197C.1
tctacactggctttatctataatgagttcttttctgtcccattcgcaatctttgctccctctgcgtatgattgtcgtgacctttcttgcagggatgctacaacagtgggcctgataaaagtgcgtgacacttatcctttcggagtggatcctgtatggcatggcacacgaagtgaaactaccattcctaaactcattgaaaatgaaaatgtcaattcttcttggagttgctcaaatgaaccttggaattgtgatgagctatttcaatgccatattctttagaaacagcgtaaatgtgtggttccagttcattccccagatgatatttcttaacagtctatttggctatctatcccttcttattattgtcaagtgggccactggttctcaagctgatttgtaccatattttgatctacatgttcctgagcccaacagatgatttgggtgagaaccaactctttgctggtcagaaaaatctgcagcttgtgcttttgcttctggctgttatctctgtgccctggatgctattgccaaaaccttttattttgaagaagcaacatgaagctaggcacggggttgaatcctatgcaccacttcaaagtacagatgagagcttgcaagtggagtcaaaccatgattcacatggtcatgaggaatttgagttcagcgaagtctttgtacatcaactcatacataccatagaatttgtacttggagcagtctctaatacagcttcttacctccgtctatgggcccttagtcttgctcattcagagttatcaagtgtattctatgagaaggttctgatgatggcatgggggtacaataatgtgattatcctgatagtgggtctcattgtcttcatttttgctaccgtcggagtgttacttgtcatggaaactctcagtgcctttttgcatgcgttacgtcttcactgggtggagtttcaaaacaagttttatgagggtgatggatacaagttccaccctttctcgttctcctggctggatgatgaggaatgatatgctctaaactcgcattaataagaacgaagagttatatagctttggacctgtattgattctttcatttgatgtaactagtcagtaattggtatctgtggggcattgtatgtggtggaatccttggagcattttcatcaaacgtgccgttttgtttatttatccattgagggaataaatattcccaattaggggagtaactttgtatgggcaaggcaggcgtgtctatgtgtaataattataacttccaagataaacttaatattcatatctttatttgttttaatttaaagaaaaaaaaaaaaaaaaaaaaaaaaaaaaaaaaaaaaaaaaaaaaaaaaaaa

SEQ ID NO: 115380 - DNA, 727 bp, Glycine max
  Clone ID: PAT_MRT3847_75198C.1
gcatgcctcgcgatttttctgacacgaaagagttggttctcacccaaatcatctgttgggctcaggaacatgtagatcaaaatatggtacaaatcagcttgagaaccagtggcccacttgacaataataagaagggatagatagccaaatagactgttaagaaatatcatctggggaatgaactggaacctgagagggaaacattgaataaaaaagtacattaatgttgaattagtatgtaagtttattctgatagaaagaatcagtgatttgattgttgattgcagatgcaaataactgcacaaaactaccccccccccccccatctatttctattttctatcctcgagagtaagattttaccataaatattaccgattaacttaccacacatttacgctgtttctaaagaatatggcattgaaatagctcatcacaattccaaggttcatttgagcaactccaagaagaattgacattttcattttcaatgagtttaggaatggtagttcacttcgtgtgccatgccatacaggatccactccgaaaggataagtgtcacgcacttttatcaggcccactgttgtagcatccctgcatgaaaagaaagtatacaaaaaaaaaacagaaaagatggtgactaaatttttaaaagcataaagcacgataataaatgttaccaatcaaggggtttaatttacctgcaagaaaggtcacgacaatcata

SEQ ID NO: 115381 - DNA, 573 bp, Glycine max
  Clone ID: PAT_MRT3847_75199C.1
ctcattcagagttatcaagtgtattctatgagaaggtcctgatgatggcatgggggtacaataatgttattatcctgatagtgggtctcattgtcttcatttttgctaccgtcggagtgttacttgtcatggaaactctcagtgcctttttgcatgcgttacgtcttcactgggtggagtttcaaaacaagttttatgagggcgatgggtacaagttccaccctttctcgttctcgtggctggatgatgaggaatgatatgctctaaaatcacattaataagaacgaggagttatatagctttggacctgtattgattctttcatttgatgtaactagtcagtgatcggtatatgtgggcattgtatgtggtggaatcctgggagctttttcatcaaacgtggtgccgttttgtttatttatccattgaggaaataaatattctcaattaggggagtaactttgtatgagctaggcaaccgtgtctgcgtgtaataattataacttccaagataaacttaatattcatatctttatttgttttagttttaaaaaaaaaaatccttattctccc

SEQ ID NO: 115382 - DNA, 527 bp, Glycine max
  Clone ID: PAT_MRT3847_7519C.1
tacggctgcgagaagacgacagaagggacaatttagaacttcataatactgaaaacaaagtagcatagatattcaaggtaagatgggagagaagaaagttttggctcttgtcatgcttgttgtggcttatggtttggcagtaacaacattcactgcttgtcaacttcctccaacgtgcaatgggtatgagccattaatttgccaatgtgtgccttatttggttaatccaggcccttctactccaactcctcattgttgtgatggagcaagagtggcgattcatagagccaacaatgctcaagctattaagaatttctgtagttgtttggaggatgctggaccaaatttatattttcaaaagcagagtttggtactacttccagcagcctgcaatattaaaccttcctttgattttagtaaatgtgtatatggtgattaactgtgcaagcataaatttgcggataaattgataagtagatgtaatagaaataaatattttcaataaaatagagagagtattgttccct

SEQ ID NO: 115383 - DNA, 358 bp, Glycine max
  Clone ID: PAT_MRT3847_751C.1
aaaccaaaaacatcttttttttgccatatgtgtaaacttccccgaaattagatgaataataataataacaataagagagactaatcataagttgataactgtggaaatgtgcgaaaaaagagaatatgtactattccaggggtggtctgccttgggaaaatgtgacaaacccttcttggccttagcctgaagcttgaacacattgggtaaaaaaaatgcgctgggttcccacaatggaagcaaggggttaaggcacggggagaaagtttgtcgccacggcctccaggaatcgtttcttggattgcttaggggaaaatcttgtgggaggagcattttttggaggcccaaggtttcctga

SEQ ID NO: 115384 - DNA, 116 bp, Glycine max
  unsure (1)..(116): unsure at all n locations
  Clone ID: PAT_MRT3847_75200C.1
ctcaacgggagcacctctcntcaggtcgcnatctagaactgcaatcatggnctgatnggaccacagcatccatnagttgttnagnagctagctgtgacattctnacctggtgtcta

SEQ ID NO: 115385 - DNA, 153 bp, Glycine max
  Clone ID: PAT_MRT3847_75201C.1
gatccattattccatatttgaaaaccttgtgcatataaatgtcgataagtcctatagaaaatagaacaaaattgtctactggttttccatgaagcaatctagtactatcttgttactgccattgagaatcgcaagtgtaatcttttaactaga

SEQ ID NO: 115386 - DNA, 467 bp, Glycine max
  Clone ID: PAT_MRT3847_75202C.1
acggctgcgagaagacgacagaagggggctcgagaaaattacatttaaaatgacgtcgaggtgaacgaaggattcgaaacctttcatcttgcgtggggccgcacggcaaacgacggtgaccattggcgggtggcgccgtacgcctcatcccatccatcggcatcggcaccttgcttaaacgacatcgggtccatcaccccttttatcttactcacaggcacagcagaggtagccttccaaaaaagagtgccaatgggatctttttcagacttatgggtgaaggaatataatgaagcgctgaaacttggtgatgatatcagtggcagtgattactgagcagagttcattttcttgtatctcggcccagtaacccagcattatttcatctggttttccggagaaaagatttcaattatttgggggctcgggcgttttaactttgacagtccctttttgctaaaactttc

SEQ ID NO: 115387 - DNA, 323 bp, Glycine max
  Clone ID: PAT_MRT3847_75203C.1
tgatctcaagaggggtgggaataacaggttcttgaagactgctgcatatggacacttcggcagagaggaccctgacttcacatgggaagtggtcaagcccctcaagtggaatgaatgggagttttttagcgttgcccttataatgtctattatccataactttccacgtcccttgctctgtgtttttctctcgtcgtcctcctcctattttgtttctcctgcctttcatttgtaattttttacatgatcaactaaaaaatgtactctctgttttccgaccattgtgtctcttaatatcagtatcaaaaagaatgttccaagtt

SEQ ID NO: 115388 - DNA, 296 bp, Glycine max
  Clone ID: PAT_MRT3847_75204C.1
aagaacggtacctgcccttggctgaggcctgatgggaagacccaagtgaccgttgagtattacaatgacaatggtgccagggttcctattcgtgtacacaccgtgctaatctccacccaacacgacgagactgtcaccaatgacgaaattgctgctgacctcaaagagcatgtgatcaagcctgtgatccctcatggcgatgctggtctcaccggccgcaagatcattatcgatacttatggaggatggggtgctcatggtggtggtgctttctccgggaaggaccctaccaaggt

SEQ ID NO: 115389 - DNA, 474 bp, Glycine max
  Clone ID: PAT_MRT3847_75205C.1
taccggttcgatttaattcccgggtttacgtgctcacttgttgttttccgctcgcgatctagaacggccaggcaagccccactcaaccaccacacctcttcttgttcacgctacccctttctgctcttcttctacctttcaagttttaaaagtataaagatggcagagacattcctatttacctcagagtcggtgaacgagggacaccctgacaagctctgcgaccaaatctccgatgcttgcctcgacgcttgcctcgagcaggacccagacagcaaagttgcctgcgaaacatgcaccaaaaccaacttggtcatggtcttcggagaaattacgaccaaagccaacgttgactacgagcagagccctgatattgctcagggtgtacacggccaccttaccaaaaaacctgaagaaattggtgctggtgaccagtgtcacatgtttggctatgccactgatgaaacccctgaa

SEQ ID NO: 115390 - DNA, 286 bp, Glycine max
  Clone ID: PAT_MRT3847_75206C.1
ttgaacatctaaaaaaatccatgtttcattaataaaataattagggagccccagttcctacacttaataatacaagaccatccgatggaaccctatggtgctgtcgaccgagacctggcactgcctctcacggagaccggctataaagaatccgaatataaacggatccaaccgatctttataggaactggttgctatggcttagaaattcaggaacatgggtatatggccatcaaagctgatcttttcacgggaacctgtggaacctacactgttggtgttctaa

SEQ ID NO: 115391 - DNA, 499 bp, Glycine max
  Clone ID: PAT_MRT3847_75207C.1
gaacgagggacaccctgacaagctccgggaccaaatctacgatgctgtcctcgacgctcgcctcgagcacgacccacacagcaaagaggcctgagaaacatgcaccaaaaccaactcggtcatgggctcaggagaaatcaccaccaaggccaacgttgactacgagaagatagggcgggacacctgcaggaacatcggcttcaactcaaatgatgcgggactggatgccgacaactgcaaggtccacgtgaacatagagcagcagagccctgatattgctcatggtgtacacggccaccttaccaaaaaacctgaagaaattggtgctggtgaccagggtcacatgtttggctatgccactgatgaaacccctgaatcgatgccattgagccatgtgcttgcaacaaaactcggtgctcgtgtcaccgaggtgtcgcagaacggtacctgcccctggctgacgcctgaagggaagaccccagtgaaccgtgagtattac

SEQ ID NO: 115392 - DNA, 491 bp, Glycine max
  Clone ID: PAT_MRT3847_75208C.1
ggccaggcgagcccgactcaaccaccacacctctcctcgatcacgctacccctttctgctcttattctacctttcaagttttaaaagtatacagatggcatacacattcctatttacctcagatgcggtgaacgagggacaccctgacaagctctgcgaccaaatctacgatgctgtcctagacgcttgcctcgagcaggacccagacagcaaagttgcctgcgaaacatgcaccaaaaccaacttggtcatggtcttctgagaaatcacgaccaaggccaacgctgactacgagaagatagtgcgtgacacctgcaggaacatcagcttcatctcaaatgatgtgggactggatgccgacaactgcaaggtcctagtgaacattgagcagcagagccctgatattgctcagggtgtacacggccaccttaccaaaaacctgagaaaattggcgctggtgaccagggtcacatgtttggctatgccactga

SEQ ID NO: 115393 - DNA, 215 bp, Glycine max
  Clone ID: PAT_MRT3847_7520C.1
ggggttagcactacccaagcagtagttaattaaaacattgccaccaactgacacaaggactacattaccacatataacgtagccacggagcgtaatctctgctataaccactctcaggggtggtgctaacatgtggggaggcccttattaatctacgatatgcacacaggcacgacaagagagataccctgcactaactacatacagacaacctt

SEQ ID NO: 115394 - DNA, 409 bp, Glycine max
  Clone ID: PAT_MRT3847_75210C.1
ggcagagacattcctatttacctcagagtcggagaacgagggacaccctgacaagctctgcgaccaaatctccgatgctgacctcgacgcttgcctcgagcaggacccacacagcaaagtggcctgcgaaacatgcaccaaaaccaacttggtcatggtcttcggagaaatcacgaccaaggccaacgttgactacgagaagatagtgcgtgacacctgcaggaacatcggcttcatctgaaatgatgcgggactggatgccgacaactgcaacgtcctcgtaaacattgagcagcagagccctgatattgctcatggtgtacacagccaccttaccaaaaaacgctgagaaattggagctggtgaccaggggcacatgagtgggtatgccactgatcaaaccccggat

SEQ ID NO: 115395 - DNA, 1538 bp, Glycine max
  Clone ID: PAT_MRT3847_75211C.1
ggtatcgcttcagagttgagaccaagacgacactcgttcatatatctctctgctcttctcttctcttctacctctcaagtttttgaagtataaagatggcagagacattcctattcacctcggagtcagtgaacgagggacaccctgataagctctgcgaccaaatctccgatgctgtcctcgacgcttgcctcgaacaggacccagacagcaaggttgcctgcgaaacatgcaccaagaccaacttggtcatggtcttcggagagatcaccaccaaggccaacgttgactacgagaagatcgtgcgtgacacctgcaggagcatcggcttcatctcaaacgatgtgggacttgatgctgacaactgcaaggtccttgtaaacattgagcagcagagccctgatattgcccagggcgtgcacggccaccttaccaaaagacctgaagaaattggcgctggtgaccagggtcacatgtttggctatgccactgatgaaaccccagaattcatgccattgagtcatgttcttgcaaccaagctcggtgctcgtctcaccgaggttcgcaagaacggaacctgcccatggctgaggcctgatgggaagacccaagtgactgtggagtattacaatgataatggtgccagggttccagttcgtgttcacaccgtgctaatctccacccagcatgatgagactgtcaccaacgacgaaattgcggctgacctcaaggagcatgtgatcaagcctgtgatcccggagaagtaccttgacgagaagaccattttccacttgaacccctctggccgttttgtcattggaggtcctcacggtgatgctggtctcaccggccgcaagatcatcatcgatacttatggaggatggggtgctcatggtggtggtgccttctccggggaaggatcccaccaaggttgataggagtggtgcttacattgtgagacaggctgctaagagcattgtggcaagtggactagccagaaggtgcattgtgcaagtgtcttatgccattggtgtgcccgagcctttgtctgtctttgttgacacctatggcaccgggaagatccatgataaggagattctcaacattgtgaaggagaactttgatttcaggcccggtatgatctccatcaaccttgatctcaagaggggtgggaataacaggttcttgaagactgctgcttatggacactttggcagagaggaccctgacttcacatgggaagtggtcaagcccctcaagtgggagaaggcctaaggccattcattccaccgttctttgctggtagttttttgagcgttgccattacgatatctattatttgtttcatgtcacttacttactccgtgtgtgcttctcctcctcccctccttctattttgtttcttctatgttcatttgtaattttttacatgatcaattcaacgtgatacaaaaattattcttagagagtgaacggaggagcgtgtgagatggatgtaggaaaataatgcttgtgtggggggccgggacctgatttgc

SEQ ID NO: 115396 - DNA, 133 bp, Glycine max
  unsure (1)..(133): unsure at all n locations
  Clone ID: PAT_MRT3847_75212C.1
tctaaaagcattgaatcatagtatttgggtcttttttgggaaacgaaaacattgtatctttaaatatttggacatttggatacccttgaaatttggaatgtcaacaaaactagatggaactggaaaanaaaaa

SEQ ID NO: 115397 - DNA, 427 bp, Glycine max
  Clone ID: PAT_MRT3847_75213C.1
gctaggcccactcaaccaccacacctctgcacggtcactcttcccctttctgctcttcttctaccatggaagttctaaaagtagaaaaatggcagagaccatcgtagtaacctcagagccggggaacgagggacaccctgacaagctctgggaccaaatccccgatgctggcctcgacgcttgccttgagcaggacccagacagcaaagttgcctgcgaaacatgcaccaaaaccaacttggtcatgggcttcggagaaatcacgaccaaggccaacgttgactacgagaagatagggcgcgacacctgcaggaacatcgggtacgtctcaaatgaagggggactggatgccgacaactgcaaggtcctcggcaacattgagcaacagagccctgatattgctcaaggggtacacggacaccttacc

SEQ ID NO: 115398 - DNA, 201 bp, Glycine max
  Clone ID: PAT_MRT3847_75214C.1
gtgattgttgtgactcgatcttcttcgtagttatctagctcataatgtcgaatgagtgaggggggcttttttcacgtgaaaatgtcatgctgcggtggtcacatatggctgcggaagcgcctgcaagtgctgcaacggctgcggatgctgctagatgtacccagagttgatctacaccaaatcaaccaccaactagacctt

SEQ ID NO: 115399 - DNA, 337 bp, Glycine max
  Clone ID: PAT_MRT3847_75215C.1
tgaggccaggcaagccccactcaaccaccacacctcttctcgttcacgctacccctttctgctcttcttatacctttcaagggttaaaagtataaagagtggggagacactcctatttacctcatagtcggtgaacgagggacaccctgacaagctctgtgaccaaatcttcgatgctgtgctcgacgcttgcctcgagcaggacccatacagcaaagttgcctgcgaaacatgcaccaaaaccaacttgttcatggtcttctgagaaatcacgaccaaggccaacgttgactacgagaagatagtgcgtgacacctgcaggaacatcgggttcgtc

SEQ ID NO: 115400 - DNA, 554 bp, Glycine max
  Clone ID: PAT_MRT3847_75216C.1
atactatttgtttttttttgtcatgtttctagttttctccttttctgtgtgcctgcatttcctgttacatgttttgtgtcaattttgacacctggattcaattccttcttttacagatttatgaattgagttttattgatttttgaataattaattatgtataataaattgtagatggccttcgaattaggattcggtgaatttttttttatacatttgatgcttggtcttgcaaaatcagtgtgcacatttctgttgaattgaaagacaatagaaaatcttagtttgtttcgatgtaaattaaacttagctgaaccataagtggtgaattaaagcagagatatgtatttgatttttgagtgtcaaatgaattgtgatatattttactaaatgctaaaatttctcattttaatcatattcttgctgtgataggaagtgaggcggttgcatcgaagcaatgtgtgttcttatgtttaatatatgttagtttgcttgtgttattccaatgtatgtggcaatgatcatattgctgtaaataaaatctgattcttcgt

SEQ ID NO: 115401 - DNA, 629 bp, Glycine max
  unsure (1)..(629): unsure at all n locations
  Clone ID: PAT_MRT3847_75217C.1
ggtgtaggtggtggaaatggtggtttgggaggtttagntggtgggcctggtagtgtaggaagtggtggcggtggtgcgtacggttgcggtattcccgcagtaggtggtggcggtggtggattaggaggaccggtggtgccgggtggtgcggggactttaggtggagctggtggtttgggatgtggtgttggtggtgctggtgtctttcaacattgtaataatccttgatatcattctggggcttgcatgcatggctgttcttgttaatctagggctgccaatattaattgttttttaggttagataatcttagcctcttagcatttgatttacttgttatgttattttagattcaagttgttataattgtcttggtttactgtttgatgtttctggtcattaaaggctgcatgcatcgacagggtcactatcgttgttgttagttttgtactccactttttgttagtgttttcaatgtcatctgtcgttgcctttctttctttctttaagcaacagagtacaacttaaatctgtatgtgtgagagtttttggctggcctatttggtacattcctttgaattgtcagtgcacactaataaataaagcactatatgttttatttttgtccc

SEQ ID NO: 115402 - DNA, 705 bp, Glycine max
  Clone ID: PAT_MRT3847_75218C.1
ccacgcgtccggtgaagaatttagggccgtgtcatggtgtctaatacaagccctggattatcttcagagtaaaatgtcagtggtagaagtaagtttgaatggtagggattttattggggtttggagaagtttggcagcaggaattgatcaattgatttttaatggtattctcataagcaatgtaaaatttcacaatagtggtgttgaaagatttggtagcgacttggatgttttatttggggtatttggagcatggtgtttgcgacctgaaggttttttcccaaaatcaagtgaaggtctgaagttgttgaagatggatgaaaatagactgcaagaatgtatgggaggggggaagagatggttgaaggagaatgggctcaggcgtttgagtgtaactgaagcagaaaagattttgaagaacagggtgttcacaagttgaagcttttgggcttacattttaagcgcatgctctgctggaatggcatagggaagtgtgaagatttaggattgtttaatggtgtacatgactgtagaccagctgaactaattcaattttgcaaagttgcaataaatatattttccattaagaatattctcaggcattgccacgtacctcaaatttggggcatggctaatacttcatatttctagatgctaattatactgtaaatgtgcagtgaggaaaactattcttcctattcgtat

SEQ ID NO: 115403 - DNA, 448 bp, Glycine max
  Clone ID: PAT_MRT3847_75219C.1
atctattctatgatccatattactcaaaatatagtgcatgatgggagaccgtcttatggatgtgcataccaaacccctgatcatatacggagctcattgactgtgagttaaccttacatgtaatacactgggttccactagatctgatacatatattcttggtgtccggtggtgctatccttattgatcagaagatagaaaagtatgttcttatgacctataatacgtggccacacgcaagaaacggactgagacagacaggacattatatattgcttttagtgatatatttgctgatgagataagggatgcacgatatgccgtactagctataaactagagactatgaagcaaacactacaatactcaactcttagctgtcatgtggctgcaaatgagaatagaacattatctgaagatgatatacatgatcgagtcgatatgatag

SEQ ID NO: 115404 - DNA, 324 bp, Glycine max
  Clone ID: PAT_MRT3847_7521C.1
tgtcaccctagaaatttagctgaaaggatacacatcaacatttatcgtaattagcgacttgctaatcctgtattcagctttggcatagagttgcaaaaaaatgattttactaaaattaagagagaagctatgttaaaaaatgtcatccaaagggtcatcaacatgcaactcaccggcgaactgcaaataggacatgggcgacgaacttcaactaatacttccacagcttctgcaagtatcgtaccattatgaagagcaagactgattaagacatcgccctcttgcggcaattcgagcatcccgggaatgttttcggggtcctca

SEQ ID NO: 115405 - DNA, 275 bp, Glycine max
  Clone ID: PAT_MRT3847_75220C.1
tactgtaacatgcctatatttattatgtacctggttcacatgcgtacatcatgaccagagtggcacctatgcttcctagctttatttcaaaacacaaatctaattatccttggggaaatgtatcaacaaccaaaaccttttaccgaggtcaggccttgataattggacaccattgtattctgtctaaaaccaactcttcagagagactgtttagatctaaatcctttttaacgatttcacttaatttttcttgatctatctctaattctgtagct

SEQ ID NO: 115406 - DNA, 272 bp, Glycine max
  unsure (1)..(272): unsure at all n locations
  Clone ID: PAT_MRT3847_75221C.1
cccaaaaccctaggtagagagctcntcntcantctcattcgcantggccgcagcagcacgtcctctncgtcnacgtgcaggccctcgacagtgacattggcaacggacgcttcggccaaccgtccttatccctgaaggtcatgaantccntccatcggccccggacntcgtaactttggtaaantccacnntttccnaggaanngcnganaacctantgcnntcagcggnggngttggccaacaagaattcggcggagtcttggggaacggt

SEQ ID NO: 115407 - DNA, 237 bp, Glycine max
  Clone ID: PAT_MRT3847_75222C.1
gttcagtcataccatccacactagatacaatttcagtaatctgtaactaactctactgacttgaaggacgctacaatgaactcaatagaatgcattgaggagctatgggtcatcttccgagggatagatgggaagccagagtgtgatcagaacacctgagcatacagataatgttctcgacaactaggcacggtgaatgagggtcgtatccaatgatctaaacatggctgggaatat

SEQ ID NO: 115408 - DNA, 308 bp, Glycine max
  unsure (1)..(308): unsure at all n locations
  Clone ID: PAT_MRT3847_75223C.1
aaaagagtcaaatcattttcaagctattctgtcatattttccaattaacccancgtagattttcatgagatgtgagggagaaatatttagagtatatttatgctactgatcaccagctgtttattagcggagattggtggacatgacacacaaaacgataatttattgggttcatagagaatcccagacatactgcttcacaagaagaggaaggcaactgggtttccatgcaaataaatgggtcactcgtatctgaattacacctgcacataacaatgaaagcatattcgcttgtttcttgatctttg

SEQ ID NO: 115409 - DNA, 332 bp, Glycine max
  Clone ID: PAT_MRT3847_75224C.1
ggtcgacccacgcgtccaaacaggcgtcagtacaggagtgagtggggctccgacgggaccacagaaggggttgcaggtctatatatcgacatcaacggttttacgttctaccaacaacaccaccagctccatcatcttcgatgacaacatgtcaaatttgacctctgcatcatgtcacgctagtgcttcctcacgttacctatctcaattttgcatctgctacatggctccaccaccaattcatgttcaaccaccgcatgaactcaagagacctccttggcgatccatacaatgattctgaagttacagcctagtctcccaagagtcttcct

SEQ ID NO: 115410 - DNA, 178 bp, Glycine max
  unsure (1)..(178): unsure at all n locations
  Clone ID: PAT_MRT3847_75225C.1
ttacaacaaaaataaaatgaaaaaaaaaatcaatttacaaagcaaggtagtactgctcatgaaaccttcaataccatataccatattcacaacagttccattataaggtaagaaagcaaatgtgacttttcacactactantaagtaataatncactttccaattgatcattcttctc

SEQ ID NO: 115411 - DNA, 2207 bp, Glycine max
  Clone ID: PAT_MRT3847_75226C.1
gtaaaatcttggtcctcctcatccacaacacaaagatcaaatcctacgcaacgtgtggttaaaccaaacccgcgtgctccttttccatttctcatttccttcaaggcccgaggttctcagcacaccacatcacctttgcagcagcctccataatattccaattcatcaccctcttttcaatattcccttattatcgctttgattcgttgatttttttaattctttacctcaattttaataagaatcagtttttgtagttttgatttgttgtagtaagattaattaactattcagattcagttattgccagctttgatttctttttttttttttttttaattaggtttgcaagtaaaacccaaacccaaacccctagaccttgggaatagtttgtgagttgtgttgaaaaagaagcgtgtcagcgatttttgacatcgggaatcggatcggtcaggccggggcggatttcggtgccagcttgaacgggctggttcagcagtttttccggtcgttgccggtgccgatgccattcaagcacgaggagagttcagtgagggtggagggtggggataaggggtggcagagaggaggggttgtggttgctgtgcaggaggatttgggattgcttagtgagaggttgaagaatcgtgggtttgctgagagtgttagtggcagtggtggtggaagcgcggaggaagagggtggtggagggtttaaccttgggtctattggtcttctgggcaggcgacagggaatcataaattttacatcaacttatgatagtagaactcaagaagtggaaggttctttagttgcaaggggagatttgtggagagtagaggcatcacatggtggttctgcgtctagaaatgaaaattcatctcttttcctggttcagcttggacctcttctctttatccgtgattcaactctcctcttgcctgttcatttgtcaaagcagcacttgctgtggtatggctatgatagaaagaatggaatgcattctctttgtccagcagtgtggtcaaaacacagaaggtggctgttaatgtccatgctttgcctgaatcccgtagcttgttcatttgtggatcttcaattccctaatgggcaactaacctacgtatctggtgagggtctaagtaccagtgctttcctacctgtttgtggaggtcttcttcaagctcagggtcaatatcctggggaaatgagattcagcttttcatgcaagaataagtggggaacaagaatcacaccaatggtgcaatggcctgacaaatcgttttctttgggtcttgctcaagccttggcctggaagcgatctggtctcatggtgaggccatccgttcaattcagtgtgtgtcctactgttggtggaagcaatccagggttgcgggcagaacttattcattcagttaaagagaaacttaatctaatttgtggatgcgctttcatgacatatccttctgcatttgcttctgtatctattggcagatcaaagtggaatggaaatgttgggaactcgggtctggttctaagagttgatgttcctctctccaccgttgggcgcccttccttctccattcagataaatagtggcattgagttttgatagcattctagtgtttggtatcatcagttttatattttgcatgaagtgtacataggtttggtaccttgacagtacttgcaggaaattaaaaaaaaaactcctaacaacaaagcttagtctttttatgtgaatagaaaatcctattctggtagtgtattagttttagtcttgtcattttctatggtacatcccaaatcattttggagcctggtgtacttattgaatttctaattattttgaaggcgtaatttgtaaaagtttgtttcttatttcatgctttattacgattgtagacttgtataagcactaattcttgactattatttccgaagttcattgtggaaagagagtgcttatgtatcataatctaaatggtttgtcttacagattggcagatcaaagtggaatggaaatgttgggaactcgggtctggttctaagagttgatgttcctctctccaccgttgggcgcccttccttctccattcagataaatagtggcattgagttttgatagcattctagtgtttggtatcatcagttttatattttgcatgaagtgtacataggtttggtaccttgacagtacttgcagg

SEQ ID NO: 115412 - DNA, 499 bp, Glycine max
  Clone ID: PAT_MRT3847_75227C.1
gacaaacaagctttccatatctgatatcatatcatactgtttcctataattctaatttatctgggcatggctacgccagggtttggtctcgctgaagcatacatgacacggaagatatacaaggaaaaaatgaaaaagatagcacaagaagaacaagagggagagaaaaactccaacatgaagatttctactatcaaaacgggttccgaggataaaacatcaagtgggtgtttctcatgggtctccaaacagcaacacaagaaaaattctcgaatttcagattacaacgaaaccctagctgctgccaattcatgattgacgatgttgggcttttatacattttaagtactaattaatgtttctttcaatttttcatctgtactagagattattctttttctttttgtcattattatgtataattgcataccctcccatttttgtgaaatggaatgaacttgttgtaattccctgaattaatatttggaaaaaaaaaaaa

SEQ ID NO: 115413 - DNA, 272 bp, Glycine max
  Clone ID: PAT_MRT3847_75228C.1
ggttggaacatgtatcattattttgcaccttttcatgggatgctagtcatattccaatcacattccttaaattaaattatccttaaaatatctggccttttccttatattacaggttgagggggaaaacatgctttatcaccttggcgggaaaaggaaacctggcacgcttttcttgggggggaagggaatcaataaccttaatttgaagaaaaaaccctttccttttttttcttgattttaaaaaaaaaaaagaagggaaccaccgaaaaa

SEQ ID NO: 115414 - DNA, 540 bp, Glycine max
  Clone ID: PAT_MRT3847_75229C.1
gctaaaccttgcaagatagccatttgaaaactgtctcctttgatttttgtaataaaaattcgtatcattcaataataatataaaagtgtatgaaacggaaaaattttttcttgggaacttgctgtaagaaaaaatcccttacaataatgtaaggaaagtgtaagacttttagatagagtatagtatgccatttttcgtataatacaagtatagatatatgactagggaaaaagaagtgcaaacaggaggttcatgtatgaaattggtaattaaagttttaactgtattcgccattattctaggtggaacagcgtattatttgaacacaaaaacagaaggtgtacatgcttttgtagacaacttcttttcaaataaagaaatacaagattattatgcggttatagataaaggtgagaaaaaagacggagaatacttgtatacttttaaagggtatacagaagacggaaagttacaggttattaaaagaatgatgaaccgtgaattgcatacgggtgcttttataaaaatttatgcaaaagg

SEQ ID NO: 115415 - DNA, 197 bp, Glycine max
  Clone ID: PAT_MRT3847_7522C.1
ggctcgagcaaacactagcaaagggaaggaattgtacctttcccaataacccctatctccggtggggcttgtctcatcggagggaaacaatcaataaaagaaaaaaaaaacccacaaaaagattataacaaaaaaagtatgaaaggaaaagtactaggttccgcaggttctctcatcctactggtgggtgtggtaat

SEQ ID NO: 115416 - DNA, 301 bp, Glycine max
  Clone ID: PAT_MRT3847_75230C.1
ctcgagttatgccggaaatcaatttttgctacggcgtgcggtggtcggagagtagaaagaaagaacaagaataagggtttcaggtcttgtattctcccaaattggattcaaatatgagtgtaaaagggcacaaaatcaacacaagacaacccagactatgaggtaaccatttctcaaaggtttttctccggtcgccgccgcaccgccgcgccgttaagacgaagagtagaagacgggaataagaaggttttacagagttcccttcccttcaaagcctttcttcgacccatattcactcttt

SEQ ID NO: 115417 - DNA, 1719 bp, Glycine max
  Clone ID: PAT_MRT3847_75231C.1
tgatgttccatgatgagcagatagcatgattgagatgatagtgttcctcttccttgtcttgcttatatcccttatcttgagcagcagttccaataatagcctccagcttcccccaagcccaccaagcattcctctgctaggtcacctccaccacctcaccccttccctatacaaatccctctacaccctctcatccaagcacggtcccctcctcctcctccgcctcggcccctcccgccgcctcctcctccttgtctcctccgccgccgtcgctaccgatgtcttcaagacccacgacctcgccttctcgtcgcgccccgccttcgccttcgccgagaggctccccttcggcacctccggcttcgtcaccgccccctatgggccctactggcgcttcatgaagaaactctgcgtcacggagcttctctccacgcgccaacttgagcgctccaggagcataaggagggaagagatactacgttccatcaaaagggttattgacaatgctcgtgagactgttgcacttgatttgggctccgagttcaccaaattcaccaacaatgtcacttgcaggacggccatgagcaccagttgtgcggaaaaatgcgaggatgctgagaggatcaggaagctagtaaaggagtcctttgagctagctgcgaaattgtgctttggtgatgtgttgggccctttcaaggagttgagtttttgggtgtatgggaaaaaggccatagacatgagcacaaggtacgatgagttgttggaagaggtgctcaaggagcatgaacacaaaagattatcgcgtgcaaatggtgatcaaagtgaaagggatttgatggatattctgttagatgtttatcatgatgctcatgcagagttcaagatcacaatggctcatattaaagccttctttatggatctcttcattgcaggcacacacacctcagcagaagcaacacagtgggcaatggccgagctcctcaaccaccctgaagcatttcaaaaggtgagaaaggagatagagttagtcactggcaatgttaggcttgttgatgaatccgatatcacaaacttgccatatttgcaagcagttgtgaaggaaacactaagactctacccgccggcaccaatcacgacaagagagtgtcgccaacactgcaaaataaacagcttcgatgtgccaccaaagacagcagtggcaatcaatttgtatgccataatgagagaccctgattcttgggacaatcctaatgagttttgccctgaaaggttcttgcaagaacaagatcatgaggatttgagtgatgatggtaagagaatgaagttcaattttgttccatttggaggtgggaggagaggttgtccagggacagcactggcattcagcttgatgaacactgcagttgctgctatggtgcagtgctttgattggaaaattggtaaagatggaaaaggagaaaaggttgatatggaatctgggtctggtatgtctttgagcatggttcacccccttatttgcgttcccgtagtacattttatcccatatgatatataatataattcaatataatgaagactcaccaaggaagaacttatattatgatatgatgggtaatatataatataacccttatcttcaattttatcctttcttatcctaattttcattgttttacggaaagacacttcctgaatccaagttcctgaatccaagtcttg

SEQ ID NO: 115418 - DNA, 290 bp, Glycine max
  unsure (1)..(290): unsure at all n locations
  Clone ID: PAT_MRT3847_75232C.1
ctcncangcncgcgtacgtnagctcggnattcggctcgagctttganacaggnttgatcggntcnaagtccacacctatcccacnnngtgnnacataccctggcannagatcattgcagtcgnngtgggttgtgngatacnnnctanattgcccatgtcaanaangcangcgcttncntggncganggaatgnctangattganagattggnacctgtngnncatggtagnngcaggacgacngataacnnggnngngacctacttaggggnctcngaggngctgcnata

SEQ ID NO: 115419 - DNA, 276 bp, Glycine max
  Clone ID: PAT_MRT3847_75233C.1
gatgatattaatgttttgtttcggaaaagtttaggcgatttaggtctcgaaacttatgagggtctcagaacaggtttcacgtctcaaagaacgtttgatgatgttgttaaattgttaagtaaggatgttggtgctgaactgctgattgtgcacgttaaaaattgtacaagcagattaaggagctgaagggtgctattggacccttatctggacgcagtttgatgtattgcactgattcatgttttaagagatatttggaagctcgaaactggaacg

SEQ ID NO: 115420 - DNA, 294 bp, Glycine max
  Clone ID: PAT_MRT3847_75234C.1
acgcatccgtaccgatacgacaacacaaggggactttacgttcgaactaaacaattcaattcattctgcctcgatcatgggaaagaaaacatttgggtttttgttcttgctcctccttggcgttggggtctgatgtgacagtgataagactaggggcgaacgattgcttgacaaagatgcacggattccacagtagatgcttattcgacaagcaatgtgcacatttctgcaagaaccataggttcatcggttgtcaatgccaaaggcctcttcacaaatgcttttgcaacaaga

SEQ ID NO: 115421 - DNA, 493 bp, Glycine max
  Clone ID: PAT_MRT3847_75235C.1
aacataaattatggccactgcaaaaactctttcccccgccgaaggaagtctaagaaaatattatgcgactaaaattcgtgaggcagaacaaacatttgcggacaagttgcaaaacacgcgttgtctgcaggcccaacgcaacgaactgaacaacaaagttcgcgcacttaaggaagaactgatgcaactgcatgagcagggctcaaatgtgggcgaattggccaaagtgatggacaaacagaaggcactcgtaaaggtccatcccgaggggaaatacgtcgtcgacattgacaagtctattgacgttgcgaaactgaccacgggctgtcgggtcgcattgcgagcggacagttacgcactgcacatgattttgccaaacaaagtggacccattggtcagtctgatgatggtcgagaaagtgcccgactcgacgtacgaaatgattggcggattggacactcaaatcaaggagatcaaagaggtcattgaactg

SEQ ID NO: 115422 - DNA, 1614 bp, Glycine max
  Clone ID: PAT_MRT3847_75236C.1
ccgggctagacacgaatctctgtgcatgtattttctcactacaaaagcacactcactctcctcctctcgcctctttccttctttctttctcccattctcctaaattcctccaaaaaccctaacactctctcattctcagtttttctcaatcttatgattaatggaagaccacgcgcatgctgcactacctcccggttaccggttctacccttccgaagaggttctcgtcggttactacttaaccaagaagaacgagaaccgggaggagggtttctacggttctgatttgatcagagaacttgacctctacgatcacgatcccttcgaattaccggacgctgctgcttgcttttcgtacggttacaaagggaggaagaagcattggttctgttacgctaaagagaccaaacgcagaaacagaagaaaggtgaaaagcgggttctggctccggaagggaaaggttcgggatatttccgaccacaacggcgacgacgtcgttttgggcacgaggacgcgtttcgttttctacgtcggcaattccctgaaaaacgctgccagaaccgattggattttgtacgaatacgcattggttgatcgctttctggcttcgtttgtgctttgtcgtgtggtgaataagcctcctcataagaatagtccgtcggagatcggtctgagttgttgtgctgaggagagtgttgtggcggtggtgcgtcacgttggtgttcagtgtgatggatgtgccgaaagtgatgttgttgaagctaaggtgtgtgatgaaggctttgttaatagagagaatgagattgctgagaatccaattagtggtgaacatggtgatccagctgcacctgtttcagttgctcagggaagtcatcaggttcaggaaaggctttctaaacttcccagtggcagtgcattgttcgtaggagctatgacatctcagcaacttatgctttccattctagaggaggatttcatagaattggatgatattgcatgaattgattggttttaagagattttgtgaattctaatactgctctgaggagtaattatcacctgaaacaattgtattcagaatggattattgacccagctaaaggggagaaagatttatgataatgagtagctattattccactcaaacgaagaaacatactgtcgaatggggttgaggcaaatgtcatgaaatgatcacttcgcatgttaagattttctcctgtgcctactgcagggcaattggctccagagggatagagttagagttagatattggtattggtaattggaatatgcgatttactctagtatgctatgagcaacttcaccgtacttcatgctttcattgttcccttgatcgacctgttcctatttaaatttaattagcattcctgggatcatcagaatttcctatctgcaccttagtagcaagacctatttgttactgtctgtgctactttctttttcctatattgttcaagaggagaatcagatgaattccaaattgtaagtgttacaacataatgatagtttatgaattgacttaacctttatacttttgaggttatgctgactaattttatgttcttcatggtatttttgtttggataaaaa

SEQ ID NO: 115423 - DNA, 639 bp, Glycine max
  Clone ID: PAT_MRT3847_75237C.1
ctttcccctccccccccccccccccccccccccctctcccttttttttttttttaggcagcataacctcaaaagtataaaggttaagtcaattcataaactatcattatgttgtaacacttacaatttggaattcatctgattctccttttgaacaatataggaaaaaaaaagtagcacagacagtaacaaataggtcttgctactaaggggcaaataggaaattttgatgatcccaggaatgctaattaaatttaaataggaacaggtcgatcaagggaacaatgaaagcatgaagtacggggaagttgctcatagcatactaaagtaaatcgcatattccaattaccaataccaatatttaactttaactttatccctttggagccaattgccctgcagtaggcacaggaaaaaatttgcattcccaaaacaaaaaaaaactggtgaatattttctcaagtagctcaagagagtaacataccaagatctattgtaactaccttaacatgcgaagggatcatttcatgacatttgcctcaaccccattcgacagtatgtttctttgtttgagtggaataatagctactcattatcataaatctttctcccctttagctggggtcaataatccattctg

SEQ ID NO: 115424 - DNA, 395 bp, Glycine max
  Clone ID: PAT_MRT3847_75238C.1
ggctcgagggtggatgacgctatgctattatctatggacagcaaaggagctgaccttagggtgcgtagcggtgctcagcataacatgtgaaggatcttatatgccgaaggacaaaaggtctaatcatgggccgaagctgaacatgatctattgaggtggagacacacaggatgcgtgcacacattgcataactctgatgggggatgaccgattcatctacgactagggtcaacgacactatatggagacgatgcgagtatctactggtactttaccatgggacatgtgatacagtttgccgtggtgacatgcaccatacagtgtagtatagtccatcgcatttgcaagcatatgtgctaaagtctgatcgagagacgactttatgcgggctatac

SEQ ID NO: 115425 - DNA, 315 bp, Glycine max
  unsure (1)..(315): unsure at all n locations
  Clone ID: PAT_MRT3847_75239C.1
tacgacagattggttttagcaaatttcttttatccctatnttttcttccggagtagtgggcatttactgcttctctntctctgcagcaactatgncctaacctctaagggtcttctttgacanttaccatctggcggtcaatcntgctggccgcatctgtgatggagcctctactgccgacgttcactccctcgcactcgtcgagtaacttcctgcgctgctttgcatccgtctatgaagggcgtagcggcggagcggctaagctcctttcactacaatgggctttgtcctttccaccgtgttgatcccgagttt

SEQ ID NO: 115426 - DNA, 480 bp, Glycine max
  unsure (1)..(480): unsure at all n locations
  Clone ID: PAT_MRT3847_7523C.1
gatatatcctttatcttgtgttctttatatgttgatttttatttgtgaaactttaacccgtgtatgtgtgtgcatctgttgctttgtatacttgtactatgtggaaccttggttgaattcaatctttatttttggtttcaatggttgtctccacagaatcgtgttataaatcctgcaatgtctggtggttatcctcaacaaggttaccaatctcgaccaccctctgattgggctccccctgccccaatgcagcaagctggttatggctatgtgcaacctggagcatactctggtccatcaccccagtataacatgcctcagtaaccatatgcaggctatcctgcccagcaacctggtggatattccaccaattgtgaccagtctactgcaccacctncaccagcagtctactcatggtggtggttatgattactatagtcatcagccacagcaaccacaaaaattctgtgggtactgtac

SEQ ID NO: 115427 - DNA, 185 bp, Glycine max
  unsure (1)..(185): unsure at all n locations
  Clone ID: PAT_MRT3847_75240C.1
ccgggtacgcacccacgaccgtccgcgnagaggcacgtacttacgtctcacaggagcacactcacagctcacactgcccgntgtgccgaccgctcgctcatccatccacgcaccattgccttttcactgctcacggaatggacaaccattcctatctcccatatccagaaccgctacaaattgcc

SEQ ID NO: 115428 - DNA, 245 bp, Glycine max
  Clone ID: PAT_MRT3847_75241C.1
ctcctccgttcaatcaaccacaccatctctcattcctacccgtttttcttctacctccacaacgaaacaaacatggtattgggtcaatatcttacacgcgctcggaaaaacataaatatcatttcattctaactaatacccctcaccatataattatcattacacacatatttcactgacactttatttgttcaattcacctcgcatatactcatttttattaattcttacatttatcaccttac

SEQ ID NO: 115429 - DNA, 396 bp, Glycine max
  Clone ID: PAT_MRT3847_75242C.1
attaagtcaattgtttcagaagaacaaacaagtctacaacttgctctagtggggactttttttcctatccccccttttttaatgaattcgtaaataccattgttaatagttcttcgtaggagtattagcatacaactggttaagttatatgctgtatcaaattaataagaaccttggaagaatcacaccagaaaagctagcagttgtagttggaggagccaaagttcttataaatccctcactagaatcgcatacttcctatatgggattcaagtctcataccttgctattggattctagcacacatattatgtcaatgattgtattggattttgatgctgtcttcttttgctatctaaatttggtagtgttgctaattctatctgcaacattttt

SEQ ID NO: 115430 - DNA, 319 bp, Glycine max
  Clone ID: PAT_MRT3847_75243C.1
ttccatttgtacgcccgcgcggacgcaaaagcgaggactatgtcatttaatgcaaacccgtgtgctgaagcatggagcttgagattaatgaagcgtacctgatttcattgcgataacatttgtgtcaatggatggactgactccccagcgcatgatgtacaggttacaaaagatagtgctataggctatcacgaaagggttgccagtacctatcgtgaaaagaatccacaaaatccttttgtgtgagaataggtggatgggaaagctgactttacatcagggcgcctcacgaagaggtaaatgaatgcctatttctata

SEQ ID NO: 115431 - DNA, 452 bp, Glycine max
  unsure (1)..(452): unsure at all n locations
  Clone ID: PAT_MRT3847_75244C.1
ggccaaactcagttaaacttattgcaacttgtgttctagtgctcatagtggtcactgctttctttctacttcccaaaactcagggtctaattagtcaacaatgagaaagtactgattatattctcttagttgttggcagtgactaaaccaattggtctcaggttttctaagttttagatagtagacactagtaatagatttcttctctttcttagtctcttttgcttcaactagtttttcttttctttttcaatccctgatagaaaatttttcagaatgaagcattctcacattttaccactagcatcctgtatctttttccttactttagttattctcgtccaagctaggcatcattctcatcatgcaaaacacaagcactcacatcctcataaatcttctaaaactccaaagcctgcaccacctnctagcccttcacataatcagaacta

SEQ ID NO: 115432 - DNA, 511 bp, Glycine max
  unsure (1)..(511): unsure at all n locations
  Clone ID: PAT_MRT3847_75245C.1
aaagcaagcaaggaacttaactaaaaaaaaaagggggaaaggctaacaacacaaacccccaaacaaaaacctttctctttaaaggaaactgggacaggaaaaaaattacaaaggatgcaaaaatcataaaaaaaaggtaaaaaaaaaacccaaacccccccctccatgggtagccccatcaaaaaagggatggggaaaaaccccccaaagcaccttaatttccatgggacctcccccgcccccttggtttaaaggggggcttgctatagctataaagctttacccccgcaatatatatatatataggaaggggcccctttttcaaacctcccccaanatatatatatatatatatatatatatatatatatatatatatatatatatatatataaaaatatatgggaaaaaagaaaaaaaaaacaaggagcgacacacacacacattcattggttcaaggccaaggatattctaggggttccaggcggaggcccaaaccaccgggtcctcc

SEQ ID NO: 115433 - DNA, 168 bp, Glycine max
  unsure (1)..(168): unsure at all n locations
  Clone ID: PAT_MRT3847_75246C.1
gcgcttttgctgaagctctgtttggcgttcgagaaagggattggcagagcggagcaggagaagagggtcatggcttccgcggttcagaccatcacagggtttcggagctttcgcttcttggcttgacattggtccaatccttgtgctttctggggtgacctcattacn

SEQ ID NO: 115434 - DNA, 249 bp, Glycine max
  Clone ID: PAT_MRT3847_75247C.1
taccaggtgcctgtcactaaaaaacccagccgtgggggttgatctaatgtacggtaggtatggcgtgtcgatcacccaaatacggtctaacagtatgcctagacagctattagcagcctgaggagcaaatcactgccggttgagcgcgctgctcgtgagagtcgctcagatgatcttcgatacaggttcgttccgaattcgactctgttcacacagatccaccgattacgtcactatccaatgcagcag

SEQ ID NO: 115435 - DNA, 594 bp, Glycine max
  Clone ID: PAT_MRT3847_75248C.1
agtgcatgagcctcacatggattttgtttaaacctgtttttatttcagtcaaaacatgtggattcagttttctggtgcattttattgctttcttttcactcatatttgatccctctaaactgttcagattaaaagcttaaggttgccaatgaagtttggaagccatagaggctttgcttttgtagagtatgttactcagcaggaggcaaaaaatgcccgcgaggcacttgcaagcacccatctctatgggaggcacctgttgatagagcacgcaaaagaagatgagactttggaagaactgcgggctaaaacagctgcccaatttagtgatgaacagaatggatttcaaagtgctatgaaattatccaaaaaaaggaatcaagttgatatcttggatgaagggaatatgaagtttggaagaatggctgactagtacggctccaaagatttaaacagttttgtgcatgtcttgaaaattcagagatcacaattttgccataggttgtaagaatatataaacattctatgatacatcttttgatctttaagtgttaaaataacttcaagtttaggtttctattctttatccatttt

SEQ ID NO: 115436 - DNA, 394 bp, Glycine max
  Clone ID: PAT_MRT3847_75249C.1
ggctcgaggcaaaaaaaagttatcacgaaaacaaactggttgcacgattagtagctctccaaggttcatagactcaattaacctaacaattgtcccacatgtcatactcatagtccatatgcacatataacccaatcttgaaatgttcccaatccaggctaagctctgtagatccattgtatgcctttgaccatcatgagtcctgaacgcgactactgttattctttgctagtgatagagggtccataggacatttgacccatacgttgaaagatgatagtcacgtactgagacagtcttgtcactgtactgggttagcatgggctgaagttatgatttacatgttttgcatttagcctcataacttacatatgcattttagtggactgttgat

SEQ ID NO: 115437 - DNA, 442 bp, Glycine max
  Clone ID: PAT_MRT3847_7524C.1
tgcgaaagtccttcaaggattccctcaaagctcttgaagctgacattcagttcgcgaatactctgtaaaattctcattgctctttacactctgcaatatctaccaatattttttatttttgaatttttaattttacaatggcttttaatgttgaattattttgattttgattagtttcagaaattctgggatatatttgggtggaaatggtaattctatattttattttttaggaatggagtttttgtttgttataaaaataaaataattgacagtgttccaatccaaagcagagagaaagcctccgtttttaatgaaagattccagagatatttacatttagttcattcaaagagacgagtgactgagtgagtatgaacctgtgactaataatatgcgagacctttggaagaagtttttttattttattattttcatgaaa

SEQ ID NO: 115438 - DNA, 404 bp, Glycine max
  Clone ID: PAT_MRT3847_75250C.1
gaacttaaaaaaaaaaaagttactaatcactattcacaatacatattacaaaaaatcaatgtttcccgaaccgatcaggacagaaattcaggatcacttacaaaaacttaataaaaaacatgtacctcattaaatctcataataatacccacaaatgtgaaagatccaaaaagtgggtcaagttaaaagtcaagtctattaaacccacaatccccgagataaacaaaggggagaagaagaagcgcaccgaagcgttccctgagcttagatgcgccggaatcgataaccacgggggtcttccctgcaaggctaacgggtttaggattcaccttgggtcccaaatcaacaatttccacatttgcccctccccacaaacgggggcggttggtgtaccaaaaaataat

SEQ ID NO: 115439 - DNA, 842 bp, Glycine max
  Clone ID: PAT_MRT3847_75251C.1
tttttaaggaaatagaattcctaatatttgaaactaactaaaagagttaacacaacaaattcaataacgttttgcacaacttaactgaatattactccgaaatcctatgatgatccatgctactaccacgggttgataagtagttcaaaacacgcactaattcattcttgatgggagaggtgaaagtacacaggtcttgcttgttataataaatagggtacacactggttagtgtgatggattttgctaagcttcatcgacaaagagtagctgatgtgataaaacgggtctgactaaaacctcaagcggggtagttttcatatttgtgagtccaaatgtggcgctcatatcaacttgagcattggatggagttgtgatttcaaatgcctgcaaaaaagaagctaatgccaagtgtgacatttgaaggccaaatgatatgccagggcacgatcttcttccaccaccaaagggaaggagctcaaaatgctgacccttcacatcaacattcttatgggtgttcaagaacctttctggctgaaactctaatggatttgaccatacacgaggatctctatgcaatttccaaatattcaacataaatcgagtacctgcttctattttgtaaccacctaaagtacagttttctgtaaattcacgcggacccgagaatggcccagctggatacaatcgcagtgtctctttaacccagcttgaaggtaaactaattttgttaatgtcagattcattcactaatctttctttgcccacgtgctcatccaattcatctttttactttcttcaagcatgggggattattcagcaacattgacagtgcccatgtc

SEQ ID NO: 115440 - DNA, 418 bp, Glycine max
  Clone ID: PAT_MRT3847_75252C.1
ccggccccaagggaagggggaaattgggaaaccaatgccaaatacccttcctgctttgatttgaacccttagggaaggcaaattggggaccttacccacttcttctacccaatttttgaacacaatttaaccttttttggggattatggggaaaataatgatggggatggatcccatggaaaaaaccattaggaacctggtgccattaaaaggggaccggcatcaattgaccctatttttttgggaaaaattttcttaactttctttaattttcctttcaagaagaaaatttttaaagcgtttaaatttgaacatttgactgggtttaacaaaaaaatctttggttctttcttccagcaccttataatttggggcaaaaaattcttcgaagaacttgacccccaccggatttttttta

SEQ ID NO: 115441 - DNA, 325 bp, Glycine max
  Clone ID: PAT_MRT3847_75253C.1
ggtcaagtagtgaaatctgttaacttatgagaattgtgattttgaatacacacacattggcttctgattctggctttgaatagccaaacctattgtatttgatccattgcagttgtcaatttgtatacaaaaagaatagtacctcttaatttgtgtatatatttgaatacgaagttttaggtgttaaatccaactttcatgtcaaattttatgataactgaacctttcttaatacatttctaccctattggaaaatggggttcccccacttcttgttgcagttactgtttgtgtgttataacttataaactagtagtataaagat

SEQ ID NO: 115442 - DNA, 396 bp, Glycine max
  Clone ID: PAT_MRT3847_75254C.1
tcttcttctcttcgttttctgagttctgaatcgctcaatgctcatcgattcctccaacgttaactccgttctgcaagatcttcttcgtctttgtcattcttcttcacaagtcatcttcttcgtcttctgagaagtctataagggaagatgtctcagacatccactgtcctgcctgccttccactccatcaaatcattgcctcctgagttcaaccccgttctcgtggaaaaacatggagatgttaaatttagacacaccaatccgattggatcaaatggccttgaaaatggtgcactggtagcggagatttctaaggaagttaactgccgtgctggtggcatggatctttttgacgaggactcgccgtatggtggaaaaggtagatcattaaaagac

SEQ ID NO: 115443 - DNA, 371 bp, Glycine max
  Clone ID: PAT_MRT3847_75255C.1
aattcggctcgagcatcaagatcaatcaacaagaccaagaccaccatgtcagcgaaccccacgacaacaccaacaccaacaccaactttgacctcgacgccaaccacgccaaccatgctgccatacctccaaggccgcgtggtcactcgcctccagcagttcgtgctgctcccagaggcagcgcagcgcgagatcctcgacctcgaagtctacctgaccaaccaccagaccgtcatcttcagtcagcaccacgtgaagctcgtcaagagcgtgcgtggcgtccgcgtcaaagagttggtggatcgcatcgacgcctggcttcaggacaagcagacgccaacgtccgacacgccaacaaccaacgcagcgcg

SEQ ID NO: 115444 - DNA, 414 bp, Glycine max
  Clone ID: PAT_MRT3847_75256C.1
acgatcaaagcaataatcaggagaaagaatacatgggaaaatggaggctcacgtgtacaatgatgatattgaaattactgccacgcttttggatgcaatgaatatcaaggtgatagcattggctggggcactccaaactgtcaatgatcaccaaagcacatcaaaatgaagcatgccacttacatgtgttgaaactttatgcatatacaatgaacaacagtataaacaacaaccccaaatcacaatcacaatatggataagtcaagaaattattctgatgtgtacatggctttctcgatactaaatctgacaagtgttgccttcaaacttaattgatctgtcaacttgcattacacttcatgatcatctgtaattacaaccattgtaacatgcatatattattcactccttgga

SEQ ID NO: 115445 - DNA, 373 bp, Glycine max
  Clone ID: PAT_MRT3847_75257C.1
ggttgaacggtgttgagatattcatagagtcaaagtgcatagaggaattactatcctctcacacttgttatctgttaatttctattttttgttttgcaggacaattgataaagaggcagatgttcttaaaaatattttgactacatttgaggcatcatcaggcctagttgtgaatttgctatccatctgggtggtgattaaagatggcattacacttttgggtgatggtaatagaatgaatatttggagggatcaagtggcttacatgtgaatgtttatatatcagaactactcctattcaacgactagaacatctcaaggtttatgatttgattgagagtaagtacatcatgaagtatgaacttagtcatga

SEQ ID NO: 115446 - DNA, 196 bp, Glycine max
  Clone ID: PAT_MRT3847_75258C.1
caacgctaacgcgtgcatatcacatagagtttcaccctttttgccaatacccccgagccagaatcttgtgattattaacaaaccatacctcaagtcacgattttgctcatcttttcctgatcccaacatcaggatttactatcttgctttcaataatacatgtgtcgatcaatttcctttctctgtacatctggtt

SEQ ID NO: 115447 - DNA, 219 bp, Glycine max
  unsure (1)..(219): unsure at all n locations
  Clone ID: PAT_MRT3847_75259C.1
cttgagcagcatctcaaaagagagcaatacaaagtgaagcagcataagcatacttgagtctagagacatcataaggggggggccatcgatgtgagagctgaagtcccggatgtttctgcaattgccaattatgtgattacatttataaagggtcaaattgggtacatattctcctacgataaaaccttgacngcttataccgtggcaaactctaagatc

SEQ ID NO: 115448 - DNA, 480 bp, Glycine max
  Clone ID: PAT_MRT3847_7525C.1
cccagacatacgaccacgcatgcggcaacagaggccgaactaataattattggtttatactttaaggtaacaactgatgctgctacagcttcgcatgagtgaagcatcaacaagaaaccaacggcgagtaccggagtttttgtcctgggggaggtaggcatgacgctctatgtcggcccataggacataaatttccggagttgcagagatgcccatatacttatctacgtcaggcccactactgcgcgattatgaacacattagattcacacagcctgaataggaaattctggcactccaggatatctcgtcaccggccgacataagtgccgacgtggagaagtattgccaagattgggctgattgcgtgctagagtaagcaaaaagattgcgaaatgatgtccatagcgtcagcgtggagacctgggtcaaagttgtagacccaggggacaaaacctgtcacatgaatcatatgtagag

SEQ ID NO: 115449 - DNA, 486 bp, Glycine max
  Clone ID: PAT_MRT3847_75260C.1
gatgctaactgacaccttgcatcctatactattaacaccctcgagagattcctttgtgccaaacgcccattacttccctcacaagtttgccactgggttttttcgacaagacattttactccctatccaaacaaagcaagtactgcacccttactgaactgttgcgtaaagaaaagccagctttctacattcatgaggcgaactttttctaattagcaactgctgaacctttttctgtaaaaatgagctcgagcctaccctatgtgtttaaccgattcaccatttcctacactaatcggaacgcaaaacttcacccgggaatcatctattatccttcaatcacaaaaatgcaacccaccaatgataatcaaaagtaaaaaaacttgacactgactatctttttgttacttcctctgcactgaagaagatcatgaaataaatcaatggtgggaacccaaacaaaaagaaaataaacttgtattttat

SEQ ID NO: 115450 - DNA, 659 bp, Glycine max
  Clone ID: PAT_MRT3847_75261C.1
gatacctttttcagaagcctaatatttgtctttgctgtgtcgctgcatggcatacgatatatatttagtgcaaaagacatagctattaacagttcgctttcactctcaatttcactctccagatcatgccttcaggtgctaggaagagaaaagctgccaaaaaaaataaggcaaagaaaaacagcatcaacccatcaaccaacaagcccaaaggaaatggtgatttgaagtcgcgggatgagaaaggaagtgatggtggtgagggtaattctcctgcatttcgtgaacatggtgaccatcgtaatccattcaatgatgggagtgaagatctggaagagagagggccatcagctgctcaaccacatgctcctgatgtcgtcgggtccctggaagaagttgttagtgatgtcaagattgaccaggtgttgggaggaaaggaagatggtgttgttttggtagagagaggtttgaagtctgaggagtgttttgagagcaaaaatgcaagttttgagaatgggaatggatggcatactccaaagggtcaatccctcgctgagaagaaactcaaggatggaaattgtaattcagttgaagaagcagctgcaagtcataaggtggttagtccattgattcttcccctccaaaaatgactccattac

SEQ ID NO: 115451 - DNA, 450 bp, Glycine max
  Clone ID: PAT_MRT3847_75262C.1
gaagcttgaacatgatagacatgatacctttttcagaagcctaatatttctctttgctgtgtcgctgcattagattacgatatatatttagtgcaaaagacatagctattaacagttcgctttcgctctctgtagatttggtttttgtgtgatagcttcatagttatttcactctccagatcatgccttcaggtgctaggaagagaaaagctgccaaaaaaaataaggcaaagaaaaacagcatcaacccatcaaccaacaagcccaaaggaaatggtgatttgaagtcgcgggatgagaaaggaagtgatggtggtgagggtaattctcctgcatttcgtgaacatggtgaccatcgtaatccattcaatgatgggagtgaagatctggaagagagagggcatcagctgctcaaccacatgctcctgatgtcgtcgggtccctggaaga

SEQ ID NO: 115452 - DNA, 412 bp, Glycine max
  Clone ID: PAT_MRT3847_75263C.1
aattatgtacttattgtgaaaccatcagggtttgcttgtccttctattattgttgcttttaggtttctgaagagctcttggaaggcaaggagttggagttttacaaatgggaaggagatgtacctgaattgttgaaagatgttcatgataagctcaacatgctttcagagcattggtctctagatgacaagaatagatgtttaaaagaaactactaaggcattccgttatatgggacaaattgttcgtctaattgtctcataaatagacatttgttctccttttttgttgttgaccttctttgatgtttcaatgttttgtagctgcctggccaaggtgccttacatctgtgatagatctgcacaatcttattgataaggatattaagggcatagcacaaccgataaagacac

SEQ ID NO: 115453 - DNA, 399 bp, Glycine max
  Clone ID: PAT_MRT3847_75264C.1
aaacaacaaactaacattagaagccctaaaatcaattggcaagcctttacatccatttcctttagaaaaacaaaaaagttggaatgcataaattttttgaaaaatagccattaactataacactactgggcacatatgaaaattttttataaattaaaaaagaagcttagcctggcctcctattttgggccccagggttttccaacaggtaatgaccaaatccacccaaaagcttggccaaacttgataggatcaatcatttgaattttgaaaaaagaccacttgcttactggggagagaaaactttttagggatcaggcggcatttgagcctgagtgtcactttttgtcttaaaagaaccaaaaagtttacagattttactatgtgcccgtatatggg

SEQ ID NO: 115454 - DNA, 386 bp, Glycine max
  Clone ID: PAT_MRT3847_75265C.1
gctcggaattctgctcgagctcgagccgattcggctcgagaaaaaaacacacaattccgataacattattcccagccatcgaacgctgcatttggggatggtattgggacaacagaaaatcgacctcacccctccctcttcatgcttgcagctgcgcaggcgtagtctgacctccctacacctacgacgaatattgacatgtgtacaagaacggggacagcaccatgaccgacacggacatcaggcaggcgctgagcctcctcggtctgtactcctacggggcggagctggagtccatgactgaaactgtacatagaaccccgccacgagggactcacgttcgatgacttcatggccctgcactaatgcgtgggtgagacccactt

SEQ ID NO: 115455 - DNA, 227 bp, Glycine max
  Clone ID: PAT_MRT3847_75266C.1
cacccgtcactcctgctgccacacgaccactcacgcgtacagacactggttaagactacggagagatacaatgccaacttttctaccaaatccacattattacgttgtttcctttgctctttcccacactctatctttcactccgcacaaaggtttagcggccgttatgaagttacaaggtccacctgctgcagcataataatttctgctcgcaaccctcagcgacg

SEQ ID NO: 115456 - DNA, 326 bp, Glycine max
  Clone ID: PAT_MRT3847_75267C.1
cgcatatctacactttgtcacttaattcgttgatatgagaactcactctattgagtactcttataagataattactaaatcacacaggtaagtatatttgatagtgttattgcatgactcacaaaatgaacgacggagagttttgtctccctcgtcagaatatgaccgacgactactacaacacgatgtgaaacaatgccaaagaactgcatcgactaaaagagtatgaaattcagatcatcgacgagacccgaagcgacaaggaggagcaccacctaggcgagttgactccgcgagctcgtgtcgaactggatcttaacaacgac

SEQ ID NO: 115457 - DNA, 261 bp, Glycine max
  Clone ID: PAT_MRT3847_75268C.1
aaacacattggctaggaaacaaagagccgacccacactcttttgatctgacccaccatttgaaaaggatccatcagatgagcccctttgaacattacttacctgctttatatctgtataggaacatttgctaaagcacgccacaactgatcgcaataactacaccaaattgtcttaatgaacgaaaccgccctcgttttgaccgctaagtcctacaaaatactaacctatttttttacatcatattttgacaaatctgttg

SEQ ID NO: 115458 - DNA, 432 bp, Glycine max
  Clone ID: PAT_MRT3847_75269C.1
cacgaggagagagagagagagagagagagagagagagagagagagagagagagagagagagagagagagagagagactcacgcagagttcgacacgagacaagatgatgacaacaatgctcctcatctgtgcacgtgtgcggggcacagtagatacgcttatggtgaattaaatacagagacagacactggtggtgctactggcgtgctgtcagtgtatagaggacctgagttctctctcctcttggagacaaggtctctgagtcaagacatttggaggcggccatcagagatgcatgtttctaggatagtatcttcttctgttgctgacacaagagctgctctttctgctatagaacccacatttcagaatttgcgtgaggggttgaagagctctgatgctgacactcagagagaggccacagcagatctc

SEQ ID NO: 115459 - DNA, 210 bp, Glycine max
  Clone ID: PAT_MRT3847_75270C.1
gttaaataataagaaaacccctcatggttaaggaaattgcatctaccagttcaagatcaaagcaatgcatcaaacggttatctcgagaaattgagctaaaacaactctagataacatcacggtagggaacagtaacaactgggattctcccaattttattttattttttaaaaaaggaacattttatttttaaactgatcggacgcgtgg

SEQ ID NO: 115460 - DNA, 458 bp, Glycine max
  Clone ID: PAT_MRT3847_75271C.1
agagaccaagctgtcagaaaagtacccaagattgtacaccatatcgactcagcaacatcaactcatccagcaattaggagtctttaatgaagaaggttgggaatggcaatttcaatggaggagtccattatttgataacaagattgaactagcaattgctttcttgcaagatatcgaagggacaacaatcagatcagattcgcaagaccactggatttgggtggcagaaccaagcggctgctattcagctaggagtgcatatagagtcatttcagaaggcataccaacagagggtcaggatggaggattcaaggaattatggaagctcaaggtaccaccaaaagtggccatgtttgtttggaggctaatcaaagatagattaccaaccagggacaatttgaaaaagaagcgggtagagttacaggattacttatgccctttctgcagattggaggatg

SEQ ID NO: 115461 - DNA, 323 bp, Glycine max
  Clone ID: PAT_MRT3847_75272C.1
gggctaaagagaggcttattgaatgccaaggcttgagacttgatcatgacttgaccgctaattacgtctataactatgccggggaaacggctcatatgtcagtggactatgccggtgacactgctcagaataccaaagactatgccggtgacactgctcataaaaccatggactatgccagtgacacatgcacatacgtcaagggactaatgttccccggtgatgctgttcagaagtcactggctcatgtccgtgatgctgcacataagaccagcgaatataatggtgatgctgctcataacaccattgattataccactgat

SEQ ID NO: 115462 - DNA, 460 bp, Glycine max
  Clone ID: PAT_MRT3847_75273C.1
aaacatctcaataaacatgtacatgaattgttggaaagacatcttaattgtggtcactcctaacccaccttagttgtggcgggcaaccttgggcaaagaaaggtgtgttgaagtcccccatcaactaaaatgaactaagtcctgtttgtatatacttctctgtatgataaggttactcgtcatccaaaatcatcacaaattggcccttcctttgacaacaacagaatagagaagatgaagcctctttcaagtaacttgcatggtatgcatgaaactaccaaggaaaatgatatcaacagtcctggaacaagaacaccgaaatttctagaagccaaccgttgataaaaatggtttcttttcttggtggtggtagttaattttcatcattaatggcaattgaaaatgggatgaaagctcacactaacgcagacttttattctggtattggcgatgatatttt

SEQ ID NO: 115463 - DNA, 1389 bp, Glycine max
  Clone ID: PAT_MRT3847_75274C.1
cgagagcaattaagaaataatgccagaatcgtactgcgtgaaggagagtaaaccctgtgtgggttgggttgagaaatacttggatgattgtctctgcaatttgaaagataaaatctcctttggctttggcttcataagtctcgtatgttggggagtagcagaaattcctcagataataaccaactttcgcgctaagtccagccatggtgtctccttagcctttctcctcacttgggtcgctggcgacatattcaacctccttggttgccatctggagctagccacgttgccaacccagtactacacagctctgctttacacaatcactacgatcgtgttagtacttcaaagtttctattatgactacatctataaatggggcaagcctcttcggaagattaacatcgatgaggctcatgaagaagaagagaaaaaacctttgagacagaaaccaggccgcgactctgggattccaatacaaaatgacggacccaaagaaacgcctcgacgggattactactataggtcagcgagatctttggctgctaatgatactccaccatttggtacctacttgagagctgctaaaagtgtcccttcagccatggaaatgaacaatgattcatcctcagatgatgaggcacctccactctcttctacgaagcctgtaacacagcctagaccaatcccccgttctgtccctgcaagctatggaacttttctagcagcatctatgaacttgccccggcagggtaatgctttgatggagggatacaaaagattcaatggaagacagctactctcgcaggagcacaacatgcacagtgctttgggtcaatggttaggatggctcatggctgttatctatatgggtggccggcttcctcaaatatggttgaatattaaaagagggagcgtggagggcttaaatccactcatgttcatctttgcattgatcgccaatgccacttacgtgggaagtattcttgtacgaactatcgaatgggaaagtatcagagctaatatgccatggcttttggatgccattgtttgcgtggcattggacctattcataattttgcagtatgccaactacagatacgttcggaagaaaacaggaagtgatgatgctgattatggagactacaaagaagccagcaaaacttttgtgtcttgatttgtgggactgtagccgacacatgtaggtcttccccattatgaaccaatattatacttcaattccaccatgacattcagctattagtaaaggtctggctagaaaaatgaggtggactagttaggaaacgcttctatatattagcgtcttaaaatgtgctatacgattaccagctatcaatgtaatcaagtttatgaattatgaatcaaaaa

SEQ ID NO: 115464 - DNA, 175 bp, Glycine max
  Clone ID: PAT_MRT3847_75275C.1
aacaaacgtaactgacccgcagctcaatgtgattactattaacactgacggtaccgagagggcaattagatcgctatgatgtcttaaaacagcgacggtcgccatacgagacccacgttaacaaccccgatcatacatgctcgaatcgttcctaaaatgccacctcaacagattt

SEQ ID NO: 115465 - DNA, 404 bp, Glycine max
  Clone ID: PAT_MRT3847_75276C.1
cttgggtcctctagagcggcgcgcgtttttttttttttttttttttttttttttggagaaaaaaaaattgggtttttttagcctgaaattaagtgtaaatatatccgaacctcattgggcatataagtgaattcattagtcaattggaggggaataaatatcaaaacttttttcctatttatcttttttaattatttttctcaacgtaaacggcatttttatctaaggggaaggagggtggtcatcattggggggggagcacaaatccctcaatttctttcatcgatttgcgaccttggggtggagattgcacatagggggaagtttggctttgaggggagcattgggaagggaaatttgagggggtggagacaaaagcaatctatcacctttattaaaagggg

SEQ ID NO: 115466 - DNA, 449 bp, Glycine max
  Clone ID: PAT_MRT3847_75277C.1
acgaggactcattgatacttcaatttgcagaactaactttaatcccttttcctcggaaaatcttttaatcttactttagtcaaaatactccacacgatactggctctaataccattttgatttgatatttagaaaacatatttgcactgcatatgtaaaagatccatcttagaattagtgcttaatgttacttgtcaatgcgtcagctacttttggttggtagcacaatcaattcacccattaaagtcctatataaaaagttgtgtgaattgcagattttttgatttatttaggttcaatgattttatctcttgatactgtctgtgtctcccacttactttaacatttttttggttgatttggggttatttaataattggtccatctttgaagggcagtccttctcagtttgttagggcactgagtgttattgaaaattcttcttcctt

SEQ ID NO: 115467 - DNA, 292 bp, Glycine max
  Clone ID: PAT_MRT3847_75278C.1
ccaaggagggagcagtctctctcactcagtcttacttcttctcatgaaacccataaagagtcagtatgatctgggcaggcagatgtactaacgcatggatgcatcctttcatcatatcagcaccattgatacttcactatgggaaggcccattagtatacactgaatatcagatctcatgtgcttctgggctcatggccacaaatgagaatcttgcaccacatgtactttagcaactagccaaagagttgaaaaatcttgaagaatatcctccccagggcattaaagttgag

SEQ ID NO: 115468 - DNA, 723 bp, Glycine max
  Clone ID: PAT_MRT3847_75279C.1
tacggccatcggaaaagtgcagaatcggatcgtagaactgaagattcagttcgggatttttgcgcttcgtcctcaatttgcagcgcgtgagtgagggaacatggacggtgccgaattgtccaacataaagaaatggattgtgatgtatcctgtttacataaactccaaaaaaacgatggccgaaggaagacgcattggcctcgccaaagcctgcgaaaaccctacttgcgctgaaatcggtgattgctgcagctatctgaagcttccttttgcaattgagatagacaaggcgtaccctcgtgatttcatgcaaagagggcgcgtgagggtgttgctgaagaaggaggatggaactctctttaattcaaccatctcatccaaaaataaaattttgaatgacaagtgggtactcttgacttgaacccaaggaatgaaagatactagcatgctctgtatctataacgtgatcgacgaagtattgaggagccttctcatatttggataatagtagtttgtttctggaatgcagttgtggaccgcagatatcatgcgggataattttgttattacaaattgcctcacaggagtgatttcgagtgctctccaatatgtgtttgttatcataagcagaataaaaataattacaaaaaaggagctacattaaaaaaaaaaaaaaaaaactgtgtctacttctcccgaataaacacccctgcacatgagttt

SEQ ID NO: 115469 - DNA, 427 bp, Glycine max
  Clone ID: PAT_MRT3847_7527C.1
gaattctcctaattcgcctggagacaggatagtgggtatcttctaagagtgctaattaggataacgtacctattgaactatggggggtgaaacagtgaatgggacatggctcagtgctttttggtcactgtcacgtaagagtgcatcagatggcaaggaagtgattggagttttggcatttgaagttgcgggtttgatgtctaaggtggttaatttgtggcgttctttgagtgacagggaaataatgaatacgaaggcatggataatgaagtcggttggggtcaaaatgctaatgtctgatgatgattatttcttgatggaccttgccttgtgtgagatactcaataacttcgagtctctagcttggtctgtggccaggttgagtaagaagtgcaagggtccagtttatcatggctatgaacatttt

SEQ ID NO: 115470 - DNA, 1073 bp, Glycine max
  Clone ID: PAT_MRT3847_75280C.1
cggttcgggcagattgagtaaggtccgttcggcttcgccccgcctcccggaaagcgtaacgcggtttgtttgtttgtttgcaggagtccagagagtgcaaggagagcattggaggagcctcataaggattttgaagggcacattttgcattgccagaaggcgattgatgggcccaaggccgggaagttgcagcagcacgggaatgtgaatgcccaggcgcagcgggcccagtttcagaggaatggtagtgttggtactaatgctgctgctgggtatggtggtggtgcggcgttgcagcccgggcacttgatggccccggctgggccggggattgggtttaatcagtctgctgctgctgcgcaggccgcactgaatccggcaatggcgcaggcgttgaccgcgctgctggcatcgcaggggacgttggggctgacgaatttgttggggagtattggaacgagtgctgcagttaaccctggtgtgccttctgcaggggctgcggtgcagggtggttacagtgctcaaccgaatataagtcccggtgttgttggaggatatgggaatcaggtggggttgcaggtggcgtatccgaatcagaatcagaatcagcagatagggcagggtgggtccggaagagggcaatatggtggtggatctgcgccctacatggggcactagattccacataagtgcatcagtattttattactggcccggtgattcttctgagttctgaagtttaaggagctgatgcaattggcgtgtttataatgaaatgttacttactacaatgatcagaatattttaattaccaaatggagttctgttttcgcgacctactttttcttattttcttccatttcaaaatattgtagtattttgatttttagtttatcttcaaaaaaattcctgtggaactgtttttgtactgcaaattgaagttttatcagcatttatgaggagtttgggatgctgtacaaattatatttttaaatatttatgtttgtgtggacaaatgtgctgcaacttggtattcttgtattctcgatagtttttatatagtagtttgatac

SEQ ID NO: 115471 - DNA, 1004 bp, Glycine max
  Clone ID: PAT_MRT3847_75281C.1
cacaagacagcatccactgtctctctctctctctctctttgtttcagtgtttgacaaatcacaaacgcaagggcgatctgagtggatgagatgagcacttcggagctgattcgccatcgccttccaacaaaacttcaaattagtataaataaaactttatttccttccccttttatttttcgtttcactttttctatcctcttttttttttttcttttgagattttcaattttcgagattacgttctatttttgtcttgctacggattctccaatatttcagaagctagatctaattgatatgctgtttggttgctcaggaattcgtgatcaggtatatcactgttaaaaaaaatacatatgcttttgcctctcttttttttcgtctttggatttattaggctttgattattcttatgtgaattaacttcataagaacaattttgtccataaaagaagaaagttgtaacagctaacaagttcagtggagaacccaaaagcgtgtatttatgggttagcgtttgcgaatttgattttgggtgaagaattggttttgcttaaatatcgatttttattgaagtttttgtttgaaaatttgtttcttaaatgtaagtttgtaatcagacttagtatgaaattttcagcccaatgcaaagagtttttttaagttgaacaatttttggtaaagttacatttctctttagcaaacgggaatttttgagctatgcaatcatagatcaaatatgttagatgtttgattttgttcttgctatgttggattgctcttgctgtgctggattgcaggtatttcatcttcagatgccgaacattgaatttttattgctcccttgtttgttattaagagaaattgtggatctttatgattttaatgtgagtaaattcaaatattcgatattcattggttgatctttgacatatgattgtatgaagttgcatgctgtcttcctgtcccctaacaaaaaaaaaaaaaaaaaactcgctcgt

SEQ ID NO: 115472 - DNA, 260 bp, Glycine max
  Clone ID: PAT_MRT3847_75282C.1
tgggtcaattcattacacttgttagttcactggagatgcttgtttgacaagatgattaataataataataataataatttaatactctgactgggacatctgagttttttggaatgggtatgctactgctttatgggggccagttttgaaattaaattagttagcaaaagagaatgaggatgatgtaagtaattaagtatcttgttttttgatggtgacaaatgtttttttcttcttcttaatttgtaatgagaaattgt

SEQ ID NO: 115473 - DNA, 273 bp, Glycine max
  unsure (1)..(273): unsure at all n locations
  Clone ID: PAT_MRT3847_75283C.1
ccaaatgggttaatcatcctgtgctacagtgtgcgcactgcgacacagtaaactttcctggcacggatgcaggcattgtggtcatggatggngaccgcatggtttcgcggtcgggccggcgcatgtttgagagagactatcgtgctgtaaccaagcatgtgtcgcctctctgcgagggcaccccgttgaatgtgatggtatctgcgattactcgaagtgaagtggacatattggtaaagaacctcgcaaagagtccagaagtgctggagtcgg

SEQ ID NO: 115474 - DNA, 353 bp, Glycine max
  Clone ID: PAT_MRT3847_75284C.1
ggctcgaggactaaatgatagatcgctagcggacctttcatgatctacaactactatacagccgtttagctttcctttgctggtcatacttggctcttcaaggccatctattttattactgaacctcttcgcgtgccaaatggtcactgatgaggatgcgacaacacacaccaacaactgggacagaaaatgaagcatcctacgtgaccaagattgaagaaactaccccataacaactcagctacgccaggttactaccaccgaagaaccaaaggaagaaaccaccaaagaagcacaagatgaagaacaagccccagttgagactaatgacgcaacagagacgacagaggaag

SEQ ID NO: 115475 - DNA, 445 bp, Glycine max
  Clone ID: PAT_MRT3847_75285C.1
ccgtggtcgaccccacgcgtccgtatacggctgcgagaagacgacagaagggagcctgttgatcgatatacaagaccagaatttacagagaatgggccgttggcaattgattctggtagacacccaatcctggagagcatacacaatgacttcgttgccaataatatatttctgactgaagcctcgaatatggcgattgtgatgggccccaatatgagtggaaagagtacttaccttcaacaagtgtgtctcatagttattcttgctcaagttgggtgttatgttcctgctcgtttctcaactgtgagggtagttgatcgtatgtttacaaggatgggtgcagttgataatcttgaatccaactctagcacgttcatgacggagatgaaagaaacagcttttatcatgcagaatgtttcacaaaggaatctgattgttatggatg

SEQ ID NO: 115476 - DNA, 332 bp, Glycine max
  unsure (1)..(332): unsure at all n locations
  Clone ID: PAT_MRT3847_75286C.1
gtaacanttnnngtcgcatgcacgcgtacgtaagctcggaattcggctcgaggacagagtcaaataaactcccttgagaaaatgctattggtgggtgctgggaactggtaattgttgtagttttgggctaggagaacaaaaggaagatttagaacaattatcatgtttgcactgccacatcagaccagaataaatcctctctcgtgccaccatttacatcagaagaaaatnttgtnctgaagttctgagactcccagaactgttggtgccctctctgggggaggagaaggtgtaagaggaatgtcaatagtatgtggtaattgtataacatg

SEQ ID NO: 115477 - DNA, 452 bp, Glycine max
  unsure (1)..(452): unsure at all n locations
  Clone ID: PAT_MRT3847_75287C.1
tcggaccncggcccgtgagaaaaaggaggccngattcctaaaccgagganngggannnggcaagagggtgagattaagagggaaacaccggnggaccccaccagccaccaacaaccacagncactgaaaacgaaaacggcngagaagcagcccccgcaaaagcataagcaagcgcaagcaaangcaaagcatcgcggaaccagagggagagaccctgagcgacagcccggagccaccacagcgaccgagagaatcagcaacaacgagccaatacgcgcggcaagaactcacactcagcacccaggggcaggggtccggcacccgcggcacggcgaccccatcgaggtctacgagcaggcgcgagggcaagtccaccgacaacagaaagggactgtgcctcgcgcacgctactagctacaacaacggcgccagcttcatagacaaaaagaagg

SEQ ID NO: 115478 - DNA, 316 bp, Glycine max
  Clone ID: PAT_MRT3847_75288C.1
cctatatattttcatatatataggagaacgtggtaaaattttataaccttcatgccctaaatcccgaaacacaaacaaccccccacattttttcattaaaaaaacccacttacattttaaaaaaaaacaacaaattaggggtcccaaacaaaaataccccccggttaaataaacccatttaataccccaaatttacttgagcaccaaaccacaagggttccccccatgttaatcgtccctaggactacaagtaataccgacatactttcctaacaaatacgcataacattgaagggcttctatgattgaacacacc

SEQ ID NO: 115479 - DNA, 740 bp, Glycine max
  Clone ID: PAT_MRT3847_75289C.1
tccagatttcctgacatcagaaaaacaaatggaaattctgtaattgaattagctagtacacccacaaagataagtggggtacattatgttcagggggtagttatattccatgatgtgtttgacaatgagtatgatgttggcggttctcaaatcagaatagaaggtgtatatatatggccttttagacagcttcgaatggtagccaacagtggaaaagagggagatttgaatcagaatgaagattatattttatctaatccatatcatctgcttggagttttctcatctcaggtactgcaagattcttcgcgagataagatgttgagaagaaaacattctctgattcatgacatggagaaacattgtaatattgaaattgctgctcagatttcacacttgccatcacaaaataacgaaggtgaacatgatcattttcatctagaagggttaatggagagtccctcagctgatgatgatggggactgcttctcaccattactgttaaatgcaacgtctgtcaaaattgaggtctactataacaaagcagtgaactataccttgatggtcacttttgtctctttcttgcaagtccttctattaattcgtcaaatggagcatagcagcactcaatctggcgctgctaaggtttcaatattaatgattggccagcaagcaataatggatgcctatctttgccttttacatctgactgcaggaatacctagttgaatccttgttta

SEQ ID NO: 115480 - DNA, 228 bp, Glycine max
  Clone ID: PAT_MRT3847_7528C.1
tagcacatgcttcatcactacattcaacaggtctaccctggtcttatttcaccatatactcatccatataattccccacactcttttccatccaccaatactacctatcttccaatcatcacctccctcattcccccaaacagactagacttcaacatatcttcaatacaaaacacataccttactaacatattacatctaaaacccatcataactcaaattcaccac

SEQ ID NO: 115481 - DNA, 274 bp, Glycine max
  Clone ID: PAT_MRT3847_75290C.1
aaataacattgggcaggtgaagatcaatatcaccaattagacctgattaactcaacccgataaaaactaggccatggaacacatggagataaatacatctgcaaattatgagatctgcacaacctgaggctcactactctacgagaactagccattattatcgccaaattttatatcaacattctatctcacatctgcgatggtcactagataccttgcccaccggatctcgacataggtcagggctacttgtctcacacattgcttgttctaa

SEQ ID NO: 115482 - DNA, 287 bp, Glycine max
  Clone ID: PAT_MRT3847_75291C.1
ggctcgagtaggaggggggcggcgactgtgtcgcgcgctttagaggatgaaagattataagggggatctattctacccggtaacggcgatggactcttcctcctacgaatactatcgcagtgcttcctataccgacgccgatattgtgttgactgtgaatgacagtcatatcgccgacaggatccttcgacccgagatcatgggggacctcggcacggccacacccgattactacggttgccccactatcgacgactgctactaccaccgcatgaggaggcgcgagg

SEQ ID NO: 115483 - DNA, 181 bp, Glycine max
  Clone ID: PAT_MRT3847_75292C.1
gcagccccctctcttttctcagcttccccattcttcttctcctctctttcatggatgtggacatagtgaaaacgtccaacaacaacaacaacacggacgttatggcaatgatgatgcaaatggaaaagttccccgaattattattctgcgacgaccctttttataccaccacacccactta

SEQ ID NO: 115484 - DNA, 318 bp, Glycine max
  Clone ID: PAT_MRT3847_75293C.1
tatgcgtcgagagaaacaaaacacaactgcgagtcctatgtatctgccttcacttgcagatctgatcatattcttcaatacagcaggggagcagcattgagagcctaaacatcccaattgacatgtaccgttaagggagaaccactgagagtatctgtgcgcggcctctacatctcggtattcaggtaatgcataatctcataggcttgtaggctatgctcacatacgaccatgtctagctcagacgcagtagtgtccagagggaccacaagaaatacaatacgcgtgcacgccaacatcattataatggggaagatt

SEQ ID NO: 115485 - DNA, 376 bp, Glycine max
  Clone ID: PAT_MRT3847_75294C.1
cttacgcaccattgcctgaatgttgatgatttcgaatagatgctggaaactaacagattgtgggtgaccattcagggggatctggagaggatcattctattcggcctagaataaaggtgattgtatattcgatgccataaggtgagatacttactgctgttgccaatttaacagatgcacaaactgaactcatagatgcctaataggacgacgattctgaactatcagtaggacctgcaccaccagctatagactctgatgcagaattatctaatgaatctcaacgccttgaagatgcaaccagtatcatagaagctgaggcaaacagacaccatgatgttcttggagctaaccataatatgaccaatgacaacat

SEQ ID NO: 115486 - DNA, 266 bp, Glycine max
  Clone ID: PAT_MRT3847_75295C.1
ctcgagctctagcgcgatacacatcacctcctattcccgtgaacataggacatcttctctgttttcttactcgctcgctcatggagcttgcgacaagaagaaatcgagtcttgtttactttttctagtttcactacactgatatgatgtacgagttgccttattttagctctagactacgattttgcttttagaaatatgtcttacctaatcgctacatgatttactgtaaaagtccatttggcttaaaaaaacaaatgttaacgt

SEQ ID NO: 115487 - DNA, 182 bp, Glycine max
  unsure (1)..(182): unsure at all n locations
  Clone ID: PAT_MRT3847_75296C.1
cgttanagctncgggaaatttaaatttcccgggnacccgggtnaccctggccagngccggtaacccaggctntttccccctaattaagttgaagttncgtcaattnaagaaggctttgggccgtaaaattcattgggttccattaagcctcgttttnccctcgttggtggaaaatttcgntt

SEQ ID NO: 115488 - DNA, 142 bp, Glycine max
  Clone ID: PAT_MRT3847_75297C.1
cgtaacttcgttactctgtatatagaggctggtcacacgaaagggcaaaagcccaatggattaaatacaaatgcatggttgaatctgctatatctaacacagagaacactcctgagggcgattcttctggctattaaaatgc

SEQ ID NO: 115489 - DNA, 644 bp, Glycine max
  unsure (1)..(644): unsure at all n locations
  Clone ID: PAT_MRT3847_75298C.1
caagtaactaatcattcaaaagaaagacctgacgtgtgggttgatagccctgagaaatcaattattctgtctataaccagtgatattcgaactatagaatctgaggtattttctgcaccttacagtctcagatttcctaggattgacagggtgagatatgacaaagcttggtatgaatgccttgatgttcaatcatttatagaactggtacattctagcaacggtaccacacagagggatacagaatatggcagcaaacaggacagtaaaccaaaacgatcgaaatcctccactaggggagaaaagaaaaacttgtccattgttccttctcatttaattcaaactgatgtttccagcattaaggggggctccttaatattttcaaacatggatgttctattttggtaatgtgcctctatctcattctctcgagtccttgcacaaaataattgctgagaatgggggaactttttcaatgaatttgaataactcagtcacgcattgtgttgcagcagacagcaaggggtttaaatttgaagcagcaaagcgtcatggtgatatcattcatattctgggtatagattgctagatcanaagaagcttgtctgcttacagcctaagtacttccttttctatctgaactg

SEQ ID NO: 115490 - DNA, 536 bp, Glycine max
  Clone ID: PAT_MRT3847_75299C.1
cttaacaatctcgtatctcgtaatatataaatacgcggtccttccactccttcttctgaccattaaaaaaaccctgtgcaccaagaaaggtaacttgaaaccccagccctagaaccttcctctggaatcctccccaatgttataacccctacccatttctcttctcatcgctccaagaaaaacccagaaagcaaaatcgcaacttgatcattaattaatcagggacatggttgaaaagaagagatcatggctctctaagaggctcaagagagagtcactgaggtggaagtacctgggtgctgcattcaagtggaagaggctttcctctttgccagtttccttcttcaacaacgtcgctttcaagattctctctctctttgaagccattttcctcgttctcactgcctgctttttctacctcatgtgtggatgccgcttttgaatcgcttctgatctttcgtcgtgtaattttactctcttgctttcacttttgtattcagctctctagcttgtgtatgtttaatgtctataacgga

SEQ ID NO: 115491 - DNA, 657 bp, Glycine max
  Clone ID: PAT_MRT3847_7529C.1
caacttctttcaagtctaaacccacctcacgtgtggaaccaaccttctccagtctcagcttcaccatatctccaaactacaaacccaccacaccacatctcatgtaccaccttatcccaacaccaaacaacctcaaatttaaattccaccttatcaccattaaaccaaactcaaaccccaaatgaagaatctcaatcaaactctaacaacctgtacacatgctcatcacttcctgcaaatgcaaatgctcttcccccatgctctaagacttcactctcgacttaccccatggtgactcgctctaagaatggaattttcaaacctaaacaagttcacctagccaccaaatttccctttccttctctggttgaaccaacatgtgttacacaagccatgaaacaccttgagtggaaaaaaaccatgttagaagaactcaatgcgctcattgctaatggaacttggacacttgtcccttcatagctaaatcttaatgtcatcgggaacaaatgggattttcgactcaaacataacactgatggttctatttcccggcatacagcttgccttgttgccaaaggctaccaccaacggtgtggcattgattaccatgaaacctttagtccaatggtaaagccacaaacaatcacactggtcctt

SEQ ID NO: 115492 - DNA, 259 bp, Glycine max
  Clone ID: PAT_MRT3847_752C.1
cctcctccaggatgaagctggccgacaggtagagcggctgcgcgcccatcatcgccacatcgttgacggtgccgtgcacgctcaaggcgccgatgtcgccgccgggaaagaacagcggcgagatcacatgcgcgtcggtggccagcaccaggcggtggccggcgggcggcgcgggcagcaccgcgccgtcgttgccctcgcgcagcgcggggttgtcgaaggcgcgcgcgaacagcgcctcgatcagctgcgcgctggc

SEQ ID NO: 115493 - DNA, 427 bp, Glycine max
  Clone ID: PAT_MRT3847_75300C.1
gtataaccgggagaaatccccccatgggcgggagaagtccgcatatatgaggaactgggatagaagtcgtcagcatgatcataaattgagaagtccaatgcgtgctgagcagtcgccaccagatcgaagttcgcatcatgatcgcagggattgtaccccaaatttggcagaagcatctccccttcaacgagcgaggaaagactgtcgacaggaatcaagtagtaaaaccttatcaagtgaaaaacatgattcccaaaatagttgcaaggatcgtgaagataagcagattcaaagggagtcaaattgttcaagtacagaatctcaaaatgaaaaaagtgtgcaagttaccattaagtctgttgagaaagacatctgcagtgaacctctaaaggaacagcatagttgcagcccaactgtcagccacaaa

SEQ ID NO: 115494 - DNA, 2776 bp, Glycine max
  Clone ID: PAT_MRT3847_75301C.1
acgaggttgtctcgccccgacttcttgcggtcgctcggcctcgccctcgccgccgctcagtggtggtctgttccatttcccggggctttgcttgcctgtcgtggttgggtggtgcctgtctcccggtccctgattttgtgtgactgttccgtgccgaaaccccttatctcgtcttggctgtccagggcgaggtgcttcagtccgttaccgggctgggcggggccgagcccgaggctggcgtggacgacgcaggtggtggtgatgcggtggcattgggtgtagccactggaggtggggaaatatatcttcctgaggtggacctcttagatcttgaaccttgcgagggcatggaattcgagtctgaagaggctgccaaggccttctacaattcctatgcccgtcgtgttgggtttagtactcgcgtcagctcatcccgtcgttccaggcgcgatggaactattatacagaggcaatttgtttgcgcaaaggtaggttaagtcttcccgaagactcatcacagtttctgcaaggggcacatgcgccctcgaacaattacccgagtcggttgtaaagcctctctttctgtcaaaatgcaagactctggcaagtggatcgtctctggctttgttagagaacataatcacgaactcgttccaccagaccaggtgcattgccttcgctctcacaggcaaatttcaggagctgccaagacgctcatcgatactttacaggctgctgggatgggtcctcgtagaattatgtctgcactaattaaagagtatggtgggattagcaaagtcggcttcacagaggtggactgtaggaattacatgaggaataataggctaagaagtttagaaggtgacattcaacttgttcttgattatttgagacagatgcatgccgaaaaccctaatttcttctatgctgtgcaaggagatgaggatcagtccataaccaatgttttctgggctgatcccaaggctaggatgaattatacattttttggtgatactgtaacctttgacaccacataccgatctaataggtatcggttaccatttgctccctttactggtgtaaaccatcatgggcaacctgttctctttggttgtgctttcctaattaacgaatctgaagcatcatttgtgtggcttttcaagacatggcttatggccatgtctggacgtcccccagtgtcaataacaactgatcatgattctgtaattcggtcagccataatacaagttttccctgagacccgccaccgtttctgcaagtggcacatctttaaaaaatgtcaggaaaagttatctcatattttcctccagtaagatataacaccctccggcatgaggctcttaaatttgttgatgaaggcgcgcggtctgctgaaacttatgatgtcgcaatagatgctttacaagaagctgcaaaaagagtttctcagggaatacaaaatgagggcaaaaattcctatcagtaatggaaaggtaaggagtcacgtgctgaatgatgaaagtcatgctaattacacaagtgggtgccaggaagcaagcttgagccagcatatgtctaaggatgatttggataagtttattagaaaacttatgaatgagcttgagtgtgcaaatcggaagtgtgaaatttatcggtccaacctgctttcagttttgaaagctgttgaggatcacaagccagagttgtcagttaaggtggaaaacatcaagataagcatgaaagatggcatctaaagactatggataattaacattgaaacagatacgtccaaagctgatgatgatggggaggtcattacatatcatgtagctaagtatggagaggaccataaagggtattgtgttaaattcaatgttctggagatgaaagcgacttgcagttgccaaatgtgtgagttttcaggccttctttgtaggcacgttttggcagtctttagagttaccaatgtgcttactctcccatctcattatattctgaaacgttggacaagaaatgccaaaagcaatgtaatattagaagaacatgcttgtgatgtatatacttactatttggaatctcatatagttagatataacaccctccggcatgaggcttttaaatttgttgatgaaggtgcgcggtctgctgaaacttatgatgttgcaatggatgctttacaagaagctgcaaaaagagtttctcagggaatgcaaaatgagggaaaaattcctatcaataatggaaaggtaaggagtcacgtgctgaatgatgaaagtcatgctaattacacaagtgggtgccaggaagaaagcttgagccagcatatgtctaaggatgatttggataagaatattagaaaacttatgaatgagcttgagtgtgcaaatcggaagtgtgaaatttatcggtccaacctgctttccgttttgaaagctgttgaggatcacaagctagagttatcagttaaggtggaaaacatcaagataagcatgaaagatggcatctaaagactatggagaattaacattgaaactgataggaaaacaaattctattttggcaatccagtcgcgcatcaataatgatcccatgacaacccgccgccccacaattgtcttgtagccctcttgtgatgtataaagttggtttgcactgtattatttttttgttcagtactaaatttattatattgatgtcaacttttatagtccaagttttctttaagaaaataataatttagcacatatacgtcatcgtattaatatttttctgagttt

SEQ ID NO: 115495 - DNA, 1665 bp, Glycine max
  Clone ID: PAT_MRT3847_75302C.1
cgtaagctcggaattcggctcgagttgctttctttactggtgtaaaccatcatgggcaacctgttctctttggttgtgctttcctaattaacgaatctgaagcatcatttgtgtggcttttcaagacatggcttatggccatgtctggatgtccgccagtgtcaataacaactgatcatgattctgcaattcggtcagccataatacaagtcttccccgagactcgtcaccgtttctgcaagtggcacatctttaaaaaatgccaggagaagttatctcatattttcctccaatatccaaattttgaagcagaatttcacaaatgtgttaacttgactgagtcgactgaggaatttaagtcttgctggtcaacacttgtagataaatatgatctcagggtccatgaatggcttcaagcaatatattcttcttgtaggcagtgggtacctgtatatttgcgagacacattctttgcagaaatgtccatcactcagcgaagtgatagcatgaactcttactttgatgggtatataaatgcttcaaccaatttaagtcagttctttaagctctatgagaaagcacttgaaagtcgcaatgagaaagaagtgagagcggattatgacacaatgaatactttgccggtattgagaaccccatctccaatggagaagcaagcatctgagctttacacgagaaaaattttcatgaggttccaggaggagttagttgggacacttgcattaatggcatccaaagccgatgatgatggggaggtcattacatatcatgtagctaaatttggagaggaccataaagggtattgtgttaaattcaatgttctggagatgaaagcaacttgcagttgccaaatgtttgagttttcaggccttctttgtaggcatgttttggcagtctttagagttaccaatgtgcttactctcccatctcattatatattgaaacgttggacaagaaatgccaaaagcaatgtaatattagaagaacatgcttgtgatgtatatacttactatttggaatctcatacagttagatataacaccctccggcatgaggctcttaaatttgttgatgaaggcgcgcggtctgctgaaacttatgatgtcgcaatagatgctttacaagaagctgcaaaaagagtttctcagggaatacaaaatgagggaaaaattcctatcagtaatggaaaggtaaggagtcacgtgctgaatgatgaaagtcatgctaattacacaagtgggtgccaggaagcaagcttgagccagcatatgtctaaggatgatttggataatattagaaaacttatgaatgagcttgagtgtgcaaatcggaagtgtgaaatttatcggtccaacctgctttcagttttgaaagctgttgaggatcacaagttagagttgtcagttaaggtggaaaacatcaagataagcatgaaagatggcatctaaagactatggataattaacattgaaacagatacgaaaacaaattctaaattctattttggcaaccctatcgcgcatcaataatgatcccatgacaacccgccgccccacaattgtcttgtagccctcttatgatgttgtataaagttggtttgcagtggattatttttttgttcagtactatatttattatattgatgtc

SEQ ID NO: 115496 - DNA, 316 bp, Glycine max
  Clone ID: PAT_MRT3847_75303C.1
ttttctttcccaaaaaaacacctttaaatgcctcaatttcgtgttcaaagatcaaacactggagtggttttttcaaaagttctgcaactttttttttgacacaaagtgtaaaatacacaagaaacaagaacaagaacatgacaagaacaagaacaagaacgcatataacaaagcacaagatgcaaacaagaatgaaacaagatgtaaataagaacagaaattatagaacaaggacaaaaacacaaacctggacataatacaaagaaaaagatttggataggatagaacctgtatccagagccgaagctctgatacc

SEQ ID NO: 115497 - DNA, 423 bp, Glycine max
  Clone ID: PAT_MRT3847_75304C.1
ctcaaatgaaataaggaccctgggtattatggacgtttcttatgcgaaaccccaggattcatatataaacacaacgatgtttcccaaattccccctatggtgaatgttatgaactctttatagacacatcgccaagacgtatggacccttacacccacttttaaaattcatcaaacctttttttgtgcacgggtttacgacacttatagggtccctggggatgaacacaagtgcccgagtagagaaacatcggtgaacccaacacatcatggggtaggtttcactgtaccagctttctgaagggtaaaaccaccataaacggggggtgggcggccaataaaattcggataattgagcatgggtttgtggaccgaaaccacgacggactgtgagtgcggctagataaacttcatgagcctccct

SEQ ID NO: 115498 - DNA, 370 bp, Glycine max
  Clone ID: PAT_MRT3847_75305C.1
tccacacatcctcaactataactactctatttactctactaaatatattcaattgtacacatgtgacattttaacaaccttatgtcaatcaattatttatcttactgacccatattataacataaatattacacatatgatcatattcctttccattctgaacttaattaaaacgattttttcatccaattctacttaattcttatatatattaattagatttcttacttctaaaagtttaattatcttcgttagacctataacttcttaatagtcttccaatttataccccaaatttatatactggttcattcgtataaccctattttgcccactaaactacctatatgcttcgtgctcttactatcaa

SEQ ID NO: 115499 - DNA, 238 bp, Glycine max
  Clone ID: PAT_MRT3847_75306C.1
caccaaatcatctgatgcctgtcctcagacgccttgcactcgaaccaggacccagacacgcataggttgctcttgcgaaacgatgcacgcatatactcaacttggtgcatggtcattcggagaaatcactgaccaaggctcaatgttgactaccgagaagattagtgcgtgacaccttgcaggaacaatcggcttctgtctcaaactgatgtgggaactggatgccgacaacaactgc

SEQ ID NO: 115500 - DNA, 434 bp, Glycine max
  Clone ID: PAT_MRT3847_75307C.1
gcctgcaggtacacggtctcggtatttcccggtccgattttacgcgttctgagacgacaacgcagaatcacgggcaaggtttgatacattttggacaaaatttccgaactcttccacaaagcagaagaaggagatcaaaaactctcaacatgatgggaagtaagaatgagggtaagcatacttcagtatctaatactaagtgcaggggagaatcaagtagtacaaaaacccttaaatggtacaagaagaaaatctgtaattaagtgcaagtgattctaaaactgaaatggtgaggaaaaatagcaagtcaaaagcaactgcaatgcaatgagggagcattagaaactatcattgatagtttcgcaagccctgaccgcaacctagcaggagcaaaggctattggttgaaacttataataccaaatactgcaaatg

SEQ ID NO: 115501 - DNA, 277 bp, Glycine max
  Clone ID: PAT_MRT3847_75308C.1
acttatactttttaatttaagaatttattttattggatccctatttgttcactgttattcacagcttcaaatttactatggcacctgaactacattgtactgttcagtgaaactaagattatatattttgcaaacacccatataattattgcttcgttccgtttgcgatgacttcaaagcatatagcatgaaactgtgaataataacatcactctgatagattaaattaactatatatgcctcagaggaagatcattcctttggtgagataacccta

SEQ ID NO: 115502 - DNA, 363 bp, Glycine max
  Clone ID: PAT_MRT3847_75309C.1
aatgcacacttccgtaggctcggaacttcagctcgcgctcttggtcaagcacaatcgtactccaaccatctgttattgtttggtcacgatcttcttgcttcaatatactgcttgctgtgggtgatgattgatccactaacctgtgactccaaccacctatccagtgagtcactgggtgcatacaacatggaacattcttgttgtacgatacagttcggcggtcactctccctttggcacgcagatacacaagggtgcttgcccgtatatcacgagaattgccagactatcataggtgactgtacgatggaaccccggagattcatgggcatgtaccctatctgagtctattatgtatctacat

SEQ ID NO: 115503 - DNA, 470 bp, Glycine max
  Clone ID: PAT_MRT3847_7530C.1
aaacaaagccatttaaaaaattttcaataaaaatatttccgggagacccccaaagataaaacccacgaatacccaatgggccacgggctataacccccaacaacccactttttaacaggccccaaatgaggaacccaggatatggggtgggggaaattcaattaacccctccagaagctaagggcgtgaggaacccggggagctttcaaccaggcgcttccaccgggggttccagcccgtaggaaccgggccggggtgaaatggggaccttcttcgggggtaaaaaaaccccgggaaccctttcacttggaccttccggaaacgtgggcgcccagggccaccggggggggattcacccaagaacaagggggtttcaaaatgcaccccggcccatgggcaccaaccttcggggggaaggaagtccccccgggggatcccaaaaaacccgccctaaaaaaggcccaaggcct

SEQ ID NO: 115504 - DNA, 256 bp, Glycine max
  Clone ID: PAT_MRT3847_75310C.1
atcgcccaacgctcggggagaggcgctttgcgcattcggcgctcttacggttcctgctcactgactcgttgcactcagtcgctcggctaaggatgacggcatcagctaactcaaaggcgacaatactggtatacacagaatcaggggacagcgctggaaaaaccatgtaagcataacgccagaaaagggccaggacccgaaaaaaggcagcgtagatggcgttcatacataggctccgccctcttgtatagcataa

SEQ ID NO: 115505 - DNA, 213 bp, Glycine max
  Clone ID: PAT_MRT3847_75311C.1
aggtagataaagagagagaaagatgtcgaatcgtggtcgtggtaattcagcgggtgacaagttccgcatgtcactgggtcttccagtggcggcgacagtgaactgctccgacaacacatgggcgaagaacctctacatcatttctgtgaaagggatcaaaggccgtttgaaccgtcttccctctgcctacattagctacattgtgattgccac

SEQ ID NO: 115506 - DNA, 349 bp, Glycine max
  Clone ID: PAT_MRT3847_75312C.1
taaaaaatgtacctctagaatttttttttaaaaaaagcggggcacagccctccagcttaattagtgggtgggacccgggagggacagaccttggcacttggacattaggtttagcctaagaaacctgtgcttcccatttagccagaggccccttcctttgcctcctttggaaaaccgttaatgggctttaatgggtggaattttttggctaagaagtgctggtcctccgtgcctggtaagaagcaataatgagcccctggggcggggcgactatttggcccgggatttctggaccccccggattcccatcccctggctttggcagtacggcctgccatagtcccccctc

SEQ ID NO: 115507 - DNA, 234 bp, Glycine max
  Clone ID: PAT_MRT3847_75313C.1
aaaaaatccttaaatttatgtaaacggagaccttgatacttgaaatactttcctttcttgcgcgactttttatcaaacactctattctgcttcattatattgttaaaatcctaactaaatctatcataataattatgagacaactctataactattatatttatatatgcatttatagctacataactttttttattcttatctgtttgagtcttgttttgtatttaattatga

SEQ ID NO: 115508 - DNA, 256 bp, Glycine max
  Clone ID: PAT_MRT3847_75314C.1
gtttcttgtttttgctcatctcaataactatggccacgtgtatttatatgaagggccttgacttattcattgctacaattttctttacatgtcaattccatccgttcgatatcttccctttccgaatgatcactgactttggagtcctttctcccgagttgaaatgcgcatgtttgatgctatctattgaaacacacaacatttttgtcttttagaccatttctgaagagagcgtttaaatctacaaatgaataca

SEQ ID NO: 115509 - DNA, 698 bp, Glycine max
  Clone ID: PAT_MRT3847_75315C.1
atattacttctttgaacacatttcctcaagatgcatcctctagtgttcatggtgttcatgttattagccttatactctccttcttctatatccactagagaagccggtgaaggcctaaggggtttcagcatcgaccttatccatcgtgactcaccattgtcacccttttacaacccttcactcactccatcagaacgcatcacaaacgctgccttacgctccggttctcgattaaaccgagtatcacacttcctagatgaaaacaatctacccgaatctcttctaatcccagaaaatggtgaatatctcatgacattatacattggtacccctcccgtggaaaggcttgctattgcagacacaggaagtgatctcatttgggtacaatgttccccttgccaaaattgttcccccaagacaccccattgtttgaacccctcaagtcttccacattcaaggctgcgacatgtgattcacaaccttgcacatcagttccacctagccaacgtcaatgtggaaaagtaggtcagtgcatatatagttacagttatggtgacaaatcattcaccgtttggagtagtgggcactgaaaccctaagttttggctccccgggtgatgcacaaaccgtttcatttcctagctctattttcgggtggggagtgtaacatactttcccgtttcctacaaggcgacaaag

SEQ ID NO: 115510 - DNA, 1425 bp, Glycine max
  Clone ID: PAT_MRT3847_75316C.1
ccggggacatagaagacggtggcggtgtggcgcattgatcttctcttctcccttgactgccccaaaggcacaaatttggcaatgaattcgacaccagcgaacctggaatcatcactttcagttcccagtgttcaagagttagcattccaacggccagagaaagtgccagcaaggtacataagagatcaagacggtgatggcatcattgccacctacccttctcatccatctcttcgtgtgcccttcatagacatggccaagttggtcaacgctgacacacatcaaaaagaagagcttcgtaagcttcatcttgcttgcaaagactggggtgtctttcagctggtaaatcatggactttcaaattcatcccttaagaatatggggaatcaagttaaaagattttttgaacttcctttacaagagaagaagagatgggcacagagaccaggaactcttgaaggctatggccaagcatatgtgacctccgaggaccaatagctggatgtttattgcatgtctgagagtatgatcaatgatgtgttttgtgcatcattttcaatgtaccattcctacccccctgccttttgggataccttagtggcggattctgtaggacgggcccaagggtcattgtcagttgtgaagttccttactatgtctttggggattcaggataaagagatatcggaaagtttcagagaaggactgtatgatataaggatgaattgctacccaccctgtccagagcctgaaagagttcttggaattgcgccccatgctgacaattctgggatcactcttctgcttgactgtgctgattttccagggttgcagttcctcaaagataaaaaatgggtcaatgttgaacctatagaaggggcaattgttgtaaacattggccaaattattgaggtgatgagcaatgggatatacaaagcgccagagcatagagctgtagtaaataagttaaaggagaggttttcaatagtgacattctgctatccaagccctcatatggacattggacctgctgacaagcttacaggtgaaggaaaagtagctgtattcaagaaattgacacatgcagagtatttcaggaagtttttcaacagagaccttgatgaatcgtttattgatagtctgagagtatgatcaatgatgtgttttgtgcatcattttcaatgtaccattcctatatcatttcctttttgtataacataattgcggcactgataggacgggcccaaagattatataggatggacttagatatttataaattatagtttttatttatgttaaaataagatgatgttgatacttggataattattatccattgattaacattccttacattatataagtgtattcatctttacttattatcatcaatgaagatatctgagttattttatcttcaaa

SEQ ID NO: 115511 - DNA, 175 bp, Glycine max
  Clone ID: PAT_MRT3847_75317C.1
gcctactgagaatgatttgggtgacgcctcggtagagcgatgaccaggttcatgctactacttgatagtttcgaaggaggttctcaggcaatggtttggggagaaatgtctgcacggttcaaggctattcctgctgcttggggtcctggagattccctgtgggatgacctcgatg

SEQ ID NO: 115512 - DNA, 242 bp, Glycine max
  Clone ID: PAT_MRT3847_75318C.1
tcgtttggcgaaacacgggagacgatagcgggcgttaattgatcacagctcactcccatgaggtacctgcttaagtgtgaactcacgtacaaatggaaaagaacattgacccttgtgtggacatccgcagacttgtggaggagttcatgataaagatcagctgaatgtgctgatcactttgctagttgaacaaggaccacgtgacataatgataattgggacgaatgtataacagatgtctg

SEQ ID NO: 115513 - DNA, 598 bp, Glycine max
  Clone ID: PAT_MRT3847_75319C.1
ctttgttttttttttttttttttttttttttttatgaaaaagttgacttgttttctttctttggcattctattttttattctctatcttttggccttctatatacatacgaatcagtgtaaagaacaatttagaagtcaattatgggttctccaactctcaaatttcgttccactgtccatggtaagttaaagagcttggccatgataaacttgaaaattttgttgacatttatgttgtgggttgcacttgaaaagaaaagggttgccttcatcgcccttgcatatgcccttgcctgtatttatgcgccgtaccaagttaattaaattttgaaaagccaagtaatgtgataattaaaaaaaaaaagtagtactattaactttatttaaagttataaccgtgaatttctgccaaaaaaagaaagtggtgagacctgtgaacacatcactgattcgactttaatcaacatgtaggccccaaagttaatgctaaacgccggaacatagaactttcataaatgacacacgctgaggttccaaataagactcctatttattagaagaatatttctttgttcccgggtcaatcaaggttgagtc

SEQ ID NO: 115514 - DNA, 564 bp, Glycine max
  Clone ID: PAT_MRT3847_7531C.1
agatattcaaggatctggtgccccttcttccttcttgtgttgggaccaattctttaatgagcgagagagagagggcgcaatagtagccatagccataatttattgttattatttagggatgagtgaagtgaatgaatgaaaacaaaaacaccgccatcgctcttgtctctcacggttgactctgcggttcttaatctctccgacatctccgatctctcccatgtccctgatcacatcctcctcgacctcttcctgagaatattgaaggctgggaagctgactgagaaagttctgagactttttatagcaactgggtgttctgaggcaaaatcagacttttagtttgtaagatagtctgtaccttgcaagatgtctcaagcagttatcaacgataatgaagtggacattgtgattggtgcactgcattctgatcttacaacttttatgaatgaatggaggccaattttctcccgctttcacctgataatagtaaaagatcctgacctcaaggaggaactccaaattcctgtaggcttcagcgtggatgtgtatacaaagtctcag

SEQ ID NO: 115515 - DNA, 321 bp, Glycine max
  Clone ID: PAT_MRT3847_75320C.1
ggctcgagatcactaattccgtcttcattctttttcacaggatggactgaaacctgctgggggtggcttaccagttcgaagacaccatgaaggagatatggatcatttgcatcccttagattgccaaaacgcaccagggtacctgagcctcacacttgggcggatgcttatattacgatgtgtctacatttacatacttgatggcttgctcaatgagcctgtatttaaagtaaaatgttcacccatacctatggtatggtctaagacattgtttatctgcactgtttttcctttattggtactggcgttaactgttacctt

SEQ ID NO: 115516 - DNA, 551 bp, Glycine max
  unsure (1)..(551): unsure at all n locations
  Clone ID: PAT_MRT3847_75321C.1
gatgcaggaggcattttttcgaacatatccaccaatgctcccattccccaagcgtacctctctgtcatactgaggtcatgaagggcctccaagtagacaacatgcacattggttgcactcttgttagcaaacagagtgcaacccagaagatgaagaagatatgcgcgagccgcagctgtccaatgacctgcctggcatcgacactcatatatatcacgtacccattgcaggtgtacgtacggtccacgacactgggctgtctcagccctggcagactctgtaaagaccatcaataagtccatcagcatctcaaccgcatcatccacatgcaagggctcaaaggcatgtaagtcgccaaccattggcagatggagaagcgaggagacatcgtccagcgtgatggtgagctctcccacagggagatggaaactagacgtctnccagtgccaccgctccacaaatgaggacaaaagtccccgatcgccggtgtctaccgaacacgcgatcagaggacttagtcctataccagcaacaagttcttcaatggcagg

SEQ ID NO: 115517 - DNA, 3493 bp, Glycine max
  Clone ID: PAT_MRT3847_75322C.1
atcagggactgccttcgatgggcgtttggacatgcgtatgaggcaggcagcaatgagtagggctagcgatggaaatcatcaaggtgatcttctatatgatcattttagtgagaaggatgattttcggtttgactttatggctgatactggccgtgcggggaactcatcttatgctgttgcacggctgcttgctaagccttttattcggacactgaaagatgattctgagcttaccttgccacgtggaaacttgctacttattgggggtgatcttgcgtatccaaatccatcagcattcacatatgaaaggcgtctttttgttccttttgagtatgctcttcaacctcctccttggtataaagcagagcagatagctgtgaacaagccggaggtaccctttggggctcaattaaaacagtacaatggacctcaatgttttgttattcctggaaaccatgactggtttgatggactccagacctttatgaggtatatatgccatagaagctggttaggtggatggctcatgccccagaagaagagttattttgctttgcaactccctaaacggtggtgggtttttgggcttgatctagctcttcatggtgatattgatgtgtaccaattcaagttctttacggaactgataacagagaaagttcaagaggatgactctgtgatcattattactcatgaacctaattggctcactgactggtattggaatgatgttactggaaagaacatttcacaccttatttctgattatttaagaggaagatgtaagcttcgaatggctggggacttgcatcattacatgcgtcattctcatgtaaagtcagatgggcctgtacatattcaccatcttcttgttaatggttgtggtggtgcatttctacatcctacccatgttttcagtaaattcaacaaacttgatgaagtttcctatgaatgcaaagctgcatatccttcctttgaagattcgagcaggattgcattgggaaatatcttaaaatttcggaagaagaactggcaatttgattttattggtggcattatatattttgtactagtcttttcaatgtttctagtgtgagctgaatcacatcctccaagatgatacattttctggtcacataaagagtttccttggtactgtgtggaatggatttatatatattctgcagcactcttgtgtgtcactagcgggagctatactattactaattgcggcatattcttttgttccacccaaattgtcacggaagaaacgagcaataattggagttcttcatgtttctgctcaccttgcagcagcactgatacttatgttgcttcttgaaataggtgttgaaatatgcatccagcataagttgctagcaacttcaggtttggtttttctatatgttgaacaatttgtattgatacaacgttttgtaacttgttttgctcaagttgataaataatatatcttagcttaattttaaattacacttttgatccttttagtttcacgaaattcctattttcgtccccacttttaattgcaacttgaagttttgaaatcaacacaatgaagtccccttgtcagattgacattaacttagcattcttttgctgatgtggtgttatgccatgccatttccaaaagtccagcaaatagaatcttatcattcattatattgaaaataatattggcatgtcagctgactgccacatcagcactaatctgagggtacttaacttcatgaatttgaaaatggttagaaatataaaattgttgggcttccaccaaacattgtaagctttggggtgaattgaccattgacatggtattaagagtttgtacgatcaagttgttaggggttctcacccaaattgtcacggaagaaacgagcaataattggagttcctcatgtctctgctcaccttttaaagcaaaagtggtattgcatgggggtttggggggatgctagaaacaacacactactattatgaggataaaattgtgactattgcagtgaatggaactaaatagagcttcagttaaatgaggaagatgagacgcataatttcagatttttattgtgtgtaatcctgcattccagattttacaagtcacaccatattgtcatatccataagggcatgttcattgttacgttgcttataaaggatagacttccatctttataattatcttgttggaaattatatttctattgttgtatctttattttgttggaagctagattcaataggttcacaatgacctgctggaacttagctttggtgatattgatatgactcctgatctggtgaattttggcacaaggtcctttgactaatttgccattactcatcacaaataaattagagaaaaagatttcagcactttgtaaagtgggattgtgtgtgtgtgatgatgatatttagtttataatgtctggtgtttttttgggggggtgtgaatccagggtatcacactttatatcagtggtatagatcagtggaaagtgagcactttcctgatccaactggactcagagctcgtatcgaacaatggacatttggactttatccggcatgtatcaagtatttaatgtctgcttttgatgtgccagaggtcatggcagtctcccggaacaatatttgccagaatggatgagaatcttttgccagaatggatgagagtctatttcccgagggggtgctgtaatatattatgcttccgtcttcctttatttttgggtcttctcgacccctgttgtttccttggtgtttgggagctacttatacatttgcatcaactggcttcacttacactttgatgaagccttttcgtctcttccattcacacggtttcacatcaattcggatggtgatcttgaagtttatactttggctgttgataaggttccaaaggaatggaagctcgatcctgattgggatggagagacaaaacatccacatgagttgagtcatttgagaaggtttcccagcaaatggagggcagccattgcccaccaggatccagttcgtacggtcaaaattgttgaccatttcgttattggacggacagataagaatgactgtgctactactgcacctaacggaccagttcaatgatttgttgatttggtttggtttatcctgtttgtaacattatttaggaagcaatttgaagaaatgaaaaaaaagaaaaaaaaaaaaaaaaaaaaaaaaaaaaaaaaaggagaaaagactaaaaaaaaagaaaacaacgaaggaaaacctataattgaaccaaacaacaaggggggggcccccctttatgggctttttcaccccggaattaatttcgggccgggtccctggggggacccaatttttccttttgggggggctgttaaaacttgggggaaataagggcaaaagtttttcccgggggaaaagggttatcccttaaaaattcaaaaaaaaaatatacccggaacataaaagttaaaacccgg

SEQ ID NO: 115518 - DNA, 1982 bp, Glycine max
  Clone ID: PAT_MRT3847_75323C.1
ggtgtgttgcaccagggagggatgtttgtgttcaacagaggaaagcagctactctatgcgaggaaaaacgaagggacaggtgatcatgcccccttggcaaagtttttggtgtgctgctgcaaagctcctgtagcctaatgtattttataaaatttaaatggcatagccttagggatgttcaatttaagaatatttgtgttagtagattagatttctgtgaatcatattagtgacaacatctatcatgaagtccaatctacaaatatgtagtctatagtatataaagtgcccttgtgaattcaatttcccaaatctatagtaccaatacttcatttaggaatggtgattgtagtttcatatatgtagccatttcagatagttggctgtcaaggcatgtttgtattttcagtcattcacctattctttccccgttatcaaatggtggaaagcgtacatgcttgacgtcaggattgacttaaaatgtcccccggaatccatttgctcggatcttaattttaatggcttatctgaatacttaagatctgcccatggttagttctcaatggctgttttatttatccagatgtctccaaatcgtggcggcacgctttcattttttttgttggtacataaacttatctttttgctaccctgtcttcactttgcaatgcttcttcgagctattaggctttagtccaaatcattcatccagctacaaaaatctgtttttatctcttttcttaataaaaaattctacatcttcaattacaatcatatgctataactcctttatatgccactatttttcatttcttcaatcacttccactttctttctctctctcacacccactctccaaatccctatcactatctactctatccgtgaactaatctaccaaatggatattccctctcattattaactcaatcttattgatttcaattatctctaccctcctctaattaaacattatccaggttacttgcctatatggagataaacttgctaccagatagcttttatcaattgggggtggacgaggaaagattaacccattctttgacaactttctcaacaaagcaatgtgcctttgggattgcatcaaattggagtttgttgctttgcttcgttaacttctttacaaagtccatcgagaatatcatgtcaaagttttcttccaaatcagtgattttagggtaaatttgtatcccaatctcggcttcccgtgaattaatcaacccaagaagtagagagtttccaccggccgttttttcacttgggcagcaaaactcaatgtactcaacacccatgtcaataagattatctacaatactatgttttgaaaacaagctaataagtcccccagatccaactggagattggagtatttcccaaggtgatttcattaaaatcttatatttgttctgtcccttgggcaaactgctaattactggcagcttctcttcctccaaaaaccataccttttctgagtcaaatgcaaagtaattgttgcttggaaacagattccttaaagactgaatttgttgggctgaggaaaccaaaattaaaggcacagaaacatgatctttgaccttttgaaacatgcgaagtaccgaagtgtcaattgcttcattttcaatcatgttagagtcagaaatgctcccctgacgctcttcttcattcaaaagaaagacaatagccattttgcccttagacatgagctcagctcccttctcttgcatatctcggaaaaacttattttcacttccatttaagaaatattcctctggtatttggatagaatttataagctttgcttctatggcactgaccaactcagcaactttccatctctttgctggccgctctagactttgtaaagcctcctggagcaatttggagtttacgccaacaatctgatcactaagcaagctccattatctttctctccatattaaatccataaatacaaattttgc

SEQ ID NO: 115519 - DNA, 1003 bp, Glycine max
  unsure (1)..(1003): unsure at all n locations
  Clone ID: PAT_MRT3847_75324C.1
acggaatcaatagtggtgaagcaatattgtctcgtggagatgcaagttaagacaaatcacacgcatcccaaggcaaaaccatctcttaagtcttaacttatggaatagtcttttaatattgcaataactataagtctggttttcttgaacagcatgtccggaatcccgggtcggctcaaggcaaaaggaactgtttccttttggattcaattgctttcttactatcataagcaagctcttcctttgttagttagacttcactttgaagcaaccaattctgaattctgagtgtgcaatgcaatgcatgcataaaaggcgcgcataaagctagctataattggtattcgtctgcctgtgttattggcgtttcgcacacataaagctgagagttgccatggattctaagaatgttgttgcttttcaagttgtaacattttgcatatgcttggctgtggcaaattcggttgagttcagttaccctgcagttttcaactttggtgattcaaactcagacacaggtgaacttgctgcagggatgggatttctagtcgtcccgccttatggaaaaaattacttcaaaaccccatctgggaggttctgcgatggccgtctcatagttgacttcttaatggatgcgatgaaattgccattcttaaatgcctacatggattcagtgggtttgccaaattttcagcatggatgcaactttgcagcagcaggttcaactatccttccagccactgcaacatccatcagcccgtttggctttggggttcaggtatttcagtttctgagattcagagctctggctcttcaatttcttcaagtttcaagaaagaaatttgatcagtacgtcccaacagaagactatttcgagaagggattatacatgtttgacatangccagaacgatcttgctggggcaaaaattcaaaaacattggacctaatacttgccacaattccaacaattctattggaatgtgaaactggaataaagaaac

SEQ ID NO: 115520 - DNA, 202 bp, Glycine max
  Clone ID: PAT_MRT3847_75325C.1
tagcgtgcaaaattatattcaaaaaaaaaaaaaaaggggaggctgcagattagtgagttcgtcaacccggaaattatttcgggcccggaacttgaaggggtacaagttttcccaaaagggagccgtattaaagcttggggaaatcatggccaaagctgttcccagtgaaaaattgtaatccgttcaaaattccaaacaacat

SEQ ID NO: 115521 - DNA, 413 bp, Glycine max
  Clone ID: PAT_MRT3847_75326C.1
tatagctccaatgtttgtttgccaaactcataaggctgtaagatgtattcataaaaaatagtcatcaatagagtatgtgaaatatttttcgtgtaaaaaaaatcaaaataaaatattaagttggataaaagtgcactaaaccttaaacatgtgtaatattctttgaaaaaattctttgtagatcatatttctcgcagttgatactctttgattttcttcgtcaatagcttcaaacctgatttagtgtaacatattgaccatgtgatcattaatttggtcttggcaaaagtactccaccaacttgagacaaagtttgtccatgacttttatttattttcatggtgtaacacacaagggaattgacatcttggaatttgaatgaagccaagcgatcaaatgatattaaatttaaa

SEQ ID NO: 115522 - DNA, 200 bp, Glycine max
  Clone ID: PAT_MRT3847_75327C.1
cagaatattattatttagtcacataatgctatggtggatctacttggactgaaagaattgcccccctctcatatcatacgctgaggcccgattcaatacacctgcatcaagcgaaatctttgacgacctatttatatgcacattagcgttgtagcgcaccttcttcatatgtattgaaatgttcttctttgcagatgctt

SEQ ID NO: 115523 - DNA, 222 bp, Glycine max
  Clone ID: PAT_MRT3847_75328C.1
aaaagacgcaaattttacttacattagcggcgcttcacactgtggacacgaggtgaacgtcacggaggagcaagaacacccccaatggacagaagccacagtgttacagctaagatattctgccggcaaagaggcacacgctcacatggcaccaaagtggaataaaatgcctgccggtgaagcaggcactgcgaaaggatcaaaattgggtcccaaaataca

SEQ ID NO: 115524 - DNA, 273 bp, Glycine max
  Clone ID: PAT_MRT3847_75329C.1
atcgagaccacgctcgcgcgcctcgtcccgcccaccgaactgaaaggctgcgccgacgcggcatcgctgctcgccgatgcgatcgccgacaagcggcacctgctcgtcgtcgccgactacgactgcgacggcgcgaccgcctgcgcggtcgcggtgcgcggcctgcggatgttcggcgcgcagatcgactatctggtaccgaaccgcttcgaatacggctacggcctcacgcccgagatcgtcgagctcgcggcccctttaaaagatccaagc

SEQ ID NO: 115525 - DNA, 811 bp, Glycine max
  unsure (1)..(811): unsure at all n locations
  Clone ID: PAT_MRT3847_7532C.1
cccacttataagagagagagagagagagagatattcaaggatctggtgccccttcttccttcttgtgttgggaccaattctttaatgagcgagagagagagggcgcaatagtagccatagccataatttattgttattatttagggatgagtgaagtgaatgaatgaaaacaaaaacaccgccatcgctcttgtctctcacggttgactctgcggttcttaatctctccgacatctccgatctctcccatgtccctgatcacatcctcctcgacctcttcctgagaatattgaaggctgggaagctgactgagaaagttctgagactttttatagcaactggtaaggatgaagtcctctcatttgttcaggcactcaatatccaacatattttgacccctgtgcttcccaccaggtgttctgaggcaaaatcagacttttagtttgtaagatagtctgtaccttgcaagatgtctcaagcagttatcaacgataatgaagtggacattgtgattggtgcactgcattctgatcttacaacttttatgaatgaatggaggccaattttctcccgctttcacctgataatagtaaaagatcctgacctcaaggaggaacctcaaattcctgtaggcttcagcgtgatgtgtatcaaaatctgagatcgagcccgtcctggggccggcgcggcctgtcccctctctggcttgcgcctttcttcntggcttattgcctttgnnannataatttttnggcttttccttnaattttcaaccgggaaaaaaaagtattggttggtcctggccaattgg

SEQ ID NO: 115526 - DNA, 264 bp, Glycine max
  unsure (1)..(264): unsure at all n locations
  Clone ID: PAT_MRT3847_75330C.1
ctctcgtatactacaatcaacttctgtacttaacttctatagaagttctatcatctaacttctccaaaagttgaggtggataaaattgagtgtagctaataagagaagctcaattcactttacccnattttttcacttataagtgtttatgaagaagcttatccaaacaggatattatctataatattttttggtaattcatacattgacatagttgttatgtgcntcatgtgaatacaatattgaaatactcctnaanggtat

SEQ ID NO: 115527 - DNA, 266 bp, Glycine max
  Clone ID: PAT_MRT3847_75331C.1
acggctgcgagaagacgacagaagggcacacacacatatatatatagacacactcatttaattttctctagcattattttgttccatttttagcggagaatgttctgtgaaatccgaacgcttttcttcaccaaggtaagtaatgaatagttatctgattccatatcacacatgcaatgaagacaagtaataagaaaaacagctgttatatattattctagtgtcagacaaattctgaatttgaatttatgctgccttttgtacta

SEQ ID NO: 115528 - DNA, 329 bp, Glycine max
  unsure (1)..(329): unsure at all n locations
  Clone ID: PAT_MRT3847_75332C.1
gaacttggttccttctatgctgaatttcttaatggcagggccgagagtgggggagatcaattggtcaaagactttgattttctttctaatattgaaagtgctaatttatatgtagagcagccgngacctgacgtctattctacatgtatgagaaacatatcgcgtctgctctacattgaggcttcactgaataatactgattatacattttactcctaagtagaccgatcatgaggttgttaacttttgagattgttattctaaggcttgtgatcttgttaaatgagccgtttgtttttactttgaatggccttcaacagaggtaaaac

SEQ ID NO: 115529 - DNA, 438 bp, Glycine max
  Clone ID: PAT_MRT3847_75333C.1
gaagagtccaagctatcgtttttggtcaccagtacaaactgcaaagaaacgaagcttttgggacataactactgctaacagcccgtcagtcaccacattgaatgggagaaaaactagaagtcatctcatttctgaacctactgcacatccatctatgcttcttcagcccggatttgctcgaaaaaagggcgatatttaaacgtggggtcttcttggaaggagttacaagaggaagtttaaggacagaagcccacgtatagaggtttttttttttccgaagaccctgatacgtcctcaaaattctctctgggcttgaactggtagtccaacataaaagaaaagagatcattgcaggttggtgtgcttctccttccacctcatctcttctcgtgtaattcagtcataggaaattaggaattaggatgatagtttctttag

SEQ ID NO: 115530 - DNA, 286 bp, Glycine max
  Clone ID: PAT_MRT3847_75334C.1
aggaaaaggagtcagtgactatgcctgacttggatggatatttggagagagagatacagagagattatcaatggatcgccgatcagtgtgcgactaggaacagtactttataccgagagtgcttcagaaatcatgcagaccgcctatgaagctgcgccacggaccgatgcttcgactacactgaggacggcgccttgggactacaatgcatccgatgcgggtgccaccaggtcttccaccggaaagtgaagtacctggcggccgctgaaaaccctgccacggagta

SEQ ID NO: 115531 - DNA, 226 bp, Glycine max
  Clone ID: PAT_MRT3847_75335C.1
ctgcatgttggttctctgcggacagatactgcaagagaagaataatattgaagatttggttaggtttaatcgctgggttgaagcgttacagacatcacggctattctaagagtgtctcgctctctcattcatgtcccaactgtacgacggatgacagggtgcgtaactgccaccaagccttcgccgcacggtgtgcgtagtgctgtgccttctgaaggtggtagcc

SEQ ID NO: 115532 - DNA, 402 bp, Glycine max
  Clone ID: PAT_MRT3847_75336C.1
agtttgcaagctatcaagttagttagaaacaattttctgataagttagttgatggccaacatctaactgtttttaagtttttccattttggtagttttctctttgataacttattttcttgagtgctatataaacatagaagtatttccttatgggtatgttgcaacagtgaggtcccattcatgcaatcacaatgagtggaagatcaaagtgtgtaagaaagatagagtgaaacttggggatccttgatgttgttatctcaacagtgaaacgcccaaacacgattctatttgtatacagagttctttgtaactcttttgtgactgaaccatgtaattgcttgggttcatcttctattccttatctttctttgattgaatttcttttatgttattaactttt

SEQ ID NO: 115533 - DNA, 479 bp, Glycine max
  Clone ID: PAT_MRT3847_75337C.1
gttctgagattccacaaaaaacaacctgcgaactgcgaagtcatcaaggttttggtggcacttcagctcctttatctgggcatggaaacatcttcatctgtgtccaataagaccataacattggaagaatggaacggttcttcccccacaaaactctccaagactttcaccatcaaggcttcctcttcctctgtcctcatcacaagatctggtgcccgctttacccatgtttggagaaggttacttcaggcatttgtccctgagggttttccaagcagtgtgactgcagattatgttccttttcaaatatgggacttattgcagggcctgtcgacgtatataaggactatgctttctacccaggctctcctgagtgctattggggttggggagaaatcagctacagttattggtgccacttttcagtggtttttgagagatctaactggtatgcttggaggaatcttattcacatttta

SEQ ID NO: 115534 - DNA, 700 bp, Glycine max
  unsure (1)..(700): unsure at all n locations
  Clone ID: PAT_MRT3847_75338C.1
gaggcagtgcgcccacgcgtccgtacggctgcgagaagacgacagaaggggattcttattgctgctaatgcgccattacttatgctaagctaatacctaatcctcccaattcataaggcgttctctggctttcgttggtaattttctctccgtttcagggttttcagaaattttcgtgtgaccctgtgaccaagaagagagaagatggcacctcaattggcactaacccactcttctcttctctatgtttctccctcttctgcttctctcggtttcagaaggaataaagttttgattccacaaagatgcactataaccaacgagaaaaaaaatcatgccatcacagcgtttgcagccaactctctcggaaaatcatctatccaactcactcctgtttcaacttcactatttaccgataaagaagctaacctctcactcagacttcctatttctcaaagattcaattctaagatctgtggacaagcatttaaatatcatgcgtctggtttccgaatccctgcaaatgctgagaagccagaatggtggtggaggactttatcctgtattccctatctaatagcattgcagatgtcatcaactggatattatctagatcctttcattcaaaaatttcctttctttcggattttgcttttttacatcccangaggtgtcaaccgattaccaatctgcttcccta

SEQ ID NO: 115535 - DNA, 386 bp, Glycine max
  Clone ID: PAT_MRT3847_75339C.1
ccaaattcgatcctattttctaaaatttccagagcagatggaagaaaaatgagaccaaattgaatccattttaaaaaataaaggacctaattgaacattttaaaagtaaagagacctaattgaaccattttaaaaaattacaggatctattgaaccttttaataataagtggaccaaattgaatctaaaaaacaaattagagaaccaaaatagtaatttaaacttttttaaaacaaggcaaacccaagtttttaaatttaatttgtttaaataaatgaatctcaagtcaagttggaggttcaagtgctcggcctggctctacttaaaactttcctaacaagataaggaaactacacacatgtcaattaatctcaggtgtcaaattt

SEQ ID NO: 115536 - DNA, 467 bp, Glycine max
  Clone ID: PAT_MRT3847_7533C.1
ttcagtttcgaaaactgttttcaagttctggtttagatatgcatgaaggtagcaggttgcagactttagtgatgggtggtgggatggggagtggtggtggcaggatttgcggtggtggaagaggctcacatggtagggatgggacagatgcttattaccagaacatgattcaagcaaaccccaataatgctcttttgcttggaaattatgctaagtttttgaaggaggttcgaggagattatcctaaagcagaggagtatcttgaaagagctattttggctaatcctggcgatgctaatgttttgtccctctacgcggatttaatatggcaaacagagaagaatgctgatcgagctgagggttattttgatcaagctgttaaaactgcacccggatgattgctatgtcttggcttcttatgcaaaattcctttgggattgttgaagaaaatgatacaaaaatactgc

SEQ ID NO: 115537 - DNA, 403 bp, Glycine max
  Clone ID: PAT_MRT3847_75340C.1
cgcgtacggtggaaatctatctattagggcagaatctgcagattctgttgatccagcccaaagagaggaagcaaatgacatggatctgctcacaagtgcttcatgaaaaagcagaaggaagagatcctggcatcaatggttctgtctataatgcagccttcctatagtggaaacatctgcttctacaacttcacacccacttgcagattaggcatttccaaaccctggcttatacagacaagctcctgctcttagctggcccattgatgatctggttggattagataatccagctgagactgcagccatgccttcacctactccattgaacctatacccacaagctgtgctggatcctggcgcaattgatcagacatggcgtcaactgcaatatgcttatctg

SEQ ID NO: 115538 - DNA, 2662 bp, Glycine max
  Clone ID: PAT_MRT3847_75341C.1
tcggtaagaagttgaagccatggaggctataaggaaggtcaatttgtttgaatctgcccatgtgcgtgaagtaaagctcagaaaagaggctgaggatgcactgacagatacagtacaagaacaacaaaagctcttgaatgcgagtgaagaaattgctggcgagctacaaatgaccatgagaaatattgccctgctagatagtcgtgctcaggaagcacaccgtaggtgcgatgaagctgcagatgaactatcactaattcaagaatccatctcaaccctgtggcaagaaaggcagcaaatcaggagacagaaaatggaagccttacgttggcttgagcgttggagaagtcgtgggaaagttggagcagctcattgcaatggggtcattgggtttgctgaagaattacctgagttagcagaattttcattatcagatcttcaaaatgccacatgtaatttttccaatagctttataattgagcaaggtggatacgtttgtatatacaagggagaaatgttgggtaggactgttgctataaaaaagttccatcaacataacatgcaaggaccattggagtttcgtcaagaggttcaagttcttggtagtctccagcaccctcatttaatcactttgcttggtgtttgccctgaagcctggtcaattgtatatgagtacctcgccaatggaactcttcaagactacctaccccgaaaaagcaacaattcccctttgacatggaatacccgagcacgaatgattgctgaaatcgctagtgctctctgcttcctacattcttttaagcctgaaactattatccatggtgatctgaagccagaaactgtactacttgattcttcactgggttgcaagatgtgtggatttgggctctgcaggctggtgagcgaggagtctctcctccgtcctagtttccgcttgagcactgaaccaaaaggtgctttcacatatacagatccagagtttcagagaactggaatactaaccaccaagtctgacatctactccttcgggctcatcattttacaacttctcactggtaggactccagttggattagcagttttagtacgcaatgcagtttcatgtggaaagttgtcttcaattcttgattcttcagctggagaatggccctcagctgtggcaatgcaattggttgaactgggactgcaatgctgtcaacaataccatagagacagaccagagttaacacctacacttgtgagagaattggagcagttgcatgcttcagaagagcgacctgtaccatcttttttctcatgtccaatccttcaggaaataatgcatgatcctcaagttgcggcagacggatttacctatgaaggagatgccatacgtgaatggttggaaaatggacatgatacttctcccatgactaatttgaaattaagtcacctgtttcttactcccaattacgcacttcgacttgccatccaagactggctttgcaaatcttgaagcttcttctatttatctgggctaaagttctcttttttatcctcattagtttggggccagtttcgtttcagtcccatgattttcttttcttgtttcagtttgtgtgtgtggttgtaaatttattttgtatcccacaaaacattttcaaattgatttgatcccagcttacgccattcaagtagacagaaggaaaaaagaactgtattttggccacaatttccagccaagagaaaaaagaaaaagaagggaaagtaatagaccgtcatcgtctgtgcacccgtcatgattaagactttaatatgttatgggattaaactgattcttgtctcatatttgagggggcaaaagaaacaacttagcctttttatttatgtaaatatttgtatattttattattctcattgcgtttgggtaatgttcttcagctgcaccactgattagctacaaatgatataagacttttgttttgctgtttccttctggaaataatgcatgatcctcaagttgcggcagacggatttacctatgaaggagatgccatacgtgaatggttggaaaatgggcatgatacttctcccatgactaatttgaaattgagtcacctgtttcttactcccaatcacgcacttcgacttgccatccaagactggctttgcaaaccttgaagcttcttttatttatttggcttggactgaagtgctcttttttatcctcattaggccagtttcgttttagtcccattctttacttttcttttcttgcgtgtgtggttgtaacttgtaaaattattttgtatcccacaaaacattgtcaatttgatttgatcccatcttactccattcgagttgacaagaaaaaaaatattgtattttggccacaatttccagccaagagaagaaggagagcggaaagtaatagacggtcatcgtctgtgcacccgtcatgatttgacttcaatatgttatgggattaaactgattcttgtctcatatttgagggggcaaaagaaacaatttagcctttttatttatgtaaatattctattttcccattgcgtttctttagagtttttcagcttcccccttaagcgataaatgatataagactggtgttttgctgttgcgctttactgaatcgctttagatgctataaaaattgactgcttgt

SEQ ID NO: 115539 - DNA, 325 bp, Glycine max
  Clone ID: PAT_MRT3847_75342C.1
caaaggggattaaaggcagaggtattgccattgcctctggggcttgcaacaccaaactgatacacacttaatactattatagtaaaaattagccaccaaagtacactaaccgctattatcatacaactcaatagctagattggagcaacgtgaaagatctatcatttgcaaccaatgccattgaacatatgtaaagacatatatatattgccacggattatattgactgaaccaaaggattcattaactgatgttctgctttatacatggcatatcatttattggaagaattatctaatggaagaacttctttttatgagcagta

SEQ ID NO: 115540 - DNA, 339 bp, Glycine max
  unsure (1)..(339): unsure at all n locations
  Clone ID: PAT_MRT3847_75343C.1
ccgctttnttttttttttttttttnnnnnnnggagaaacaactcacaatgtgtgctttctttaaaaaggactgatgcctcctcagaatatccgtatataatttattgggtacctcaccaaggggccccttcacacaagcacatgcgtgggttaaagggtttaagggtcatttatccaaagcgcatcccataaaaggattggcccctctaattaaaggaccctttctcttttttttgccacactttctttttgttacacaaaatgctaatcccacgaactactggtaggggcaatcagcatttacgcggagtgaataacaacctggtttccaacaccctt

SEQ ID NO: 115541 - DNA, 562 bp, Glycine max
  Clone ID: PAT_MRT3847_75344C.1
gtaacagccctgcaggccactcggttttaatctttcaatctctcagactttgttattatattcttgagagtgagcataattaatggctaccaagcattcactaatgtctctctttcacagaacttcatcacagggtgagcacaacccgttaaacatgtccgatgagcagatattggaccaaatttactcaacccatgtccacagtcacacaaagtttgatgtagactctcttttcattcttgttgagaacacccttaggcgttcaactctcattgttgacaatgttgttcagggttccaaagcaagcttggagcaggtagaagacaagattccccaagccaacttcaattctccactctataccctgaagcaaatttattccgagatgtcatgcaagcctccaggagaggaaatagctcatataactacaatggccatacttgtcaagctctcaaactatgagtgggatgcaaaagcagtgctgacactggcggcttttgcaatggaatatggcgagttctggctgctagctcagcatcaaccaacagaccctattgcaaat

SEQ ID NO: 115542 - DNA, 737 bp, Glycine max
  Clone ID: PAT_MRT3847_75345C.1
ggaagtttgaaaccaccaagtactattgcacagtcattgatgcccctggacacagggatttcatcaagaacatgatcactgggacatcccaagctgactgtgctgttcttatcattgattccactactggtggttttgaagctggaatttcaaaggatggccaggtatgatgaaattgtgaaggaagtttcttcctatttgaagaaagtaggatacaaccctgacaagattccttttgttcctatatctggttttgagggagacaacatgattgagaggtccacaaaccttgactggtacaagggtcctactctgctagatgcacttgaccagatctctgagcccaagaggccttctgacaagcccctcaggctaccccttcaggatgtgtacaagattggaggaattggaactgtgcctgtgggacgggttgagactggtgtcttgaagcctggaatggtggtgacttttgcaccaactggactgacaaccgaagttaagtctgtggaaatgcaccatgaagctctcacagaggctcttcccggtgataatgttggattcaatgttaagaatgttgctgttaaggatctcaagcgtggttatgttgcctcgaactcaaagatgatcctgccaaggaggctgctaacttcactgcccaggttatcatcatgaaccatcctggtcagattggaaaaggctatgcccctggtcttgactgccacacttcccacattgct

SEQ ID NO: 115543 - DNA, 574 bp, Glycine max
  Clone ID: PAT_MRT3847_75346C.1
ggaatttgccccgaagaatcttctggtcctacgttttctacctctcacgcttcctccacctgcttcgcaccttcttcgtcgttttgcgtcaccgaaggttgtcgtttttcaggctgttcaacaactccgtccttttaatcatgtcgtttctgtggctcgagttttcgcagtcgcttcaggtgctggcgattcttttttacacggcggtttattccgtcgtttacgcgtttcggctctggacggaaatcgggttgcctaccaaaacgccgttagcgttgtcgttcaccgcgaattttcagatagtgctgttgggttttaacttaatgtgccacgttggagtgctctcgttgcattacttgagaggagggtgtaatggaatcggggcttgggtttttaactccgtgttaaacgctgcttttctcgttcagttcttgaagtcctatgtgaaaacgcattgtcatagccaaagtattgttgcttgctcttcttccaaacgcgaggtttccatgcatgcaagcaagacataatagcaacttaatctaccgccagagttattgaggtttttggtatttga

SEQ ID NO: 115544 - DNA, 722 bp, Glycine max
  unsure (1)..(722): unsure at all n locations
  Clone ID: PAT_MRT3847_75347C.1
acttatagtaaaagnnaaccaagccaaaatttgaacacaaattataaagaaaaagcaaaccaagccaaaaattgaacactacaaatagaaagttgacatttaataaaccaaagcaacacaacgcagcaaagtcctgaaactcgctgcgcttaacaaaaatgtaatcaggggttccgacaaacacaacacattaaaacacagataaataaaagcaattttgccaccgtcgatcaagctctttgccggatcgcctgtcaatcttggtcatgagttcagcaaacttgacagcaatgtgagaagtgtggcagtcgaggacaggggcatagccatttccaatctgaccagggtggttcatgatgatgacttgggctgtgaagttagcagcctcctttgcagggtcatcctttgagtttgaggcaacataaccacgcttcaaatccttaacagcaacattcttaacattgaatcccacattgtcaccaggatgtgcctctgtaagagattcatggtgcatctccacagacttgacttcagttgtcagtccagttggtgcaaaagtcaccaccattccaggcttcaagacaccggtctcaacacgtcccactggcacagttccaatacctccaatcttgtacacatcctgnnnnggaagcctgnnnggcttgtcnnnnnnnctcnnnggctcactaatctggncnngtgcatcnngcagnnnnggaccc

SEQ ID NO: 115545 - DNA, 411 bp, Glycine max
  Clone ID: PAT_MRT3847_75348C.1
aaggaaaaggcaacccaggccaaaattggaccactccaaatggaaggtggccatttattaaaccaaagcaccacaccgcagcaaagtcctgaacctggttgcgcttaacaaaaatgtaatcaggggttccgccaaccccatcactttaaaccacagataattaaaggcatttttgccaccgtcgatcaagaacccagttctgggaacaacagttgcgagatgatggtggagacttcaaactttgtccgaaaaacaggctacctagaaaggaagacacaggagtccagaaaagaacccaccttttatgtgaaccaacatcccctgatgaaccagcccgcacgattcacttcttcttctgggcagccttggtgaccttggctccggtaggatccttcttctcaacgttcttga

SEQ ID NO: 115546 - DNA, 828 bp, Glycine max
  unsure (1)..(828): unsure at all n locations
  Clone ID: PAT_MRT3847_75349C.1
ttgctcacgcgtccgcccacgcgtccggtggtgatttgcttgaactaaggtagagtctcgtatacagttttggtctgtgatttgttgctttggtgagagagtggatatggacgaacggtacgagactttgaaggagcttggttcagggaacttcggagtggcaaggttggccaaagacaaggagacaggagaacttgttgccatcaaatacatagaaaggggaaaaaagattgatgcgaatgttcaaagggagatagttaaccaccgatctttaaggcatccaaatattatcaggttcaaagaggtgaagagtttgtttctatacttaaactgttctttgagtgtgattttttctagatatggaattggtcaatgaattttcttagtagttatctgtattttttggttcttacagctctcaaaaagcaaaactgtgcagttcattggatgttattgttgattcataaagaaatccaggtgtaactcaatggcttctgcaatgagttattaccgttggcattaatatgtcaaaactcaaaagctatagggtgtgtagtgtagctgtagcctactatcttgtgagattattactacaagaaatatggtcaccataaattgcattttctgttttcatattatgtgttgaggataaactgtccaacatgaatctgttaggtgaacacttagcttttgctcagttggccacaaaggctctaatgccatgtcaagaatcagccattccaaaaacttaagttgtctcgtgaaaactcaccaatggttttgtatctaacactacgcanacagggttgcaaactatcatgcttattt

SEQ ID NO: 115547 - DNA, 399 bp, Glycine max
  Clone ID: PAT_MRT3847_7534C.1
gggtacactagacaacttagaattagaatggatgcatttaggagaaagttgggtaacactggaaaagatagtagaatcttgcgttaggtagtttgagctgatgtggaaaagactgtaaaagctcttgtaaagggagcagatcaaatggaggaaagtccaatagttagaggtagaaggggccaagacaaactataatttaagaaggacttgatttaaatggtttgtcattagacatgatccacatcaattgatccatgtagctgatcccacttagtggggaaaaagtttttttccccatgttgttgttcaatagaaagaagctaaggagtgaagttagaaataagtatttaagttatgcttggttatgaatattgctttttgtcaacctttataaatgat

SEQ ID NO: 115548 - DNA, 626 bp, Glycine max
  Clone ID: PAT_MRT3847_75350C.1
gcaccagaaaccttgactggtacaagggtccaactctgcttgatgcacttgaccagattagtgagcccaagaggccctctgacaagcccctcaggcttccccttcaggatgtgtacaagattggaggtattggaactgtgccagtgggacgtgttgagaccggtgtcttgaagcctggaatggtggtgacttttgcaccaactggactgacaactgaagtcaagtctgtggagatgcaccatgaatctcttacagaggcacatcctgatgacaatgtgggattcaatgttaagaatgttgctgttaaggatttaaagcgtggttatattacctcaaactcaaatgataaccctacaaaagagactactaacttcacagcccaagtcatcatgatgaaccaccctaatcatattagaaatagctatacccctatcctcaactaccacacttctcacattactatcaaatttactaaactcatgagcaaaattaacaaacaatcccacgaacaagctgcagaaagagcccaagtgtttgacaaacattatactggttttattaaggatatggccaccagaacccatattattagaacgttcttggaagatggtgcgctgaggaggttt

SEQ ID NO: 115549 - DNA, 440 bp, Glycine max
  Clone ID: PAT_MRT3847_75351C.1
tgtcactgtcttcagccacaccaagagtccctctcttgcacttgcacaccaatctttacacacacactctctctctctctctttctaaccagcattggagccttgaaagcatggaactttccttaacctgttccataacttgaaacttctagaataatgcattaatggggttgcaagcaaacgtcacctaatccatttctcaattttttttataccctccaacttctctttctttgttttgtttttgttttatttatatatgcactattcttctagcagaagaggtgcttagctttgaggtttgaaaaattttgttttttttctctcttcaaaaatgtcaagtctacagttgtgtcatgtggtggatttggagcaagggagtctagtcaccaccgttctgtgagtggcagtgacatgagcatgtgcttttctgatgctga

SEQ ID NO: 115550 - DNA, 1725 bp, Glycine max
  unsure (1)..(1725): unsure at all n locations
  Clone ID: PAT_MRT3847_75352C.1
aatcttcaggtagcttcttttgaagtaaaccanactttttttttttttataanggcnnnnncttgcactgtgttgtgatcaaacctgcggagcgggctcgatagttgatactccggactaagaatttacagcacaacaataatgaataataaaatgcttttacgtttcaccgtttccttatttttttcttcaattctcttgtatacagttttggtctgtgatttgttgctttggtgagagagtggatatggacgaacggtacgagactttgaaggagcttggttcagggaacttcggagtggcaaggttggccaaagacaaggagacaggagaacttgttgccatcaaatacatagaaaggggaaaaaagattgatgcgaatgttcaaagggagatagttaaccaccgatctttaaggcatccaaatattatcaggttcaaagagctctcaaaaagcaaaactgtgcagttcattggatgttattgttgattcataaagaaatccaggtgtaactcaatggcttctgcaatgagttattaccgttggcattaatatgtcaaaactcaaaagctatagggtgtgtagtgtagctgtagcctactatcttgtgagattattactacaagaaatatggtcaccataaattgcattttctgttttcatattatgtgttgaggataaactgtccaacatgaatctgttaggtgaacacttagcttttgctcagttggccacaaaggctctaatgccatgtcaagaatcagccattccaaaaacttaagttgtctcgtgaaaactcaccaatggttttgtatctaacactacgcaaacagggttgcaaactatcatgcttattttcttcaggaattattgccagtaatgtactttagttcgaacatgtctgcagaaatcaaatagttctgttccttcgaaaagatagggaaaataaaaaaaatactccatttaggtttcatgcattttaatgttgtgatgagcatgtcctttcttttgtgtgggctaaagattgaacaaataagacgtgttctattgagagctttctgaagttatatacacattctggaagtcagatcttttctgcaggtatttctgacccctactcatttagctattgtccttgagtatgctgctggtggcgaactcttcgagaggatatgcaatgctggtcgattgagtgaagatgaggcaagatttttctttcagcaactaatatctggagttagctattgtcattccatgcaaatatgtcatagagatctgaaattggaaaacactctactggacggaaatccagctcctagacttaaaatttgtgactttggtttctccaagtctgctttgctgcactctcaacctaaatcaactgttggaactcctgcatacattgctccagaagttttgtcgcgaaaggaatatgatggaaaggttgccgatgtttggtcgtgtggtgtgacactttatgtcatgttagttggagcatacccatttgaagatccagaagatcctaaaaatttcagaaagagtattggggtgaactcttacttgacttaaaagagatcttttatgattaatatctttgatccatagcagcaagtttaaactctgattctctcgttggcagagaattatgagtgttcaatatgccatacccgactacctacgtgtctcttaagagtgtaggcatcttatatctcgtatttttgttg

SEQ ID NO: 115551 - DNA, 469 bp, Glycine max
  Clone ID: PAT_MRT3847_75353C.1
gtcaaactgttgctgtgggagtcatcaagaacgtggagaagaaggatcctactggagccaaggtcaccaaggctgcccaaaagaagaagtgaatcgtgcggtttggttcatcaggggatgtcgtttcttatggttacaataaatgttggtttcttactcttgtgtcttctttctaggtagcttgtttttcggacaaagtttgaagtctccaccatcatctcgcaactgttgttcccagaactgggttcttgatcgacggtggcaaaattgcttttatttatctgtgttttaatgtgttgtgtttgtcggaacccctgattacatttttgttaagcgccagcgagtttccaggactttgctgcgtttgttgtttgctttggtttattaaatgtcaactttctatttttaattgttcaatttttggcttggtttgcctctctttaaaaaaaaaaaaaaaaaaaaaactttt

SEQ ID NO: 115552 - DNA, 213 bp, Glycine max
  Clone ID: PAT_MRT3847_75354C.1
acggctatttctaggtcacactctactaccatatctactaaaaatgccttattcccttggttgacagaaatttgcgttgtctatctactgataatacgtacaatgcaataccaagaaaatacacatgaccctattgttcacaatgcacttcctattcgaaaaaatccaaacccattttaattgtcgtactgatttttaaagcgttgttatttt

SEQ ID NO: 115553 - DNA, 566 bp, Glycine max
  unsure (1)..(566): unsure at all n locations
  Clone ID: PAT_MRT3847_75355C.1
aaaacaacattggcatcatcactactcaccagcacttgtttcaatttccctctcgtgtctctgcacacttagccaccctcaccaccaccatgttttcctctagaggcaacatggctatggcttcaccctcctcaatcttctctgtttatgcttccatgacagcctccatcatgctcctgcgttcagtaaccaacgacctcattcctcaaccatttcgtggctacctcaccaacgccttccgctacttcttcaaggctcgctgcaaagtcctcaccctcaccattgaagagtactgcagcggcatagctcgcaaccatgtctatgacgctgcagaggtttacttgtctaccaaaatcacccctgaaaatgagagactcaacatcagcaagagtccaaaggagaaaaaactcaccattaggcttgaaaagggtgaagagctagttgattggtttaatgggattaagctcaattggaaactaatctgctcagagtctgagaagagcaatagtttcaatgatcacagcagaaacaaacccacangaacagaaaagaagtactttgagcta

SEQ ID NO: 115554 - DNA, 1311 bp, Glycine max
  Clone ID: PAT_MRT3847_75356C.1
ccaaaacaaaaccatatccgtttccttattttggtcttctcttgtatacagttttggtctgtaattttattgcttttggtgagagtggatatggaggaacggtacgagactttaaaggagcttggttcagggaacttcggagtggcaaggttggccaaagacaaggagacaggagaacttgttgctatcaaatacatagaaaggggaaaaaagattgatgcaaatgttcaacgggagatagttaatcatcgatctttaaggcatccaaatattatcaggttcaaagaggtatttctgacccctactcatttagctatcgtcctagagtatgctgctggtggtgaactcttcgagaggatatgcaatgctggtcgattgagtgaagatgaggcaagatttttctttcaacaactaatatctggagttagctattgtcattccatgcaaatatgtcatagagatctgaaattggaaaacactctactagacggaaatccagctcctagacttaaaatttgtgactttggtttctccaagtctgctttgctgcactctcaacctaaatcaactgttggaacacctgcatacattgctccagaagttttgtcacgaaaggaatatgatggaaaggttgccgatgtttggtcgtgtggtgtgactctttatgtcatgttagttggagcatacccatttgaagatccagaagatcctaaaaatttcagaaagagtattgggagaattatgagtgttcaatacgccatacccgactacgtgcgtgtctctaaggagtgtaggcatcttatctcttgtatttttgttgccaatcctgccaagaggatcagcatctcggagataaaacagcacctttggtttaggaagaacctgccaagggagattattgagcctgaaagaaggggttacgtggaccacaaaaggacccaaccaagccaaagtgtggaagaaaccatgcggatcatacaagaagcaaggaccaaaatccacactggtgagcaagctggtacaggaacctcggatgctgtgcatggtgatgaggctaatgaggaagttgatattaatgaccactatgccaaatacctagcccttaattagtttgtggttgggtgtttaccaaagctagtgtgcattcttcgtgtgtaaggtatagagttgaatgagacataacacttcatcgaatttgagagttgtatcaattataatgagaatcaaactttgttgtttgggtgaagagtttgtttctatacttaaactgttctttgagtgtgattatttctagatatggaattggtcaat

SEQ ID NO: 115555 - DNA, 535 bp, Glycine max
  unsure (1)..(535): unsure at all n locations
  Clone ID: PAT_MRT3847_75357C.1
gctcactcttcttctcttgcggctagggttttagcgcagcttcttctagatttaaggaagatgggtaaggaaaaggttcacatcagtattggggttattggccatgttgactctgggaagtccactaccactggccacctgatctacaagcttggaggcattgacaagcgtgttattgagagatttgagaaggaagctgctgagatgaacaagaggtctttcaagtatgcctgggtgcttgataagcttaaggctgagcgtgaaagaggaatcacagttgatattgccttgaggaagttcgaaaccaccaagtactattgcacagtcattgatgcccctggacacagggatttcatcaagaacatgatcactgagacattccaagctgactgtgctgatcttatcatagattccactactgctggttatgaagctgtaatttcaaatgatgcacagactctggaacatgctctgctttcattcaccctcggagtgaaacagatgattggntgctgtaacatgatggatgctacta

SEQ ID NO: 115556 - DNA, 1743 bp, Glycine max
  Clone ID: PAT_MRT3847_75358C.1
gtaataaagccctatctactcgtagctccattttatgcaacaatcacatataaatgccactccttatctttggtgtgaacaaggatgtccaaatcttcagttagcttcttttgaattttggtctgagatttgttgctttggtgagagagtggatatggacgaacggtacgagactttgaaggagcttggttcagggaacttcggagtggcaaggttggccaaagacaaggagacaggagaacttgttgccatcaaatacatagaaaggggaaatcagattgatgcaaatgttcaacgggagatagttaatcatcgatctttaaggcatccaaatattatcaggttcaaagaggtatttctgacccctactcatttagctatcgtcctagagtatgctgctggtggtgaactcttcgagaggatatgcaacttttatgaattccctattttgcaggcaagatttttctttcagcaactaatatctggagttagctattgtcattccatgcaaatatgtcatagagatctgaaattggaaaacactctactggacggaaatccagctcctagacttaaaatttgtgactttggtttctccaagtctgctttgctgcactctcaacctaaatcaactgttggaactcctgcatacattgctccagaagttttgtcgcgaaaggaatatgatggaaaggttgccgatgtttggtcgtgtggtgtgacactttatgtcatgttagttggagcatacccatttgaagatccagaagatcctaaaaatttcagaaagagtattggggtgaactcttacttgacttaaaagagatcttttatgattaatatctttgatccatagcagcaagtttaaactctgattctctcgttggcagagaattatgagtgttcaatacgccatacccgactacgtgcgtgtctctaaggagtgtaggcatcttatctcttgtatttttgttgccaatcctgccaaggtaagtattatttattctgttcatccataggatttatataagtattgttaagatattcaaaactaaagatgttcgtggtataaaatggccccagcgaaattcatacttcaccttaaaaatatcataatgaaatgttaggaagtgtcttcaaggtgaaattatcacatagttgagtttttcaatttgcaataaaaaattaataacatttgattacatgttattcgataattaattggaacaataatagtcctactcttaaatcatgtaataatttctaggtttgtttcttctatattgagaatctccttgtattttaaaacttactatttctcatcattgttaaagaggatcagcatctcggagataaaacagcacctttggtttaggaagaacctgccaagggagataattgaggctgaaagaaggggttacgaggaaacacaaaaggaccaaccaagccaaagtgtggaagaaatcatgcggatcatacaagaagcaaggacaaaaatccacactggtgagcaagctggtacaggaacttcggatgctgtgcatggtgatgaggctaatgaggaagttgatattaatgaccactatgccaaatacctagcccttaattagtttgtggttgggtgtttaccaaagctagtgtgcattcttcgtgtgtaaggtatagagttgaatgagacataacacttcatcgaatttgagagttgtatcaattataatgagaatcaaactttgttgtttgggt

SEQ ID NO: 115557 - DNA, 529 bp, Glycine max
  Clone ID: PAT_MRT3847_75359C.1
gggtaaggaaaaggttcacatcactattgtggttattggccatgttgactctgggaagtccactaccactggccacctgatctacaagcttggaggcattgacaagcgtgttattgagagatatgagatggaagctgctgagatgaccacgatgtcttacaagtatgccatggtgctggataagcttaaggctgagcgcgaaagaggaatcacaatcgatattgccttgtggaagttggaaaccaccaagtgctattgcacagacattgatgcccatagacacagggatttcatcaagaacatgatcactgagacatcccaagctgactgtgctgttcttatcattgattccactactggtggttctgaagctggaatttcaaaggatggacagactcgcgaacatgctctgttctcattcacccttggtgtgacacacatgatctggtgctgtagcacgatggatgctactacactacagtactgcacggtcaggtatgatgaactagcgacagacgctcctgcttat

SEQ ID NO: 115558 - DNA, 269 bp, Glycine max
  Clone ID: PAT_MRT3847_7535C.1
ttgcttctgaaattttgccagtatcagtaacaaataaggcacccattgtttcaactgcagcagccatgttagcttccaacttactatcactgaccatttctggtccagatataaatgctatagtgccaccccatctccagaaaactgcatgcaatttcaggttcaagcttgccctatcaaactgtatcccagttgtcttccacagttttgggatcatcaacttctatccatacagaaacattaacaccttctctcgtaaccccaggtca

SEQ ID NO: 115559 - DNA, 751 bp, Glycine max
  unsure (1)..(751): unsure at all n locations
  Clone ID: PAT_MRT3847_75360C.1
gtctttttcttgcacagagttctgatcaaacctcctcagcgtactcgatagttgatactccggactaagaatttacagcacaacaataatgaataataaaatgcttttacgtttcaagaaagcttgtttgttgtggtgattttgcttggactaagttttggtctgtgatttgttgctttggtgagagagtggatatggacgaacggtacgagactttgaaggagcttggttcagggaacttcggagtggcaaggttggccaaagacaaggagacaggagaacttgttgccatcaaatacatagaaaggggaaaaaagattgatgcgaatgttcaaagggagatagttaaccaccgatctttaaggcatccaaatattatcaggttcaaagaggtatttctgacccctactcatttagctattgtccttgagtatgctgctggtggcgaactcttcgagaggatatgcaatgctggtcgattgagtgaagatgaggcaagatttttctttcagcaactaatatctggagttagctattgtcattccatgcaaatatgtcatagagatctgaaattggaaaacactctactggacggaaatccagctcctagacttaaaatttgtgacttttggtttctccaagtctgctttgctgcactctcaacctaaatcaactgttggaactcctgcatacattngctccagaagttntgtcgcgaaaggaatatgatgggaaagttggccgatgtttt

SEQ ID NO: 115560 - DNA, 420 bp, Glycine max
  Clone ID: PAT_MRT3847_75361C.1
agtaaaagcaaaccaagccaaaatttgaacacaaattataaagaaaaagcaaaccaagccaaaaattgaacactacaaatagaaagttgacatttaataaaccaaagcaacacaacgcagcaaagtcctgaaactcgctgcgcttaacaaaaatgtaatcagggggtccggccaacaccacacattaaaacacagattaattaaagcggttttgccaccggcgatcaagaacccagttttgggaacaacaattgcgagatgatgggggagacttcaaactttggccgaaaaacaagctaccttgaaaagaagacaccagagggccgaaaagaaacccacctttattgtgaccaacatcccctggggaaacaacccccacgaattacttttttttttggggaaacttggggaacctgggtt

SEQ ID NO: 115561 - DNA, 701 bp, Glycine max
  Clone ID: PAT_MRT3847_75362C.1
ggtaagtatattaagatatacaaaactaaaaattgcatacaccacagtcgttagggagtgtcttcaaggagaaattacaaatagtcttagactagtcgtgtttacggtctcgatcaatttttacgtgacacgaaattgagtgtttcaattatgaaaaagaattaatgacacttgatcatatgttgtgtgaaaattagttgtaaccataatagtccttgatcatgtaataatttcttgtatttaagtaggtttgtttcttgtacactgagaatccccttgtgtttttcaacttactatttctcatcattgttaaagaggatcaacatctcggagataaaacagcacctttggtttaggaagaacttgccaagagagataattgaggctgaaagaaggggttacgaggaaacacaaaaggaccaaccaagccaaagtgtggaagaaatcatgcagatcattcaagaagcaaggacaaaaatccacactggtgagcaagctggcacaggaacttcggatgttgtgcgtggtgatgaggctaatgaggaagttgatattaatgaccactttgccaaatacctaacccttgattaatttgtggttggctaaattccctctctctctatatatatattgtttaccgaagctagtgtgcattcttcgtgtgtatgatatagagttgaatgagacacaacacttcatcg

SEQ ID NO: 115562 - DNA, 5069 bp, Glycine max
  Clone ID: PAT_MRT3847_75363C.1
ggctcgaggctaacttcacagcccaagtcatcatcatgaaccaccctggtcagattggaaatggctatgcccctgtcctcgactgccacacttctcacattgctgtcaagtttgctgaactcatgaccaagattgacaggcgatccggcaaagagcttgagaaggagcccaagtttttgaagaacggtgatgctggttttgttaagatgattccaaccaaacccatggttgttgaaactttctccgagtatcctccacttggtaggtttgctgttagggacatgcgtcaaactgttgctgtgggagtcatcaagaacgttgagaagaaggatcctaccggagccaaggtcaccaaggctgcccagaagaagaagtgaatcgtgcgggctggttcatcagggatgttggttacaataaatgttggtttcttttctgtactctcggctcgagctcttttttgcgttcattctgttttcctgttgaagtctttccctagccaatggccaccgatcgtttgacccgggttcacagtctccgtgagaggcttgatgaaaccctcactgccaacaggaatgaaattttggcccttctgtcaaggatcgaagccaagggcaagggcatcctgcaacaccaccaggtcattgctgagtttgaggaaatccctgaggagaacagacagaagctcactgatggtgcctttggagaagtcttgagatctacacaggaagccatagttttgccaccatgggttgctctggctgttcgtccaagacctggtgtgtgggagtacctgagagtgaatgtgcacgctcttgttgttgaggagttgcaacctgctgagtacctgcacttcaaggaagaacttgttgacggaagttctaatggcaactttgtgcttgagttggactttgaaccattcaatgcagccttcccccgcccaactcttaacaagtcaattggaaatggtgtgcaattcctcaaccgtcacctttctgccaaactcttccacgacaaggagagcttgcacccacttttggagttcctcaggcttcacagcgtcaagggaaagactttgatgttgaatgacagaattcaaaacccagatgcactccaacatgttctgaggaaagctgaggagtatctgggcacagtgcctcctgaaactccctactcagaatttgagcacaagttccaggagattggtttggagagagggtggggtgacaacgcggagcgtgtccttgagtcaattcaacttctcttggatcttcttgaggcccctgacccgtgcacccttgagactttccttggaagaatccctatggtgttcaatgttgttattctttctccccatggttactttgcccaagataatgtcttgggataccctgacactggtggccaggttgtttacatcttggatcaagttcgtgctttggagaatgagatgctccatcgcattaagcaacaaggattggacattgttcctcgtattctcattatcacccgtcttctccccgatgcagtaggaactacttgtggccaacgtcttgagaaggtgttcggaactgagcactcccacattcttcgagttccctttagaactgagaagggaattgttcgcaagtggatctcaagattcgaagtctggccctacttggaaacttacactgaggatgttgcccacgagcttgccaaagagttgcaaggcaagccagatctgattgttggaaactacagtgatggaaacattgtcgcttctttgttggcacataaattaggtgtcactcagtgtaccattgctcacgcacttgagaagaccaaataccccgaatccgacatttactggaaaaaattggaagagagataccacttctcttgccaattcacagctgatctatttgccatgaaccacacagatttcattatcaccagtaccttccaggagattgctggaagcaaggacactgttggacagtacgaatctcacacagccttcacccttcctggactctaccgcgttgtgcatggtattgatgtctttgatccaaaattcaacattgtctcccctggagctgatcaaaccatttacttcccccacactgaaaccagccgtaggttgacatccttccaccctgaaatcgaagaactcctttacagctcagtggagaatgaagaacacatatgtgtgctgaaggaccgcagcaagccaattatcttcaccatggcaaggttggatcgagtgaagaacatcacaggacttgtggagtggtacggtaagaacgcgaagctgagggagctggtgaaccttgtggttgttgctggagacaggaggaaggagtcaaaggacttggaagaaaaggccgagatgaagaagatgtacggcctgatcgagacctacaagttgaacggccaattcagatggatttcatcgcagatgaaccgtgtgaggaatggagagctctaccgcgtgatctgcgacaccaggggtgctttcgtgcagcctgctgtatacgaggcttttggtttgacagtggttgaggccatgacttgcggcttgccaacattcgccacatgcaatggtggtcctgctgagatcattgtgcacggcaagtctggcttccacattgacccttaccatggtgaccgtgctgctgatctccttgttgacttctttgagaagtgcaagcttgacccaactcactgggacaagatctcaaaggctggtctccagcgtattgaagagaagtacacatggcaaatttactctcagaggcttctcactctcaccggtgtctatggcttctggaagcatgtgtctaaccttgaccgccgtgagagccgccgctatctcgagatgttctatgctctcaagtaccgcaaattggctgagtctgtgccccttgctgctgagtaaactgaggataaagagttggataaagaaatggaggaaccggctttttctttctcatttggagtttgtcgcacttgagttttataaataatgtccgtgattttagttttgtgattaagctttcgataagaggagagaaagagaaggaaaaaaaaaagttgcttttttttttgttgttgcatgatttggatcttgattggaaaagcttcgaattggggtagttttacccatcaattcaattttaagccgtgccttcttttggaagtcacaaacaagtttattttacatatatgtaacgttacatagaccctacaggatacaaggccatcgccatagcaacttcctacaaacgaaaaagtccaaacctcattgtgctgcctacatatcaaaaaccacccatatcagatataagcacacatcagttttccaaaggccatatttagaggccttcaatgaagttgaccccagtgttcttcaaccaaacattgccttggatgagttgtgctaccgtgaacttgctggcctcagctgcagttttgatgatatggtaaccaggccaattcactctcttgctggtaccggcaccggggccattattcatgtactctccataatacaacgtttgcaaaaagtctttactttgggcatcccattcagcccatcctgttgggtcaatgtggctgtccaatgtcgactgcatcacaacagttctggagtacttcttccatgggcgccctagaaaagttttgatggagcccacgacaggcttaagatccgaacttggtgttaggttacattgttgaattgaagttcctgtgttctggtttggatcttctcgtccttgggcagtgaccatgttgttctgtttatccatgggctttcgggccaccaagtcgcacttttggaaaacaacagctgcatttccaaatataaagtcaacagtgccagtaataaaagagtctcggtagaactgcctgttggagtgagcgtagagagtgtcttggaaggcatcaatgcgacagaggtttatgacggattggtcagcgcctacacgaagagccactgcttggtgcttctgtgggcctgctgtgttttgaaaccatatgtcttgagctataaacccatcacccacagcagcaacagtggcagtcttaaacgtggttgttccgtcgatgaaattcaagttgccggtgattacagttgcatccttaccatctcctacaagcatcacgttggtcttcttcttgccgatttcaacattttctttataagttccctttttcacgtaaataacataccttgtcttaccgttgtcaggtgcggatgctacagcctcagccacagtcttaaacttgccacttccatccttagctaccacaacattggccttgatgtcgccaacagtagactccaaaagtctccgatccttgctgctcacccatgagggaaagtctccacttaaaggttcatcaataatttgttcaacctttgggggcaaaacagcaacaaacatggccagagaagttcttgctctggatatcaagtcctcgagttcgtccttcataaaggcgcgagctgacccctctaacccatccaaacaagttgcatggttagtaagcacgctacttagccatgtgtgtgcatcttgttgggactcaatggtttgttttgttagggtcaccattgagtccctaactctgctgatagataagtccatcaactccacacaatcgtgcaaagcttcttcttctttgggactgttgatcctaagtttgatagaactggctgtgttcataactctcttaatgtgtgaggtgtatttcattaggaatgactgtaacaaattgaatttgtggtcttttgtgggggtcaagatcggaccttgtaccacttctgagacatgggttaaacatgttgccctatcaagtgcatgatcacagagatgttgaggagaggattggttgaagaaggaggtggatttgatgagataagaaccaacaaaggctgatgagatcatgacagcagctatagaaaagattaagcagatagttttggaaacagattttctaggcctgtctaacagagattgttggatagccatactggtaagtgttactggctgttcttccccttctgtcgtcttctcgcagccgta

SEQ ID NO: 115563 - DNA, 1285 bp, Glycine max
  unsure (1)..(1285): unsure at all n locations
  Clone ID: PAT_MRT3847_75364C.1
tttttttttttttttttttttttttttttttttttttttttttttttttttttttttttttttnntttttttttttttttttttttttttttttttttttttttttttttttttttttttttttttttttttttttttttttaagcaagattcggaggtatttactattcaacaattaacatgtaccaccatgattacttctccccgatactacgtttgaattgaaggaaaagaatgtaataaagtggaatgaaaaagaattaagactaggttccattatttgggtagtttggattagaataggatggaatgaaagcatgcattgtattctattccttcccctccaataaaactatccaaacaatagaatgctaattttatttcattccaccccatgattcctttccatttcatttcactcatcactagatatctaaacatagcctcaggaaaaaggattacaaaggcaagttttcaacagagaaggcattggaaaacgatgttggcatagaagattttttatgaggtccataatatcaccatttttgtgactataaatgcaggaaaacaattggaaacctaaaatcaaataatgcacaggaaacataacacaaacactaaatgttttgaatgggcaccaatgcctctaaaagcagcaactggcccatctgtagttccatatcagcacccaaatcaacctctacctcgccctgcacctctgtttccactgggttttccacctggaccaccccggcctcgtcctccttgtcctttagctccaccctcatcaatacctcgcccaattcctttaggttgacgtccaccaggaccatcatccctacctcttccccttccacgtcccacaccagggggtttgcgatcagtacggctctttgtttcttcctggactttgtcaataacctcatcaggaacccgaaggtacttaatggtattgccacgaatgtagcactcaggcatacgccaaaatctatctccatctttagaggtacaaatgacttctcggagatggatgttcatccatgtatcacaattaaccaagtgcccgttataagtctccccatttttcagttccaccagcatggggtggccttgggcagtcttgagaagggaaaggggaagcatggttggaatcggtggttgcagaggttgacggtgctaactgtgtgtttctttgcgattttacagaaaactagtattaatcagacctctcttgtgttccaacttcctttttgaatcttaggcgactctactcctatttcgtttc

SEQ ID NO: 115564 - DNA, 1717 bp, Glycine max
  Clone ID: PAT_MRT3847_75365C.1
tttacgtgacacgaaattgagtgtttccattatgaaaaagaattaatggcacttgatcatatgttgtgtgaaaattagttgtaaccataatagtccttgatcatgtaataatttcttgtatttaagtaggtttgtttcttgtaccctgagaatccccttgtgtttttcaacttactatttctcatatccgtttccttatttttttctttctcttgtatacagttttggtctgtgatttgtttgctttggtgagagaattggacatggaacctctttgagaggttggtgtagtagctttttggagggttgacatggaagaacggtatgagccattgaaggagcttggtgctgggaattttggtgtggcaaggttggcaaaagacaagaaaactggagagcttgttgcggtcaaatacatagagaggggcaaaaagattgatgagaatgttcagagggagataattaaccaccgatctttaaggcatccaaatataatcaggtttaaagaggtgttactgacccctacacatttagctatcgtcttggagtatgcttcaggtggtgaactttttgagaggatttgtactgctggtcgatttagcgaagatgaggcaagatatttcttccagcagctaatatctggggttagctactgtcattcaatggaaatttgtcatagagatctaaaattggaaaacactctcttggatggaaatccatctcctcggcttaaaatttgtgactttggttattccaagtctgctctactgcactctcaacctaaatcaacagttggaactcctgcatacattgctccagaggttctgtcacgaaaggagtatgatggaaagatttcagatgtttggtcctgtggagtgactctttatgtcatgttagttggtgcatacccatttgaagatccagaagatcctagaaatttcagaaagactattgggagaataataggtgttcagtactccatacccgactatgttcgtgtttcttctgactgtaggaatcttctctctcgcatctttgttgctgatcctgccaagaggatcaacatctcggagataaaacagtatctttggtttatgaagaatatgccaaaagagataattgaggctgaaagaaaaggtttcgaggaaacaaaaaaggaccaaccaagccaaaatgtggaagaaatcatgcagatcattcaagaagcaaggataccaggacaaggatccaaagctggagaaggtggacaagctggcacaggaacttcggatgttgtgctggtaggctaatgaggaagttgatattaatgaccactttgccaaatgacctaacccttgattaatttgtgtggctaaattccctctctctctatatatatattgtttaccgaagctagtgtgcattcttcgtgtgtatgatatagagttgaatgagacacaacacttcatcgaatttgaaagttgggctattttgtttatcaattataagaattaatttttgttgtttattaaaatgaagaagattaaaaaaacgctgttactatagatatattggctaccgaagctagtgtgcattcttcgtgtgtttgatatagagttgaatgagactcaacacttcatcgaatttgaatgttgggctatgttgcttatcaattataagaagaagtaagttctatcaattacagaaagagtcggactttctgggttgggtaagtttg

SEQ ID NO: 115565 - DNA, 373 bp, Glycine max
  Clone ID: PAT_MRT3847_75366C.1
cggtccgaggaggcatcatatgggatctgatgcgaaaaaacgacagaggggcgtcgcagtgggaagacgacctatgggtcccgctggcatgagtcttccttctactgtaacaaagatcatctccgcgagaccgcgtcttacaccatccacacttacaacggcgtcgattcgaaccttatgttttctatagagccacctcttttatattctggggccgtacaattacataattttgactggctcgacgtgggcgcttctcaatttgatcggcgggcccttaatgctacctgagtcaatcagcgtgacagcgaaaagcccttggcaaccaggtgttctaacatgttgacatgcatcaattgcgcatgcaacaaat

SEQ ID NO: 115566 - DNA, 387 bp, Glycine max
  Clone ID: PAT_MRT3847_75367C.1
aaagggaaaaaaaataaaaggggtattatttgtaaaaaatcccgccccttgccaaatggccaaaaaaccttaaaaattttccccccctaaatgtttttgaatccctaaagagcttttttatcctaaaaccctagggcaatcaatattttgctggccaaataaatttttttgaatacccagagaggcttggacttataatccccccaaattcccaatcttttttgaatagtaatgggcttggacttgaaataccaatttagcaatcttttttgccgttttgcaggaccattctgaaatcccagatcgagttgtctaccttaaaacaaattctgacatcatacaaattaacgggaggccctctgtcttaactcttaatcttaaaaagaa

SEQ ID NO: 115567 - DNA, 355 bp, Glycine max
  Clone ID: PAT_MRT3847_75368C.1
tactattacaacatcgcccgctaccatgaccattgttgcgatcgtgctcctgttgacggtctttgtcgggtactccgtcctacacatgtctatgatctcatactacaacgcccacgcggtctaggtgctccacgtggcgcaccgaggaggagctgatgtccatgtgcgagcaggggcttgtgaagcacgggaaggtgtgcagcgcgctccgcgagaaggagaagcgcttacagatcttaaaggacaacctgcgattgataaacgagctctaacttgccgtggaccgaacctaccagctagggctgaaccggttcgctgatctcaccaacgaggaattctgggccaatgacttggg

SEQ ID NO: 115568 - DNA, 845 bp, Glycine max
  Clone ID: PAT_MRT3847_75369C.1
aattcggctcgagcgaagacgcttcacgaacaagtttgaagcaatctccatccatatcatggctagaccccaacaacgctatcgaggtgtccgccagaggcactggggctcttgggtttctgaaattcgccaccctcttttgaagactagaatatggctgggaacgtttgaaaccgcagaggatgcagctagagcgtacgatgaagcggcaaggttgatgtgtgggccaaaagcacgcaccaatttcccttacaatcccaatgagccactttcatcttcatcgaagctcctctctgctactctgactgcgaagctacacaagtgtcacatggcctctctttcccttcaaatgagcaagcagaaacaatctcagacagagcctcatcaaggatcatccagcgactcaggcaatgccattgcgggaacaagttcagacaacaccggctttagatggccagaagaggaagcacaagttgaagtgccaccagcacaacagcaacaatttcagccagttcttcaagatgatcacattgaacagatgatacaggagctgcttgattatggctcaatggagcttagttttgttgactcagcctaagctctatattataaattaacaatgcagaccccttttcagggagagggattctactatttactaatgcgccatgtaataaaatatagcgagctttagaccttagtaccataggataggagagtttcaccatgagtttcaattaatggtcaagcatgtggaaccagaatgtaatcaatcatacaaaaaacaacgcatgcatatatggtgtggactatattatagtagataccattagtaacatcaaaaa

SEQ ID NO: 115569 - DNA, 205 bp, Glycine max
  Clone ID: PAT_MRT3847_7536C.1
accgacagaccgtccacaacctgaaggtatgaagttcttcgtttcccccgtcgtgcagagctccgtcgaggtcaagaatgcccaggatctgcccaagctggtcgagggtctcaagcgtctgtccaagtccgacccttgcgttctgaccatgatcaacgagttcggtgagcacgtcgttgccggtgctggtgagctccaccttgag

SEQ ID NO: 115570 - DNA, 261 bp, Glycine max
  Clone ID: PAT_MRT3847_75370C.1
cagcaagtattctaaatgtcttagtcttaagaggggggagaaactggaattcgaatgattctgaatttagtacaagccaatctgcaaagtgagcatgatatataacttgttgtggatttctgcctcatcattgtgcatcatgtgagattaaaatggaagggttgtgtggagattgcttcaatatgattttgcacatgttgtgctgcaggaacttggagcatagcgtgtgctcaaagtgcatagggatggatttggatagca

SEQ ID NO: 115571 - DNA, 306 bp, Glycine max
  Clone ID: PAT_MRT3847_75371C.1
ctcactaggtcgcccttcgtctctttttttttatttagttataataaaacggtacatatggtttaggcttttaaaaatatgacaaacttttctaaaaactttacacatagagccggttcctatacacatgaaaatcatccacttatttttaatgtatggggtggggattaagaaaacacgtttcttgatttatttgtgaacctaatccacgtactggaagtgggccctatctcataaaggaggaccacattggactggctcttgatgggggaaactgtacttaggaggaacgttatttgatgagat

SEQ ID NO: 115572 - DNA, 424 bp, Glycine max
  Clone ID: PAT_MRT3847_75372C.1
ggccgctcgagccggcgggacgggtaccgaggagggccatcatcatcgaatcccaaaaatcagtctcattgtcaacacgaagagctactaattactgtatttcccctcaaaagagaagcaatggaaggataaggagcaggggtggccacagcgtacgggaacggtgcgagcaccgaaaccaagaagagccccttcaccgttgaagtgggcatggtgcagaagcacggaggaggacgaacaatggaggacgtgaacgaggaaaggagacgcatcgcggagggaggtcggtgcctgtgcgattatgtgcagagagcgtggcacaccgaggtgcccaactttattattttagcgccacccccccgaaaggggaaccttctgaagcatttccaaggaagaataatccacaaagaggaagagagtccaa

SEQ ID NO: 115573 - DNA, 198 bp, Glycine max
  Clone ID: PAT_MRT3847_75373C.1
aaatgatcctgttatatcaattgcaaaaaaaaaaaaaagtggcctgtcgcaaggtgctcccacctaatggtgtctagaagagttagatgtacacagccttatccctgcaaacagaggctttttcctagatttgaacctgtgaccttcaagtcacaaggcagcaaccttagtgcagtgccaaaacttgctctcatttgc

SEQ ID NO: 115574 - DNA, 323 bp, Glycine max
  Clone ID: PAT_MRT3847_75374C.1
tttttctaattactaccttttattctaatgtgaaccatggccctgaaagcggataacaagcttggctgagcagagggaactaggggtcggcagaaaggattatgggtggagatactgagccaaagtattatcagttgcctgaagcctgtgcatgggaaagaagctggaggtgaaccactagcacaaagacaaagacataaaggactgtccttgagtgaaaaaataaaaagaaaagctacaagcaccagcccagcgctgtgcagagaaagtgacccaaacaggccggacgcgtgggcggacgcgtgggcggacgcgtgggcgga

SEQ ID NO: 115575 - DNA, 355 bp, Glycine max
  Clone ID: PAT_MRT3847_75375C.1
ccaacgcgtacttcaaattcgacatcaatatcattggccatcttagattcattcatcaaataaagaaaatcacattttccatggccacttttaagaccctctgaagcactcattttactaactcagactccgactacgattacgatgaaaagacagagctctacgcaaactcgtaaaccacgcactccaactagctaaaagacgtgtacacgaaactcaaagccataaaactcaaatgccagacgccgtgtgcctcaatcaaaccgtttgcgcaatacgccgtttagctctatatacacataagcggctacccttgcaacgccaaatggatcctatccgacaaacacaccttcta

SEQ ID NO: 115576 - DNA, 595 bp, Glycine max
  Clone ID: PAT_MRT3847_75376C.1
cacgcgtccgagttgctagaggcatgcaagccatgcctgacctaaacgtgactcaactaactcgggggcatgataatgacacatacacgatggacctacttctagaacatccttcgtatgagaccgttcaacctggcctatacatggctagtgcgctcagggaggaagacaccactgttatgaaccgaagaactcaccatcgatatgaacgtggttaaaaacatatgagtggagatactagcttaactatgaacagtcagtgataatgcctactgactagacgatcaattttgttgtgaagaagtggagcttgaaaccctaaaaatgacagcggatgagacaatgctcattatcagaaatgaatcaaacagcttatgaggcgttggactcaataaccattgtcggtcactttatgattatagtcaatgacattgtttacagcaaaacgctatataaatggatctcgaaagggcacataatcatggggtcaattacaaagtgttctatcaacagtcataggataatgaaaactgcgatcctcgacgatagaatcttgatcatcatgatcttccaactgtgtttcttgcttactttt

SEQ ID NO: 115577 - DNA, 437 bp, Glycine max
  Clone ID: PAT_MRT3847_75377C.1
ctagatcgcgagcggccggcctttttttttttttttttacaaggccaactctagtcggcggatgacattaatattttgacatctattaaaccatattccccataaaacaacatttgactggctaccatactgtgaacaattgcactgcactattgcacaggacaacgtactagaactccatcgaactaatataaacgtttgctcaattcatggtatgcgccatgaagaacaacaaacaatatggctgtccaatgcagagtcctatagttaccacatatatagctttatcgacccctgatacgatgaacgatcttcgtgacaagggaacatatcttaatcacaacgaattcatagctgcaatgcttataaaaattactgatcacatccttgaacatgccatcgctggcactggtttatatgtgcttattcttgatgat

SEQ ID NO: 115578 - DNA, 814 bp, Glycine max
  Clone ID: PAT_MRT3847_75378C.1
ggtccggaattcccgcgtcgacccacgcgtccggacttgtttggaaggttagtttagttgttacaagtgtgtctttctttcaactcagatttgcctgtgactgagaacaggactttgaaatggggaaactagggagggtgttggataccttctgtctttcttttggttcaaacacctgtttctgcatgaactccatggagtttgaagatgagtttgagaaaaagcccttgatagtaagtgacagtgatcataaactgagattgaaggatgttgtagatggaaagcaaacgttggcttttcaactaaaaccccagatagtgacattgagggtgtccatgcattgccatggctgtgcaaaaaaagttgagaaacatatctcaaagttggaaggagtgagctcatataaggtggatttggaaacaaaaatagtagtggttatgggtgatattcttccctctgaagtgttgcagagtgtatctaaggtgaaaaatgcggagctttggaattttcaagctagtaaggaataattttggacacaacatccatcttcatcagattcaaattcaacaaagatagatgttgaaacgaattaaggagctcttattttctatgtgctttttggtgttgtatatagtgtatcatgttaatacctattgccaagctccagaaattgtcgtgcaagaaagaaaagttaaagaacagaagtgttactattaatgtctctatctatgagacttgatgtgttttaacacatttgtgatggtgatcagatgtaagccatttccattagtgattaaaattttccttctgtttg

SEQ ID NO: 115579 - DNA, 226 bp, Glycine max
  Clone ID: PAT_MRT3847_75379C.1
tccgggaaacacctattatatctcaccgttcgctactgatactacacatagcataccgtaccttcttttattgataccacaatatcgaatatgcctctagcaaaggctctgacaccactagaggagtgacgactcgcgttcactcgagcaggtcctcactcttatcgttctgatcaaccctgctgacgcagcaccaagctccagggaatgccatgtccctaggatg

SEQ ID NO: 115580 - DNA, 407 bp, Glycine max
  Clone ID: PAT_MRT3847_7537C.1
ccgctcgagcggctcgagaggaattacattttgcaaagcattaagctattcagtaagtaacatggctgaattctatgtcagtagcaaaattgactttgatatcaattaatttggttgctttagagtggtgatagttatcagttatcacgggctcaaggatctcagaggaaactgatgaaaataaatttattttaattttgagttatacaacaacaacgcctttaattttgagttatgatgagaagaaaacatagtctaagagttatggttgtctttactatatttttgttgctttaatttaatttagtttttgagatctgttcattcgttttatatgtgccttttgttaaacccatatgatgctttcacttaaatcaaggtcatggaaaagggatttatctttaaca

SEQ ID NO: 115581 - DNA, 1527 bp, Glycine max
  Clone ID: PAT_MRT3847_75380C.1
ggggcccgccttttttttttttttttttttttcgcacgagaaactctaccatgtgagttttattaacagctattcactccgacaacagataaaataaaaacttgagcacctttaaataaaagcttcagccttctgcacttttttttttttttccttctttaatcaaagcctaaactaaccttggatacaagtcacagcgtcaaaatattaaaataaagaaacgccgttagccagaggcttacggcggaagcttgcacggactaggtggaagacttgtcttcccagtagcaacaagacgttgcatgaagctctcaattctgttaccgtttgtctcctgcagtaaccgctttcccccgaacggtaacgattcaaggactctctcgttcagtaccttctcatcttttccttgatctcctaatccgaatgcctgaatcctgacatattccatacggttccaacagaaggcgttccctagcatctggtcgacggtctcggaaatgccgtcgagcgtaatgtcaaccaccgtcgacgtggagcactctccggcattgttcattctcttcgcctgagctccgtttccgatggacaggacgaggagatcctccacgccgttcaccgacgggaaatcgcgcttgttgtggaggacgtgcgtgacggcagccgctgccggattgttcatcaccaagccgccgtcgacggcggcgcacgaggtttttccgtcgacggaggagaagtggaagggcgtgaagaggccaggagtcgctgacgtggcgcggcacgccttccaaagctcgaagttgaaactcggtgactcggacgcgtcggctcgggagaacacgaacggcgcagagctcttgaggtcaaagcaagggataagtagcggcttacacgtgtccttcagagtcaacaaccgttcttctccctcttttctcttgaaaacgcgctttagcgtgttttccatgctcctcgcggagaatctacggcgtcggcggaacacgccggcgcgtttcggcttgtagagttcgcggttgttttcggcgaggaagttgacggcgtctctgacggtgtacagaggccggccgaagccgtcgtcggcggtgatcatgacggcgaggatggcgccaatgccggtgccggcgatgatgtcaaagtaatcagtgatttgcgcgtgaggatcggaggtttgggcgcggatctggtcctcgaggtggacgagggaagcgccggcgacaatggcggtggttcctccgccgtcaatgctgagaatgcgcgttttggttgatgcttcgtagtgcgagagccattgctgctccaattttgagaagatctctaacgtgaatttgctaagctccattgtgttaagtttagaactgtcaggaggaagcattaacaagtgaagagttgagagtgcgttagaagaagaggaaggaagtgaaaggtgtgtttgggaaaggggtagatataatgctgggtagcagggagggccacgcttgggtgctgggtggccgaagcggccgagccagaata

SEQ ID NO: 115582 - DNA, 224 bp, Glycine max
  Clone ID: PAT_MRT3847_75381C.1
cccacgcgtccggtatcgcactggtgggattagacgtaatgtttttgctgcgacactaaagcatctgagcttgaagattattgttactctgaagggctggtgactcttacctatctgaagacttgaaggcccatgactaatggcaacgagactctataagtaatcaatgctacgtctatcacactctatcgtgtagaaatatacgtgtagacacatacctaatc

SEQ ID NO: 115583 - DNA, 393 bp, Glycine max
  unsure (1)..(393): unsure at all n locations
  Clone ID: PAT_MRT3847_75382C.1
ctttcgtacgataagacnacagaatggcatttatgatcttaagaaannaatcaagcaagtggggccggaaggtatcccccctgtgggagtccactaatcacaaacggtaagacgattgtttttccgccaaccggctcggtttgagtattcagatactgttataaaatatgaaataaatgatcttatcaccaactaataactgttgaatgtgttagttcaatctaactactggaaaaaatatggaccaatataaattctagctttctttactaaatattttgaagactatgtcagtgttactttttttaacaacttgatgtcatgtttaatattttgtttttttttatatttaacctttatatgatactgcgtgttttattctcataataaaat

SEQ ID NO: 115584 - DNA, 368 bp, Glycine max
  Clone ID: PAT_MRT3847_75383C.1
cgctctcttcaccctcttcttcttcttcttcttcttcactttgtaactttcgaatcttcttccttccaccgcaatggccaccgccacgcttagccccgccgacgccgacaagctctccaacctcaaatcctccgtcgctgcattgagccaaatcagtgagaatgagaagaatggattcacaagcctcgttgctcgttacctcagtggcgaagcacagcatgttgagtggaggtgttgaagctcaatggaggcttggggacaactatgggttgtactggcccaaaatctgtcattgaagttcgtgatgggttgacatttcttgatttaattgtcgtccaaattgagaacctcaattccaaatacggaag

SEQ ID NO: 115585 - DNA, 329 bp, Glycine max
  Clone ID: PAT_MRT3847_75384C.1
gcgtaagcagtgctaacaacgcagagtactttgcatctgtttatgatttattttactgggctgtgaatcaaacatgcttgatgccatacttgttaagattctattagtatccaggatacaagtcgacttctacaagctgacttataagatgagagagcagagctctgtctaatcgaaggaaatgaggttatcgcagatacataacattaaattgactagattacccaattttccatgaggtagaagcggtggttagaactgcacttgtaaagatgtaatctacagaagagtggactaatccaaccattcatgcaggtacaatgaaaagt

SEQ ID NO: 115586 - DNA, 2553 bp, Glycine max
  unsure (1)..(2553): unsure at all n locations
  Clone ID: PAT_MRT3847_75385C.1
catccactttcctcaatcttccattccagatctctcaccttcttcttcttcctctgtgccacccttttgttccatgattgttttttgtgtctgtatcagcttgatctttttgtttttttccttgttgtaaaaacatttcaatctgcaagttcagagatattgttgttggagctcaatgtatctgctctgtgagcgatccatgtttggggttaaaacaaattttatgctggctgtcaagggcttaacataactggttctcctttatttgggtttgagactagctatgagactgtaggtggagtgaagatgaatggtgtgtccacaaaagaaaggataagatacgaaatgatagtatcaaggagatattcacatgacagttattgaggaaaagaagatcgcaactcaattaatgtgatttggacacgtgcaaagaagtccactcgaggcattggggaggagagtagatgacacggtttttagccttttgtgaagtggtaaagagagatctaaaaggacattggacaaaattattgaaagggatttcatgataattattggcagcttcactaatatcttttaagactacatactttagctaggcaatcacatttcttgggataatgttgggaggcaacaacgganattgcttgcttcctgttttcttggacgaaactcaatttcagcatcaaactaatgtgtcnaaccgctctcttcaccctcttcttcttcttcttcttcttcactttgtaactttcgaatcttcttccttccaccgcaatggccaccgccacgcttagccccgccgacgccgacaagctctccaacctcaaatcctccgtcgctgcattgagccaaatcagtgagaatgagaagaatggattcacaagcctcgttgctcgttacctcagtggcgaagcacagcatgttgagtggagtaagatcgagacgcctacggatgaagtagtggtgccttatgactctttggcaccgactcctgacggttctttggaggtgaagaacctcttggacaagcttgtggtgttgaagctcaatggaggcttggggacaactatgggttgtactggcccaaaatctgtcattgaagttcgtgatgggttgacatttcttgatttaattgtcgtccaaattgagaacctcaattccaaatacggaagcaatgttccgttgcttttaatgaactcattcaacactcatgatgacactcaaaagattgttgagaaatataaaaactcaaatattgagattcatacgtttaaccagagtcaatatcctcgtttggttgttgatgactttttgccattcccatccaaggggcatactgacaaggacgggtggtaccctcctggccatggagacgtctttccatcattagtgaacagtggcaaacttgatgcactattgtcacagggtaaatgtatttgttgccaatctaacttgggtatactgagtatatttattgtttgtttgtcacagggtaaagagtatgtatttgttgccaattcagataacttgggagctatagttgacttgatgtacttgactcattgatgtagaaatcttaaatcatttgatccagaacaagaatgaatactgtatggaggtgactcccaaaacattggctgatgtaaagggtggcactttgatttcttacgaaggaagggttcagcttttggaaattgcacaagtcccagatgaacatgtcaatgagttcaagtcaatagagaagttcaaaattttcaacacaaataatttgtgggtgaacttaaacgcagttaaaaggcttgttgaagctgatgctcttaagatggaaattattcccaatccaaaggaagttgatggaataaaagttcttcagctggaaactgcagctggtgctgcaataaggttctttgacaaggctattgggattaatgttcctcgatcacgattccttcctgtgaaggcaacttcagatttgcttcttgtccagtctgacctctacactttggaagatggatttgtcattcggaacaaagctagggcaaatcctgaaaacccttctattgaacttgggccagaatttaagaaggttagcaacttcttgggccgcttcaagtcaattcccagtattgttgagcttgacagtctaaaagtggctggcaatgtatggtttggagctggtgttatcctcaagggaaaaatcagtatcgtggccaatcctggtgttaagctggaagttcccgatggtgctgtcatttcggataaggaaattaatggcccagaggacctgtgaggaagcccgctgagtttagaagtatcagactgtatactatctttatggtctcatgttttttccaattattactactcccaagtttgatgggcaaagaaaataagtccctttttgtttgtcttctgattcgatttagaacaagagagacagagacatgagttcttccccattatgtcattttgtataatcacattttttttcattaccacaagtactaagaagtgatataattaaaatcaaaggatttaaaattacacttt

SEQ ID NO: 115587 - DNA, 1114 bp, Glycine max
  Clone ID: PAT_MRT3847_75386C.1
cgtaaggaaaaagggaagaaatggttattacaaccttcaacggaaccggcgttggatttggtttcggcgtaggttgcggtttcggtataggatggggtttcggaggtctgtgccttactttcgaaccgtttttgacatttctctaccttttgcaatttaattttagtacccaattttgatactccactcgttgatcttagaattatgagtctttttcccctgctgtttactagcaatctttttaagctgttgcattcatttattatcgtatttactcgtcaccgccattagaggttctcggtagcgtttgtagtatgtaaattcctagttggcctattgagataaattgaatttgtaataacaagaagcctgtggagatagcaattgtgacttccgagtttcgattattggcctttcaaatcgtagaaagaaatggttattacaaccttcaacggaaccggcgttggatttggtttcggcgtaggttgcggtttcggtataggatggggtttcggaggtatgccattgaacttattgggtcttggtgcaggtggaggttgtggcgttggagtagggcttggttgggggtttggtactgcctttggtagcaagtatcgttcctcacgggtcacatttcaaggagtggattttgatagcaaggagaaagttaacagcacggagttgtcaaaacccaggaccgaagttggaggtgcacggtagcgtttgtactttgtaaattcctggttggcctatggagataaattgaatttgtaataacaagaagcctgtggagatagtacttgtgacttccgattattgtcctttcaaatcgtagtagcactacagtgcttgttacagctctcatttcttggatactgcttgcactaagtaaacagtttgtgacatgaatggtaattttatatgtacgcttcgtttggtgcaagaaaaataaaggggaaattgagatgagatagtaaatggtgtgtatttggtggtgtggaatttggaaagtagaaacgaacagtaatctgatacggtgtataaatttgtggtggatcttttttattggttaaaaacagccataaattgaaattttggcgatttcaagtgttta

SEQ ID NO: 115588 - DNA, 219 bp, Glycine max
  unsure (1)..(219): unsure at all n locations
  Clone ID: PAT_MRT3847_75387C.1
aagaaattcttgctcatgcacttggggaatatgtcattatgaatgacagttttattcttgattatttttatcatttagacattttaacagttgaactgaataaaantcanaaatattatttagatctatttgatttgagcactatatgatattttccaaagttagtaaaaagttatttggccaaacatatttctacttactctggctatactatttaca

SEQ ID NO: 115589 - DNA, 167 bp, Glycine max
  Clone ID: PAT_MRT3847_75388C.1
attttctaagcttacgggcgcactaaggttactaggctgcgcaggtacgatggacaccgctgaaatgactgcattgctgcggaacatgtccgcacttgaaaggagccaaccttgagcgctgccatttacttgtgttgggcgcgtcagaatctggacactgactcaaa

SEQ ID NO: 115590 - DNA, 717 bp, Glycine max
  Clone ID: PAT_MRT3847_75389C.1
aaactcgaagatgacctaaaactatgtaaaggtgagctgcgtgtaactgaagaaactatcaaaagcttgagaagtgataagttgattttggaacagaagctatctgagcttgagaagaagagtgctgaagagattaattctcttcaatggaaacttgagcaagaacgcaaaactctgaactctaaagtgtatgaccttgaacgaaaactggatgtgtttagacaagaattaactgtagctgagtctacactctcggtcaaggactctgaattggctgcattgaagaacaatttagatgaactagaagaattgagagaaatgaaagaggacattgatagaaagaatgagcaaacagctgccatactgaagatgcaagcagttcaactagctgaaatggaattgctttataaggaagagcaggttctcagaaagcgatattttaataccatagaagatatgaaaggcaagataagagtttattgtcgggtaagacctcttagtgaaaaagagattgcaagcaaagaaagagattctcttactactactgatgagtttactgttgagcatccttggaaagatgataaaccaaaacaacacatttatgaccgtgtgtttgatggtgatgccactcaagaagatatatttgaagatacaaggtacttaatgcaatctgctggggatggttataatggttgcatatttgcttatggtcaaact

SEQ ID NO: 115591 - DNA, 111 bp, Glycine max
  Clone ID: PAT_MRT3847_7538C.1
aagatgagtgcagtgaagatatcaaggtgtaaagtctggtagccaatcttcccgatcatgtagagcaaccatgtgtctgcacacctgatctcgaagggacagatgtacgct

SEQ ID NO: 115592 - DNA, 214 bp, Glycine max
  Clone ID: PAT_MRT3847_75390C.1
gaagtgaagcttgtgtgcttcctgtcatcaaggttgacaagggcacagtcgagcttgctggaactaatggagaatccaccattcaggtactagatggcctatgtcagcgttgtgtcatgttctacatagctggtgcacgtgttgccaaatggtgtgctgagcttaagattgatcataacaagccatctcatctggttatacatctgaactccta

SEQ ID NO: 115593 - DNA, 1162 bp, Glycine max
  Clone ID: PAT_MRT3847_75391C.1
ggtaagactacatggatgattgatagataaaaaattgatgccgcaatgtaatcaattgtacaagtgcaaatccctcaacaatttgaaaaaggattaaacaactatcaagtgagtttataaaacacctaaatttaaatatcaccgttgtgtgtctttttccttttcttcttggacaaatccccagttggatcttctggtctcccttctgcatcatcacttctcctattcttactttgctccaactttacctcttcagcatataatttagtctcgcttcctttcttgtatttctttttcttcttgatttgtaaatactgggaactaccaagcactccattttcaccctccaagctgttgcataatgttttttccatctcttttcgttgttctagatcttttccattctcagcctcacccttataactggaaaaactactagtagttactttgggcttctttccacttttctgtttccttccctcttccatccccgtcttgatgtcgccttcatttccctgttctctggctgactcaacttcattttgggatccattaggtagctttccatcagcttccctcactccaaatttaacggtgctatctatgtcgtgcaaggactcaacttcctgcttcttctttttcttcttcttatgcatctcacccccatccacattttcagtttgatacccaataaaaccatcaagttcttgactaaaattttcatcatcttgatcagcattcccactgccagtttgttgccttttgaacagatcagatttcacatgcccaatgctgagctccttgttaatatcaacactctgaacagaattttccactaccttcccactgccattgccattctctgttctgtgccttttgtgtttcttatgagagtgagatgacccaagctccttgtggagctgcttgagctcattgaaagatgcagaagctcggtggagatatgcattgatgacatgagaagcaccattgtcagcagagacaaactttgtgagaattttagctgcttttgaaactgatatgtcttttaccgaaacacaatgtccagagattgtcttcatcttcctgccctttggccctcgcacatataccttgaagtcttacctagggtatgggatgttgaattgtgcttcccagaatcgag

SEQ ID NO: 115594 - DNA, 1988 bp, Glycine max
  Clone ID: PAT_MRT3847_75392C.1
ccctcacagcgtcacccagtcggcattgtgcaggagcatttctctcccgtcggagcaacttcagagattcaatgctagttgtttggactttgaaaatatgaaagtaataagcttttccggtggcataacaaaaccctgtttttttattgcccaaacagaaatgcctattctaacatttgctcattgtaagctgagtgctaccctagctcttaggaggatggggtccattacgagacttcaatattctgttgctgataggacattcacttctggttccgtggatttgccggcttccaaaacggactctggtcgagtgaatcggaggcggggaggcggctcatcctcggtatatagccgtcctagtttatcagaaatgaagaaggagaaggcagcaataagggaaaaggtttatgagttcttgagggcaattggcattgttcctgatgagcttgatggtcttgaactccctgtgactgttgatgttatgagggagcgcgttgattttcttcatagtttggggcttacgattgaagacatcaacaactatccgcttgttcttggctgcagtgtcaagaagaacatgattcctgtgcttgattaccttggaaaattgggagtgaggaaatcctcgatcactcaattcttgcagagatacccacaagtgctccatgctagtgtggttgtggatcttatgccggtggtcaattatcttaaggggatggatatcaagttcgatgatgttcctcgtgttcttgagaggtaccctgaagttctcggattcaaacttgagggaactatgagcacatccgttgcttatttgattggaattggagtaggaagaagagaaattggaggtgtcttaactagatacccagagattttggggatgcgagttggtagagtcatcaagccttttgtggaatatctggaaagcttgggaattccaaggttagctattgctagactgatagagcaacggccttatattcttggatttgggctgggtgagaaggtgaagccaaatgttaaataccttgaagagtataatgttaggcgaacatcacttccgtctataattgctcaatatcctgacatcattggaactgacctaaatcaaaagcttgaaaaacagagaagtttactcaattctgtacttgatttggatccagaggactttggccgagttgttgagaagatgccacaggtagttaacctcagcagtggacctatgctgaaacatgttgattttcttaagaattgtgggttttccttgccacaaatgaggcagatggttgttggatgccctcaattacttgctttaaacattgacattatgaaacttagctttgattacttccaaatggttatgaaaaggcctttggaagacttagttactttccctgcattcttcacttacggtttggagtcaactataaaacctaggcataagatggttgtcaagaaagggttgaagtgttctctgtcatggatgcttaattgttctaatgagaaatttgagcaacgaatggactatgacactattgacatggaagagatggaaatggaaccatcatttgacatgaattcactgacgcaaccaagaagtgatgaatcagattttgattatgaagacagcgatgaagatgacgagtagaatgattaagttactccaataactagtttatctgggaaaattttgatattctgttggatgatctttatgctgatatttacaatgatgtaccattggaaaggtaatttattatgcgagtacacgtgaagtatttttaagtgtttgtatactaattcttatgtttgtttatgtgatatgatattgagttcttgtattccaattacctcctacttatttctatttcacaattgtacaacagagctactgatctcctcatctattacaatgtttgtagtacaaaagttctgtggaattgtgaacgagacattagttgactcaatggataagctttgac

SEQ ID NO: 115595 - DNA, 222 bp, Glycine max
  unsure (1)..(222): unsure at all n locations
  Clone ID: PAT_MRT3847_75393C.1
gcactagcgttggcttcagaanttccagagcaaaagatccnncatctttctgtatctgctcaaaactggacactggaaacaatctgttgataaaacaggtgagcatggagctcacttcctccttgactgatgatatcaaggttactcagaagttactacgcactccaaagcagaggataatactgtgcagattgcttgagcttgatccaggcgtgntncant

SEQ ID NO: 115596 - DNA, 397 bp, Glycine max
  Clone ID: PAT_MRT3847_75394C.1
ggctgactacacattgatgagtgatatcatctcagccttcccatatatcctttcctacttaaaaggcaaatggaccgcaacagttcctctttgcagctttgttgacaccaatgcctattatactatcttttacatgactgctgactgtatgcctggacatcataaaccaccgtaccttgatggtgcagcacctgataactgtataactaaccctgtaccgcatagagaagaaacagagaaacataagaggtacacagagtcggaactcattcactgtagatgggccctgctggctgttgcaatgatataggttccacaagcatgaggcttaggcaactaggaaaaggctgatgattggactgtagtgcctggtggacaagcaacctacctaggtcaa

SEQ ID NO: 115597 - DNA, 754 bp, Glycine max
  unsure (1)..(754): unsure at all n locations
  Clone ID: PAT_MRT3847_75395C.1
ccacgcgtccggtaaaaggagggaagagtgggagcaacgggtgagtgaaaagtgtgagaaaatgtctaaccctcaagaccagaaaccatggaaagcggaatacgcgaagtctgggagatcttcatgcaggacgtgcaagagccccattgccagcgaaacgctgcgtctcgggaagatggttcaatccaccaaattcgatggcctcgtgcccatgtggaaccatgctgcttgcgtattgaagaaagccaatcagataaaattagttgaagatgttgaaaacttagagtcacttcgttgggaagatcagcagaagatcagaaaatacatagagagtggcggcggtggcggcagcagcagtggcgggggcagcgcggcaaagtcagactccaagactgtcaaagatactaaatgtggtattgaagtttcacaaaattctcgtgccacatgcaaggattgcggtcaaaaaattatcaaaggagaggttcgtatatctactaagcaaggtggtcaaggtgctaaaggtttggcttggcaccatgccaagtgtctcatcgatctgtcaccatcaattgaagtggataagttatctggatggaacaatctctcatcttctgatcaatcagctgtcattgacttcgctaaaaagggtggtagtgatacanaaattgagactgaggagggtaaagaatccacaccacaacaaacttncaaaggtggcataaaacggnggaaggatgttgatagtgagcggaaa

SEQ ID NO: 115598 - DNA, 732 bp, Glycine max
  Clone ID: PAT_MRT3847_75396C.1
ccacgcgtccgcaacgagcgagtgagtgaaagtgtgagagaatgtctaaccctcaagaccagaaaccatggaaggcggaatacgcgaagtcgggaagatcgtcatgcaggacgtgcaagagccccattgccagcgaaacgctgcgtctcggaaagatggttcaatccaccaaattcgatggcctcatgcccatgtggaaccatgctgcttgcatattgaagaaagccaatcagataaaattacttgaagatgttgaaaacttagagtcacttcgttgggaagatcagcagaagatcagaaaatacatagagagtggcggcggcggcggcggcggggagtagcagcagcggcagcgcggcaaagtcggactccaagactgtcaaagatactaaatgtggtattgaagtgtcacaaaattctcgtgccacttgcaaggattgcggtcaaaaaattatcaaaggagaggttcgtatatctactaagcctggtggtcaaggtgctaaaggtttggcttggcaccatgccaagtgtctcatggaactatcaccatcaattgacgtgtataagttatctggatggaacaatctctcatcttctgatcaatcagctgtcagtgacttcgctaaaaagggtggtagtgatacaaaaattgagactgaaggagggtaaagatccacacaacaacaaacttcccaaggtgggataaaacggggggaaggatgttgatagtga

SEQ ID NO: 115599 - DNA, 682 bp, Glycine max
  unsure (1)..(682): unsure at all n locations
  Clone ID: PAT_MRT3847_75397C.1
cggtccggattcccgggtcgacccacgcgtccggagtgagtgaaagtgtgagagaatgtctaaccctcaagaccagaaaccatggaaggcggaatacgcgaagtcgggaagatcgtcatgcaggacgtgcaagagccccattgccagcgaaacgctgcgtctcggaaagatggttcaatccaccaaattcgatggcctcatgcccgtaacattgacatgcattttcttctcttttctttttccttcaatattcctcaccctcgttcaatgtaaatgtagctttagctacgctaatgcatttcacacctttcttctgttttttacttgcaaaaataaccccgccgtaggttttgattttttttttttttatcttctcaatataccgtattttaatctgtattttattttcaatcagatgtggaaccatgctgcttgcatattgaagaaagccaatcagataaaattacttgaagatgttgaaaacttagagtcacttcgttgggaagatcagcagaagatcagaaaatacatanagagtggcggcggcggcggcggcggtagcagcagcggcagcgcggcaaagtcggactccaagactgtcaaagatactaaatgtggtattgaagtgtcacaaaattctcgtgccacttgcaaggattgcgggtcaaaaattatcaaagga

SEQ ID NO: 115600 - DNA, 731 bp, Glycine max
  Clone ID: PAT_MRT3847_75398C.1
ggtccggaattcccgcgtcgacccacgcgtccggtaaaaggagggaagagtgggagcaacgggtgagtgaaaagtgtgagaaaatgtctaaccctcaagaccagaaaccatggaaagcggaatacgcgaagtctgggagatcttcatgcaggacgtgcaagagccccattgccagcgaaacgctgcgtctcgggaagatggttcaatccaccaaattcgatggcctcgtgcccgtaatattaagctgccccttcttctcttttcttcttattttttccttcaatattcctcaccttcgttcaatgttgtaaatgtagctttaggtacgctcttgcatttcccacctttcttctgttttttgcatgcaaaaataacccaacgtaggtttttttttttatacaccgtatgatagtggtattttaatctgcattcttattttcaatcagatgtggaaccatgctgcttgcgtattgaagaaagccaatcagataaaattagttgaagatgttgaaaacttagagtcacttcgttgggaagatcagcagaagatcagaaaatacatagagagtggcggcggtggcggcagcagcagtggcgggggcagcgcggcaaagtcagactccaagactgtcaaagatactaaatgtggtattgaagtttcacaaaattctcgtgccacatgcaaggattgcggtcaaaaaattatcaaaggagaggatcgtatatctact

SEQ ID NO: 115601 - DNA, 262 bp, Glycine max
  unsure (1)..(262): unsure at all n locations
  Clone ID: PAT_MRT3847_75399C.1
cgccggacgcacgcgaacgaaagcncggaaaacggcacgtggtggccacagttgatatccctcagaatacaggaatatggggggcctgtgctaagggggggggggggtaagaggagcgccagatctgatatttacaccatttgctttcaagactgagaattgaggaatcctggttggacaaaagcaaagactaatgcaataaagccaaacccaggttcagatgcatggagtttgaaatatcagaagcgtactggaataaata

SEQ ID NO: 115602 - DNA, 409 bp, Glycine max
  Clone ID: PAT_MRT3847_7539C.1
gcgtgatgaccaataggctatcctcttttgtgcgtcttaagaaagaaatgaagagacgcggcattcattcgctcactcatgacattacaaacggaggcaatcactgctccaacttctgcacatgctcgaatcaacgtaatccccacatgcatggccctcttcctctttcagatactcttactcgatgacactagattcactccagagaggctcagatcagagatcggcatgcatagccagggatgagcatgccgtacagggtgcccaggttgcgtatgccaaacaaaaggaacgcctatctgacaaagaatcgcgacttattgctcacaatgaagcccggggtcttgaggccttcgcatgcgctaagactactgaatggccaaacattgaggtgaatgaaaggataact

SEQ ID NO: 115603 - DNA, 734 bp, Glycine max
  unsure (1)..(734): unsure at all n locations
  Clone ID: PAT_MRT3847_753C.1
cggctcggagtttagtggtganaaaggggagaagacgtcagaaggggtagcgggtatagtttagtggtaaaagtgcgattcgttccatggacccctaaatagttaagggatcccccgtttgattcatattccgatcaaaaactttatttcttacttaaagggaatcctttataccctcaatgaatgatttgcggtataatatacattatcgtaatttgtatacaagaagaatcaattctaaattgacaacttgagttctaaaattatgaaacataagtttttggaattggatctataatccgaatttttttgagtatgacgaaaggatctatggagagatatatagaaagtttctttctaatcgtaactaaatcttccatttttttgtatagtagagattgaagcaaaatagctattaaacgattcttttagtttactagagacatctacatttttttagctcgacagaaattttatgcttttcctaaagattctattaaatagaaatagagaacgaagtaactagaaaaaaaacatagattattataatactgctcttctagagggatcatctaaaaagcaagatgttttaaacttattcatacaaaacaaaaaggctgacatagatgttatgggtcaattttttgattttccatctcttaattttttctgtaaaggagccgaatgaaacaaaagtttcacgttcggttttgaattagagacgaaaaattgaa

SEQ ID NO: 115604 - DNA, 318 bp, Glycine max
  Clone ID: PAT_MRT3847_75400C.1
gtcacaactagctgctgttgtgacccttcaccctcccgatcataccttgccggagcccatgcaagaggggggggcaacctaattttttcttttcttaatcttacttcacacctaatactaatcctccttaatcttaatcactcttctctaagtactctcctccacacacgattatttactccattaatatcaacacctgtttttactcattttccaacaatcactatcatatcattttctttccttttccatattcctctcaaaaactattacaagcacaaatagtattcacctaaatttcactgttaaaaaaactat

SEQ ID NO: 115605 - DNA, 259 bp, Glycine max
  Clone ID: PAT_MRT3847_75401C.1
aggctcgagtacggcgcgagaagacgacagaagggttatatgcctttttaattcctcattcttcatttcaatataaataaacaatggatacaagtgggaacggaaagtttaatgctatgtttgatagaaattgagggtgaagaaaaggcaaagaggaaacatagagaatataccagaagtttcatattgtttgatactgtgcaaatagagagaccaggaaaaagagttagcatctcacatcatgttatttcattgcttg

SEQ ID NO: 115606 - DNA, 405 bp, Glycine max
  Clone ID: PAT_MRT3847_75402C.1
tcgcggacgcgtgggtgaccaccgactttcacgggcaaagttcttctttattgcactagagtgcagtttttcgtggtatgttgtccctggatacttgttcacaacgctcacaaacatttcatgggtgtgttggatattctccaagtcagttacagctcaacagatagggtcaggcatgaggggccttggagttggtgccctcacacttgattgggctgccgtggcattattcttgttcagccctctaatcttacccttttttgccattgtcaatgtttttgggggctatgcattaattgtctacgtggtcattcctttattatacattttttttttagtgtacaatgatttccagtttctttttttctttttacttttaattttttatctccttatttctattat

SEQ ID NO: 115607 - DNA, 784 bp, Glycine max
  unsure (1)..(784): unsure at all n locations
  Clone ID: PAT_MRT3847_75403C.1
cttacataatttttaacacttgtcagatgggtttacttacatgtactaacacttatcacatagatatatagctaacagttagaattttaataataagaatttatttgcataatagatataaaaatataaactattttttatattaaaaaaaaataggaactaatttacaaaataattacagggataaaaatgttttttttctcgaaaaaaaaaaatattttattaatgaaagtaacattttgtatacttcaaacaaacattaaaaactattaaaaattatttttaaaaattatttattgaataatcaaataaatttttcacttaattgaaataaacttgtgcaatataacctttatttaggaatctaaaccaaccaatttggagagagtctcactcccatcactctcttaattaaaaattctcaatatttgttttttctttattcctttaaacgtgtattctatacactttttctgtcatcagtaaaaaaattccctcaactattttaaattactcttatttttatcatatactcaatttatcctcttttgcctttttctctaaatttaattctaatattttttaaattgccaataattaaactgtttattataaatcttaaatagaatttatgtatttaaagattttattaattataaattntaagtattggtacacatactaaaatacaaatgaaaattgaaaatctcttgttgggccgaaagtaaaaaagtttttccgaaaccgaagtgaaaatggaaaatcatgactataaaataagcgt

SEQ ID NO: 115608 - DNA, 262 bp, Glycine max
  Clone ID: PAT_MRT3847_75404C.1
attggataacctttgggttcatcgctgcaagcatacacgatctaaattatgcccgtttatcatataatttatgcaaaggggttttatttcttgggtcatggaatttggatttttatgcctgaaaaaggattttaaaatttaataaggcccaccatcaaaggttaaaagcaactcattttaacaatcctaagacttgaacacaaaaaaatacccttttcaaaacaaacatgatagaggcccgctttttcctttcttttttttt

SEQ ID NO: 115609 - DNA, 416 bp, Glycine max
  Clone ID: PAT_MRT3847_75405C.1
tgagaggggccaatgtgtgtttctcagacgtgaccaatttggatgtttttgaggaatctctgaacaggttggggaagtcatttgatgttgtggtgtcatgtcttgctagtagaaatggaggtgtgaaggactcttggaagatagattatgaggcaacaaggaatagccttgttgctggaagaaaaacgtggggcttcacattttgtgttgctttcagcaatatgtgtgcagaagccgctcctcgagtttcagcgtgccaagttgaagtttgaggatgagttggtgaagttagctgaggaggatggtggattcacttatagcatagtgaggccaactgcatttttcaagagtttggggggtcaggttgagttagtgaaggatgggaaaccttatgttatgtttggagatgggaaact

SEQ ID NO: 115610 - DNA, 368 bp, Glycine max
  Clone ID: PAT_MRT3847_75406C.1
ggatagcagaagcgtaagggtcatcaaggggaccctcatacaaattctcaactctatatttctgagcactagccggagatggaaggtgaaatatcatcatctccagaatggcactacttgctgggagccaactttgcataacacacttcataaaagccttccctgtcaactccttctcgaacttcaagttcaacccaagcttttgcaacaaggggcacaacttatccttctggtcattcatgcagagttcaataacctgcttgattggttcataacaaaaccgaacaaagccacgcttgcaagtagaagccccaatgtgcctgttggtccactttttggtagcagagtcaaagaaattctcaccccaa

SEQ ID NO: 115611 - DNA, 818 bp, Glycine max
  Clone ID: PAT_MRT3847_75407C.1
ggtccggaatcccgggtcgacccacgcgtccgcggagatggtgatggcgtggaaatggatcgtgcgaaggacccgcgaatcaaagcccttcttccttgcattcgccaccatatgcggcgtcgttccgggcgtcataggagagagatggtgatggcgtggaaatggattgtgcgaagaacccgcgaatcgaaacccttcttccttgcattcgccaccgtatgcggcgtcgttcctggcgtcataggctatggtgtcatgcaactcactaacacccgcaacgagaagcttgagtcccatcttcgcacaaatgcccgtcccgaatcattgatgatggggcaagtcaataaagagagactggcagagtacctgggagagctacagcgtaaagaggatacgaatgaccgctatgttgctgctctaagaggagaaactttaaccagaaaaccttatgtgagaatccaaccgattccagaacaaactgacaccaaggcaaacaaggagcagaaaaaaatgaattagttgcagatctccggttattgtgaatatacgtttctccagtccactatgaacttgctgcagtgcgtttaatcctgttttactgctggatgcgtttatttaagcattaaactctttttggttaggaggaaactgatgtccatgattctgtccagacaagactacactagttatactcttattattttatttatccaaattcttcatagacatctagtatttgtcctaaacattttgtctatccttttctcttttggaatataaacattttccagacttctggatgctttcggcctaaaaaa

SEQ ID NO: 115612 - DNA, 290 bp, Glycine max
  Clone ID: PAT_MRT3847_75408C.1
gctgggctagcttgctgtcttacagcatctcattggacataatgtctttttgcttgacgcgccggtgttgtccagctccatcggcgttaaggatgactctgctctaatgtcagctgagatcactggcgtggttaatgcagaggcaacttgcgactcaatttatgacgctgacaagtggagctggacacgccctttccttgaatgtggagttcagatggtcattagccagttgtggtggttctcagcatttgcatttacgtatcagcattggcctggtcatggggtcccct

SEQ ID NO: 115613 - DNA, 130 bp, Glycine max
  Clone ID: PAT_MRT3847_75409C.1
tttcaactgtgggttctcttccgcacccaactagtacacggttaattgcttatgaagagcctaaagaagcaacaaccaatttgaagcagcgagcataccttggagaagaggggttggtagagtttttaaa

SEQ ID NO: 115614 - DNA, 320 bp, Glycine max
  Clone ID: PAT_MRT3847_7540C.1
gcgctcacgcatcctgaaaaatttaatgaaccatttattgataacccaaatctcaagcataacgccgacctttgtgcacttcacaacttaaattacatctcgattgaattgtaacatgataaatatgctacttagatcgacaatgaattaattactgatgatccacattatgctaagcaacctgttgaagaaccatggaccaagcacaacgatgctgacaatgcatcatgagaggaggccgataacaacatggaaaatgaggaatcataggatgacccagttgactctgatgcacatgatgaacaggaagatgctgatga

SEQ ID NO: 115615 - DNA, 269 bp, Glycine max
  unsure (1)..(269): unsure at all n locations
  Clone ID: PAT_MRT3847_75410C.1
tttttaatgagcaaaaattactgccaaaccgaaggaactaaaaaacttacaaatttgcgtgaacctaatgagaataggataaaagatctggcagtaatctaaagaggnnannntaactttgcacacttcatgcctgggcctaccgaccgtaaagctaattcaaaaactatgccactactgtatgcatccatactaaaaaaaacaaactgacttatactttcaccatgaacggcatacattatatatgacctccatgatagatactattt

SEQ ID NO: 115616 - DNA, 600 bp, Glycine max
  Clone ID: PAT_MRT3847_75411C.1
gcacgagagtatccaaataaggtggtaagaatgtgacgcatcactaattagattttcgatcaggtatatggaagtgattataaattggttatataattagtcctcatataaaacgactttttagccatgtccaccatctttaatttctagaaatgacatttttctgtcctctcttttatgataataggttactaataatgaaatttggaacatgcattttcatcagatactaaacacttgataaaaccttttcatataattttctaaagcatatctttctcctttttcatcttctcaaagagggtgcactccgcgtttttaacggtggggactgtgcccttaagtgccacacttttcgagttctcaacttgatcactatgcctctaagttatttttttgaatgccgattgtgaataatggcactaatgtagtttaacattgttatggtgtatgacacataggattatttagatcgtgcagtgtaaaataaactgagtaaaggagagagttttgacagaatttagagagatttttgaactctcatagtattgagttttttttgtcatgtgttgtgacaatgtaatcttattgtgatttgtt

SEQ ID NO: 115617 - DNA, 177 bp, Glycine max
  Clone ID: PAT_MRT3847_75412C.1
ggaccatggagggttttgcctgcagctaaaatcgaaagcaggacgccgcagtgtcatatagtaggtcaagcgatcacaatgcgaaggtcaccaattcatttcattatacctcacacgtctagcctcacttcaaaatcatctcgcaagcttcatgtcacctctgatcgatgacatact

SEQ ID NO: 115618 - DNA, 1106 bp, Glycine max
  Clone ID: PAT_MRT3847_75413C.1
gattgtccaacaggaatcaatgacaaagccaggtgagcgcaggagattatggtcattggaagatgtaagggaagttttaggatacaacacggtcccacgcgtccgaaaaggtttaacaaagataccagacatatctggttaaccaaattttgagaaaccttcatttgaatattgtcagaatttaattacagctcatgattcgatttgtttaatttctaggtaagcttaaaatattgagtgcttttggttgcatcaagcttaggagttttccaaccatgaagttgacctcgcttgaagatctccatccttcatgttatacttgagagttttccaaaaatatcagaaaagatggaaaatgtaagggaacttcatttgcagtacactcccataagtatgtctgtctagttgtggagttgttcagttaccaagtagcactgtcgtgttaccagaactgactgatattatagcttttggatggaaagggtagcaatggctaaaacaggaagatggtgaagaaaaagcgggttcaatagtatcttcaaaggtagaacggctttgtgcctaaggatgcaaccatttattattttttcaaaaggtttcatgcagtttgttcatgtgaaagatttagactgattgataataatttcagaattcttcatgaatgtatcaaagaatttcaatttttaaagatgcgacttgttgcgagcatcttttggaaattagagggagtcaatcataccgaacatttcttggcaagagactggatatccttgacttcctcatgtattatgtataagcatgttcctaaatcagcttatgtcctgttcttaatgcatctgatttaataatatgtagtgtacttaactttgacaagcttatgaattcctttataactaattgcaggatctgcatgaggccggaaacactatcatttgccaggagtaatatgtagtggttcaatcaccaaagcaaaaggaccttcaagttctttttggtttggtacttagtcccctgacaaagttctttgttcttcttattgcacctatggataatggatctggatttttttcatctcattttcatcaatggcaataaatgttcccttg

SEQ ID NO: 115619 - DNA, 246 bp, Glycine max
  Clone ID: PAT_MRT3847_75414C.1
ggcgttagtcgagagtgttattgaacaagagcattttgcaacctcttcggagttaacggaagaactagcgaatgatgggtccagtgatatcgaacacggagaagaagttctctcttgcattgatttaccgtgggttctcgcgcatgattctgtactttcacacaagcatgatgcttattgaggaagcggcgataattccgtcaaacaggctatggatcatgatcgaggtgttctcgacacacctga

SEQ ID NO: 115620 - DNA, 283 bp, Glycine max
  Clone ID: PAT_MRT3847_75415C.1
aaaatgcagacatggtgtcacctggatttttttctgcccatgaatgttgccagtcagtacctgtcctccttgtttctctatttttggttatgaatgttggggttaccacctgcatttaggggaaaattgtgttctgtgctttcctggtatcttgttccgaggaactctagttctgtctttcaaccaagaaaatagatttgtggtgtttcttttattgaacttttaacagtctctttagtaaatacaggtagttgaataattgtttccagagctcaaccgatga

SEQ ID NO: 115621 - DNA, 432 bp, Glycine max
  Clone ID: PAT_MRT3847_75416C.1
gaaacaaaatgtttttttttacttaatttttcggaaaacaaaacgttttttttaactccaaatttacgattggcttttccagccaaatttgggccctatgaaaaatacaaatgcccctgggcgccgggggatttaaaacatgctttaccctacttttgccgggggccggaaaattaacaattcccattttttaccatatttcacgagtttttgtttaaaacttgaaaagcaaaaattttgggaatttacctctccccccgttccaattggtttagcccggcccactttcaatggaggggttcaatggagggcccgggtctaggggagggaaatcaaaattcttagccgccccttccctggggattaggggcagccctaggttcaaaaaaccttgggccgcctattgcattactggatcaaacaattgccccc

SEQ ID NO: 115622 - DNA, 500 bp, Glycine max
  Clone ID: PAT_MRT3847_75417C.1
ctgcttgggggggggggggggggggggacaacagcaaatgctggaagggaagggaataccagcaaagagaggataattggactggtggttgcagcaaaaggtgaatgcaaaacgaaataaataacatagggagagagacatagaaaacggtagaataccagcctagggctgttacggtttacgtaagaagagagcggagataatagaaagctaggtatgcaattaaactcagaacttaacttagagtggcgagtgttttgttgttgatgaggcaccggcaaaaacggaaagaccctaactggtagggatcggctggtacttaaattttatgaaacaatgcaatgtgcctatggtaaatgctgcaaatgccgctgatttggtaaaaacagagcaatatactataccaactacgacattatattcagtatacaaactgttacagggattattagacagcggagtatacgaacgactatgatatagggagagaatgatatatt

SEQ ID NO: 115623 - DNA, 197 bp, Glycine max
  unsure (1)..(197): unsure at all n locations
  Clone ID: PAT_MRT3847_75418C.1
tcaaaatcgggaccacacacctctattggaaagatnagtttccagtatttaggtatcaaattggcccactaacgaccataatgagactggttgctgtaactgatcgttgaatcactctgatgggactagccctactcgcaatttaagggatgtggatctacaatggtctatggtagctatgcttgtacagaccattt

SEQ ID NO: 115624 - DNA, 724 bp, Glycine max
  unsure (1)..(724): unsure at all n locations
  Clone ID: PAT_MRT3847_75419C.1
gcnnnttnncccttgggtccggaacttaatctgtttgcggttgccttcnggtccgagctcttccttttgggccccttaggattaggaacttgtttttttttaaatctccctgcttattcttttgcttttccccaccagtctttcttggaaagcangctttctgaagccgtttcngacaaaatctaggtttctattnnngaatttttgggggaaacccgttttgaacgttttgaccccgcngaagatgccccgtctcttgttggagaagtgagggtgggttcgccttatttcttttttcttaggaccttccttccctcttntttgggggacctgcccgtggtttcctgggtttatgctgttggttcccagctgttggattcccctngaaggccttctgttccggcccccggagctggcctggggctcccttcaagccttttcttgggagaccgccctctgttggggcccggccttggcgcgtttgtgtttttgtcgcttcccctcttgggtttggattctgtttttttccctgggtggctgctttgttgtccctcccccttttttggcctgggggtggtttttttttgggttttgggggcttgggggggcccggggtntgcggggagactttttttttttttcttgtgtccggctgggtagggttttttgtttggggggtttggcctgggtggggttgtgggggggcgtttgttggggggcgttg

SEQ ID NO: 115625 - DNA, 595 bp, Glycine max
  Clone ID: PAT_MRT3847_7541C.1
ttgagatgggggtttttttatttttttttggcatcattggatagttgcttgaactccattacattaccactagcaacttttccaattccttttgaaacagatatcccttcgagaaatatttgtatctgtcccctgatttagttcataattttaattaatgctatataatattttcttcaacgatgcatgcttatttaatctttagccttaacatcaattttcatcattagaatttgattaaaaaaattactgtagcacaaggctgagaatcttctctagttccaacaagttcaggacgtgtatagaattttataggccttaggcaaattttgtatttgaaaaattgttaattaaaatttaataattaaacaatttaaacatctcattcaataagaattcatttaaccaatatttttgtaatataatttatctcaagttaattttaaaaaaaaaatattttcttttgaaaatgaaaacaattactattataattactaatattattaacaatattatgtaaacattgcatgcatgtaaaatgaattaatcttttaaaatataatttaatattttctaataaaacattaattttttt

SEQ ID NO: 115626 - DNA, 218 bp, Glycine max
  unsure (1)..(218): unsure at all n locations
  Clone ID: PAT_MRT3847_75420C.1
ccttccggccaccctttttttttttttttacattcacntaaatcactaattcaggcattttgggtaatttataactgagattgaacctaccaaaacctattctcttttgtccttcatccattagctaccactcttattaaaaacttctagaacaaacaaaatcaaaaactttctacaaacctacttataaatacaatggttcattcttaacacacatt

SEQ ID NO: 115627 - DNA, 575 bp, Glycine max
  unsure (1)..(575): unsure at all n locations
  Clone ID: PAT_MRT3847_75421C.1
ggctcgagaaacaacttagaagaggcttttcttcttttaatgattttgctgagaaaaatatctttaaataaaattgaatgggatccgtcaattttggatcacctttcgtttgctctatctgtttcaggggatttgacaactttagcccatcaatgggaagaattactccctgggactatcaatcgaagagaaagataccatgccttatctctttgttattatggcgcagtgagaaccctgatcttgcaaaagatggggcaagcttagctcgcaaagtgcttgagaacttggatggaagatgtgatcggttggaaagtctttccagttgcttacttggtgtttcactttcagcacactcaaaaattgatatttctaattctgagagggttgagaaacaatctgaggcacttcattctctggaaactgcaagcaaagtgaccaaaatgagtaacccccttgtaatatactacttgagcttagaatgtgcagagcaaaggaagttggatgctgcacttcattatgcaaaatgctttctaaacttagaagtggngtctaatattaaaggatggttattg

SEQ ID NO: 115628 - DNA, 821 bp, Glycine max
  Clone ID: PAT_MRT3847_75422C.1
aacttgctgattctccccgtgatgttattttgtcttaccgtcgtgcactccttcaccgacggaatcttgatgcaaaaaccatagcaaagattcagaaagaatttgttgtttttcttctatatagtggaggggaagcaatcctttcaaatcttcgttcccatatggacagctcgtttgtacccagaaacaacttagaagaggctattcttcttttaatgattttgctgagaaaaatatctctaaataaaattgaatgggatccgtcaattttggaccacctttcgtttgctctatctgtttcaggggatttgacagctttagcccatcaatgggaagaattactccctgggactatcaatcgaagagaaagataccatgccttatctctttgttattatggtgcaggtaatgacttggtagcactgaatcttcttaggaaattgctgagtagtagagaggacccaaaacatgttccttctttgttaatggcttctaagatttgtagcatgaaccctgatcttgcaaaagatggggcaagcttagcttgcaaggtgcttgagaacttggatggaagatgtgatcagttggaaagtctttccagttgcttacttggtgtttcactttcagcacactcaaaaattgctatttctaattctgagagggttgagaaacaatctgaggcacttcattctctggaaactgcagcaaagtgaccagaatgaggaatccccctgtaatatactacttgagcttagaatgtgcagagcaaaagaagttggatgttgcacttcattatgcaaaatgctttctaaacttggaag

SEQ ID NO: 115629 - DNA, 509 bp, Glycine max
  Clone ID: PAT_MRT3847_75423C.1
tactccactgtacttaaatactacaatgatcgaagtagttgatggttgggacatgacaattaagatttcaccggccaatagattcttcttccaaacaagtttgaacatttagcggtgttcgacagatgagatctccataagtctacgtgtatttatggtgtgtgtgctctcgttcacactataaataagtccttctttcccaagctttcttataggaaccacagcaagcaatattttcagctgtattattttctctctttgtgcaaagatgggaaaattgcacagctatgtttcagtacttgctgtggcatttgtattggtgataggagtagctgaatgcagaaaaataaaagacactgagttagttgacggttttggaggaggtggattgggtggtggtgccggtggaggttttggtggaggagctggtgcaggaattggaggtggtggtggtgcgggtgggggtgctggtggtggtttcggaggtggaaaaggaggtggactcgtgc

SEQ ID NO: 115630 - DNA, 328 bp, Glycine max
  Clone ID: PAT_MRT3847_75424C.1
aactcacgctagattctgggcttactttgataacaataagatcttctatcttataagagcgattcggacatccaacgggacgaagatatatgagcctgccaccaaggagttcatagctgcccttaaattatcgtaggaacagctaggagacaagacttatttagcaagatactatctacgctttcatgatatagcccttataccattgaccactcagttcaacactctcagctgtctcaacatacagagtgagtgcgccaagtatgatgcttggatcaatatgagcctacagatacacatgtgttccaagtctctatctgatcaacac

SEQ ID NO: 115631 - DNA, 687 bp, Glycine max
  Clone ID: PAT_MRT3847_75425C.1
ccggtccggaatcccgggtcgacccacgcgtccggccggattgagtgtagaaattaatattttgctttaatcttaaaaaaatctcccaatagtttgacaaaaaaaaaaaaaaaaaaaaaaaaaaaaaaaaaaaaaaaaaaaaaaaaaaaaaaaaaaaaaaaaaaaaaaaaaaaaaaaaaaaaaaaaaaaaaaaaaaaaaaaaaaaaaaaaaaaaaaaaaaaaaaaaaaaaaaaaaaagggggggccccttttaaaagaaaaaaattttactaccccggaattgaaaaaaaaaattttttttttggggcaccaaaaaaaaaaaaaaggggccgggtttaaaaaaaggggaaagggaaaaaaccggggggtaccaaaaaaaaatgccttggaaaaaaacccctttttccaaagtggggaaaaaaaaaaaaagccccacacaaaccccctttcaaaaaattgcccccccttaaagggaaaagggaccccccctttaacgggcaaaaaaaccgcggggggtggggggtttcccccaggggaccccttaaatttcaaaagcccaaaacccccctttttttggttttttcccttccttttctcccaaggttgcgcggttttcccccaaaaatattaaaaaggggggctctttttgggggcccaattaaagggttttaaggccccccccccccc

SEQ ID NO: 115632 - DNA, 447 bp, Glycine max
  Clone ID: PAT_MRT3847_75426C.1
ggattgggggaatacatttattatatgcatcaacaataaatagcaaacagagcctccgctcttccttccgcttcgtctgcgcttcgcttcgcgtgacctccacttcgcttacatgtgctgcttccagggagagcccttgatgtgtttgccgttaaggagcacgttgatgtcgtagtttccggcctgaggaaggttgtaggtgacgacgtatgttccatcgctcacgtcggggatcttgaccgtcttgacctcttccttggggccttggttgacgattttgacggcgaagttctcggtctcacctcccactttcttgtcctggttgttcttggtcttggtgcggatcacgaacgaaaagctgtcgacgggggtgtggtcgtgcgaagcgccatccttgacgttgacggagacaggtgtgtggccgacaggctttccctgtaagcgcac

SEQ ID NO: 115633 - DNA, 187 bp, Glycine max
  Clone ID: PAT_MRT3847_75427C.1
aaaactgatctcaacagagcttaatagaacacatcccaaaaagtcctacaggtcccccttgctagaaagcttagattaagccgaacgggcaatataaactcttaggcacctaaaatctaaactctacatggttaacagaaacgcgttcatagaaggtaaaaccaatatcgaaaaagaaagaactcat

SEQ ID NO: 115634 - DNA, 772 bp, Glycine max
  Clone ID: PAT_MRT3847_75428C.1
cgttaattcggctcgaggccgacgtggtatcgacaaagcaaggttccgccggagacgccgcaacgccatgaaccactccccgttcaggctctgaggatcgggggaggactaagagagtagcttcgagctatactatgatggcttcgacaataattaaggggctccgcccgctgtcgtcgaggatgtcggagtttctgctcggatcgggattcgacggactgctacagtatgtttcgtagattgagatcaacaacttgggtaaggtggagaatctgccggtgttgaatgtggcgctagagtcaatgccaacggtggaaattactgagtctctggttgcgacggagacgcacagcgccgtgtgcaaggaacattggcgcgcgagatgtcgtgcaagcacctctaccactctaattgcttgtgtccagtgtgctgccgtcgaagtaggccatgtcgaaaaagagagtcgtcggtgaggtcgaggaggagttggtagggttgagcatatagaggttgacgagcgacagattcgccgtcgggaggtttgccgacgagaatcacttgtaggaggtgtacacttgttttagttgggatacatgtgattttgtccttaactatcctaattaacgcttaaacagtatgcaaacaaattatatttccaactgttagattaaaaccatcttcatccaacagtattcaagtgttttgtaacttgaaaaatgaaagaaagtttcccagtcttctttacctgggagaaacaatttgttctgcccag

SEQ ID NO: 115635 - DNA, 235 bp, Glycine max
  Clone ID: PAT_MRT3847_75429C.1
gcaactttaccgacaaggatgaagcgagtgcgaaactatagaagaagaattgatccaatgagccctttttaaagtataattataatattttagcaactgaagttatttttttggattgtaacatagttttgatttttacatgatgaatatttaatattaagcaaagtaacttaaatattacttgaagtaataattctcaatattactactttagtgctcaaaaaaaaaaaaaaaa

SEQ ID NO: 115636 - DNA, 1141 bp, Glycine max
  unsure (1)..(1141): unsure at all n locations
  Clone ID: PAT_MRT3847_7542C.1
attcctgggctctagtaaaataaaaccttaggacccatcacatgacaatagaagcaattaattcaccagctacatagtttttctgtttgaagtgctacaaacaatggcagctactcaggaagatgtgacgcttttgggagttgttggaagcccgtttgtgtgcagggtccagattgccctcaaattgaagggaattgaatgcaaatttttggaagaaaatttggcaaacaagagtgatctacttctcaaatccaaccccgtttacaagaaggttccagtgtttattcataatgagaagcccatagcagagtctcttgtgattgttgagtacattgatgagacatggaagaacaaccccatcttgccttctgatccttaccaaagatcctttgctcggttttggtccaagttcatagatgacaagattgtgggtgcttcatggaaatctgttttcacggttgatgagaaagagcgtgagaagaatgttgaagaatcgttggaggctctgcagtttcttgagaatgaactacaggacaaaaggttctttggaggagatgaatttggatttgtagatattgctggtgtcttcattgcattttcaatcccaattttccaagaagtagcagggttgcaattattcaccagtgagaaatttcctaagctcttcaaatggagccaagagttgatcaaccaccctgttgtcaaagatgtccttcctcctagagaaccactttttgccttcttcaaatccctctatgaaagcctttctgcttcaaaatagattgtttaagaatgattgtgtgaactacttgtcgctcattgaattattgttgtttgaatttcatgtcaatttgatactatatgtaatttagtaacctgggatattaggatatccccaaggaacaaagaatcctaggattttgtttccattttggccatttcagttaataattaaagaaactctattttttcttgttacaaaaaaaaaaaaaaaaaaanatttcaaaataaaataaaattcatgctttgggcttatttatccccaaataatcacctttcgtgacatctaactgtgaaatgttagaatatgttagagaactcaatactacctcaaattcatctaacagcttaccatgagctc

SEQ ID NO: 115637 - DNA, 124 bp, Glycine max
  Clone ID: PAT_MRT3847_75430C.1
ctttctcgtgggatctaacaaaacttaagtgaagcgtttctacgttgtgcagacaaatctgatgagtacctagatatctgtgactgagatatcataggaggcagattgaggttaagcttaatgt

SEQ ID NO: 115638 - DNA, 431 bp, Glycine max
  Clone ID: PAT_MRT3847_75431C.1
atcgttcatgtcaacattaactgtgctgcggatgataccatgctaaactcattcactatcaagattggaattgaatgccaactcagtgccgaagaactcgctcaacaaatccagcaaacattctgctaattataaaagatgggttatgtttttccagagtccagaccaaacatcagcttgcatgcatccctctctctctctctctcttctcttattgtgttgtacgtaccttgctgtacaaataacatagaacatgggaagagccatatttaatttttcaaccatttatcatttttctttctttttaattattacagcaattgctagtgtaattcctcatgatgacaagtattagctagtttattagtatagagtgacaccactctcttgtaattgaccaccgtacgtcaagctgtgatttgtgtatgaat

SEQ ID NO: 115639 - DNA, 317 bp, Glycine max
  Clone ID: PAT_MRT3847_75432C.1
aaactactcttctaaattgtttagacatctgagcctgagcgtttttcaagcggggataaaaattggaccttcaggaacacttagaggcagcatgctaaagactttgaaaggtaaggctacatagaaagtaatatgctgattaagacttagctaatttattcttccaatcagccatacaattttacgttgagattatcactttggacttgaaaagtggcgagttctctttaatgagtaatcattttcgtggcgtacttggtacttgaaacttgaaatacagatgcgtcaatttaatattataattacttattaagact

SEQ ID NO: 115640 - DNA, 655 bp, Glycine max
  Clone ID: PAT_MRT3847_75433C.1
gatagtgtttatgtacatgagaacgtgctcaagcagcagagaggactcggttgcaagcaagtcgctgtcgaaaattagaggttgtctgaacgcaactctacaacgtatgtgccaagaagagagtgagcaggaatgcaaaattcagggtagcgcaaccgagtttttcttccaaaaccacccagctgattagagcgtcctcagcactgctgtggggcctgttcaagcgctgacagggtcattggcgcataatatcattgtccaacaaagagaaaagcgtaattgcagcgtgacgttctcggacgtccaccacgcctcataacggacgtcaactgcacctgattataccatttgtgtgcacctggtgcgtggtgcgcactgatcaggatggcagaaggctcagagcatcccagaagcattcatacagaagcacacatcaatcgatatttgggtggcggccctaagcatgttgatttcacaatgctttaatcatgcattgttccatgagccaattgtcactcgtgtgaacagatgcgctgacaatagctgatgtgccaggcgaatatggtgttatggtcagtgattacctcagaagtattacatagaatggtatactaagggatcagtcactcttcagtagcgataaatgctgcatgac

SEQ ID NO: 115641 - DNA, 414 bp, Glycine max
  Clone ID: PAT_MRT3847_75434C.1
aattcggctcgagctgtgaatgggacatcactactggaagaagatgaaactgatgtatttacatccgaggatcaaagggaaaggaggaagaaacgttctgcagtgggtacacctgattacttagccccagagatacttttgggaactggacatggttcgtatagtcccatttttatgtttaaggtggtttgatttctggttttctcccatctcttaaaatatagatttgacttttgtcatttgggcagttttttttaaataaataattacagaaaacatgattttccttctgtttataattaaattcttaacaatactgaaaacatcttgtaggatctttattctttatagtgaaatgattaagtcaaatggaaatgttttgatcattgtagcctactgatttaatgattcgac

SEQ ID NO: 115642 - DNA, 131 bp, Glycine max
  Clone ID: PAT_MRT3847_75435C.1
gtcgagacattgatgcacatcctccattatgtgagtgcaatgatgagctcgataaatgttggtatgacccgctacataatgttgaattcagccatgtgatatatcactcattggtggtcttcatgattaat

SEQ ID NO: 115643 - DNA, 200 bp, Glycine max
  Clone ID: PAT_MRT3847_75436C.1
gaaataattcttatctcatgctggcacagagaatatttatacaaattatactggtatctttttttccccaaacaatagaaaaactacttgggtatgctggatgtttcctaatcacagcggaaaggataactatcaatattactccggtaaaaaaaaaaactaagtattcctaggtttacccatgtactaaaagaatacat

SEQ ID NO: 115644 - DNA, 363 bp, Glycine max
  unsure (1)..(363): unsure at all n locations
  Clone ID: PAT_MRT3847_75437C.1
tnggccacaagtctcagtaggcagtacaaacacctggtgggtaacttttcaagcctcacaaagccacaatgaaaacaatatattagaaataacagctcagtagtctgacttcaaggaaacaccagacggtggcagtatagcacacacattcatgatcaagccatatttacctgaagaatttatcacaccaaaaaaaacatgttcatagtagaatatagaattgtctgtaaattttaatgccataggtaggtaaaatataacctatcacataaaaggtgggcgtaaaaaggtaaatgctgacacaacacagtcatacagttaatctatgaaaactgagacaagaacgggaagggggaattttta

SEQ ID NO: 115645 - DNA, 494 bp, Glycine max
  Clone ID: PAT_MRT3847_75438C.1
tcgcctcgaggtgatccctctctttcttttactttcgccaaatctgaacaacatgatcaacatcagagatccaagagctttgaggcttacggcgatgtttccaagtctggtgtgtggggcgtccttgctcagaaagccaaagaaattctggaggacgataagtcgtcatccccacaacacaacgacgtcatcaatatcatgccaccagttgtcgacatagacaaactcaaatcgcactcttttaatacctttgctcctcctcctcaggagaataataagacaacaaggccagatcagtcaaatcaaactgcagcagcaggtacgtggaatccatggcagccgcaaccagctgcacaaacaggaggaggagcctctcaaactatccatcaaacacaactcaaggcatctcgcgacgtggcaatggcaacagctgccaaagcaaaattactcctgcgggagctaaagaccgttaaagcagatttggctttttcaaa

SEQ ID NO: 115646 - DNA, 306 bp, Glycine max
  Clone ID: PAT_MRT3847_75439C.1
catgttgagttgggttttgataacctctcttttttttttttttctcaattggttagagcattgaaagaaaagaagcccaaaagagaagggccattagaaattgaaatcccattgaatacctgaaatgccagagacaaccctcatagctttttgcttgattttgggtttatgtacttccaccttcaacacaactttttgttacaggaaaaacaaatacttgttacaactttacaacacttttgaacctcatttcgtaccaaaactatctaaaacgagagcccatggtaaaactccaactcttggtta

SEQ ID NO: 115647 - DNA, 608 bp, Glycine max
  Clone ID: PAT_MRT3847_7543C.1
ggctcgagcctaccccttgctagctctataaaaggaaaagaccttaggtatccatcacagacaaataaacaatatagttattttgagtgaaggttagaagtgctacaaacaatggcagctggtcaggaagatgtgaagcttttgggagttgtgggaagcccatttgtgtgtagggtccagattgccctcaagttgaagggaattgaatacaaatttgtggaagaaaatttggccaacaagagtgatttgcttcttaaatccaacccagttcacaagaaagttccagtttttattcacaatgagaagcccatagcagagtctcttgtgattgttgagtacattgatgagacatggaagaacaaccccatcttgccttctgatccttaccatagagccttggctcgtttctggtccaaattcattgatgacaaggtaactcagcttttcaaaaatcttcttatttttcttgatttgagctgatttccccccaaagcatcacctttcatgacatgtgaaatctttgaacatgttagagaacgcaataatcaacagctatgggctaattgttttgtaaaaaaattactaaaagtaatgtgatttctcaaatc

SEQ ID NO: 115648 - DNA, 214 bp, Glycine max
  Clone ID: PAT_MRT3847_75440C.1
cgacgaagccggcgagctcctcgggcgtctcgcccttgatgcgcatggtcagcgcgaagccgcccagtaccaggtcggtgacgcggccgtccaggatgcgcgacatcaggtcgtgcgcctgctcgcggctcaacgaacgggcgccgtccttgccacggccgatttccttcagatagggggcgatgctcatgggccggattgtgacccggctcat

SEQ ID NO: 115649 - DNA, 273 bp, Glycine max
  Clone ID: PAT_MRT3847_75441C.1
tgtgtgggcattttcttggtttttcttgctttctttcactcactcttttttgtcatctacacataatttggaagtatcaatcccacctttttgtcacttacttaatttgataccttatgctttttatcattatacgaagcattaaatgctttgtattcttgtgggtcttggacatagatatgttgccagagaatagagattctcacaacttaaacaataattagatggaggcacactgccttgcctactcttgtacatttggataatactaca

SEQ ID NO: 115650 - DNA, 213 bp, Glycine max
  Clone ID: PAT_MRT3847_75442C.1
gtgagcaaggaccacactgcctcatagttctccaattaggaactccttgagagttgctgctcggaagaaaggctgtttaatggtcaagattgtgatgtctgggaatgcagcagtcaaaaggagttattgggcctcatcgttacatgtgtttttaacaaacagcatctgtacagatcattttcatgcatgtaattcgacacaatcagaaccaca

SEQ ID NO: 115651 - DNA, 160 bp, Glycine max
  Clone ID: PAT_MRT3847_75443C.1
tttttatgtttatatatttttttttattctttttttttttacagtttacataacattggaccggattccaagcttacgaccagcggatagctaattcaaagatcttttatggggaccctaaattgaaagccaatggacgataattaacaacaggtggata

SEQ ID NO: 115652 - DNA, 656 bp, Glycine max
  unsure (1)..(656): unsure at all n locations
  Clone ID: PAT_MRT3847_75444C.1
gttggtaagtttttttttttttttttttctttttacttgaatatttctgtacttcattcatgccttcttctttcctttctgtgagtgcattatcccatatatatatcctcaggggagngtgtggccctgggnccgntgtgtcttcccttgactantcacgcagtcataaagttcgtgcagtggtgggcanaatttagttaaagactttcattcccaatgggtgttgatggtatagtggaatgatatgaacgaaccagctatctttaaggtaattctaatctctttggtttcttttcttcaaataatatgaaacaatatttgatccaaatcttattttttgtggatcttgatttgtttcatttccaacttctttacccatttcttttttctaggttctaacaaaaacaatgcctgagagcaatgttcatagaggagatactgaacttggaggttgtcagaatcattttttctatcataatgtaatatactttgtcccttattatgactttggagtcgcgtttcttttatttatcataagcttgttgatagagcacttcgattatataattagataccaattaccaactgcatcttgactctctgatgttagtgtatcaatttagatttgttgaatgttttggtgccttaccatgtag

SEQ ID NO: 115653 - DNA, 594 bp, Glycine max
  Clone ID: PAT_MRT3847_75445C.1
cttttttttctttttttttttttttttttttttttttttttttttttttttttttttttttttttttttaaaacccagggggcaaaaaaatcatcaaggtttttcaaaaaagggttttttttaaagacaaaaagagttttttaaaagggccccccctttttgcggggggcaaaaaaccaaagggggtttttttttccccccaatacaaacaagttaaaaaaattgtccaaggattaggaggaggaggcataatccccaagggggaggctttgctatccgaagttccccccaaatttgaagggggaaaaaccccaaaccaaaatgggccctcatcaattccagcatcatggtgtttttgggaaacaaacgggtttcttgatttttggatactttccaattcggaggggacttctttaataggggggcggcttttccctttcaactttaaaaatttttttgcaaaatgggcaacaacaacaagggggtctttttccgcttccttcacgattctttcataaaaaaaatcaaaaagacgattttcccccctcccgagaaggaaatatgaagcccaacttctaagctcttggggttttg

SEQ ID NO: 115654 - DNA, 2275 bp, Glycine max
  Clone ID: PAT_MRT3847_75446C.1
ccctcatgcactttgacactggtgtccgttgctaaactaaatatcaatatcaattatcttcttcctctttaagtcaaaccataactattccatttctttccaccctacactttctgaattctgggtgttgattttcattttctccatttttttttctctcccttggatgtgttattttcaatccaaaagatcatgcaaaaaactatatttgagaatctgaaagagtgactaggtggtctatttgagcttgtgaagtttgtgtttgtgtgaaaggtgtgaggcttattattcatagaagagtttgtgtttgttcacataattgatcgtggtgtggtgtgtgtccacgtctgcactgttatttattgctaaactaaatatcaatatcaattatcttcttcctctttaagtcaaaccataactattccatttctttccaccccacagtttctgaattctgggtgttgagtttcattttctccatttttttttatctcccttggatgtgttattttcaatccaaaagaccatgcaaaaaactatatttgagaatctgaaagagtgactaggtggtctatctgatcttgtgaagtttgtgtttgtgtgaaaggtgtgaggcttattattcagaagagtttgtgtttgttcacataattgattgtggtgtggtgtgtgtcggtggcaatggaggcaagtttggtggagaggggtagagagagagctggacatgttaacaaggttggttatgttagaagggtcattgcaaagaagaagaaacagctttatcgaagggttaggagacctgagttgagtgtttcaaagacacttcaccaattatttgattcatgcagagaagctttcaaaggccctggcactgttccttcgccacaagatgttcagagattgactcacatacttgataacatgaagccagaagatgtggggctaagtagagatctgcagttcttcaagcctggaaatattgtcaaagagaaccaaagggtcacttatacaaccgtgtacaagtgtgacaatttctcactctgcatctttttcatacctgaaggaggagtcattcctctccacaaccacccggacatgactgttttcagcaagcttttattaggactaatgcacattaagtcctatgattgggttgaccctgaggcctctgatgataacatgttgcaaccacaatctcaattgagattggcaatgttaaaagttgataaggtgttcacatcttcatgtgacacttctgtgctgtatccaacaacaggaggcaacatccatgaattcacagccataaccccatgtgctgtgcttgatgtcattggccctccttattccaaagaagatggaagggactgttcctactacagagatcacccttatacttgttttcctaacgaaaggattattggtgaggcaaaagaggaaaatgatagttacacgtggctggaagaaattgagatgccagagaactctgaaatgaatggtgttgagtacctgggtccaacaccctcttagtgtatgtttgggaatcacttgaatccaactccgatggtctttcaatgaaagctacaatatggttgctttgaaatttttacattggaacgtgtaatttctgggtgattttaatgctaattcaaacacacccttagtagtaacatcttaccgtgtactactaacgctacggatcatacacagaatctcccgtcgctttccctttttgtccacattcaatgaatgcgtgctgcacgtgttggcttttgttcttttatgttgaaaatgtacctataattcgcacatttttgctatagttggtatttataacatcatgggacttgttgtcatgtataggaaaactatgggcttgaggtggttcagctgtcaataagttgggagtttatgattcatcctttccggcttcttttgttactttttttttttttttttgcaaagggtccacagtggtaactttattgaacaagtggtgaacaaggttgactcacttgttatggagagaaagccatccatgacttgttatggggagaaagacatccatgacaggcaatacttttatgtttgtgggaaaataaatagataataaatattagagtgaattgcactttagattctttaatattgaacacgtctttattttttagtaaattacacctcaaccatgaggtttgtcctaattacattcgatatttttttttattttgaatcgtacaaaaaaaatcttttaatttctggatatttgttacaattt

SEQ ID NO: 115655 - DNA, 982 bp, Glycine max
  Clone ID: PAT_MRT3847_75447C.1
aatttatttttcatcctagacttcttatcctcatgcacttttgcactcttatttatcgctaaatatcaatatcaattatcttcctctttaagtcaaaccataactattccatttctttccacccccacagtttttctgaattctgggtgttgagtttccttttcttcattttttttccctcccttggatgtgttgttattttcaatccaaaaggccatgcaaaactatttggtcttgtgataactttgtgttggtgtgaggcttgttattgttcatagaagagagtttgttttgttattggtgtaagtgtgtcggtggaaatggaggcaacaagtttggtggagaggggtagagagagagttggacatgttaacaaggttagttatgtgagaagggtcattgcaaagaagaagaaacaactttatcgaaggcttagaaggcctgagttgagtgtttcaaagactcttcagcagttatttgattcatgcagagaagttttcaaaggccctggcactgttccttcaccacaagatgttcagagattgaggcacatactcaataacatgaagccagaagatgtgggactaagtagagatttgcagttcttcaagtctgggaatatggtgaaagagaaacaaagggtcacttatacaaccgtgtacaagtgtaacaatttctcactctgcatctttttcatacctgaaggaggagtcattcctctccacaaccacccagacatgactgttttcagcaaacttctattaggactaatgcacattaagtcctatgattgggttgtccatgaggcctctgatgacaattcaaagcaaattcgatctcaattgataatggcatgcataactaatgatacggagcatatagacagaatctccctgtgtcaatattcaaggaatgagtgttgcacgtgttggcttttgttcttttacgttgaaaatgtacctatgattcgctcatttttgct

SEQ ID NO: 115656 - DNA, 2940 bp, Glycine max
  Clone ID: PAT_MRT3847_75448C.1
atgggtggtggaggtggtggtggtagcaagatgtggcacaaaaaatggtgggagaagatctcagggcagggttgcaaaatccaccaacagtactaccagtatattggctccaagaaagttaagagagcgttgtggaggaagcttttgctgacatgggtagtgggttggttcatagtatctttgcggatcttctgctacatgagctcgcaaggtactgagaagaggaaagaaactcttgcaagcatgtgtgatgaaagggctaggatgctgcaggatcagtttaatgtcagtatgaaccatatccaagccatgtccattctaatctccactttccaccatgctaagagcccctcagccatcgatcagaaaacttttgcaaagtacacagaaagaacagcttttgagagacctcttacaagtggtgttgcgtatgctgtaagggtgctccattctgaaagggaacaatttgaaaagcagcaaggttggactatcaagaggatggatactctagagcagaacccggttcataaggacgattatgccccagaggcactggagccatcccctgttcaggaagaatatgctcctgtcatctttgcacaggatacaattgcacacgtgatttctgttaatgtgctttctggaaaggaagaccgtgaaaatgtgctgcgtgcaagagaatcaggcaaaggggttttaactgcgccctttaggctgctcaaaacaaatcgactaggggttatcctgacctttgctgtttacaagagagatctcccatcaaatacaaccccaaatgaaaggattcaagcaactgacgggtatcttgggggagtctttgatgttgagtcattagtggagaaattacttcagcaacttgctagcaagcaaactgtaattgttcatgtatatgatactacaaatcgtactcatccaattgccatgtatggctcaaatgaatcaggggattttttctatcacgtcagcactcttaactttggagacccttttaggaagcatgagatgcactgcaggttcaagcagaagccaccatggccatgggtggcaataactacttctattggtatccttgttattgcactccttgttggatatattttccatgccactgtgaatcgaattgccaaagtagaagatgattaccgtgagatgatggaacttaaaaaacgagctgaggcggctgatgttgcaaaatcccagtttcttgctactgtttcccatgagatcagaacaccaatgaatggtgttttggggatgttgcatatgcttatggacacagatctagatgtaacccaacaggaatatgtcaggacagcacaggaaagtggaaaagctctggtgtcacttataaatgaggttttggatcaggctaagattgagtttggtaagctagagcttgaggctgtgctcttcgacatacgggcaattttggatgatgtattgtctctattttctgagaagtctcaaggaaaaagagtagagttggcagtttatgtgtcagatcatgttcctgaattacttataggtgatccaggaagatttcgacaaataattaccaatctcatgggtaactcaattaagttcacggacaaaggacatatttttgtcacaatccatcttgttgaggaggttgtccgttcaatagaggttgacaaagaatccaactcagaaaataccttgagtggttcgcccgttgctgatagtcgccggagctgggaaggattcaaggctttcagtcaagagggacctcttggttccttctcatccccctccaatgatcttgtcaatttgattgtatctgttgaagatacaggtgaaggtattcctcttgaatctcagccactcatcttcaccccattcatgcaggtaggttcatccatctcccgaaagcatggaggaacaggcattggcctaagcattagcaaatgtttggttggcctcatgaatggggaaattggatttgtgagcatacccaagattgggtccacattcacttttactgctgtattcaccaatggacaccgtagttcaagtgagtgtaaaattcagcaaatcaacaaccaacctcagtctgcatcttcagaatttgaggggatgactgcattaattattgacccaagatctgttagagcagaagtgtctggatatcacatccaacggcttggcattcatgttgaaatggtttcagatttaaaacaaggtttgtcaaccataagcaatgggaatgtagttgttaatatggtcctgattgagcaggaggtttgggatagagatttaggcttgtcatctcactttgtcaataacacgaggagaattgatcatggggttcctccaaagctgttcattcttgttaattctagtagttcttttaaagctagcgtaaacttgggtgttcataatcctactgtgatcaccaaacctctgagagcaagtatgcttgctgcctcactacaacgagccatgggtgtccaaaacaagggagctcctcatagagagctccaaagtttgtctcttcgccatcttcttcgtggcaggaaaattctaattgtagacgacaatggtgtgaaccgtgcagtagcagctggtgcattgaaaaagtatggagcagatgtggtttgtgttagcagtggaaaagatgccatctcttccttgaagccaccccatcagtttgatgcctgtttcatggatattcaaatgccagaaatggatggggagatggaagatagtgtgaacagagaagtatctatggatgactttgagaatattacaaactggcatgtacccattttagccatgaccgcagatgtgatacaggctacacacgaggaatgcctaaggtgtggcatggatggatatgtttcaaaaccatttgaagctgaacagctgtatagagaagtctcacggtttttccagtcatcttga

SEQ ID NO: 115657 - DNA, 4063 bp, Glycine max
  Clone ID: PAT_MRT3847_75449C.1
ataaaatatttttattttttttttttttttttatttcccccattggcttgggggaatttaaaagtggatttataacttcaaagcttctaattatcacaaggggggagccaataatttttcactcttctcacattaatagatttcatgaatcttctctgaaaatttgaatacacggattagttacttagttgtacttcaaacctttatatcaccaaaatggaataatttttttttttttatttgagtcaaaggaaatccagaattggaaatataaaaatcggccaaaaaatggtggatcactcacactacagtataatgtatcagttacatgtttgcaagccgaattccagcactgttaagaacaaaaggaagcaagcttgctgtgatacatcgaatcaccatctttattgtgagtcatatacaaagattgatgatgggtacttgcttccttcctcccctttgatgccaagaagctaattttcttcctttcacctgaatcaagcccttgtgatacatgcatcaatacacataaaaatgtaacgcgcctaggctagattactataagttgtattattacatacacaaggatgagactccagaacctgtattataatacaccctaatcttctaatcagcctcaatcatttcggctgactttacaaggaagaagaattaatgggttttggtacccttaacaaccaattacaactcaattgcaaccaatcaaacttggctcctatgtacactccctgccacaaaaacaatgttttaaaacaggaacccttcacacacagcagaaaagacaacaaaataggtcaaaaaggtagaatgaaccatttctgaacttctacaatattatccccctttgttccattttcttttatctttcagatgagatagatagcattcttctgtctctagtgaacaaccaccaagctttgaggtggttaaatactaaaacatgcactggctgttaaatagggaacttactctcaggagacttcggaacctatttgcccacttcggagtgtcctggattacggacagctacgcttccattatcaaatattctggtttaactcggcaccgtattttcttttcaagatgactggaaaaaccgtgagacttctctatacagctgttcagcttcaaatggttttgaaacatatccatccatgccacaccttaggcattcctcgtgtgtagcctgtatcacatctgcggtcatggctaaaatgggtacatgccagtttgtaatattctcaaagtcatccatagatacttctctgttcacactatcttccatctccctaattcgctttgtagcttcaaatccatccatttctggcatttgaatatccatgaaacaggcatcaaactgatggggtggcttcaaggaagagatggcatcttttccactgctaacacaaaccacatctgctccatactttttcaatgcaccagctgctactgcacggttcacaccattgtcgtctacaattagaattttcctgccacgaagaagatggcgaagagacaaactttggagctctctatgaggagctcccttgttttggacacccatggctcgttgtagtgaggcagcaagcatacttgctctcagaggtttggtgatcacagtaggattatgaacacccaagtttacgctagctttaaaagaactactagaattaacaagaatgaacagctttggaggaaccccatgatcaattctcctcgtgttattgacaaagtgagatgacaagcctaaatctctatcccaaacctcctgctcaatcaggaccatattaacaactacattcccattgcttatggttgacaaaccttgttttaaatctgaaaccatttcaacatgaatgccaagccgttggatgtgatatccagacacttctgctctaacagatcttgggtcaataattaatgcagtcatcccctcaaattctgaagatgcagactgaggttggttgttgatttgctgaattttacactcacttgaactacggtgtccattggtgaatacagcagtaaaagtgaatgtggacccaatcttgggtatgctcacaaatccaatttccccattcatgaggccaaccaaacatttgctaatgcttaggccaatgcctgttcctccatgctttcgggagatggatgaacctacctgcatgaatggggtgaagatgagtggctgagattcaagaggaataccttcacctgtatcttcaacagatacaatcaaattgacaagatcattggagggggatgagaaggaaccaagaggtccctcttgactgaaagccttgaatccttcccagctccggcgactatcagcaacgggcgaaccactcaaggtattttctgagttggattctttgtcaacctctattgaacggacaacctcctcaacaagatggattgtgacaaaaatatgtcctttgtccgtgaacttaattgagttacccatgagattggtaattatttgtcgaaatcttcctggatcacctataagtaattcaggaacatgatctgacacataaactgccaactctactctttttccttgagacttctcagaaaatagagacaatacatcatccaaaattgcccgtatgtcgaagagcacagcctcaagctctagcttaccaaactcaatcttagcctgatccaaaacctcatttataagtgacaccagagcttttccactttcctgtgctgtcctgacatattcctgttgggttacatctagatctgtgtccataagcatatgcaacatccccaaaacaccattcattggtgttctgatctcatgggaaacagtagcaagaaactgggattttgcaacatcagccgccccagctcgttttttaagttccatcatctcacggtaatcatcttctactttggcaattcgattcacagtggcatggaaaatatatccaacaaggagtgcaataacaaggataccaatagaagtagttattgccacccatggccatggtggcttctgcttgaacctgcagtgcatctcatgcttcctaaaagggtctccaaagttaagagtgctgacgtgatagaaaaaatcccctgattcatttgagccatacatggcaattggatgagtacgatttgtagtatcatatacatgaacaattacagtttgcttgctagcaagttgctgaagtaatttctccactaatgactcaacatcaaagactcccccaagatacccgtcagttgcttgaatcctttcatttggggttgtatttgatgggagatctctcttgtaaacagcaaaggtcaggataacccctagtcgatttgttttgagcagcctaaagggcgcagttaaaacccctttgcctgattctcttgcacgcagcacattttcacggtcttcctttccagaaagcacattaacagaaatcacgtgtgcaattgtatcctgtgcaaagatgacaggagcatattcttcctgaacaggggatggctccagtgcctctggggcataatcgtccttatgaaccgggttctgctctagagtatccatcctcttgatagtccaaccttgctgcttttcaaattgttccctttcagaatggagcacccttacagcatacgcaacaccacttgtaagaggtctctcaaaagctgttctttctgtgtactttgcaaaagttttctgatcgatggctgaggggctcttagcatggtggaaagtggagattagaatggacatggcttggatatggttcatactgacattaaactgatcctgcagcatcctagccctttcatcacacatgcttgcaagagtttctttcctcttctcagtaccttgcgagctcatgtagcagaagatccgcaaagatactatgaaccaacccactacccatgtcagcaaaagcttcctccacaacgctctcttaactttcttggagccaatatactggtagtactgttggtggattttgcaaccctgccctgagatcttctcccaccattttttgtgccacatcttgctaccaccaccacctccaccacccat

SEQ ID NO: 115658 - DNA, 486 bp, Glycine max
  Clone ID: PAT_MRT3847_7544C.1
acgcgtgcgtgcgctcggaagccgggtcgagcgatcgtgccttagacgttagcgtccgcataaccacatatcgcgtctgttcatgcatttatttacggatttctcttaccaaattaacggatcctgaaagattatttttcctccagaagaagaaaaacaattaattccgaactaggaattcgaacttatcaaacaatcacgaaactaacgcgtggctgataattatcgatcaccgaaatgcatacaaataatcagaaaagggaaaatacgaaacgaagatctcaaagagagagagagagagatgatgaaagagcttaccagcagcagcgtgttccttgccgttgacggagccggtgctattacggcgttgttgggaaggctttgacttgacgtgtggtttgagagaggttctggcatttctgtaactgttaccaccctgagaggtggccattgttttcaagataagaagagcgtttgttgtatttt

SEQ ID NO: 115659 - DNA, 291 bp, Glycine max
  Clone ID: PAT_MRT3847_75450C.1
cgtcttttgaatttctcccatggcctaatcctctcaacactcttcatccactactctctagctgatgttggcactgctgcccaatatggccctccctttttgccgaccacatgtttcggcagagacgcatcgcagtttccgtcaagtaacatgtttgctgcggccggggagggtatatgggacaatggtgccgcgtgtgggaggcagtatcaggtgcgctgcatcagcgctgcggcacccaggacttgtgttcctggccagacgcttcagatcaagattgttgatcgagcg

SEQ ID NO: 115660 - DNA, 253 bp, Glycine max
  unsure (1)..(253): unsure at all n locations
  Clone ID: PAT_MRT3847_75451C.1
tgtttatgtggttgnatggtggtagaagatgaccccagggggttgagaaaatttnagggtgttggtgggtatataagaggttaaggtgaggtaaagtttgagangggtgaagaagggaaggtaggagaattagaantagtggggaagaagtgtaagagggaggaggaatgggtgnaggttaagaagtaagaatatgangtagttaagaagaagagagttgagagttgtaaatgtagtgataatgaggatgaag

SEQ ID NO: 115661 - DNA, 190 bp, Glycine max
  Clone ID: PAT_MRT3847_75452C.1
caagaaaaaaaaaagccatggatttacgattatccacacttattttcataacaaagctttatataaagaaaaaaacactcctcaaatctctgggtgaaatgcaaaaattcccaatcactagagatggttagaaacattagttttacccgaatcgataataatctcaaattccagtggttgcccccatata

SEQ ID NO: 115662 - DNA, 472 bp, Glycine max
  Clone ID: PAT_MRT3847_75453C.1
tgcttattgatcactttcctctttcatgcctttatctttgttgccttttgctctgttgtttcattacctgatcttcagttcctgcacccttttcattcttccacttccttcatttcttctcttcttcagatcaagattctctacagttaaaatgtaaggagtggaggaaaaggcaaataagaaagataacagatcgagtttttgaccgagtaaagaatccagcacaaaataatttgagatttggagatctgtatattgctattttacttgtgtacaatgatatcaacaagtatattcccggcccccattttgatcctccgtcaaaagacagaataaaacaagtcatcacggtaatttaatgtgtcataatgggatcaaactaagtattctatctacttaaaagtatgaaaattttacactggaaataaatctatgcaatagtgttttctgttttaaccttgtaatacactat

SEQ ID NO: 115663 - DNA, 451 bp, Glycine max
  Clone ID: PAT_MRT3847_75454C.1
gttttgaattcccgctgagaggacgcgtccgacagttcctcccaccatttacttcaatgttcttcgaacatccagccgcgcaagcctacagactacttctagcgcttgcggcgagcgtcttacaacaaccaattgcccaattgcaacaacaatccttggcacatctaaacctacaaaccatcgcaacgcaacagcaacaacagtttctgccatcactgagccacctagccgtggtgaaccctgtcgcctacttgcaacagcagctacttgcatccaacccacttgctctggcgaacgtagctgcataccatctacaacaacgtctgcaacagtttatgccagcgctcattcaactagccatggtgaaccctgtcacctacctacaacagcaacaattgctttcatctaacccgctcgctgtggacaatgcacctacttacctacaacaaca

SEQ ID NO: 115664 - DNA, 680 bp, Glycine max
  Clone ID: PAT_MRT3847_75455C.1
aaggggccaagggaccaagaaagtggaaacatgcacaaagtgatggtttctttgttcaatttgagtctccttccctccgcgcgtccgggtttataccaagttcgaatgaaaaggggcagacattatgcagggatccagaggttttggacattggtgctcatgaagttcttccccggttattaaaagaaaatctgccccattcttagtgtactacttcattagtacgtggtgtatttcttaaggtaaaaatgtcaggctcacacgaaggtttgcatgttcaacgaatacagacgcaatatggtgccgatgttttgtcgtcttaggatgtgaaaaatgctggcaaaaaggatgtgtgcttcataattttgttagatccgtatatttatttattaaattattttaaatcatccaagccatcgaggagttgcattttggtattattttattgtgtttgctcttctgttcttgaggtttggagaccttggcctttagtttgtttatttgagatgtgacacttttatgttgccaaggcaaagtattcaagtagttagcatagatattttatctgttttttttgtggttcagatatgaatattgaatttggctgttaatgttcattttgatcaatttatttttgtaaaaaaaaaaaaaaaagggcgggcgctctaaagggatcaagc

SEQ ID NO: 115665 - DNA, 1719 bp, Glycine max
  Clone ID: PAT_MRT3847_75456C.1
cggaggctcgagaggctcgaggatcttcactcttaactgtagaaaagaaaaaccgaagatgagcttgttgaatgaggagagaaaaccgcacgctgtggttactccatatccagttcaaggacatgtgaaccctttgtttaaactagcgaagctgcttcatctcagaggctttcacataacctttgttcacactgagtacaactacaagcgtttgctcaagtcaaggggtcctaatgcccttgatggcctaccagattttagatttgagagcatcccagatggtcttccgccattggatgatgataatgttactcagcacgttccctctctctgtgactctatcagaaaaaacttcctcaaacccttttgcaaacttgttcatagacttaaccactcttctgccactgagggtctcatacccccagttacttgtttggtctctgacggttgcatgccttttactatacaagctgctcaagagcttggactccctaactttatcttttcgcctgctagtgcctgttctttcttgggtatcatgaactatcccactctggttgataaaggtcttataccactcaaagatgagagttatctgacaaatgggtatttggactccaaagtggactggattcctggaatgaagaacttccggctgaaggacatacctgacttcataaggacaacggatctaaatgatgtgatgttgcaatttttcattgaagttgcaaatagaattcaaagaaacactactattcttttcaacacttttgatggacttgagagtgatgtaatgaatgctctatcctctatgttcccttctctttatcccattggtcctttccctttacttttaaatcaaagtccacaaagccacttgacatctttaggttccaatctttggaatgaagatctagagtgtcttgaatggctagaatctaaggaatctcgatccgttgtttatgtgaattttggcagcatcactgttatgtctgcagaacaactcttggagtttgcttggggtttggccaatagcaagaaaccctttttgtggatcattaggcctgaccttgtcattggtggatccgtgattttgtcgtctgagtttgtcagtgaaacaagagacagaagcctaatagcaagttggtgtccacaggaacaagtgctaaaccatccttcaattggtgtattcttgactcattgtggatggaactcaactactgaaagtgtttgtgctggagtgccaatgttgtgttggccattttttgcagaacagccaacaaactgtagatacatttgcaatgagtgggaaattgggatggaaattgataccagtgcgaagagagaggaggtggagaagctagtgaatgaattgatggtgggagagaagggaaagaagatgagagaaaaggtcatggagttaaagaggaaggcagaggaggtcaccaagcctggtggttgttcatacatgaacttggacaaagtaattaaggaggtgttgcttaattagacactgttagattgaagggttttctttttttctttttcttaatgctttaatttatcatgatagttcattgatcttctctagaattttctgcattgtagaaatggtgccctggaagtgccactttgtgttttgtttattgtggtatgtaatatcttagtcttgatatttcaaattttgattatttcccgtcaaaaaaaaaaaaaaaaaaa

SEQ ID NO: 115666 - DNA, 593 bp, Glycine max
  Clone ID: PAT_MRT3847_75457C.1
ggctcgagtgtgttcaaggaaagaatactgttttttactttgaagtgccaaaagggcatcatcttgctttggatcccctgttcatatgtgacactgtactttgtgtgatatatttaaaatgtctctgtagcaaaggacggaagaatattaggcatgatgagtgatgactggagtaggtaggatctgaattgttttttctttttcttttaaaggcatcctacatgccacatcatttcctttttgcttgagtttacaagttattagttctgctatcaatattcatttttgcgtgtttgtactgacatgtgatgctcttctaaaaatatgcagaaatggccttagggaacgacgcagaagcagaagttgattttgagagtttggtattgggtatctgtgattgttaagagaatagtgagattttgttaatttagtggtgctttgactgaagtatgagtctgttttgttgggcaaggccctgagtttctactcttggattgtattcgttagtttctttatgtaaaaggttgtgtttaatttatctccagaatagatgtacccccattgaaggtaatgatcttgttaaggttgttccc

SEQ ID NO: 115667 - DNA, 486 bp, Glycine max
  Clone ID: PAT_MRT3847_75458C.1
ctctaaagccttgtcgcgcttggcgattcgggctttcggcgggccggtgatcggtgcagtttctgcagttggtaccagccccctaactgcagaaactgcagcgtcaaaaccggccatcgatgcagtttctgcagcgtcacggtgcagtttctgcagcgtccttttttttctggcttccagcttttccggcggcatcggtgcaggagcggaggcctgttcaatcgcgcgctcggcgtcacggacggtggtgaaggcttcccaatcgcgagaggccacttcggccgcgatgttcttcttcggctgctcgaacaccggcaggtcagtgaagcggtacaggttgcagaccttcgagccacgctcgacgcccacggtgcgccgcgtggcgcgaagaaaaccggccgcttcgagctggcgcagggcctttgcgagagtcgtcgagctgctccagccgcgatgcttgagctgggaaagcgccgcgctgatgtc

SEQ ID NO: 115668 - DNA, 623 bp, Glycine max
  Clone ID: PAT_MRT3847_75459C.1
ccacgcgtccggcaacccaaaatgggactctcctcgtaatgtgtcatgcaattgcaatcacagcatctgaaagctgaaacctactcaaccaaaaaatgatgcttaccttgcttaagcaaagatctctgatttcaacactagccccttcttttccattcatcaccacccaaacccatttctcttctttactgcaacaacaacaacaacacaaaccatccattttcctcaaccccttttcttccaaatccaaatccaaatcccaaaccaaaaatcctaacttcaccctctcctacctcatcaacacctgcaacctgtcccccgcgtgggccctcaagctctctaaaagggtccacctcaaatcccccgatcagcctaacgccgtccttaacctcctcaaaaccttcggattctccgaactccagttgtccctccttgtcaaacgcttccccatagtcctcaagatcaaacccgaaaagaccattctgcccaagctccagttcttcctctccatcggcctctccacctccgacctccccaaactcctcatcggaaactccgtcctcttggaaggcagcctcaagtactgccctgttccgcgctacaacatcctcagcactgtcctc

SEQ ID NO: 115669 - DNA, 268 bp, Glycine max
  Clone ID: PAT_MRT3847_7545C.1
ctttcacacaaccaaagcaaacaacaattctttcaagactctaatttccgcacattacaattccatccaactataattctcccctaatttccaaattattctctctaatacaactcctcaattccttaaaataaatcccataagaaacgttcctttcattgaaactcccaattttccagtcttttataccaattccattgctcgttacgattctcgactcaagatttacaactctttggtctcatcttcttccattgataattcccac

SEQ ID NO: 115670 - DNA, 482 bp, Glycine max
  Clone ID: PAT_MRT3847_75460C.1
gcacgagttttggaagattcttgtttaatgaaaaagcatgaggagtcaagttcatattcatctagactgtcaaggaggggaaaaaggcatatttgcaatggtaaggaaaacactactgtggctagaccttctcgtaaaggaagaagacttgcgagtgatcttgttgacaaagtagtgttgggtccttcgattttggatttaattacagatgaccacctttttagaatggatagccaacaaactgatgccgaagctacctctagcctttctgttggtgtcaataataacattattctacaaaatagtgaaggacctaacgcaggattaagtaatcaaagtagaactatcattggtggttcaaatgatattgaacagatcaaagattcaagtcatatatctaaacctagaaattcaacttcatttattgaagatcccctacctgtgccacaaacatcaattgatttatgttccagtgatgatga

SEQ ID NO: 115671 - DNA, 390 bp, Glycine max
  Clone ID: PAT_MRT3847_75461C.1
caaactcttatgcctttcttgacggctttgatgcaaagttcaacgacttgcagagtgcctctggcgcaacttcggttagcgacgaggccctcgcagcgggacaactttagcactatcgctgtcgcgaaatccaccaagggggcgaagaagcaagctgagttggtggatggtggctgtggttcacgactgatgaggtcttctaggcctaagcaattgggtaggcgtaaggtgcgatcattgaggttaacgggggcactgggttgggaaaacatggggtgtggcatcactaccgggcgtgggacggcgttctgagcgtgtacactcttgtagcaacagtttcgtttagacttggtaacctttctggatattgtttccttgatcggacatatg

SEQ ID NO: 115672 - DNA, 227 bp, Glycine max
  Clone ID: PAT_MRT3847_75462C.1
cgacgctatctaggaaaaaattggcgacaccagcaatttcacgccgtttaattcgcgcaacccaatgcgttcttggagagcattcaacgagcgcggcaaaagcaggggcatacaactgtctaaaaccaaagtcataaacaattcataaacgaaacaaacaaacaaggcaggggttgacagttccattcccctaggggccaaaatgcgcggaaacttggctcactttg

SEQ ID NO: 115673 - DNA, 400 bp, Glycine max
  Clone ID: PAT_MRT3847_75463C.1
gagaaatataagattttttatatggatggtttgaaatttctaatgtcattgaacaactcttgatttcatagggtgatatcgtggaccccacatatgagcatgaatgtgaaacaaaatcctaattaacacccattttgtctaataacaaacaaaacaagtagcccacaccacacacattttttcccagagattctgagaatcacatacatgaaactattttgaagcaggggggcccttttataggccttttacaaacacataaatcttagaaaaactatgggggacacaaaatcttgaaaactattttgaaacaaaaaggctttcatagagacccttgaaaaaagagaaaacaggatccttttggggcagactctttttgacatttggatggttcaaaaat

SEQ ID NO: 115674 - DNA, 175 bp, Glycine max
  Clone ID: PAT_MRT3847_75464C.1
cgccacgcgtccgatgatcatgagcgagaagagaaggaagaagaagaagaagaagacgaagaagacggggaagttggtggagtgagagtggagagtgtacaaaaggaaaacgccgcggccgatcgccgagattgtgggtgatttttcaggggtttctacttccaatgaagatgat

SEQ ID NO: 115675 - DNA, 273 bp, Glycine max
  Clone ID: PAT_MRT3847_75465C.1
gcaacagaatggggcgataccctgattaaacttgttcctccggtccgctttcgcttcaaacactcctctgctctttcaaaaaccatttgtttacaggtatattcgacagaagcatctcctggcatagagagagttacacatgaagtcctgatagaatttctagccactgctgtaaatgtcaccaacattcaatgtaatagtctaatacggatatatcgataatatatgccaagctggatatctttcagttgccagtcaaatgctagaagtttt

SEQ ID NO: 115676 - DNA, 160 bp, Glycine max
  Clone ID: PAT_MRT3847_75466C.1
aaaaatattccctgtttttttcctttgttcatggccaattaaccttttctttttgggcaaggcccaaaaaactaaaccccattgaacctcaaagtttgaattcagagggaccaaaaaagtcaagcaggcacaaaaaatttctgttgttttgttgcaaaga

SEQ ID NO: 115677 - DNA, 508 bp, Glycine max
  Clone ID: PAT_MRT3847_75467C.1
ggtctttctgattgtccctgacataatcataagagatatgagtatgggcatgatagttcccagaactaaactatttgattgaagatatgagcttttgtgggcttatcagaagcaaggaaactgatttatgatatttacacatgaccatggttaccaactttgctgaattatgtattagaaattagatcatgcatttctgattgtggatcttttgcagtagtatgcaatccagacttccaaatgcaacctatcctcttagaagtaaaataagagggagactgaagcttgcattgatggtttgacgtgtataacttagttaataagttgctaatctctttattcaaatgggtgtctaactgtctattgtataaaatggttgcttcataagtacacccattattttcttttgcggctctcgtgtctgtggactagattatcagatgcatatctgtattcaaaccttcagcacatccttatatgatttattaattattatggccatttactc

SEQ ID NO: 115678 - DNA, 471 bp, Glycine max
  Clone ID: PAT_MRT3847_75468C.1
aagacgacagaagggctctataatataacctttgcaatttggttgaaagaaattctacttcaataccacttgtgaggttgctgataattttggagtgcgtatatttaagtaagtttcaattactagaaaaattaaaaagattgtacaatgaatttgagggtttgatgtgttgtgtattctagtgatcccatttaacaacaacaatgatgtgctgcatttcattatttagttttatttgtacattttggcatttaggacttagtcttaactcattttctctatttttctatcttttgtagaattggttgcgctctgggtgttattgtgtttttaggtaccaattttagagttggaggatactcttcgtaccttagagagaatttggaaacttgagaagtatcagaatcatgagatatatcgttcacaactgtgaccatcagatttggagcatgttttggaacaagaagaatg

SEQ ID NO: 115679 - DNA, 590 bp, Glycine max
  Clone ID: PAT_MRT3847_75469C.1
ccacgcgtccgaaacgatccaaactcttttttaatgggcactttcaaaatgagatgctaacttcgcagggctcggaacctgtatcttctaggtttttgaaggcgcctgtgcatactgccgctacagccaactctgccggccggtttatatgccatctctttcatgctcaccctacagctgactatcacatggaaatgcctgccgatagcccacggcttgagactctacaacgagacaatcggggcttcatcactcatcctaacgatggtgccaccacgataacggcggtggcatgaaacctgtatataggcgtgggtgaaatctgaacgtcgtatggactcacgcagacccatacaaaacttcctacgctgactatagcggcgttctgaaggacccattagcaaagtggctcccggacctctgtaaaaaactgaaccctgcttatgcagagctccagactgagatagaagccattctgaaccgcttgaacgtggctttacagatgaatgataacatactaatcgtggagaagacagtgactctgcggtcatcatggtggaaaatggagttaaacccaatcaccctgacta

SEQ ID NO: 115680 - DNA, 209 bp, Glycine max
  Clone ID: PAT_MRT3847_7546C.1
gatacagaagtggtgttgatgatcgcgttaaatatgcaaactgtaacaaaaattacggaccttgatttcatcgatagccacaatttaggcagtcatggcaacaccactgcgtacgaggaagttcactcctccgacattgacactagaatatgatacctcttatctggatgagaatcgcttaacatgatggcttgctgtgcacacacaca

SEQ ID NO: 115681 - DNA, 118 bp, Glycine max
  Clone ID: PAT_MRT3847_75470C.1
ggagacaatggttcaccgacttggttcccttcagtgcggccgctctacaggatcaatacttacgtaagcgtgcgcgtgacttcatagctcttccatctcgtcacgtggcttcaagggc

SEQ ID NO: 115682 - DNA, 375 bp, Glycine max
  Clone ID: PAT_MRT3847_75471C.1
ataatgtctgctttattattattattactgatcacacatgatggaatattcaacaactcacgaaaatgagcagaaccagaggaagggatgacacaacatgaaaacatggaaaaaaaccgagatctgcatgcggggggggaatcccatgattgcataagccacatcacaggaatcacaaagatcagttttagctaaccgaatgcaagtctaaaaccgtgcatggaacacaaaacgaaactgagcatatttcaaaacacataaatactacaacgtttatctgacacgccgtagacataaacacaaactgaaaccaagttcttgtctgaaggtaacagaatgcactataccataacggctgctcgctgggcataggcc

SEQ ID NO: 115683 - DNA, 187 bp, Glycine max
  Clone ID: PAT_MRT3847_75472C.1
ggaaacagaaactgaattacaatatgaattgaatgaagatgagggtaaggttcgatagtggtaagaacatgtggaggaaagggaaacagaaacaggagcagaagcgcaacctgaagagaagaaagatgagggtatggttcgggacagtgaaaaactcgtgtaggaaacgcaaacggatacagaagga

SEQ ID NO: 115684 - DNA, 342 bp, Glycine max
  Clone ID: PAT_MRT3847_75473C.1
cttcatgaacgagggcaaattgattgatcttctcaacggctctgattacgtaccaacctgtgaagacaaagatggtgattggatgctcgtgggtgacgtaccttgggaaatactcgtggaatcatgcaagcgcctgcgtataatgaaaggatctgcggcaatcgggctagcaccaagagcagtgcaaaagtgcaagaacagaagctagaggcaaatttgtaagttccagtttcgaccacaatctcctcgatctgttgctcttgggcgtccatgggaagcattaatgctaatataggagccaagttatataatatgtcggtaccattttttggaaataatttt

SEQ ID NO: 115685 - DNA, 705 bp, Glycine max
  Clone ID: PAT_MRT3847_75474C.1
ttttcaggtttgcacgtgttggatcagtggttttagcacttcatgatgctagcgatgtgtttctagagatagggaaaatgtccaaatacagtggtgctgaaacaatggctagctttgcttttattctatttgttttatcttggatcatattgcgcctcatttactacccattctggattctttggagtacaagctatgaagttctgctcactttggataaggaaaagcaccgagtggatggtccaatatattattatgtgttcaatagtcttctgtactgcttgcttgttatgcatatttattggtgggtgttgatatatcggatgcttgttaaacaaatccaagcaagaggaaaagttagtgaagatgttcgatctgattcagaagatgaagatgcacatgaacatgaagattgagtacggaagcaaaagcataatatattctttaggcaaagatgatttggttagcttcaatcgttttctgtgcctttggccacaaagctaatattttcaaatcttaatcaaattgagaggattgtatttatacggattcgagtacagacttcggagctggtataaaatgacaacagatgaatagaattttgattcttctaaactatgggactagcacctcctgaagtttaggtgtacttcctgacatttggtgaagatattttgactttcttgattatttgtccatcgatca

SEQ ID NO: 115686 - DNA, 1763 bp, Glycine max
  Clone ID: PAT_MRT3847_75475C.1
ccacgcgtccggtgaaacacacaggtggagtggcgagcggaatttgatatgttataaaaaaatactatcaggaaaggggtgtcgtttcgattcgatcaactcactcacgcgcacgcctttcattccattccgatgcgatgacgacgatgagttccctctccctctctcttgactggcacaatgaatcctaccctgcctatcatgatttctaccttctccccattttcgctctcttcttcccctcccttcgcttctttctcgaccgattcatattcgagaaagtggctagacgattgatttttggaaaggggcatgcggcgctggactaccagactgacgagagaagaaaaaagattagcaaatttaaggaatcagcctggaaatgtgtttattatctttccgccgagattcttgctttgtctgtaacatacgatgaaccatggtttacagatactaagaacttttgggtgcctgggattcaggtctggctagatcaaaagattaaattgaaatttaaagtagtctatatgtacgctgctggattttactcatactccatttttgctttaatattttgggaaacgaggcgctccgattttggagtgtccatgagtcatcatgttgctactgtaattcttattgttttgtcttacatttttaggtttgctcgtgttggatcagttgttttagcacttcatgatgctagcgatgtgtttctagagatagggaaaatgtccaaatacagtggtgctgaaacaatggctagctttgcttttattctatttgttttatcttggatcatattgcgcctcatttactacccattctggattctttggagtacaagctatgaagttctgctcactttggataaggaaaagcaccgagtggatggtccaatatattattatgtgttcaatagtcttctgtactgcttgcttgttatgcatatttattggtgggtgttgatatatcggatgcttgttaaacaaatccaagcaagaggaaaagttagtgaagatgttcgatctgattcagaagatgaagatgcacatgaacatgaagattgagtacagaagcaaaagcataatatattctttaggagactggatacgatcccatttgttcaaaatggtatcatggtttgtcttacctaccccataaatgtctcgaatacacattgtgtgtgtccccaagaaaacaaaccaatgttaaatatccctaatagtaattaagtataggattaagtaaaaactagaagcttcttgttaaatttcttttgctactagttcaagctgacaagaacgataagaaatgctctttgtagatcaaattaagtttgcccgcttcactctcaatataaccgtatgtaatttgttgtgccagccaaaaaaaaaaaaaaattacgttatataaatgatatgatttggttagcttcaatcgttttctgtgcctttggccacaaagctaatttcaaatgttaatcaaattgagaggattatatttatacggatttgagtacagacttcggagctggtataaaatggcaacagatggagagaattttgattcttttaaactatgggtctatgctgcaactcctgaagtttaggtgtacttcctaacatttggttaagatattttgactttcttggttatttgccccttgttcgaattacaagttgtgtgtccgttaatgttttctgccatagatgttatccacttggttttgatttattgaagacgaaaattattggacttta

SEQ ID NO: 115687 - DNA, 240 bp, Glycine max
  Clone ID: PAT_MRT3847_75476C.1
ggctgccttcttccagcgtgtgatgctcacaacaggcaccttctactcggacaagggaatcattcttcaataactcgtgaccaacgcctgcgatgcttccaccaagattagacttgagagtttgacggacaagatcacacctcatgcgtaggctgagctgggcatttttattatgcgcgacaagacttactattcgctgaccattgatgaccgtggcagtgtcatgaccaaaagctgttt

SEQ ID NO: 115688 - DNA, 175 bp, Glycine max
  Clone ID: PAT_MRT3847_75477C.1
ttccccactccatacatctcaccaaaatggatcctccctttaccaatcccctgccaccccttctcctgccaaatcgaggcccatccaagtccggtccgcgagtccacgtttcattatagacgacagaagctaccacacctcccaaacaccaagcttgaggtctaattaccactac

SEQ ID NO: 115689 - DNA, 349 bp, Glycine max
  Clone ID: PAT_MRT3847_75478C.1
gcatatgatgtgtacagatagacaattccagatatagaggcaacataaaacatcgttgacaaaaaaagtccaagggagcacctgtgccaacacaataacatgctaatgtatcaacatacatacattgttattaaggttattggcctaacaaaatggtcttaaattttatataatgacaaacacatcattacagattatctctgctttacagttttattcctccctccagaaagtaaactactggcctatattttatgactcataagctttaaattattcattcttgattgggcatatcttataaagtaatatgaccaggaaaccatgtaagagatgtgatcttctaagt

SEQ ID NO: 115690 - DNA, 244 bp, Glycine max
  Clone ID: PAT_MRT3847_75479C.1
gcaaaaagaccattttcattatactccttatctttctcctccactggctgcacctcgctgtcgagtctttgactatcgtgaaatgggccatattttccatctgggtcctgagaattgcgattgtaaaccgagtttccccgactttgggcttggttcaaaaggttgcagaatgaaggatgggacaagcgaaaagcattgatcttgatgactaacaccaggtccccttgtgggtgctcttaccatg

SEQ ID NO: 115691 - DNA, 423 bp, Glycine max
  Clone ID: PAT_MRT3847_7547C.1
ctcacgctttagtttttatcttatcttatattaaacttaatcttatgctacaccaattgcatcattggtccatgtccaggtcaaggcacatttgacatgagccacttggtctgtgacacaaaatctgtcactttaggaaccaatcattgatcataaaacttcaacatttacataaccattaacattaatcactattgtaagtagttacatcaacatggaccacatggtagaccacaagagcgtcatacatgagatgctacatggtatacagctgggatggcagctgcaagtgcatctccacatgccattttagatgcaagatacacgtgacgtatcgatccagatgatgataccaacaatcgtataggcgctcgaaatggtgcaatggaaagggacagggccaggggctgagtcatcacaaca

SEQ ID NO: 115692 - DNA, 244 bp, Glycine max
  Clone ID: PAT_MRT3847_75480C.1
catggatatcacttacattcagttatgcttcctctccatcatcgtcattatcttcttcttctctacctttcgatcctttcactttcgcgtgaacgaaccattccactcgctcgcaaaacggcgtcgtgccgtcgcgttcgttcggttaaactcgcgtgttcagaatcctccggaatgacgctcttcgcccaattccctataattcacttctctactctctcacgctttctctggtcatctcctc

SEQ ID NO: 115693 - DNA, 359 bp, Glycine max
  Clone ID: PAT_MRT3847_75481C.1
ctttcttctttgctagaattaatacagtttcaccaatatcatgtttgagaaagagtagcggcctggtgagccctgtatatgaatgacatccactgaggaataatcagtcacctggagacattggagcatgccttagggctcatctaaggaatcgattctcacttgccttacacaacaaaaacagcttagacctaggagaccttgctgatgtaatatgtgattgctgacatcaccgctctattcacaacgggaacggattgacaacatctcacatacaaaaagggtgtgggcagaccaatgcaccaccatgaatggagcttactgccaaaagatctttctggagcccactgcgggacata

SEQ ID NO: 115694 - DNA, 817 bp, Glycine max
  Clone ID: PAT_MRT3847_75482C.1
tgcatgcctgcagatatgtataacatcatcatcatgacaatttgatagaatgaataaaaaaaagaggagaaaatatacatttgttctccttcaagagtaacaaaccttattgaagagaatgtccttattatttatgtgcatgatgccatcctttaatgtgcatttccacctgctcttggtacgtgccacctgaatttgtagcaagacaaccccattagagccacgatatttatccaaccctgaaccacgacctacatcatattactatatcacttgacatcgagttcacagaaagtggaggaaggttgttaccttatcaaactgggccaaaacaagatgatgtgtattttgatcgtctccttgttccatgtcatctaaatcatcatcatcctcttcatttaatggaggttcatcatcatcatcatcatcaaaatcattacctacttcattctgagccaagagagcaggagtgcttgctggtacttctaataattaataaagaaagaagattcagcaattgtgatggataaaatatataataagccaccaaaaatcttcaaaatataattaatatattcacattctcaatttaccaggaggagctggtgtattagaaatgttgtagtcttcactgaacacttctccataattgtatatctgccacaagatgaaataaacccagtaagatgatgggatgcaaaacatggtgggggaaagtgtcaaatggagcataatgcaattaaaactaaaaaactagcaacaccatagttaactagaattttacagtccaattttcttctctttttggctaaatgtt

SEQ ID NO: 115695 - DNA, 258 bp, Glycine max
  Clone ID: PAT_MRT3847_75483C.1
ggcctcacaagctctctctccctctcagccaatctgttctctctctcaaccactctcacgcacacgacgctagcgctctctctccctcccagtacactagctctctccgtagctctttccctctcagccactctcacgcaccacacgtagcgctttgtcacaacattagatgtcaattattcaagctcctcgacctttacacttgatggtgaatgtaaattaaggaatgaagaacattggtttttaatttcgttgagt

SEQ ID NO: 115696 - DNA, 112 bp, Glycine max
  unsure (1)..(112): unsure at all n locations
  Clone ID: PAT_MRT3847_75484C.1
ccgtggacgaaacagtgnaggagataatgnggctgcnccggttcgctaccggctcggccgggantcgaggatantggaggcgtcgatgnctctggtcganaacgtttngcgt

SEQ ID NO: 115697 - DNA, 486 bp, Glycine max
  Clone ID: PAT_MRT3847_75485C.1
aggttacccgatctaatgagaaaaggttcgaaaggcgccgtgcgttctgtcctttaccattttaaggcacaagcaagcagtccctctttattaggtaaataggactctttcaggcagtgattagattacgctttcccagcagtggttttccctagaatggaagggaagcttaaggaagattttgaccctgttcagctaaatacgtaagttatgcacgaaatcctccataggcgaagggccttaagcaaggaaatgagagttcggtccctggtactgtgcctataaagtcttcctaaggcaaggtctcaacgagccttcacttcgtacaccctgaaaacaaaacgaaatctccggactcagtcacatgcatgcaacctggcttgaaagccggccaactatccctcctaccggctagttcccttggtgaacgccttcttcttaaaagtagggctcctcgaacgctttgctcgtctttcccccacggaa

SEQ ID NO: 115698 - DNA, 992 bp, Glycine max
  Clone ID: PAT_MRT3847_75486C.1
attcccgggctcgaccccagagaacacaacacaacaaactaaaacacacaccctctaagttcattaacctcttcaacatcaaaacttgtaatattttaatggcaacacgcgtgatccctccaagaatcctcaagaatcttcgttacaacacaacaaccaagcccctcaacgccgcccaaccctccatctctccggccatcgcctcaccgtcgctcttcgagaggtcgccgtcccctcctgccgcggacgtcattccggcatctgcggctgggacggcagcgctcaacctggacgacgcggagcggctattcgcatcggtgtcgacaaagaggctgctccggtcgtccgcagttctgcacgcgacggcggtggggcccatggtggacctgggaatgtggatgatgaagtcgagggtgttccagagcggggtgctgaaggatctcgtcatggccgccacgaaagagacgttcttctcgcacttctgcgccggcgaggacgccgcctccgccggacggagcatccgcgcgctcaacgacgccggcttacgtggcatgctggggtatggtgtggaagacgcgcatgaaaacgatgggtgtgacagaaacctcaatgggttccttcacactgtggatgttagcaaatcgcttccaccatcctctggtagttttgacattgattacatcactgcaatatgccccatggcattccagtagaaagaatgagtgaccttcttaaatgaggacaaaaaaacatataggaatgttggctgcttcgggctttgacaggcaactgatgaggaaggagttgggaaggagactaaaagctgctgtcttttaattttttaaacttttatgggacgagttaatgagatgtaataatgtcttttaggcaacacaggattaggatactctttgtacaaatttagagaatcctgtaatctctttgaatgatgcattcaaatcaatgaaatgtgactgtggttaactcttccc

SEQ ID NO: 115699 - DNA, 1940 bp, Glycine max
  Clone ID: PAT_MRT3847_75487C.1
gtcaaggaccatgtttgactgcataattaacgaggaacagaacagaacagaacataactgcaaagtgtttgaactctgtttcaatgagatgcaactgggcgaactcttgtgttcgattcaatgcaactgtttgaactctgaatatctgtagattgtactgtagtgtgccaaatgaaaccagaatggtgacctgtgccgtgaaaggaggctgccccagtgactacatagccattgccctatccattctttccatcactgtgcttctcttatggtcaatttttcccttcctagttcacaaggttcctcgtaccaaaggcagtggcttttggttacctgtaattcaagttgttgccagcttcaaccttcttctatcaattgtgatgtcaaataatttcttgaaaatgggaaagagacattggttgcggtcatgctacctatggggagtctgggttgaaggtccactagggtttggtttgctgttgagctgtcgcataacacaagcttcacaattatattttatctttgtcaagaggcgcttaccattgataagatcatatatttttcttccacttattctacttccctggattgctgctggtggtgttatccattcaatgaagcctctaagcagtcgctgtcacatgaaagctcaatggaccatcccagttgtatgcctccattcattgtatattgccattttggttggggttacagctgcagttcatcacatagagttcaggtttgatgaactcaaagacctctggcggggaatacttgtatcagttgtgtccattgctgtgtgggttactgcttacatactaaatgaaatttatcaccaactctaatccatgagatattgtcataaatttctgcttttagttgtggctagcatacttgtggtggctttcttttcaatatcaagttcacaaccacttctctcacaaatcagcttgaggagaagagaatccagagaatttcgcacaatgagtcaggctctgggcatacctgatagtggggtattagcacaaagtgaaccaatttcaaggatagatcctaatgaaccgttggataagcttctcctgaataagagattccggctgtcttttatggcatttgctgatagctgcttggctggggagagtgtgcacttctttgatgaagtatatgagcttagtaaaatacctgaagatgactgtgtgaaaaggatctacatggcacgacatattattgagaaatacatagttgcaggtgcggctatggaggtgaacatctctcatagaagcagacaagaaattttatcaacttccaacctcacacgccctgatctcttccataatgcacttaatgagatcattcagctgatgagaacaaatctggcccgagattactggtcttcgatgttcttcctgaagttccaggaagactccaatgtaagatctaatgagtacgagctggagcaaataacagggtggaacttttctccaaggttgagttctgtgcatggtacagacgatccttttcaccaggaccatcttctcaagagctcaggctgtagcaatgatacaactaatttatgacttgttagcacttatgcacacagtttctctggtttggtaatgccttgccaaaccagtttcacttgaaaaaatcaaattactgatatgctttttttccctacaaaatatatgatttatgtccgtagaagatgaacagtagaggagagtgtggaggtataaggaagaagtaacattatttatttatttttattttcaatccataagacataagtaacatctgtacagaatcacagatttcatttgaaccctgaatagcttctgcggttattttaagtcttcaaccatgctttagttctagcatttttaccgtaaaaaaaaaaaaaagggcggcacaggtttaaaggaatccaggttaaggaaggg

SEQ ID NO: 115700 - DNA, 293 bp, Glycine max
  Clone ID: PAT_MRT3847_75488C.1
gagacaaagttttggtgcaaagcaaaggctggtacgaggagctttcctccataccaatcaaaggaggagagagagagagagggaggacacacacacacaaaaggaaccgagcaagccacacacaaaaaaagggacgtccgtgccttctcatatatgtgatagctcgcttccgagacaaaaaaaaaaaaataccaaccgcggccgccccggccgatctaaaggaaccaaccttacctacgcggagcacgcagatgtgataactcttctatagcacgaactaaactgactccact

SEQ ID NO: 115701 - DNA, 208 bp, Glycine max
  Clone ID: PAT_MRT3847_75489C.1
tttcccgtccgagacaatgaaaccagggcgtgttgttggtaagaccatcaaggttgtttaatacagagaccctcttaaacttccatgggctaaacttggaattaacattgtgattgagggaacgagaatgtttatggatagccctggggctggcaaacacatacaagcaggtgctagaaaaagttatcataactgctccagcaaaggg

SEQ ID NO: 115702 - DNA, 334 bp, Glycine max
  Clone ID: PAT_MRT3847_7548C.1
ataggaaaacaataaacctgaaacattgattagaaatccccacggtagggggatatcaataatcttcaaacaataaatccaccttttcttatcataaggtaacttttttaaagctcatctatacctacttcattacacattgttaaaaaaaaagaagccgagataattcatattcaaggaactctatgcctccactagatgcccaccattttaatccacctacattactctttgagcaatgctaacacttctgatttttcctcttcctatatccacatttgacagtctattcctggcttaatccataaatattcagccttccttatacaatttc

SEQ ID NO: 115703 - DNA, 467 bp, Glycine max
  Clone ID: PAT_MRT3847_75490C.1
tacggctgcgagaagacgacagaagggggaagcaaaaaatcataaattgacaacattcatcagctacctttaaccatgtacgaacgaatacagtcgaccgatttagaggatacacccttactctggctagcaagcactgctcctcggcggatctagcgtcacctactatcattgattgagccggcggtaaagaggaccggaaatgccaaaatgcctgtgcaccatttactatctgaatctcagcaggatgacgtttttatcaaccggctgtatcacgaaaatggcccgggaaatatggcgtgatgcttttatgacgcatactgtgcggacaatggaactcgccacttacccactcatgaagatcggtggatgctgtgttttctacatgaggaacagttacgcttacattggcattattgccagctacatcgcctttgttgcttgcgcttttaagcacgttggtgagg

SEQ ID NO: 115704 - DNA, 579 bp, Glycine max
  Clone ID: PAT_MRT3847_75491C.1
tccagctgcacacccggtgtaaatcgcgcaaatgtagaaaccctaactggcaagtgtgtcaatcggttaagctacttaatacaaataggttacccgcgccgttaccggttgtactacagacaattacaattgtacgccggacgcctggacccaacaaatgcaaccatggcagccagcaggggtaacccggcacccttacaagctacaagcacgataaccaaattcgccaatcaaccgatgggattagaataccacaaaacctgcagcaacatattagacacaatggcagagtaacgccacaaacgcacacggggtggtacaccctcaggtaccaataacccaccccgtacagaagccatattagagtccacaggtaacacacatatcagctgcggaaccacagacacaacaagggcaggcactgctagtagcgcgggggccatagcctactgtggcgacacgtgtagccgtaataatggaataatagacacacgtagcgcctatagctaacggtggggcgcacaaaactatgcactaatggtacatctgacacacgagtaaacacggtgacaacgccat

SEQ ID NO: 115705 - DNA, 425 bp, Glycine max
  Clone ID: PAT_MRT3847_75492C.1
aaatacaatgccctttcagagcagttatagtttaatcttttctacaaacggttttttgatattacatcacaatgagcaacttgttccattgctaattaattattaatcaccccttagaaaatacaaaattgagttgccttatcagtatcactaccaaagaatatttcttcctgctacttgaattatggcagaacctggtaagaaaaaaattgcttgtaatgactataccatacactgattaaattaattttacaaaatttaatcgaggataaactcctcattcctctggccttttacttttggctttgtcctcttcattcctttggctttttactcatggctttacgcttgttaacatcaaggtatttcttcctcaaacggatggattttggtgtaacctcaataagttcatcggaagctacata

SEQ ID NO: 115706 - DNA, 369 bp, Glycine max
  Clone ID: PAT_MRT3847_75493C.1
cgcgtcatccctgcagctgtgagtagaggagagagtgagttattgggcttcatgcattcatgccaactggtttgggagtgctgaaaattgctcagtcagtatggtctgtattacactcggctgggttctggggatgagtcagtactcgtgctcgatgttatgagatggtcatggctttgtcactgtacactcctgttgcttttctggcttggtttccaattgttgcacaatttcaaacgcgtatgctgtacattcaagtattcagcgctggtttgcaaatgttccgtattcttggttgccagatgaatgaacttccttcgcgtagcattgaagatgtagtcaccacataagggttacttacgacgagtc

SEQ ID NO: 115707 - DNA, 842 bp, Glycine max
  Clone ID: PAT_MRT3847_75494C.1
cacgcggcccgagattgctttctcttttcagttctcttcttttctctcttggcgacaccactgcaacactttccttttctattctcagagcgtttttagtgtttttcaagcaagcgagtacggtaccattctattctactccctcacgtacgtgcacattctctctctctctctctctctctctctctttttctgtgttttgtggtggcttataattaggaaactactgcaaaaggaaacttttttgctgaattttcacagtcccaacagttttttaaaaggttttttctttctttctttcttgctttaaccattgttttttttcctctcagattaaaaatgagttttcttaatataacatcattaattcgttccctttatttgtttgaacaccattagtctgcaacttgcattgtgatctgaatctcccttgtttcattctttccttgggactcgttttgtagtacactgtccgacacgacagtgaattgtcggaccaagtaagttctcgtgtctttcaggtttgacgctttaagaattgtgtacggtcagattatgaatcgttttagacgactagatcattcgtccttagaatccttgagcctaatataataatttctagagggtacacttcaaagccttggaaattggttgggaggaataaaacaaagtttttttttatctgattggtcatggatttgaattttcacttgtttccttagattatgagataaatgtgagttttttttataagcgttgtttgaaccaaaatcttttttctatcttaaactgagacgccgtttccttatactaatttctgggttaaaaaaaaaaaaaaaaag

SEQ ID NO: 115708 - DNA, 805 bp, Glycine max
  Clone ID: PAT_MRT3847_75495C.1
cggacgcgtgggtagaagtcctaatatatagggcgggcctgtaagcctgaaagtcgtgctttatacagtggtcggtaactaggcaaaagtgaaacagaaacagagaggaagaagcatttcgcagtgcacacaaagaggaaggagaaaaactgagtgacaaaatggggatagcagctgaagctcataacgtgaagattttgggatcaggcactgaatatatagttctggctcatggatttggcacggaccagtctgtgtggaaacactttgtaccttatctcgtcgacaatttccgtgtcattctctacgacaacatgggcgcgggtaccactaaccctgactacttcgactttgagcgccactcgatcttagaaggttatgcctctgatttgcttgccattttagaagagctccaagttgagtcttgcatttttgttggccactctgtttccgcaatgattggcgctattgcttctatttctcgccccgatctctttaccaaactcatcatggttggcgcttcccccaggtaatttagtatttaactttgtccggcattactcaagcaggaataatttgcgtgtttatttgacgaaatggcggcgaatttaaagcatggcgctatgggtttgctcctttggctgtgggtgggggcggccagtcatagccagtgttgtgtcgcgatcgaacgttgttcaacatgcggccagacatagcgctgatttgtgtcacggaccatttttcaaagcgacatgaggcagattctgagccctgttttctgtcccctgccacatcatacaagctg

SEQ ID NO: 115709 - DNA, 251 bp, Glycine max
  unsure (1)..(251): unsure at all n locations
  Clone ID: PAT_MRT3847_75497C.1
catagatttagggnatcgattactatactagtaatanattgtaacaaanaatantaatatnaataatataantataanaagaacaancacanatttnangtgattngtcgcggtatttanaataaatnatgnnagtngacnaataaaanaggagaggngatgtttgaataanaatanttccccttcaagttcttatttttngngaggacaggacaatatgaatgtnttatnatgctctatcaacacattaa

SEQ ID NO: 115710 - DNA, 586 bp, Glycine max
  Clone ID: PAT_MRT3847_75498C.1
ggtgcagaagttcctttcataacctcctccttcgtgagttctttatcattattgcactcataggaatcacctaataaatcatctctattaactctaaaccttgattgcacatatgctgtagttccaccagcaactaagataccagttgcaagtagcaaagtttttctccttgaagccagaaaactcctgccatgctgagttagttggaacagttgaagggaagacatggcggaagatcaacctctcttttaccaacaaatgaacgtgtcgcaattgctcttcatatcttcaaggtcgaaaacgttaaccatgcttttccaatccaacgcgtctaaaggttcggaagagaacatatttgctacaaaatagaatattctacttcaacaacagcgagcatcttcgattgttcgtgaaagtaagtccacagcagcgatcagaataacgtctcagattctaatatatagttgataattcatcctcactcggtgcctgaagctgggaacgaagaaggaacacgaaaattgatcacacgcagctttgctcaaacaacaagtgagtcaccaccactggtattgaatagaataga

SEQ ID NO: 115711 - DNA, 740 bp, Glycine max
  Clone ID: PAT_MRT3847_75499C.1
aattcggctcggctcgagcggctcgagacatatctcaccaattctctcttctcttcggttagcttctaccttgtttgtcttttttgtctcagtcatgttagtattttatacttaactagatatataattcccgcaaccaaacacgtacctcattattcttaaacctggcttgcgattctattcaattcaataccagtggtggtgactcacttgttgttggagcaaagctgctcgtgatcaattttcgtgttccttcttcgttcccaccgaatgaggattaattatcaattatatatcatatattagcaaatatgttctacgcgttggattggcggagcatggttaacgttttggaccttgaagattttgttgctccggaagatatgaggagcaattgcgacatgttcatttgttggtaaaagagaggttgatcttccgccatgtcttcccttcaactgttccaactaactcagcatggccggagttttctggcttcaaggagaaaaactttgctacttgcaactggtatcttagttgctggtggaactgcagcatatgtgcaatcgaggtttagaggtaatagagatgatttattaggtgattcctatgagcgcaataatgataaagaactcacaaaggaggaggtcatgaaaggaacttctgcaccaaagaataaacaaaagaaaggaggggtgaagtcacttcaagtccttgcttgcaattcttttatctgagatggg

SEQ ID NO: 115712 - DNA, 202 bp, Glycine max
  unsure (1)..(202): unsure at all n locations
  Clone ID: PAT_MRT3847_7549C.1
accacagagatttgctgaacaactnaaggattaattatctaactttgangaannaatggcctgacatgaaacattttgtacggctatagaatatggctcaccacttactgggggttggggtttgggcattggtcgggtgaccatgttactgaatgatcaacaaaatattaaggaagctcttttttgctctgccatgaaacct

SEQ ID NO: 115713 - DNA, 578 bp, Glycine max
  unsure (1)..(578): unsure at all n locations
  Clone ID: PAT_MRT3847_754C.1
tcctctanagcggccgctttttttttttttttttttttttttttttggagctcgatgaaacttattccaccaggggataaactcaatctaggaagcatatatctataatatatatcccggcataaactaacagcgcccgcaaaaatgaattgagcatcccagattaaatgatttataaatacaacatgcttaaatgagacacaacaatatttgcaaggacacaccacgacccttaatagacacaatccacgatccttactgaatgatgcagactataaacggcatcgcgagacaaacactgctggggtgtagagaaataatacatccatcacacatttatcactgctatcaaatccagaaagccatcttggcttttgaatcgggaattgggacctagcctccattctcaggaaactggtgcgccccatgacctgaccttcctgacaactgaaaaccggtgtttcttgaatccggacgaccccagtccgcggatcggcgaggagtctcatgcaaaccaagctgtggaatcctgaaatgacttccatacatagcttgatgctaataatttccgcggattg

SEQ ID NO: 115714 - DNA, 216 bp, Glycine max
  unsure (1)..(216): unsure at all n locations
  Clone ID: PAT_MRT3847_75500C.1
ttttcgtgtctcgtgggcggacgcgtgggctatgatgagttccataccttatatactccttgcctcccccctcgcagnnnccatagcagcagacacatcatccatttcaccatcccaatccctcagtttcggaaaaaccatagtttccccaagtggaacctttgaacttggctccttccatcttggaaatccaaacaaaagctacctcgggatttg

SEQ ID NO: 115715 - DNA, 460 bp, Glycine max
  Clone ID: PAT_MRT3847_75501C.1
cacggccgtccgaatgtagtgcctcagacaggctcactacaggtccgggggtgtctatggctcttctttagagtgtctaagggagaatttctctacaccctagttttccagacgactgcgtcttgcatactgggatagtgagccaatatgagctctcgggcaggcaagggacctgccgtaagcagttatcggtggagaaagacagtggtggaccttgaccttaaccgagaaccaactggagagaatcgtcagcaggagggaccttgaactgatccggagccttcagaaggtcaagttgaacagcatcagcaggctactcaacctcagatgattgacgtggaagccatggatgatgatgagagggaatgtacccgaagggcttttgttgaggctaaaaacaatttaataagagtgcataggaagactatagctggcgttgatctagacgaacagactaggc

SEQ ID NO: 115716 - DNA, 199 bp, Glycine max
  Clone ID: PAT_MRT3847_75502C.1
ttacggctgcgagaagacgacagacggggacgagatcggtagacatgccatcgtaagaatgaatggctgctgttgcatgagtatcatttcctaaccctgtgacgctcagctggatcaacctagcctaatgaccattgtgagatgtgttcacaattcatggtcgtcatgacagtggcaaggttccatggagatccaggga

SEQ ID NO: 115717 - DNA, 633 bp, Glycine max
  Clone ID: PAT_MRT3847_75503C.1
cagtgtagtttgagaggtacattgcatttacaatacatggattgtctctacatgaatcctcaggaatccattgaagcacgtgtgaaacaccttctttctcttatgactttgaatgaaaagattggtcaaatgacacaaattgaacgctcagttgctaccccttctgccatcaaacacttctccattgggagtgtgttcagtgctccacacaatggacgttttgagaaggtactgtcatctgattcggctgatatggtggatgggtttcagaagttggcacttgagtctcggttagccataccaatcatttatggggttgatgctattcatggtaataatagtgtctatggtgctactatatttcctcacaatgttggcctaggagctaccagggatgaagatttagttcaaagaattggagctgcaacatcacttgaactcagagcaagtggaattcactatacttttgctccttgtgtggcagtatgcaaagatcccagatggggaagatgctatgagagttacagcgaaaacactgaaatagtcagagagatgacttcttttgttttaggcttgcagggcaatccttcacaaagacacccaaagggctacccatttgtggctgggaggaac

SEQ ID NO: 115718 - DNA, 585 bp, Glycine max
  Clone ID: PAT_MRT3847_75504C.1
ctctgctcatacggtcaacaaatctatctagctaaagctgaaccacacgaaccctggcgaataattttccgtgagagaacccaggtaaatgtcctgcaacatgcacaaaaccattgcccggattgctacggtggatataaccaactaagcttaactgacctagatgtctaagtgcaattttatagcactttcatcatcattccaacacatggtatatatatgaccctcaaaggatatagtcgagcttgatcagcgatccaaccttggctcttgcatacactaacagagatgattctgcaggcatacatgcttccttccatgaacccaaagacaacataacctcttgatgcttctttccaccctgccgaccatcaaccaccagctctagtaaaccatgactttactatcaaggatcctactgcaaatgcacatatctacgccaacctcaccacaatgtataggctgattgagtctaaccaacctacaccaacatggttactacctaacactttacagtgctactgatcatgactaaccctgctgattgcatacatacagagcactccacatggacctgtacttgca

SEQ ID NO: 115719 - DNA, 383 bp, Glycine max
  Clone ID: PAT_MRT3847_75505C.1
cagtttgagaggtacattgcatttacattacatggattgtctctacatgaatcctcaggaatccattgaagcacgtgtgaaacaccttctttctcttatgactttgaatgaaaagattggtcaaatgacacaaattgaacgctcagttgctaccccttctgccatcaaacacttctccattggtatttataaaatttgttgtgcttttattagttgaatgtgtgttgattagttgaagcctattcatgtgctgtgtatgtagtactttcattctggtaggctatgtgtgttttttggtttgaatgaagggagtgtgttcagtgctccacacaatggacgttttgagaaggtactgtcatctgattcggctgatatggtggatg

SEQ ID NO: 115720 - DNA, 412 bp, Glycine max
  Clone ID: PAT_MRT3847_75506C.1
gagattttaagggttaccggaaagaatgaattattgcagaaccaaggatttagtgactttgatagaatgcgattcataaatctgagtcatatggcttctccaaactcaacaccaaacttcactggctggaacagcctgtcacatgaagtaagaacctcagttttatgttctattcagtgtaaaattctctaccactccacagtctccatttcctactttttcttgtccccccaacataaaatttatgtttcatttatgcattgttttaaaaaaaaaaatctgattcttaacctatccagttctggtacttaattgcttagattccctcttctccattttgtttaaggtggcaatattgcctctttgttaaatgtgtatgctttaaactttgttatataacacacagtaacta

SEQ ID NO: 115721 - DNA, 390 bp, Glycine max
  Clone ID: PAT_MRT3847_75507C.1
gttttaaaaacaaaagtgcattgggggggaccctcaatgatgaacacagtactgtgggatatacataaaattggggaagacaaccatcagtttttcccatgataaacatttcaaaatcattgaaacaagatcacgaaaaaagcttcaacttatgtaacgttaatcacttgtatagtggccacacttatcatttagttgagcatagcttcatattgaggtgccagctaggttaaccatatgtaatcaactatggctaaattttagacatacttatggttagtttggaccaacttattaaatatcacacactcttgtgttttggagagaaatacaaaagaagggtggatctgcatcatctgaccacttgtcaaatcccttaatgttcaatca

SEQ ID NO: 115722 - DNA, 555 bp, Glycine max
  unsure (1)..(555): unsure at all n locations
  Clone ID: PAT_MRT3847_75508C.1
gntgacgtcgcatggcacgnccggtacgtaagnncttggnagtccctctagnagcggcgccgcccccttttttttttatttatttttattttatttttttttattttttttttttttttttttttaggtttacaattttgggtttattcttccttaactgtcatatcaccgggttaagaaacataaaaaagcagtagatatttccatcaaatataaaagatccaattacggaaataaacaaacattgtttctttttttacctctggggcgggacccaaattacaaaattaaaacaaaacaagacttggaaaataaagtaaaaactagcctaagagaaaaccacaaaaattttgttcaggaagaaaaattctttgggcgacccgaacgggcaaagtcccacacaacctgacaaaaaaattgggccaaagccactcttaaaaagccaaacccaacctttgaagcaaaagaaaattctttacaccttaataaagacaggctgaccaaaccaaagctcaaaaagttagggaccaatacaacctttcccgcaaactaaag

SEQ ID NO: 115723 - DNA, 594 bp, Glycine max
  Clone ID: PAT_MRT3847_75509C.1
gctatctgatcgaactgtccaaggtcctgtcacaaaaagcggctactaggccgagcggaagcacagctgcgctggcagacgccaccagcagcgtgttgcgccgtgggtaggaacgtagcattcgcggcagcagtacaactataggactaattagcatctcgattagcatcgttcttggtcgcattacgtattagcccgttatttaattataattgtggtgaacgtacagatagtggtaaggttagggtgcatagcgatagagagaatagatgaatagatggaaggttgtgcgggaaggatagatgctacaaggtcttgggtagaacggtgggtggcgatgggggtaatagtcagactgtccacaatcggatgtaaagcaatgtggtggggaatggtcggggttgcgaacggagaagtagagagagatatatatcacgtcgtggacggcagcgacgacgagaaaggaatggaaggatggccccaagacaatatgggacgcaacaaggggggtggaaaaggtaagagagcagataaattacgatagctggagagaaaagaggactagagtgatgaaggaggcgaaaatgagaggac

SEQ ID NO: 115724 - DNA, 409 bp, Glycine max
  Clone ID: PAT_MRT3847_7550C.1
gggccaaaccaaagccgatggttttataaacccctaaccccgggggggtcatgggaaaacaaaacattcccccccccctaaggcccctttccggtccttaaaaggaaaaaaaaacccgggccccccaatggggacaaaacctaacaggggggggggggacccaaaacggggcctcctttttttgggcggggggggtccccggttttggttaatttgcccctgccctcccaaaaacaaagaaaacaacaccccccccccccgggggaaacaaaaaggccccccttccatggcccccccccagggattgggaaaaacggcccttttccgttaaaaaaggttggggagcttccaccccgagggacccccctggggggctaccgccacccggtggggaacggggggcccccca

SEQ ID NO: 115725 - DNA, 721 bp, Glycine max
  unsure (1)..(721): unsure at all n locations
  Clone ID: PAT_MRT3847_75510C.1
ttttttttgaggatcacaatcgattatttattaaanaaattcaaaatgtttaaaatgaaaaggaatttgaggtattagggcttataaagagactctccctagcttaactagcgaaccatagcccgctttgtccttgagaaaaacagttcccaagaaggcaccccacaaaatgaagggtctcattgtgttgctcttcattctgatccactacaaagttgtggtcaacggcaactacaacaacgttgtcatcggcaatgagttggaaacagagttcttattttggctcccatgtggccagaatgctctatgatgtgagtgtgtctgtgtgtggcaaaacaggcaatagctacaacaaagctgttagatgtccacaaacactaaggttaccgtagctgcttgccatccagaaatggacgacgtggccctagacaacgttgtgctgatttcaccagggtttgctaagaacatgttccagtcttgagacataatttcatttctcatttcatgcttgtcatatggcatggaatgaatctcaagtacgtagtttaatttccctatattgttgtaataatatgaatttgtatgtaatgattaatgctttcggatcatgtttatatatggtgatttattgtatgtttatcaaatgttgatgagaataattccacgtgagatggaacagtttatgagaaataaatatattaacttcaaggattaaaaaaaa

SEQ ID NO: 115726 - DNA, 355 bp, Glycine max
  Clone ID: PAT_MRT3847_75511C.1
gcaagctgctggattctttaacatcatttttgtgtccagcaagaactactatatgggtcttgtctcaataggatggtgatcttatccataatccgaaaatagggcaccaccgtttcaacaatgttatgcataacctgcttttgttacttcatcgctggcactaatacttttttcaatgcctcacgagaaagaattgtgcttctcatggtgatagtagaggaatatttgggccatcaggcggatcttcatataaattttctgcaatcctatgttcactcaaagccaaacataaatcctggtactgtgactgattatggttcactagtattggttatccttatacttgagtgagaac

SEQ ID NO: 115727 - DNA, 447 bp, Glycine max
  Clone ID: PAT_MRT3847_75512C.1
ctcgagccgaaatgcttccacatgcatgaaaggtggcgttagcaattttgctagtcacgatagaaatactggatgccatgaaactgtttcttgtggaaatgtgcgagcacatgttgacaacaatggacttgggctttctgtgaaattagtggaagagaacattcagaaaccaagttttgaaagcagcatgctggctccaaattccgaggggaaaatacttgctggtaaaaatttagaggatacaaatcatatcagttcattggaggatacggagattagagatggaaaggccgttaaggatgacaaacaacaaattatttgtagcagagaccagactgaaattaaagatgtttctactgatgttaaactgcagagtagttctgagggttgttcacttgtctcatctcataatgaacttaatacatctaaaaataatatggacaagac

SEQ ID NO: 115728 - DNA, 495 bp, Glycine max
  Clone ID: PAT_MRT3847_75513C.1
ggaagggggaattaaaaagggccagggctgtgctaccttttatattaacgcaagcaaaggcccaaagtttacatgacaaggctgatgacataagatcatacaggcaccccctaagtaaaaacactaacagccagttaatatgaccatagtagggcacacaaatccatcccttttggaaacagaattggcccccacatagtgggacacttaaactttgatgcctaatgaacgaagcccaaattggccattttaaagaaactttttgtttctctaagggcccttggtcttgttgccaaggggggtcttataaggggagcagggtccacatagttccctatttccaaatgtcccaggggggacacacttgcccctaacacagaacgtgccacaccccctatggcacaagttgggcctcgaatgggcactgcacctcgttttgcgcaacccaccacaatgggaaaaaggcttgaaaaattcaaaggttatttttttccc

SEQ ID NO: 115729 - DNA, 173 bp, Glycine max
  Clone ID: PAT_MRT3847_75514C.1
ctctctctctagtacctcctcctcctcctccttcttcttcttccctggcatcggatccagatccaaatccagggtaacaaataaaatgcgggcgggaacctgggccgatcgggactgaaagtgagctagctctcctacggtgcgtgggtgagcttcagtaaccagctagacgt

SEQ ID NO: 115730 - DNA, 517 bp, Glycine max
  Clone ID: PAT_MRT3847_75515C.1
ggttggacccggggatcccccccggaaacccggaccggacccggcaggcgcaccagcgagcccaaaaaaaagtcggagaaaaccggggcaaagcgaaggccagagcaaatcccggagcgaaaaaaaaacccccacaaaaaacaacacaaaaaaaaaaccggaaaaaaaaaggggaaaaaagggggggccaaaaaaaaaaaaaaaccaaaaaaaaaagggccgggctcacagcccgaaaaccagacgggaaaccggccggaccaaatggataaaagaaccggcaaaggcgcggggagaggcgggccccagggggggccccaaggcggccattcatacgaccaaaaagaaagggcacagcaccgtgcgccccaccgacaggcccagaaagaggcccaccaaggggccccccccggggcgacaaaacagggaaaaagccggtaaggggggggtaaacggggggaaataacaagagccggcttgggcaatgtccgaaacaaccaccaaaaaatccagccca

SEQ ID NO: 115731 - DNA, 502 bp, Glycine max
  Clone ID: PAT_MRT3847_75516C.1
agggatatatatatataaattttacgctgtttaatttagtgaaaatgcaaaaagaaaaaaatgtggaaattaacattgaggccaccaagaaatattgcgtccctcgggcatcggcggaacaaggtcaacagactatacaaagcaagagaaaaggtttcatttctctattttaccctttgcccatgtttccatattttatcctttggcaatgtaatgtaatcagatacaaatactaaacagcaagaagccagcatagtgcatacaactttttgtttagaaatgatatttaatacatgaataaatagtattttttacacttaatttcaaaaccaaactattttctctagtaaatttattaatttttataataattattttaaaaattataagaatattaaagataattttgattcgttaatgatataaaaaattacattaataatgcatgtttattacattttttatgttatttttatttttaaataataaaataaataaatct

SEQ ID NO: 115732 - DNA, 356 bp, Glycine max
  Clone ID: PAT_MRT3847_75517C.1
atctcctgatggcgagatatcatcagttgcatgatttttatttcctttcaaccgtgacattttaattctttacatgcaaaccaaaactgattgcttataacccccaagtttacatgatgtacgcagttccaccaaaatttggttacaagaaaacatgaatgaaaaatagaatcaatggctctgaattgcatcattgataacatggacactttaaatttcttacatgccacaaatggaacctattgtaacgccaagggaagtttattagtggtccacggttcaaaaaccctccaatggttaatgaacaagttccctgccttaaataactgcgggggtcgaaacctgggttttttttt

SEQ ID NO: 115733 - DNA, 235 bp, Glycine max
  Clone ID: PAT_MRT3847_75518C.1
ccacgcgtccgctttattacaagtagccatatattaacaaattccttaagtaacatagtatctcttcatgaatgagtccctgctgaaataatcatggaagaacatcagaagagatactatgttacttaaggaatttgttaatatatggctacttgtaataaatacattgcttatttttctgtggaaggaaaggagaagcatctgcagaacggcttgtggatgttttgcacccttc

SEQ ID NO: 115734 - DNA, 545 bp, Glycine max
  Clone ID: PAT_MRT3847_75519C.1
gagtgttgcagcatcattctattggggggttttggtctcattgtggctggaattccaccagagaaggagtttttagtggtgttccttttttggcctttccaatattaatggaccaaccactaaacggtaagttgatagtagaggaatggaaggtggggtggagggtgaagaaggaggtgaaaaaggacactttgataacaaaagatgaaattgctaatcttattaagaggtttatgcatttgggtggggatgaagtgagagatatgaggaaaagaagcagagagctgaagcagatatgtcaccgtgcaattgcaagtggtggatcatcagaatccaatatcaatgcttttctcttgcatatattacaggatgccaagcctcattaagaacatagttatttggtacttggtccttgttcgctgttactcatattttacattattacaaacatgtatttttgacggaaaaccgtcaaaaacccagcattaatgaacaaaaaaaaaaaactctaagtgagtaacaatgctggttttgttttgatcctc

SEQ ID NO: 115735 - DNA, 489 bp, Glycine max
  Clone ID: PAT_MRT3847_7551C.1
gggtggtgctttcaaactcggtaaaacttaattattctggagcaaaagacccccttattcgggcccaaatttaaccttcacattttcctcctccggaaaaatgggggtgaaaaacttgccatacacacccttctaaatgaaaccttggggcagaggataccccaaaacaacccctttttttccaacaccttgaagggggtaaaaaacaaactttggggggggtcccttgaattgcaagcacaaacacattggtttgttgttggcctaaaagtgggaaggaccccccatactacttactaaaactctggccaccttgggctttctaaacggcttgctaaattggcttgctgctccccacaccttggcccaccggggggctggtttaaactgccgaaataggggcaaaaattgaggattcagttgcagcttcaaccttggatatgacttggttggtgccaaagaccagaacgcccctcttataggggttgt

SEQ ID NO: 115736 - DNA, 253 bp, Glycine max
  Clone ID: PAT_MRT3847_75520C.1
gcggccgttggatctttattccactaaatagtttatgtttatataaaaccataccctatatgggctggttctttatataaactatccaccccaaacactttctatctcaacctataatttaattctatcatccacttctatatattttaataatccaacatacctcttctctaattaaaatactaccctctatccatacctcatatttaatatttttaactaaaaaaatcaatcaatctcattataaaaccct

SEQ ID NO: 115737 - DNA, 239 bp, Glycine max
  Clone ID: PAT_MRT3847_75521C.1
cgtttgcgatttgtttccccaccttcgattttcctatctctcttgcagaatttcatagctttctttctttgtcagccgagcatttgttcctttttcgatcccaatggcccctggtcttaactcacctattgcgccttcttcgtgtccctttctttgcaaattaaggttcggcaggggtaggctaggattggctctcgccgcggcgagagatagagagagagtatgcggctgcgggtgga

SEQ ID NO: 115738 - DNA, 291 bp, Glycine max
  unsure (1)..(291): unsure at all n locations
  Clone ID: PAT_MRT3847_75522C.1
caacactctgcaactgactacggcaatgaaagaccatgtctgttaaggagtgctagcaccacgaggggtaatagacgcagatctttagcatatgttctgatgctcaatggtcgtcctgcacagtcggctgctcacaatgcttttgatatgggcaatccttacaccgatcatacgaaccttcacgctacaagacttcaacggctaagaattgaacggcaccgaggcgaacttacttacttctaattttcaggctacgctnatctggcgtaacccgaaatagcgcatatgtga

SEQ ID NO: 115739 - DNA, 472 bp, Glycine max
  Clone ID: PAT_MRT3847_75523C.1
caaaagtgaagggtaatgactaatgggggtctcaatttaatgggcaacttgtagggccttcatcctttcaaattttgtcctagggttacctaatttcaccatttaattgaatttaccccttgatttttcatttgcccctttaaaaataaactgtttggaaaatgaccacctttttttttaaacaaaattgctcccatggatgtcggaattcaaattttgattgcgggggcccaacatttaaacatcccgttcttgatcttttatcccctttggagccccccccttttccccttttattacggggcaactcccatggggggatggcggatcaatttgcccctttgtgggccattaataaaataaaaaaccctccccttgggggggtttttcttttaaaccaatggagttcttattcccctagttaccctcccttgttaagccctttttaaatggaaacattttttccccccct

SEQ ID NO: 115740 - DNA, 435 bp, Glycine max
  Clone ID: PAT_MRT3847_75524C.1
ttcccttaccaacattcggtgttcattgctgacttttaaaattagtttgtatctgatattctgatgtcaagtatgtttctattatctttctaagtttttaaatatattatgatgtgaatcattacaccatttggtttcttagctcttaaaattcatatacaagtcacctggggtgaagacattcttgaattgcatcctttgtagaggaaccaattctcatcctctatctcagttttggacctaattcaattttttcttttaaactcaatttatgaagaagagagagaactgttaactttgcattacacatgttaaaatactagttatacatatagaaaaaatcagggtgttataaatagttctaggctatttcatcttaatagctaattgattgcataccctacttttatcatcttcaatctatggttgtgaaga

SEQ ID NO: 115741 - DNA, 142 bp, Glycine max
  Clone ID: PAT_MRT3847_75525C.1
ggctcgagggaatatctttttgttttaaatccatcatgtgtgtaaacattgaccttgaccactacctacttgtttgtgaactcgctacagtggggcaaagacaagacaaccgcgggcgctccccggctcgggagctcgcact

SEQ ID NO: 115742 - DNA, 248 bp, Glycine max
  Clone ID: PAT_MRT3847_75526C.1
acgcttgaatacattccttgtagttcatactgactgatgggttagaagatgacgttactgatcctaagactttccctcatgctccatctggcctactctgacgtggcatccacgattacaatagaggaggcaaatggtgtggatgatgccgaatattcctgaggaagctatagatatggttacccaggtcatggcggtggcggttatcctggccatggcggtggcaggtatcctgaccatggcggtcg

SEQ ID NO: 115743 - DNA, 424 bp, Glycine max
  Clone ID: PAT_MRT3847_75527C.1
ctcgagccgaaaggtttcaacctttcccaatctagcacaaggttgcactgtgcacttgaagggaagtatctggtacatgctagttgtcatgatttgataggtggagctgatgcacccattcagcatctaagcttctcttgtcaaataccaagtgtaactgggagggggtttattgaggtagtatcaattcatcatactccaaaagtattctgagcatttgttctttgggtttttcatttcagcaaagtgaaacatggtttaatttcattttgtaatttttagattgtatgctgtaaaattcctgaaactaacagaagaacacaaagctctggtgcttgcttctgaaatgtcattgatgaataactcctttgttaatgattcaatattgctggtgttgatgcctcccaattgggtacttatagct

SEQ ID NO: 115744 - DNA, 420 bp, Glycine max
  Clone ID: PAT_MRT3847_75528C.1
ctcgacacaagataaaatcgtgaccctccacacgaccaaccctttttggtttctctcaatcaatcacccatttgggattcgggctgataataaacgcacactgcgaccaccatgcgaaaaataaaacctaccgtgacacgcgtgatgatctgcgtcactgggctctgctaattcatgctaggctgtgctcttatgtgcgaaactcattgaaatgtaccgagcacggctgcctgtcaatacaactgactccttgttctaccacatacaatgctaacccttgtgcttagcatgccgctttctagccatattgatcgacttcgactctacttgttaaaacggaaatgtcatactcgcgattctaagaaaaatgtcgcacctacttcacagtggtgattgcagccgatgtagaggcaactactc

SEQ ID NO: 115745 - DNA, 397 bp, Glycine max
  Clone ID: PAT_MRT3847_75529C.1
attctatcaatttctgatttattcatatcccaaaaccactgacatggaatcagcgttcagtgtcacgtacacaaactggttcaacattggtacaacgctttaaccttgcaaatgaaccatcatcacattgtctatgtcagattgcaatgctcagcttactgagagtgccaccggctcaactgttatgctggtccagtgctctggtgcccatctgctgtctaccataacaaccacgtgcaagctgtacacatgtgtagatatcggagactggatccaaaagatgctggggactagagcctctagtatgacaaccaaggcaccggctggagctcgaagtggaacgataacgctgtcatcataagaaagtgatggacgaacttatttgtcaccctgttga

SEQ ID NO: 115746 - DNA, 1101 bp, Glycine max
  Clone ID: PAT_MRT3847_7552C.1
gtaactcattcccaattttccaattctgatttcttcatctaacaaacaattcaatgggtggagacagtgctctgaaatccggacaagtatcagcgatgataaagcagggttttatacccgcccctaacctctctttctcaccttccagaaccttctctcctcctccttcctcaactcgcccgagtcagactcagtcccaccctcacactcagactctcttcaacatgatgtcggaggagcacaaattctccgacgagaagcgccgaaatacgcatgatcgggtctccaggctcctcgacgagcccgccctgcgctccgccagcggcgacgtcaggctcacggtggtcggcagggacggcttcagggtctccatggaggtccgcaagacagtcctcgccgacaagagccgcttcttcgccgacaagcttcgctgctgcggcggcggcctctcccactccgtcgagatcagcgactgcgacgacgtcgaagtctacgtcgaggcggtcgttttgatgcactgcgacgatctcaagccgaggctgcgctccatggctgaaggagttcccaagattttgagcttgctcaaggtttcatcagctatcatgtttgacctaggggttgtctcatgcctggaatatttggaatctattccgtggaccgaggatgaacaggaggaagtcatatctcagctagaacatctgcagattgatgactctgcaactgaagttcttcttagagtatcatctgatccatctactgctgatagagctgacgacatcttcttgaacctgctaagtggcgttctacaagcaaaagatgacaaagctcgcagggaaatgaaagctctgttatctagattgcttaaagagaatgtgtctaacgatagcagcagacttgatgtttccaaagacacactttatcatctttgccataagtgcattggttctcttctcctatgcctgtccgaagcagccagcagcgatgagaagctggatcggggggctataatgagcgacataactcgtgaagctgacaatattcagtggattgttgaccttttgattggccaaaagatgattgatgaatttgtgaaaatatggg

SEQ ID NO: 115747 - DNA, 351 bp, Glycine max
  Clone ID: PAT_MRT3847_75530C.1
ctgggtgatgttgtttgtggaatggcagcagttagagtaactgcaaaagacgtagtattttggtttcggtcacacactgctgcagaaatccgatggggtggtgcaaagcatgaagctggagaaaaagatgatggtaggaggatgcatccaagatcatcattcaaggttttccttgatgttgtgaggggggggagcttaccatggaaggaatatgaaatagatgcaggaactggaagcagtgacaagtgagattgttaggttgattgaaacagcaacagtgcctattttggcagttgatgttgatgggctggtcaatgggtggaacataaaaattgttgagttgtctggttt

SEQ ID NO: 115748 - DNA, 147 bp, Glycine max
  unsure (1)..(147): unsure at all n locations
  Clone ID: PAT_MRT3847_75531C.1
acagnntggtnaagtcncatgnaggnntncgttcgaggnaattttgataaaccgcgattcacagggttgccgcaccttnaaaaccggannaacnaaagccaattcgttaanttggtttcaagaattgcncaatttgcntcccaattn

SEQ ID NO: 115749 - DNA, 283 bp, Glycine max
  Clone ID: PAT_MRT3847_75532C.1
attttcatacatgtacttctttcattaaatgttgcattgatatttagtgaccgtaattatatctggtactagtagactagaaactggtaagtttcatcttttaacctcaaaatttggtgttaacagatacttgcaaacatagtacttttttcatatcactttacttgttgcatcgctctcatataatctcatggatttgatgtcctccacaagtggactatggatgctctcctgaagaagcgcaattacttgcatagtgctctgatggaacacgttggggatc

SEQ ID NO: 115750 - DNA, 3656 bp, Glycine max
  Clone ID: PAT_MRT3847_75533C.1
gcgatgaaagatcattttactgatcttgcgattattgtccactacgcataacttaaatctggcttttaagatacaatttagattataagattatgtacatattttatttgagtatgtagataaaacaaattttctaaagcttcaactaaaaaatggaacatatcagaaccagttaataacatgttagctcagtaaaaaggggaaatccataatttccatcaaaaaacaggtaagcagagtcattcagctaaagccattatctctgttctttagtctgattctaaaacctttcttgcttgtttcagcttttcattcatagaaagtagttctgtacagcggttaagttttggcgaatccttgccgaatcaaatagagtgaaatcctcaactgataagcttccccttctgagatccaatatcttgggctttatgtaccagttctgtgacatactccacaacaatgtcctccataagagccacactttcaggaagtggattaggatcatctccaaagccatacatcatgtgctgcaattctttttggaaaactcctcttttgcgcttagacgaagtttctgatggttgtgaggaagctgctcttggttttgatgaggttccagcagaggaattgctcatttttattgcccaatgcttccgaatgttatctttcaggtgagtaactggagttaatgaataggagaaactgatgagtattcttgtatcttccaatgcagtgcgtaagttctgttcttggtatcttgagagtgtaactcgagttaataaataggaaaaactgatgatattcttgtatcttccaatgcagtgtgtaggttctgctctccgcaatttgaattgctcacaagtcacaagagagagataaacttcgttcttcagtggtatggcataatgaaaccctccgtgagagaggaagcgtactctgaagtctgaacagagagagaaaacagacttgcaaagaaaaaaaagacacgagataggataaacactttacgactgaaagtgaagcaagttgtcacgtctctaagtaactaattatcatatacctactttgggtttttctatcggtcttttacagaatttgttgctttgtccgttttaaaaattgatgaagatacttattgccagatacacgaactatgagagttttcttcatgtgaaagaatatgtaagatttataatgcgagaatactagttaaacaatgtaagtatgtatattacaggatgatttccccgcggaccaatatgtattctggtcctatgggttcagaagtgaatgctttcgcaagaaggtaacttcgaggtaatgttgttggggattgttttttcccccatgaaaatcactaatcagatgaatctaagagacaaacttactcaacccgaaagtaaataaaatagcatttgtcggtgcctgaagtcccttatggattccacaggctttagtgcattagaccggggttggatggcaaggccacctatgacgaagttaactggatggaagcgagaggaggtgctggataaaatgcttttgggaaagctttttggctcccatatggctgcttgtcgcctaaagaatcaagaagcttttgttaatttgggtgttgtacttaataaagccatgactggtttggaaacagagaaggttccttttggtttctttgctcggaatggcaagtatgtggaatgcctgctttctgtgagtaagaaattggacgtagagggcctagttactggggtcttctgcttcttacagctagctagcccagagctccaacaagcattacatattcagcgccaagactaagtgactgcctggttgagattaaatgcattaagttacatgaaagggcgcaggaactggaagcagtgacaagtgagatcgttaggttgattgacacagcaacagtgcctattttggccgttgatgttgatgggctggtcaatgggtggaacataaaaattgctgagttgacgggtcttccaattggtgaagctactggaaagcatttactcacacttgttgaggtggctgcgtccgctcggctcgaggttctggttacctcacttagtcaggtcatggcagagaggaatggcaagagtatcccaatagtcaatgatgttgcagagcagattgtcatggaaactttatatggtgatagtcttaggcttcagcaggcgtgggctggctgtcggcgtttgtcctgcgccctcgctccaactgctcgtcaggttgttgtagaaggcattctaaccaatgaaggtgattacaaggcaattgtacagaaccgcaatccattaatccctcctatatttggcacagatgaatttggctggtgttgtgagtggaatccagctatgatgaagttaactggatggaagcgaaggaggtgatggataaaatgcttttgggagagatttttggcacccagatggctgcttgtcgcctaaagaatcaagaagcttttgttaatttgggcgtcgtacttaataaagccagactggttcagaaacagataaggttaaatgaggtttcgatgatcgaaatggcaagtattagaatgtttggtttctcatatagagaattggcctagagggcaattgcatccaatgttactctaatttgttcccacgttacagaagcagtcaataagaaacgtaggaaccaattagcgtcgcaagctgcctcgacgagaatgaggacattactttagaaccaaaggcgaagcaagtatgctgtgtatggaattgtatcttccccccataccgtggagggtactgacttgggaacagaacagaaacaacttcgcgcactagtgctcagtgccagcagcagcttagtaaaattcttgatgactcagatcggacgcgtgggttcaacagttacttggatcttgaaatggctgagttcactctgcatgaagttctggttacctcacttagtcaggtcatgacaaaaagtaatggaaagagtatccgaatagtcaatgatgttgcagagcagattgtgatggaaactttatatggtgatagtcttaggcttcagcaggtattggctgactttttacttatttccatcaatttcactccaaatggaggtcaggttgttgtagcaggctctctaaccaaagaacagttaggcaaatctgtccatcttgttaagttagagctcagcataacacatggtgggagtggggtaccagaagtgttactgaatcagatgttcggaaacaatgggctagaatccgaggagggtattagcctactgataagcagaaagctgctgaagctgatgaatggagatgttcgctatctaagggaagcaggcaaatcagcttttatcctctctgctgaacttgctgcagcccataatttgaaagcttaaaagttttggaaaaaagaataaaagatgatgcaaccagcaaaacacaatctgttttgtacatcataaagagaacggagctagaaattaattgcatccaatgtaactctaatttgttcccacgtttcttgttaactgcttcttgtaacgtacgttgtagatatgtattaatcttcttcccattccgtggcctgttctttctagagtttttccttatttacttattcctccatcaaacagcaatgatgaatcatttgttgcgg

SEQ ID NO: 115751 - DNA, 4133 bp, Glycine max
  Clone ID: PAT_MRT3847_75534C.1
gcgtgctttatatcttctgcatctaacatgtggcccatctcatccaaacactgctgctacttacattaatgtggctatgatggaagaaggtctgggaaatgtacatgttgctctccgatatcttcacaaagctttaaagtgcaaccaaagattacttggtgcagatcatattcagacagctgcaagttatcatgcaatagcaatagcactttcattgatggaagcatatccattgagtgtccagcatgagcaaacaactttgcaaattctgcgggcaaaacttggccctgatgacttgcgcacacaggatgctgcggcttggcttgagtattttgagtccaaggcttttgaacagcaagaagctgctcgaaatggtactcgaaaacctgatgcatcaatagctagcaaaggccatcttagtgtgtcagatttgcttgactacattaatcctaatactaaagggagagatgcagcagcaaagagaagaagccagataacaaaggtgagagcaacgtcttacccaaacgttgggatgtcaagttctgatgaatcttcaaaagaaattccaaaagaggcttcagatgaagaggtacaaatacccatactagtaggtagtgcagattctgagcaggagagcaactctggacctgatttggaacaagctattttaaagcaaatatcggatgaaaagctacaaatttatgatgaaatcttctctgaagcacatgctgaaggagaggatggatggcaatcagttcaaagaccaagatcagctggctcatatggccggagactgaagcagagacgggcagcacttggcaaagtttatagttatcacaagaatgtggaagttggcacagaatctccttttgtaaggagtcctaatccgaatagtaggtattatttcttgaagaaacgaacaatttcccatgggagttatacagatgatcatactataaacatcacccaaggcaataaatttggaaggaaagtagtcaaagctgttacatacagggtcaagtctgtgccctcaacttccaagccttgtgcaaatgagaaattagaaaatggggataagctgctcagttctcttccagaacctgatccaactgatgctaatccagttaagaagtctattgttagtcttggaaagtctccttcatacaaggaagtggccttagctcctccagggacaatctctaagtttcaggtctataatcctcaaagtgtgatttctgttagcagtgagcatgatagtggaaaacatgaagaggaagttgaagctgatagaaatgttaatgttgatccaaccccgatagaggtaaatgatacggttaaagagaagaatgatgattctttatcagattctgtagatgactcactggatgatactggagtggctattgaggggaaagaagaaactgagttgattgttgctgtgcaagataattgtatgagtgctgaggggcaatcgggagatgttgaggctcaaggagcagttgatagcagcatattgattcatgcagtagatgatcatgtggattcttacaagcaagaacttgatacaagtaattcatctggcagtttagaacctagtgccaatacaaatcccatttctcagggtggtgaggatttaagggtcaatgtatcaccatcaagtcagattcgtaccgggggcatcccatataagaaattgtctgcatctgcagctccattcaacccatcacctgccattgcacgtgctgcaccaattgccatgaatatgactcttccttctggtcctagagcagttcctgcaattggcccctggccagtaaacatgaatgttcatcctggacctactactgtgctatcagcagttgccccactgcgccatacaccgcagtggccttagctcctcccggcacaatctctaagcttcaggtctccaatcctcaaagtgtgatttccgttagctctgagcactcgagtcgcgcctagcaactttccagtcactaacagtgcctttcatgccaatcacttcacatatttgaaccccacaatatctaagtttggtcccagtgctgtttggcctggttgtcatcctgtagaatttcctcttccagtacctattgttgaaccaatccctgatcccatttcagagtcacaagctctgtgtcatggtttggaaagtccaagttcggcttcagttcttcctgaggacattgataatattggggattccaatcaagtggtaaaaactttatcatcagagataagtgaagatgaagcagtgagatctggttcagaaagtataaaagaaaatggtaatatgaattttcacgggtctgaaaatgctgggaacaagcaacatcaaaacattgcttcaaatggcaactctagcagtagtggaactaacatggatggtgagaaaacctttagcattttgtttcggggaagaagaaatcgaaagcagactctgagaatgccaataagtttgcttactcgacctaatggctcacagtcatttaaggttatttataaccgtgtggttagaggaagtcatgctcccaagtctatgaatttgtcttcaagtaaggattgtacagctacttcataatccacagttctttgttgttactaatgaaaagtagcagaattattgtgggtaaagaagatctcataattttgaacaagagagatgtggtatttcgatcatttctggaattgaattacaaaatgccctgttgtatcagctcaagttttatagctgcactatcttttgggaggtttctgatatatgtctctatttaagatggaggattggaggtttttattcatcaatataagtctgcaggttcatcgcagtcagtttcggggtttctgaggtaccttcaaggtgaaaatttggttctctacgtagttagacaattttgatatgaattacgggactgatggatagttctaattattattttttttgtaacaacattatcaatggctttgataattaattttgtttaattgtaaagaaaatggtaatatgaattttcacgggtctgaaaatgctgggaacaagcaaaatcaaaactttggttcaaatggcagctctagcagtagtgaaactaacatggatggtgagaaaacctttagcattttgattcggggaagaagaaatcgaaagcagactctgagaatgccaataagtttgcttactcgacctaatggctcacagtcatttaaggttatttataaccgtgtggttagaggaagtcatgctaccaagtctatgaatttgtcttctagtaaagattgtacagctactgcatagtccacagttctttgttgttactaatgaaatgttgcagaataattgtgggtaaagaagttctcataattttgcacaacagagacctggtatttccatcatttctggaattgaattacaaagtgccctgttgtatcagctcaagtttcatagctgcactatcttttgggaggtttccgatatctgtgtctatttaagatggaggattgtaggcttttcttcattaatataagtctacaggttcatcgcagtcagtttcggggtttctgaggtgccttcaaggtgaaaattttggttcccaatgtagttagacaattttgatataatgaattacgggactgatggatcgttctaattattatttttttgtaacaacattatcaatgactttgataataattttgttcaattgcataaactttcttaatttcttaatatgttgttatgtggtagtagtagttcttttttgttgattgagttaatatttagttgttacaattgaaatgatgtgaaggaacgtcatattaatgaaaatcattatttgtttaaatacataaagccaaaattttagctctatttttgaatttaatatgcctatcccccagtattttaattttcaaggacagtcaaggtaactcgtaacttcctaatattatttgaggggggtctatatgcttcattgtgaatatatatgtacgtgtgggtacgtagtgtgtacccgtcaaattgcttcatactgctgatatgtccgataaaatttagaagtatgaaatattaaggtttgtttccaaaaaaaaaaaaaaaaaaaaaaaaaaaaaaaaaaaaa

SEQ ID NO: 115752 - DNA, 2048 bp, Glycine max
  Clone ID: PAT_MRT3847_75535C.1
gtttgtggaatggcagcagttagagtaactgcaaaagacgtagtattttggtttcggtcacacactgctgcagaaatccgatggggtggtgcaaagcatgaagctggagaaaaagatgatggtaggaggatgcatccaagatcatcattcaaggttttccttgatgttgtgaaggcaaggagcttaccatggaaggaatatgaaatagatgctatgcattccttgcagttaatactgagaaatgcattcaaagataccgagagtatggatttaaacacaaaagcaattaatacaagactaagcgatttgaagattgaggggatgcaggaactggaagcagtgacaagtgagattgttaggttgattgaaacagcaacagtgcctattttggcagttgatgttgatgggctggtcaatgggtggaacataaaaattgctgagttgacaggtcttccagttggtgaagctatgggaaagcatttactcacacttgttgaggattcttcaactgatagagtcaagaagatgcttaacttagcactgctaggtgaagaagagaagaatgtccaatttgagatcaaaacacatgggtctaagatggattctggtcctattagtttagtagtaaatgcttgcgcaagcagggatcttcgagataatgttgttggggtttgttttgtggcccatgatataactgctcagaagaatgtcatggacaaatttacgcgtattgaaggtgattacaaggcaattgtacagaaccgcaatccattaatccctcctatatttggcacagatgaatttggctggtgttgtgagtggaatccagctatgacgaagttaactggatggaagcgagaggaggtgatggataaaatgcttttgggagagctttttggcacccatatggctgcttgtcgcctaaagaatcaagaagcttttgttaatttgggtgttgtacttaataaagccatgactggtttggaaacagagaaggttccttttggtttctttgctcggaatggcaagtatgtggaatgcctgctttctgtgagtaagaaattggacgtagagggcctagttactggggtcttctgcttcttacagctagctagcccagagctccaacaagcattacatattcagcgcctatccgagcaaactgccttgaagagattaaatgcattaagttacatgaaaaggcaaatcaggaatcctttgtgtggaattatattttcccggaaaatgttggagggtactgccttgggaacagagcagaaacaacttctacgcactagtgctcagtgccagcagcagcttagtaaaattcttgatgactcagatcttgatagtatcatagatggttacttggatcttgaaatggctgagttcactctgcatgaagttctggttacctcacttagtcaggtcatgacaaaaagtaatggaaagagtatccgaatagtcaatgatgttgcagagcagattgtgatggaaactttatatggtgatagtcttaggcttcagcaggtattggctgactttttacttatttccatcaatttcactccaaatggaggtcaggttgttgtagcaggcactctaaccaaagaacagttaggcaaatccgtccatctcgttaagttagagctcagcataacacatggtgggagtggggtaccagaagcattactgaaccagatgtttggaaacaacgggctagaatccgaggagggtattagcctactgatcagcagaaagctgctgaagctgatgaatggagatgttcgctatctaagggaagcaggcaaatcagcttttatcctctctgctgaacttgcagcagcccataatttgaaaggttaaaagttttggaaaaaagaataaaagatgatgcaaccagcaaaacacaatctgttttgtacatcataaagagaacggagctagaaattaattgcatccaatgtaactctaatttgttcccacgtttcttgttaactgcttcttgtaacgtacgttgtagatatgtattaatcttcttcccattc

SEQ ID NO: 115753 - DNA, 693 bp, Glycine max
  Clone ID: PAT_MRT3847_75536C.1
cggacgcgtgggcggacgcgtgggtgcaattggcccctggccagtaaacatgaatgttcatcctggacctactactgtgctacccacagttgccccaatgtgctcctctccgcaccatgcatatccatcacctccagcgacaccaaacatgatgcaaccgctgccatttgtgtatcctccttttactcagcctcaatcagtagcacctagcaactatcctgtcactagcagtgcctttcatgccaatcattttacatatttgaacccaacaatatctaagtttggtcccagtgctgtttggcctggttgtcatcctgtagaatttcctcttccagtacctattgttgaaccaatccgtgatcccatttcagagtcacaagttctgtgtcatggctctgaaagtccaagttcagcttcagttcttcctgaggacattgacagtattggggattccaatcaaggggtaaaaactttatcatcagagataagtgaagatgaagcagtgagagctggttcagaaaatataaaagaaaatggtaatatgaattttcacgggtctgaaaatgctgggaacaagcaaaatcaaaacttttggttcaaatggcagctctagcagtagtgaaactaacatggatggtgagaaaaccttttacattttgattcgggggaagaagaaatcgaaggcagactctg

SEQ ID NO: 115754 - DNA, 4080 bp, Glycine max
  Clone ID: PAT_MRT3847_75537C.1
agtgaaaatgtctacctcaaggcctagccaatcatccagcaattcaaggagatcaagacatagtgctagaatggctcaggcaactgtagatgcaaaaatccatgcaacttttgaggagtccggtagttcctttgattactccagttcggtgcgcgtctctggtacagctgatggagtcaatcaaccaaggtctgacaaagttacaacagcttacctcagaggcaagatgattcagccttttggttgcttgttggccattgatgagaaaaatcacatgcagacatgtaaggtcattgcatacagtgagaacgagcccgaaatgctgaccatggttagccatgctgtccccagtgttggtgaccaccctgcccttggcattggcactgacataaaaactctattcactgcaccaagtgtttctggattgcagaaggctcttggatgtgcggacgtttcgcttcttaaccccatacttgtccattgcaagacccccgggaagcccttttatgcaattgtccatcgcgtcactggtagttatattgttgactttgagccagtcaagccttatgaagttcccatgactgcagcaggtgccttgcaatcttacaagcttgctgccaaagcaattacccgattgcaatcattgcctagtgggaacatggaaagactatgtgatactatggttcaggaagtttttgaactcacaggttatgatagggtgatggcttataaatttcatgaggatgatcatggagaggtgattcgtgagataacaaagccctgtcttgagccatatctgggtttgcactatccagccaccgacattccccaggcttcacgctttttatttaggaagaacaaggttcgtatgatagttgactgtcatgcaaaacacgtgagggttcttcaagatgaaaaactccaatttgatttgattttgtgtggttccaccttaagagctcctcatagttgccacgcgcagtacatggctaacatggattcaattgcttccctggttttggcagttgtagtcaatgacaacgaagaagatggggacactgatgctgttcagccacaaaagacggagagactttggggtttggtagtttgccataacactactcccaggtttgttccctttcctctaaggtatgcaagagaatttctgcctcaagtatttgccgaccatgtgcacaaagaaatagagttagaatatcagattattgagaagaatatcctgcaccacccagggcacctcttgtgtatgctgatgcgagatgcacccctaggaattgcatcagagagtcctaatataatggatcttgttaaatgtgatggagctgccctcatatacaggaacaaagtatggagattaggagtgacaccaagtgaaccccagataagagagatagctttgtggttgtctgagtaccatatggattccacaggctttagtacagatagcttgtttgatgcagggttcccatcggctctttctctgggtgatgttgtgtgtggaatggcatctgttagagtaactgcaaaagacatggtattttggtttcggtcacacactgctgcagaaatccgatggggtggtgcaaagcatgaggctggagaaaaagatgatagtaggaggatgcatccaagatcatcattcaaggctttccttgaagttgtgaaggcaaggagtttaccttggaaggaatatgaaatggatgctattcattccttgcagataatactgagaaatgcattcaaagaagataccgagagtttggatttaaacgcaaaagcaattaatacaagactaagtgatttgaagattgaagggataaacgatttgaagattgaaaggatgcaggaactggaagcagtgacaagtgagatcgttaggttgattgacacagcaacagtgcctattttggccgttgatgttgatgggctggtcaatgggtggaacataaaaattgctgagttgacgggtcttccaattggtgaagctactggaaagcatttactcacacttgttgaggattcttcaactgatagagtcaagaagatgcttaacttagcactgctaggtgaagaagagaagaatgtccaatttgagatcaaaactcttgggtctaagatggattctggtcctattagtttggtagtaaatgcttgcgcgagcagggatcttcgagataatgttgtcggggtttgttttgtggcccatgatataactgctcagaagaatgtcatggacaaattcatccgtattgaaggtgattacaaggcaattgtacagaaccgcaatccattaatccctcctatatttggcacagatgaatttggctggtgttgtgagtggaatccagctatgatgaagttaactggatggaagcgagaggaggtgatggataaaatgcttttgggagagatttttggcacccagatggctgcttgtcgcctaaagaatcaagaagcttttgttaatttgggcgtcgtacttaataaagccatgactggttcagaaacagagaaggttccttttggtttctttgctcggaatggcaagtatgtagaatgcctgctttctgtgagtaagaaattggacgtagagggcctagttactggggtcttctgcttcttacagctagctagcccagagctccaacaagcattacatattcagcgtctatctgagcaaactgcttcgaagagattgaatgcattaagttacatgaaaaggcagatcaggaatcctttgtgtggaattgtattttcccggaaaatgttggagggtactgacttgggaacagaacagaaacaacttctgcgcactagtgctcagtgccagcagcagcttagtaaaattcttgatgactcagatcttgacaccatcatagatggttacttggatcttgagatggctgagttcaccctgcatgaagttctggttacctcccttagtcaagtcatggcaaaaagtaatggaaagagtatccgaatagtcaatgatgttgcagggcatattatgatggaaactttatatggtgatagtcttaggcttcagcaggtcttggctgactttttacttatttccatcaatttcactccaaatggaggtcaggttgttgtagcaggctctctaaccaaagaacagttaggcaaatctgtccatcttgttaagttagagctcagcataacacatggtgggagtggggtaccagaagtgttactgaatcagatgttcggaaacaatgggctagaatccgaggagggtattagcctactgataagcagcaaagctgctgaagctgatgaatggagatgttcgctatctaagggaagcaggcaaatcagcttttatcctctctgctgaacttgctgcagcccataatttgaaagcttaaaagttttggaaaaaagaataaaagatgatgcaacagcaacacaatctgttttctacatcataaagagaacggagctagaaattaatttgcatccaatgtaactctaatttgttcccacgtttctttaactgcttcttgtaacgtacgttgtagatatgtatgattaatcttcttcccattccttgaccttaatcttcttcccaaaaaaaaaaaaaaaaaaaaaaaaaaaaaaaaaaaaaaaaaaaaaaaaaaaaaaaaaaaaaaaaaaaaaaaaaaaaaaaaaaaaaaaaaaaaaaaaaaaaaaaaaaaaaaaaaagggggggccgtttaaaagaaacaaaattaacttccccggccatgaaaggtaaaaaatttttttaaagggcccccaaaattaaattaatgggccggggtttaaaaacgggggaacgggaaaaacctgggggtaaccaaattaaatccctttgaagaaaatccccttttgcccagtgggggaaaaaacaaaaaggcccccaccaaccccctttccaaaaagttgccaaccctaaagggaaaagggaaccccccctgaaccggcccataaagcgcggggggggggggggtaacccccaggggaaccgttacatttgccaggccctaagcgcccgtccttttcgtttttttcccttcctttttg

SEQ ID NO: 115755 - DNA, 387 bp, Glycine max
  Clone ID: PAT_MRT3847_75538C.1
aaaaattaaaagcagagattcatatttcagattacccgaactttttacagaagcgaccatttcccaaactttaaaaaaaaaaagaaaaaaggaggcccccttgggtttaacacccccttcacaggtccaaaacatttgaattgggtgaaggggaaaacatgaccctttttttttaagggggttggtttaaaacaaaaccccggggggcgcgaaaaccatcccagacataaaacataagtttttagctccccattaaaagtttataattattccaaataaggggctttttttgtttgaagttggttttcccaacacctaatttgcaagtgcaggggttgcaggaacattttggcccaaatttggagcctttgttttaaaagaacccgg

SEQ ID NO: 115756 - DNA, 441 bp, Glycine max
  Clone ID: PAT_MRT3847_75539C.1
ctcttccccaggaagtggaactatcttgtgttgttcatgtttagatacctgatgaacctgagtttggtttttggttttgtgactgacaccaatccgataataatactgattctttctgaatatccttctttgggtgacaagtatcagattttgtgacagttgaggtgaggtgaggattggttttcacttttcagcttgtgcaattcttgaatttgcaattctggttttcaatttttgaatttgagattattatgatttatgagttgaacattttcctaatcttatttgattttgaatcattgttttgagtttggctgaaaagcaatagagaacaaaacttaggtgaggtatcataattaggtactcttggctgtgtttctccaatgagaattcgagtttcaccttgataatgcaaaccttaactatatggattacctagtc

SEQ ID NO: 115757 - DNA, 247 bp, Glycine max
  Clone ID: PAT_MRT3847_7553C.1
ggcacaagtgagtttgttgatcgagatacctagagacagtgtgatgaatctgaatgtccttgttttcttcgttgctagaattttggtagcatcagactgacatatgtttcacgcgttgaatctacgaatgaaaactgtgctattgtgcccgtagtcaggaggtgaagttcgcaagttggaggcttgctatagaatatcattggatttttgaccattacagaatacttcattaatgcattgaaggaat

SEQ ID NO: 115758 - DNA, 340 bp, Glycine max
  Clone ID: PAT_MRT3847_75540C.1
ttttggtgggtttttttttttttttgttggtttttttatttttttttttttttttgggaaaaaagaaaacccataatataactggaaaatcaaggggctcaaaatataccgggggaggatcaatcttaggtttcggctcaaaattgagagggggtgggtaaacccaaaatccctaaaaacccaaagcccatggaaagaaaggggcctaaacctgaaaaagaaaaacaaattggcaatcacgggttttcctaagcttcaacaaactgtgcaaaatactgggacaaacgggctggtgtgaaatcagtttccccgattcctttatcaagaatttttaccccct

SEQ ID NO: 115759 - DNA, 428 bp, Glycine max
  unsure (1)..(428): unsure at all n locations
  Clone ID: PAT_MRT3847_75541C.1
tagccggcggccgcccttgggncgaggcactataagcaacagaaacttaaagcttttttaacaccaaggaggcggcgacggggaaaaagacaaanggacagacccggaccagcaagaacaggagngaccaagacaccgaaaaaccaaaaacgcagggaaggagcactggggaaaacaaaaagcaaaagacccaacgactagccatctgggaagaggcgaagcacaatacccatgaacaagacaagggggacgtgcccaggaaagaccgagccctacccgcacacagattgaccagaactggcagcccccaacaaggaggcgggaccaggcaccaacaacaagccctgagatacccctgcaggtgaccagaggggcccccgagtgggccccggcaaccaccaaaagggcagccggaacccaccaaacag

SEQ ID NO: 115760 - DNA, 431 bp, Glycine max
  Clone ID: PAT_MRT3847_75542C.1
cccacgcgtccgcagtgaactcttgccataggttatactatgaccccactgtgttcagtgtgttgtatggctgagatatataagtcaaaggtcatcaggtagcaaagcaaattttgggaacttacgggataaattcttataattagcattctatgctggcctagaccccacttgaccgcaatacgtcaataccaaaagaagaaaagaacaaattcctcaaatgcttaactagctgaagtgttcaggtaaatataaagcagaaatcttaagatatgcggacatattttaagaagttttgtggaaagtagaaaaacagatttcaaaaaactcatcacatttgaagatattaagatgctacagaatttcaaacacaaaccaactatattataggaaaatataatttagtggtctccattttccttggggccggc

SEQ ID NO: 115761 - DNA, 829 bp, Glycine max
  Clone ID: PAT_MRT3847_75543C.1
gcggaaactattcatgggatttgttagcaagcttgcttcaacgttcccacaagcttgaagttcttacaatttataaggaaccacaaaaatatgcaaagggacaagagccaagatggatccatccactgcttgttcctgaatgccttttacatctcaaaacattctgcctaagagagtatcaaggattggaaactgagctggattttgtagggtatattatgcaaaatgccagagtgttagagacaatgacaatctacatatcaagttccttaggttcagaggaaaagctccaaattcgcaggcatttatctatacttcaaaggaactttgaaacctgtcaaattgtattccattgaatcttatgtcttaaagagaagaaaacaagtaccagcggtttcaagtgcagaaatcattcgtatagagatgctatgcagcaatttgtagtcatcaaaagttgatggaatcctattttgatctgaacggcataatgtttgaaggccttccttttagttactaatactttatagtgtatttcttttgttattgggaatacttctagttggtctagcaagaagcaaaacacttggctaactaaggttcattataggctgtgtaacatagatacttgtccacctgaggaagtcatccttacatacttactttgaggggtatttttttgcatacttcaaagttcagagcagctttctcttgagaaattatctgactgctctgcaacatttcgtgtaaagcctgtacaacatttgatcatggtatgtgaccaagtcagctgttttgtgttggttaatttctgacatttaacattgtaata

SEQ ID NO: 115762 - DNA, 226 bp, Glycine max
  Clone ID: PAT_MRT3847_75544C.1
gtcgcgagcggccccctttttttttttttttcataattgtaattaaattggtgttgtacttcagtgaaaacaggcaagagttgtgattattttcgcagttgtaaatgtgatatcccacaatgccgagttattaaattggtgagacttcactgataaaagctaagagctgtgattaaattgtagtgtctttgagaacttagagtagtcaccttctctttttttgatt

SEQ ID NO: 115763 - DNA, 412 bp, Glycine max
  Clone ID: PAT_MRT3847_75545C.1
cgttaaaacaatatggaatttttgtatggaacttgataagatgttaaatgatttacaactttatgagtttaaaaaattattatttttataccatacatgttcttgaacagaaaatactctgtgcttgattaaggcttacatacatagcgtctgcaaaacattatgaaaacttacctgatatctcgcgtgttggggattgcatcaatttggatcaccttataaatcacgaacgatagatccacacaccgtttattgtgtctgacaatagatcctccaatcctatccaaccaactttggtttagtttgatggttaattatattttggattgggaggaatttgaacatcctaggcccatcttaattattcatagaggataaagcgcggattacaaccaacattttcatatttttc

SEQ ID NO: 115764 - DNA, 332 bp, Glycine max
  Clone ID: PAT_MRT3847_75546C.1
gtgacacccagtcccctcactcaattataatttagcgcgcgctctttgcttttgtctctttctctataacacagatctccctcttaccaacgattcatctccctaaactcacgcttttgtaccgttcaaggttcacctcttcagaactccctttaacccctttgcccctctctcctgcttggattaatcatcattataaaaatattttgattatggttctaaaatctgctaaaacgctcacaatcgctgttcgataattcgattgtcttcacaccatgacattctgcttttcttagccacctacttgaacatgctacactccccctctgagg

SEQ ID NO: 115765 - DNA, 513 bp, Glycine max
  unsure (1)..(513): unsure at all n locations
  Clone ID: PAT_MRT3847_75547C.1
ccacgcgtccggttcctacggttctgcttctcctctcttactctatcctcttccgtgttgtgtttcttttaacgggtcgaacctcacaacaacaacaacaatcaggggttttatttattttgtttcggtcaaaaaaggagaaaggaaaggtttcatagattaatatatgttatgggcaccatcgcctctccagcttcttcttcttctccgttttctgatgctttttctcaaaggtacttattgaaaatcccccttcattttcgttttcgctctctccttttctgaccgtcaatttttatttttttttaatttttgagtatcatggtgtgataatatatactctctcttttcttttcttttcttttttcattttgaagatttatggagatcccttggttagggttagatataatttttctgtagcatttttcaaatcgttcaagtctctctcttttttttttcccaaaagaaaaaacatttttttctanagaagtttgaattttngtttgttgt

SEQ ID NO: 115766 - DNA, 449 bp, Glycine max
  unsure (1)..(449): unsure at all n locations
  Clone ID: PAT_MRT3847_75548C.1
gggggaacaaccgctggaaacccttgcattagtttttattttttatttttttactttgaaaggctttttaaaatgccccgggaccttaaaacgtaagggcttctcagcaaaaaaaaaaaaaatgggagatatgcctaatttggggtaagttagaataggtcaatttctaaggcaccagtgctttgttaagggcccaaaacattattttagaattggaattagacaggggaagaaaccttcgggaaaacacaaacttaaaaagaagaattccgccgaaataaatatgtgaaggagactacacccttcgcggttagagaaagaaatttcattcgaactattaaacttttttttgcaggctgtgtaattttataattatataaattaagacaaccatctttaatatattcgtttttgaatgaatgaaanaaccgtgaccaatatattttttt

SEQ ID NO: 115767 - DNA, 279 bp, Glycine max
  unsure (1)..(279): unsure at all n locations
  Clone ID: PAT_MRT3847_75549C.1
tanggttttcccaaccctcttcccttgttcgaaactagnctaatcaaaaccgaaagaaacgattatnntaacaagagaagaagnaaataatcantcttgctcggtgagaagagagngaggtacggcccgntgaccggganngcgaagcgctangaaaggcacacggcgaatgnaatcgccgcgaaggtggacnccgcnaccactaaccgcggctgcnggaaggccggcctgaaggancgatccgggtttgagnanggcggtcagcganatacgagtgcc

SEQ ID NO: 115768 - DNA, 271 bp, Glycine max
  Clone ID: PAT_MRT3847_7554C.1
tgggcatctctagttttaattatgcaggggactgtcggctgtgtgtaataatcgggctggcaataaagtaagccatctttggctttaggggaattttatttggttgagaaaccttggtccaaattggttggaaattagattccggaaaccaccaaggaaaaggtaacctctcaatgggaattaaaaaaatccttggcaagttattacacttttataaatggaaaatttgcaaattttatctttcaaaaggatatatttttgaaagggtttt

SEQ ID NO: 115769 - DNA, 808 bp, Glycine max
  Clone ID: PAT_MRT3847_75550C.1
gaattcgagctcgttacccggggatcctctagagtcgacctgcaggcacatataattgaggctcactctgatgatgcggatgctcctgccaacagccaaatgtcatttgaaaatctctttccaccccatttgatctctattcgtctcatccatcattttctccacttctcctgctcatagctatgcatttgccttctccacacaccctcccctcaaacacaactttcacacccttatcacactggtcactgcattggaactgcaaatgtttttaggaccttaaagggaccaatctctcttgtaactttctctgtttacttttgtggcagaccaagtacacatatggatggtagcatccttttcagtgaagctcacaagtaagtctgatccatgtgataaaaaggatgagagagatctgtccttggtttgcatccctttagcttaagttgtctacatgggccatacatattccccccaaaactctagagctaaaagatataaaaggttcactcaattttagttaattgtggtgtgataaagtccccttcatgttcaatgagtggccggagagggaaatccttctagagagcatcaagtggggtcattctgaagattcaaagcactatccctcatttacaataagtcataccatctgcctcaactgattgtctccattttgtttaaaaaacgcgataagtacgtttttcgttgttgtttgattttccaacaatgccactagtcagtcctcttataggggcccctcccatagaaacagccatgtttatcttcaactaagaaagatcatgct

SEQ ID NO: 115770 - DNA, 478 bp, Glycine max
  Clone ID: PAT_MRT3847_75551C.1
ctccaactttctctcgcttcttgcgaacacagcacggtgttacgaagaaaagtcgcatcacgaaccttcttagaaacctcgcggattcttcacgatcccgcgcttcacgcctctttctcccttcctttttggaatgggattgaaatcctcctcgctcttcgatttcgagactcgccaccggaggttttgcttttgggccgacgccttctgaaaaaaaaaaaatagcgagttagggttttgattcgatctttttaggttcttggcgatgatgtcaaacgaggaattcgattactcgtacctatcggacgacgacggagacgtcgccgatgacgataagctctgcatcgatctggacacagttatgagcgttctcgacgaggacgccgatccttccgagagtagtcctgaggatttttcattgaaaaatatttctcccggtgaatctggcatccatgataatttctacttcaaaatggga

SEQ ID NO: 115771 - DNA, 146 bp, Glycine max
  Clone ID: PAT_MRT3847_75552C.1
gccttaaagccatcattgcaactggaactagtgcaattactatcgcaataaatgctcacttggataaaacaactgctaaagcaaagtccttaagcactcatcccgaagcataagagggcattagaagtcaataacagcgcatcttt

SEQ ID NO: 115772 - DNA, 319 bp, Glycine max
  Clone ID: PAT_MRT3847_75553C.1
atttttgttagtgaccagggttcgctgcaccacaggataatggtcagcgtcaattgaagaagatgccgatcagaaacatcgccgtcggaaggcctgaagaggcgactcaccccgacacgttgaaggcggctttggctgatttcatctcaaccttgatcttcgtgttcgccggctcaggctccgggatcgcctacaacaagctcaccgacaacggcgccggcacccctgccggcctgatgtgcgcctgcatcgcccatgcattcgccctcttggtcgccgtctgcgtcggcgccaacatctgcggcgggcacgtgaaccc

SEQ ID NO: 115773 - DNA, 276 bp, Glycine max
  Clone ID: PAT_MRT3847_75554C.1
gcaaatcgacgtgaggggtgttattttttttgaattcaacaacatcgtgttggactgcatggaaactcttaaatgagagcgatcttttttgcgtccattaaacccaagacccaattcttacatatattccacccctccctttaattattcccccaaaatgattggctcaaagggcggcagtgttaccgtatgacacgtgtattgtggtgccatagcttgagtgacacttctgagtgtagcacccacatcgcggaaaaatctagtgacgctactatt

SEQ ID NO: 115774 - DNA, 903 bp, Glycine max
  Clone ID: PAT_MRT3847_75555C.1
taaaaaagctgaaaagctgcgagaaaacgacagaaactgatagcactagcaagcataattgttggagctccaaaccagacgggactactctctagctccgtccacgtgccgtcgtacgctctgaaatcttccgtcgtctctggcatctccgctgccagccttctgatctgtcataccaaatggccaacagggttcaaattcctaccaacaattcagcactcattgctatgattgcagatgaggatactgtagttggatttttgttggctggagtgggaaatgttgacatacgtaggaagacaaattacctcattgtggattcaaaaacaaccgtcaaacaaattgaggatgcattcaaagaatttacaacaagggaggatgttgcaattgtgctgattagccaatatgttgcaaatatgataaggtttttggttgatagttataacaagcccgttcctgcaatacttgaaatcccttctaaagatcatccttatgatccggcacatgattcggttctgtcacgagtgaagtatctcttcaataccgaatcagttgcatctgggagacgctgaattcaccttttgcagttgcagctttttgggggtgtttgttgtttttctttgtacaatatggataataatcttttcttgaaattcagagttctatgtagctgtagcttaaataatttgtgctgtcttggggataatttaaaattcctgtcacagaacttcaagacgggcgaatattttatggtgtcatgtcagattcagatgaaaatttagcttgaaatatgcgttgatataatctctctttgactaatttccaacgtgtgattgaagaacgcatgttgtgacatagggtataccgttgtttggcaatgcctaatgctgtgttttcttcttc

SEQ ID NO: 115775 - DNA, 253 bp, Glycine max
  Clone ID: PAT_MRT3847_75556C.1
aaaaaaatcagcttttcccataagctaaaagtatcttatgcataagctaatttgtagaaactcttttattttaacttattcaaaagactattttattttaacttatgcacaagtttagtttcttatgggagaaacttattttattttttcttcctattttttctcctgtaagtgcttatgaaaaagttgatctaaatagactcttagtgcatttatgtagcagttgattgtccatctaaagtttcgaggtaaa

SEQ ID NO: 115776 - DNA, 272 bp, Glycine max
  Clone ID: PAT_MRT3847_75557C.1
tttgcagtgatcacatcctcatcttctttctcaatcctcaaccagtaacctctcaatttctctctcttctgatcccactctctcacttgggggttgaagatgagaatttgtggagcagcaatcagcagcagctataccaccacgtccaattcgcttttagtgtttgcttcctcttacctctccagtcttgacaagaccaagttcgtgacctcactttctagattgactgtcaagcgtctatgcttcctttcccagactcgtgcgcacatttc

SEQ ID NO: 115777 - DNA, 281 bp, Glycine max
  Clone ID: PAT_MRT3847_75558C.1
cttacaaacacaaacggtctttaatgaaataagtaaacgagttggatccatggccagttgcagacacacctaattgcgatggaagatacggactggcaaacacaagtttttcaaaagcacatacttataatactctgggcacatttgttacattcccaaagcttctggggcacaaaactaccttcagtctatgatctcgtgctggcatgataagcattggttgggtctactgtacggagcccctgggaacaactggataattaaacggtgcctttcatgcc

SEQ ID NO: 115778 - DNA, 181 bp, Glycine max
  unsure (1)..(181): unsure at all n locations
  Clone ID: PAT_MRT3847_75559C.1
ctctctgctgaagcacagatgtgaaatgagcatgtgctgttggaaatggaccgatttttaagacctgttgggcatgcttattcatttcgagaggtccgttattatgggggatgccattgcttctatgggcaggggtttgagatgggtatgtngnaaagaaaaaaccgagtttggagtttgc

SEQ ID NO: 115779 - DNA, 394 bp, Glycine max
  unsure (1)..(394): unsure at all n locations
  Clone ID: PAT_MRT3847_7555C.1
cggctgcgagaagacgacagaagggggcgggtgcgagaagacgacagaaggggacggctgcgagaagacgacagaaggggacggctgcgagaagacnacagaaggggacggctgcgaaaagacgacagaagggtacgggtgcgagaagacgacagaagggtgcggctgcgagaagacgacagaagggggcgggtgcgagaagaccacagaagggtacgggtgcgagaagacgaccggaagggggggagggctatcgattgactcttggtggtcgctaaatggggaggctcatttccaaaggacactgtgacctgggacaacaactccctctggaacccactcgcgctggggaatgaaattcgaaggggagggatgaatgggagaatggaggggg

SEQ ID NO: 115780 - DNA, 223 bp, Glycine max
  Clone ID: PAT_MRT3847_75560C.1
tttatcgcgtacgacccaaagaatgacccaaagatggaggtgctgaaggaaggtgttcttgagagcgatgttttggactacgtggatggcaacatgtactgcatcatgtacgacctgatgaaagagaggtatgaactggactctgaaggtggaggtagaaatgggtgtcaagaagttgctcacaggcacgattacatgcaccaccatggatacttgcatcctg

SEQ ID NO: 115781 - DNA, 810 bp, Glycine max
  Clone ID: PAT_MRT3847_75561C.1
atggctaacaactttcttgatgtgttttgctggattcagaaccttccaccaatttcagaatgggaaacaagttccatgtccttaaacatatgttcttcttcaagctcatgccaaccacgtcttaatctcaccgccatccttctttatggctccaacaaaaacagcactaccttcatcagatttccaaaccttgactccactgcttccgacaacctttcagacgttttcaacctttcagacctgtattgtcacctcatggtcatggatgttgagaattcaaaaagcagtccagctagcgagaggcttcaattctccctcagatatcaccatgtggaaggcgttcttcaattcaatcacaaagtcttaatcaaagacgagtgggctgaaatcatggtggacattgacaacgtaaggtgtgatgttatcgaattggtgaatgagttccttatgaaacaacgaggggctggtgcagctgaaaaacattttccttccagaatatcattgcaacttacacccacaatccaagaccaagtgttgagcctatcagttggcaaatcctcagagaacccacgaaaagaaattggtgttgacaaaagcgtagaagcttcatttgaggcatcgaatcccttggcacttaaggtgtcagctggagagagtcctcaaccgttagtttatggatacagtgcaaatttgaattggtttcttcatgactgcgttgatggcaaagaagttttatcatcaaagccttcgaagtttgcaatgcttaacccaaagtcatggttcaaaaatcgatactccagtgcttactga

SEQ ID NO: 115782 - DNA, 704 bp, Glycine max
  Clone ID: PAT_MRT3847_75562C.1
aggctccctatgctctcatttacagaaacatggcagtcttaggcgtcgaaggtttctcggcacttccccaccactgcttgcagctctgttacgggttcttcgctttcgcggtggctgtgaacatggtcagagacctctcccccaagaagattgggaaatggatgcctttgcccatggtaatggcgatacccttccttgttggtgcttactttgccattgatatggcccttgggactttggttgtttacgtgtggcacaagcttaactccaagaaggctgaggccatgattccagcaactgcctctggactcatttgtggggaaggcctctgggctctccctgcttccattctcgccctttccaaaattaaacctcctatctgcatgaattttcttgcttcctagaacttgatcatcaactacatcaaaccaataaatgccatgattagttagtgtttgcagttccacctcatacccccagaaatagaatactacaaatattcctagtgtctcgtcattgggctttggaacattgtattattgcttactacaacttaattcgtagcaaaagtcagttcctgttattgatctcttggaagggaagagaattaattcgacttatttgtgtaaaacgtcaacaaatgatttattaagagagctgaaaagtagtctatgatataaaaaagttaatttaaaaaaaaaaaa

SEQ ID NO: 115783 - DNA, 329 bp, Glycine max
  Clone ID: PAT_MRT3847_75563C.1
cctcttcgaaaaccaaacatcccccctttctggggggaacacaaatatcaattcttgagacccaaaattttaaatcggtaatccacaaaaaataccccctaactcccctaattaaaccattcaaacctacctcggagaaaaaaaaaaaaaacaaaacaaccacccaactcccgggcaaaacggctcctttaagaaccacctgccccaccaaaaaaaaacggtagcccccgccataaaaaaacccataaacgctctctttttctaaaccccccttattctaagcgcttaagcgggtaccccggtgcccccactaaaacccccaaacgccc

SEQ ID NO: 115784 - DNA, 891 bp, Glycine max
  Clone ID: PAT_MRT3847_75564C.1
atggctaacaactttcttgatgtgttttgctggattcagaaccttccaccaatttcagaatgggaaacaagttccatgtccttaaacatatgttcttcttcaagctcatgccaaccacgtcttaatctcaccgccatccttctttatggctccaacaaaaacagcactaccttcatcagatttccaaaccttgactccactgcttccgacaacctttcagacgttttcaacctttcagactctagacaagcatcacatatgattatgaaactcttagggtctaacttggaagagctgtggatgcgttcattgaaccttgcgctgtattgtcacctcatggtcatggatgttgagaattcaaaaagcagtccagctagcgagaggcttcaattctccctcagatatcaccatgtggaaggcgttcttcaattcaatcacaaagtcttaatcaaagacgagtgggctgaaatcatggtggacattgacaacgtaaggtgtgatgttatcgaattggtgaatgagttccttatgaaacaacgaggggctggtgcagctgaaaaacattttccttccagaatatcattgcaacttacacccacaatccaagaccaagtgttgagcctatcagttggcaaatcctcagagaacccacgaaaagaaattggtgttgacaaaagcgtagaagcttcatttgaggcatcgaatcccttggcacttaaggtgtcagctggagagagtcctcaaccgttagtttatggatacagtgcaaatttgaattggtttcttcatgacagcgttgatggcaaagaagttttatcatcaaagccttcgaagtttgcaatgcttaacccaaagtcatggttcaaaaatcgatactccagtgcttactga

SEQ ID NO: 115785 - DNA, 660 bp, Glycine max
  Clone ID: PAT_MRT3847_75565C.1
tttaaacaaagttaataacaaatgtcttaaatataagaagatgccacaccattttacagagtatagcagtgtaactgaacaaagaaaatagattattgttacaaagctaacttttcttcctatggtactagctagttcaatcaatatatgaaatgaaagacaacactttaaaataaaagttataattttagatggataatcatccttaaattatcatggggcattaaaatgaagagaaaaaaaaactgcaagattccaaagatgcatacttgcatatctgttgatccatatgaaagtacagaatcaatgtcccaataagcttgggtcccctatatactctgcaatctgttcaagtttcacattgagcagctcatgggtatcagcatccctaactatggcagtttcctggtccaaatccctctctgccatactcccgtacacacccttgtatttaccagccaacacaagcaccggtcccccacgtttcggtatcactgtctcgagaacatcttgtgacactccttgaacaatctcccgggtctcatcccatagatatatcacaagtagtaggcccaacaacatccagaacctccccctcctttcccccttttttttaaaaattacaaaccgggcccccccttttttaaaaattcccgggtt

SEQ ID NO: 115786 - DNA, 408 bp, Glycine max
  unsure (1)..(408): unsure at all n locations
  Clone ID: PAT_MRT3847_75566C.1
ccattattcatttattcatttggctnntggtaactgaacaaagaaaatagattattgttacaaagctaacttttcttcctatggtactagctagttcaatcaatatatgaaacacttcaaaataaaagttataatttgaaatggatgatcatccttaaattatcatggggcattaaaatgaagaaaaaaaactgcaagattccaaagatgcatacttgcatatctgttaatccatatgaaagtacagttgtatgccacatcagatgcaccagaatcaatgtcccaataagcttgggtcccctatatactctgcaatctgttcaagtttcacattgagcagctcatgggtatcagcatccctaacaatggcagtttcccgatcaaaatccctctctgccagctcgagcc

SEQ ID NO: 115787 - DNA, 715 bp, Glycine max
  Clone ID: PAT_MRT3847_75567C.1
ggcatttgctcatcctccccatctctcaaccactccaccccaaaacgacgccacaccccactcctcccctccaaacctttctactctcttaggcatgaggctctcgcgccacagcaacaactaaatctctcaacactagactcgagaaggagccacacgcgctatggcggcgctacgtggtgtggctttaccagcacaaggagctgagactctacctggacgtgagccgggtctggttcaccgacgagttcgcccgtgaaatagagccccgcttgtgtttcaagcatgacaatctcgcctccgtttcctactatttcaaacccaagcacaaaggtgttggagaagacgagggtttaccattacaagaggctcattttagaggcaggttactccaaggaacaacactccctcttctgcacggttactctgggcttcaaattaaccaaacaaagtatgtggagatctactccaaactggctagctgtttccaccagtcgttatgcaactggtcatttcttggccaatcaaggtggcattggtcttcagtttgcacagcttggtcgagatgcttctgcaattggtgtaactcgtcgattggctacacagaaaaagaatttggatttcaatatcttgactatttttcttagtttcatgtttttactttttcttgatatgacagtcattcttgcgagagacagacagaaagatgcatgca

SEQ ID NO: 115788 - DNA, 667 bp, Glycine max
  unsure (1)..(667): unsure at all n locations
  Clone ID: PAT_MRT3847_75568C.1
cccgcgtccggtctactctcacaccttcgaaccctagcacagccccgtgccgtcaactgtcaaccaccctccgtccaccgcacgcgcacctcgccaccaacatccagcaactcgcaccagaacagcacctcccatcgttgacgcacaaagtagcaggccgtcgcactcgcgccctcccgtccacagtcgcagtcggaccagccaccaggttgttggagcattgatgggaaagatgtgcaagaataagaaacaagctggtgggcatggacctccaagagagcaaactgatacacaggaacaagaaatggacataaggaagattatgaaagatgttgaaaattttagtaatgttcattttctatttttcattttgactttctttcccttttccttgactgttgtctttatcttttctttgaatctgctttctgttgttgatgcattttgaatattcaattcaatagaagacaatgcattatgaaaagtggatgattatgttcttgcttcttactataatatttcatataattaggttggatttctttggtctgctctgatgcagattgattcgtgaatagctgtacaatgcatacttggtagctgaaatctttgattntaaagcaccatgatgnattatgtggctactggctggatagatgtgatagtc

SEQ ID NO: 115789 - DNA, 531 bp, Glycine max
  Clone ID: PAT_MRT3847_75569C.1
gcagtatggatatattggcatgtaagcttccttttttgctatacttccctcttacggagtttttatatgataagtattttttgaaactgctgtggtgctgtcagactatgataagttttctttggcaagcaatttaagaggcttgaacttgaaataactgaaatttgaagtgtgattggaactgaaatttactgagaccagctccctgcaatcagaggtaggcttccatactgaacacaaatggggacaatagggactaaaatgttgaccatgtcatcattgggacttgtaccatgtcatgcatgaacttcccaaaagcttaagctagtacttgaaggtttatgatttttctttttataaatctaacagttttatattcaacctaattataatctggtatttttttacttctgaaagataaaaacatgtgcattaatagaaaagatatgaaattgatacttaaaaatatattattgtctactccgttggatttggatttgaataatgattgctttgacaattaattttttt

SEQ ID NO: 115790 - DNA, 780 bp, Glycine max
  Clone ID: PAT_MRT3847_7556C.1
cccacgcgtacgcctgaatctcgcaagcaaacagctgcacctgttttggtcccagctaaggttattcatgctctgaacctcaaaattgatgacctcaatagccaaccacgtttcttgggtgcttttgacgtggactatgatgctttgttagcgaggaggaatgctcttctcttgcagcagaagttaagcatgctgcgagaagaggcagctaactatgaagctcttagcctgcctcaagaatggacgtactgactcctttgataatagtgttcattcaaacaagattcaattcctataagttaatccttgctgaagaaagaaagctagtgaaattagtaggtttgtgatagggaagttggtttttttagtttttttatggtataaagatgagattcaagaatgtgtttgggtagtttaggggcaataaatcatccggttttttgagagagatgcagcttttgggatctgttgttagttgaagaaacagtgaaagatagtaagcagtttaggggattttttttttaatttaaatctatgattaagaatatatttattatttgtaataagtggggttcgttttcttccatgttaatgttaaattaatgttgatggaagaagggtaaagggcttattgtgttggaagagagggttcaaagtctagctgggaaaaagtgttagaagattggccatactctttgtaaaagctcttgctggtaatagaatagtatttaataagttatacaatatatgcaggaaaggcaagtcttgtgtaattcctcc

SEQ ID NO: 115791 - DNA, 256 bp, Glycine max
  Clone ID: PAT_MRT3847_75570C.1
tgatagaattagcacaaagagaagcattatcaaatgcgggaggaactagtctaagcagagatggcctcttcagtgatggcatttgtggcctctaaacctgccactttcactgttgagaagtcctcagttagaggccttccctccctctcaaggaactcctcttcattcagagttgtggccagtggtggcaagaagatcaagactgacaagccttatggaatttacggtggcatgtctttgaaggcacgattcgatg

SEQ ID NO: 115792 - DNA, 332 bp, Glycine max
  Clone ID: PAT_MRT3847_75571C.1
agacccccatttttcccacattttctttgtctaaaagggtggtctttttaaaccccggatcattggaaccccccgccttaaatggaaaaaaggggtttaactccccccaaaccttaaaggttaaaaaaataaaaagcccccccagagctttaaaaacttttacccgggggaaaagatttattaaacactgggggggggaaaaaggggtggccaaaaaaaaattgggggggaacccaagttttatagacaaaatttttggggaggttgttccttaaagggaggagcttctttctgggggtctttttagagggccttaaagggggcattctttg

SEQ ID NO: 115793 - DNA, 512 bp, Glycine max
  Clone ID: PAT_MRT3847_75572C.1
ctacagcttctaataaatccttgacaacttcctcctcttctaattcaattcaggctctagctatgagcgtaagcaataacaatataatgagctttaaagctctaaccttatggtgcattttgttgtctttgttgcaactatctctaggagctgtaaggcaccgtattaggtttaacgtagagtacatgtatcgtgagccagattgccatgagcacgttgtgatgggaatcaatggccagtttcctggcccaaccatcacagctgaagctggagacacccttgagattttactcaccaataagctctccacagagggaacagttattcactggccatggaattagacagtatggaacaccttgggctgatggaactgctgccatttcacagtgtgctattgctcccggagaaacttttaattacacatttacagttgacaggccgggtacatacttctatcatgacactttggtatgcaaagagcagcaggactgtatggttctctgatagtg

SEQ ID NO: 115794 - DNA, 229 bp, Glycine max
  Clone ID: PAT_MRT3847_75573C.1
tccgcgcactgtttggggtacgggcgaaaagagagatgtggggaggaaaaggcgcggctagctctggcagtgtccgttgcgtttgatccttatccctagtctctgctggtgtggccctgcgagatgggagacctgggctggtgtgagaggggtcgtgcggtgaaagtgtgcatggcgtctgtcttacgatcgcgtctgggggtggtgcgtgtgtttggcgccttaatgt

SEQ ID NO: 115795 - DNA, 230 bp, Glycine max
  Clone ID: PAT_MRT3847_75574C.1
gatgaccatgaaattgcatccagatgtcccgtatgtcgtcaggagattcgagattcagtgcggacttattaagcttgtacagacacatagtgagttttctgttcactctgcagcaggaaacttttatgactgctactgtacacatcatttgttctttactagttctatgatatatggaatattcagttttacggacaacttgcttctgcgcttgttacctgtaaacttag

SEQ ID NO: 115796 - DNA, 254 bp, Glycine max
  Clone ID: PAT_MRT3847_75575C.1
aattaaatcaaccggggggttaacatgcttttgcctttaaaaccagggacccaaacatataatatcattacccatatccaacataaaaaaaatttaacattcatacatatattaacttaaaaaagcaaagccctgtagttactataaaggacacctgaaaaagcatatacccaacacaaatgggtactgggtatatatatatatatatatataaaaaaaaaaatatatatatgggggtatgggggggggggggg

SEQ ID NO: 115797 - DNA, 199 bp, Glycine max
  Clone ID: PAT_MRT3847_75576C.1
aaaaaaaggtgatgccccttcgtatgccacacaacaggatactagtagaagaggggtacccgtgagcgctatgcaagtgaaaggcggggtactcgccgacactaaaaacaggagctagcgaaggatgcgaaccactgtactgttcaatgctatcttataacagtgtaaagttggaaaaaaatggaccatgacaagattg

SEQ ID NO: 115798 - DNA, 259 bp, Glycine max
  Clone ID: PAT_MRT3847_75577C.1
tttctttttttttttttttttttttttttggggggattttttaaatttttttgggtttaaccaccaaacttaaacaaatacataaagtttcaattaaaccatattttaaaccctcacaaaatcaactgactaccttaaaaaaaactcatattctaaaaaagaatgtaacctctccccaacttaaactaaaaattaaaaatcttcattacggaacctcacccattttacattaaattaagacatctccaacaaaaaataa

SEQ ID NO: 115799 - DNA, 321 bp, Glycine max
  unsure (1)..(321): unsure at all n locations
  Clone ID: PAT_MRT3847_75578C.1
ttttgggcgcccttnntnnagaagagatccttttttttttnngtccctgaaagacattttggttacttttaattaaaaaatcaaatttctacaagaaacattggctaaaacttttcaattttaagaagtcttttaaaatattaacctggcaattacttttttttgaacagttacctatctacggggggggggaacctttaagaagaaaagggggcccaagaaagaaggaccacataattctttccataatttccctcgagctcccggagaagagggttggcgggaggctttccaaaatcaaaagtcctttcggttgatggg

SEQ ID NO: 115800 - DNA, 522 bp, Glycine max
  Clone ID: PAT_MRT3847_75579C.1
ttattaatggatcattagaatccggcgatttcattaattctaatagagacatgaagcatcatcgaattgaagtcgctaattgggtagtgttgttaaggttgttgtatgacctaagaagcataagagtgcagatacaagaatcaaaatacgtgaaggtagcaacggcattgtactccgggacatttcgtctgtgtattctgggccagaatctgaaaaatatacagtgccatcgttgggtcctctgatccacattcccagattattgtccctagcaacgccgagaacaccggcggacatagtgagaagcgaaatgcgatccacgttcttaggttgggtgctgtaggcgttctgatagttaggttcagcaactgctcccgaagcaacgaagaacgcgccattcaacaaaacatccccttcggaccgccaattccacccgctccactcccctttttcggcatccagcctcttcgtaacctgcttcgcgtacggatcctccggcgcggtgtagcgggttccctggct

SEQ ID NO: 115801 - DNA, 518 bp, Glycine max
  Clone ID: PAT_MRT3847_7557C.1
ttccaagaaggtttcccgtcatcactgtatgacgtcctccttctttggggggggggggggggggggggggggggcggggggggggggggggggggggggtgggggggggggggggggggggggggattttgggaaaaaactcccaaaaccgaaatccccccggtttagaggtgccccagccccgaaaaattgggaacagagggccccccgcaaattaacacccccagagaatgaccctcccgggccaaaagctaaccccccgggagcgcaaccccaacggaaaacagggagcgcccccaaaagatttcccgggggaaggacctaaactaaaccttttaaggggagtaaaaaatgggtttccctagggcccacccccaaaaacccttggaaagggtgcaacagggcccctaaggattaaaaaaccccccaaattccgcggtaaaaagatctaggtagcgcggtaacatgggttaggaaaaattcctttggggggtttgaaaattggcctttggatcccc

SEQ ID NO: 115802 - DNA, 165 bp, Glycine max
  Clone ID: PAT_MRT3847_75580C.1
ccacgcgtccgtacggctgcgagaatacgacagaagaagaaaagcgcggggatcaacaccaagatctgcccaacaacaagcgccttaagccgaactgatggacagacccctaaaggcgagggtggtgtttcggagccaaaacattcacaagcgatagcggaaaaa

SEQ ID NO: 115803 - DNA, 779 bp, Glycine max
  unsure (1)..(779): unsure at all n locations
  Clone ID: PAT_MRT3847_75581C.1
cccgggtcgacccacgcgtccgggcaactacactgcaaacagttcctaccagaccaacctcaatacccttttgtccactttgtcttcttccaacacacaaattgattctggcttctacaatttctccgagggccaaaactctgacaaagttaacgcaattgggatgtgtagaggtgatgttaagccagatgcatgtcgtagttgcttaaatgactcaagagtccttctcacacaacgttgtccaaaccagaaagaggccattgggtggtatgacgattgcatgctacgctactcgaatcgctcaatatttgagacaatggaacctaaccctacttactttctgtggacacaaagcaatgcaactgatatggatcagttcaatgaggctcttaggggcttagtggatggtctcagaagcaaagctgcatctggtgattcacttaagaagtatgctgcaggaagtgcagctggtccaagctttcaaactatatttgcacttctacaatgcacacctgatttatcagaacaacagtgcaataattgcttggttagagctataacagatatctcaagttgttgtgctggcaggacaagtggcagaattggaaaaccaagctgcaatcttaggtttgatacatccnctttctatgactctgcagctgatgcctctcctncgttgtcgccaccacaagcgccttctnctnctnctncttcagataccaatactgnctcctctgnaaggaaagagcaacacaacacaaattgttgttgcggtagtt

SEQ ID NO: 115804 - DNA, 351 bp, Glycine max
  Clone ID: PAT_MRT3847_75582C.1
aaaaaaaaaaaaaaaaaaaaaaaaggggggaattaaaaaaaaaaaagggggaaaaaaaaaaaaaaaaagggcggtccggtttgcggatccaaagtttccatcccctggttcgcaaggatttggcttttttttggggtaacttaaataaataaactgggccgagtgttcacaggttttgaccgggaaaacccgggactcacccaagttaactagcttgacagccatgccccttttccccgtttggcaaataagagaaagggccaaaacgattggcctttccaaccttttgaacatctgaatggccaaatggacactgccttgtccccctcattaagcccctagggggggggg

SEQ ID NO: 115805 - DNA, 565 bp, Glycine max
  Clone ID: PAT_MRT3847_75583C.1
caaaaacttaatttgaaggaccgagtccaaattattaaaatgaatgacttgttagtttccttcccttcgttcgtttctcactgttaatattgttattgtttttcttctgttcttttttaattttgcccaatgttatcgtgccttaaccgattaacacgtgttgccaatgtttatgacgacaggggcccatgtcacgcactcccatccccacctgcattgtgtttttctctacgtttcaaatcgtctacattttttttagtgcagtgcagaactgcacatgatgttaactattactaaaagaaaattacaaaattaaatagtttaatgaatagaaaaatgtttcatagaaactcccattttgttatgacttatgagacactcagaaaaaaatataggcattataaaatttataatgtaaaaaaaaatattggtgttgtgtttaaaataagtaaatgtttatgtattattactctaataaatattagttgctggattttgtaaaaaaaaaagttattggattattaaatattatctgttgtagctcaaaataaattaaaaaaaaaaa

SEQ ID NO: 115806 - DNA, 461 bp, Glycine max
  unsure (1)..(461): unsure at all n locations
  Clone ID: PAT_MRT3847_75584C.1
cttagcacaaaaaggctctntgctggagattcagttctttttatcaggtataaagagggctaatagacagcagccagcactatcttcatcagtaatatccagtgacagcatgcacattggcattcttgctgctgcagctcatgcagcttcaaataacagcccgtttactatattttataatccaagggccagcccttctgaatttgtaattccattggccaagtataataaggccctgttcaatcaagtttcccttggaatgagattcagaatgatgtttgagactgaggaatcaggggtacgcagatatatgggtacaatcactggtatcactgacttggatcctgtccgatggaagaattcacagtggcgcaatcctcaggttggatgggatgaatcgactgcccgtgagcgcccgagcagggtttctatttgggatattgagccagtggtgacctggt

SEQ ID NO: 115807 - DNA, 490 bp, Glycine max
  Clone ID: PAT_MRT3847_75585C.1
caaagaaaaaacccccaaccaatggaataaatttcattctcccaaaacataaaacaaaaagggaatttggcaaacaagaggcctttgtttgctcatacaaaaaaaagcatttttgggccaaaaaaagtcacaaagctttaggggatgacaaggggcaaaaagggaaaaaccccctttttttgtttgaaaacacaaaaaagttacaaattcaactagtaagggataaaacaactaaaagggccctcaaacccaaagggtgtttaaatcccaaatcttattaaaacaccctggaaaaaacaaagcttgtcaaaaggggcaaaaaaattttttgccccaacttggaaaaatgaaaggtggggaccaaaactacccaagttgaccatcccacaaacaaggaaattttccatatgaaaaacaaaggcttcaggggggggggcccccccaaaaagcctactattttataaaaaaattttagggggggggggttttg

SEQ ID NO: 115808 - DNA, 778 bp, Glycine max
  Clone ID: PAT_MRT3847_75586C.1
ctgagtcgacccacgcgtccgatttgatgtggcgttatgcattctggagctggaggcttcgttcgattccatttgctatttcaggactttttatgaagcctctgcaattgagaggtcttgttcctgctgattcaaaaaaggcactgacacctgagacagttgcgtcaggagttcaagttatggaggcttcaaatggaagagatgattgtttttgcttgaaggcagagcttagggataaaagctcaaatgatcattccaagtcaaaatctgcaacccaaatatttgagcagttcttgagatttttgaatgatatgaaagaactttggcttgataaggtttatgttgtcaatgttctaggttacatagcatacaactttgtcataggtgcttactcatactgggggcccaaagctggctataatacatatcacatgcttctctcaatgactacatttattggtgctgcattttgttttggggccttcttattcagaagcatgtatggcttccttgctcttttctctattggtgaacttcttgtttttgccactcaggaatatttttgcatagtgtggatagatttgatgaagacagtgaacatcaagtatcaaacgttgaaaggtcaaacaccatgccgttgcttcaagagaagactggagaaacatcagcatctcctgctcaatcccaataatgagtttcttttaatgcctgaccaaacatagtatttcagtgataaccactatgatgtaaataacttttttttgtacatccaatgtgt

SEQ ID NO: 115809 - DNA, 837 bp, Glycine max
  Clone ID: PAT_MRT3847_75587C.1
ttgatatttggaggaattacaattgtatgtggaatagtgggcactttagctggaggcttcgttctggattatatgagtaacaccttatcaaatgcatttaagcttctctcaattactacatttattggtgctgcattttgttttggtgccttcttattcagaagcatgtatggcttccttgctcttttctctattggtgaacttcttgtttttgccactcagggtcctgtgaataatgttgtttgtaattcggttcacccaatttttttgtctgatcaagaatattggctactgatggtaatcacttcatggcataaataaaataaagcaccctttaaataatgtccaacccaacttaaagattaaaacaaaagcaaattatacctgtgatggatgttactcggctacatgaaaattagcttgtctactatctagttatcttcaagatgtagtattgaatttctataatcataatcaaatcataaatgtctaattctcagaaacgtttgagaagttttttgaacatgtgtcgtgattcttgtatattatgtcaggaatatttttgcatagtgtggatagatttgatgaagacagtgaacatcaagtatcaaacgttgaaaggtcaaacaccatgccgttgcttcaagagaagactggagaaacatcagcatctcctgctcaatcccaataatgagtttcttttaatgcctgaccaaacatagtatttcagtgataaccactatgatgtaaataacttttttttgtacatccaatgtgtacaagtatgtatttgcttttggttaatggagattatttagcaagagtatatttcagttt

SEQ ID NO: 115810 - DNA, 525 bp, Glycine max
  Clone ID: PAT_MRT3847_75588C.1
ttttttttttttttttttttttgtttttttttatttttttttttttttggggtttattatgaataacatgtgtggaaattttagaacttgaccataaaaatagttaaaaaataatgataaaagagctaaaagagatggatgatttttttgaataatcataaagaataaagtgaatatgtaaaatgcaataagctgataaataaagtggaagattacatagatgatgttaaaaaaacacagcattaaaaaggatagtaggtcacgaacctaaggagaacagtaaggagataggcaagaagttgtctagacttagaaaaagtggtctcaagaaaaaagctgcaggcgaatagaggaaacagaaacgggaatacaaataaaaaaaagagccttatgaataaatgtatcttggggaagtataaaaaaaaatggtgcatataaaaagaacaacactgatatagagtgggacactcgtataaacaccaataaggtacagggatttagaaaaaaaaaactactttaatatgc

SEQ ID NO: 115811 - DNA, 239 bp, Glycine max
  Clone ID: PAT_MRT3847_75589C.1
gggtggtggtgtgtttatagactggaaatatatcttttttgatgatgtttttagtgctgttgatgcacacactggcactgaaattttcaaagaatgcgtgaggggggctctgaaaggcatgaccgttatttttgctcacaccaagctgactctctacataatgcggattttataggggtgaagagggacggaatgatattccaatcggagaagtacgatgatctacttgcgtctggaat

SEQ ID NO: 115812 - DNA, 368 bp, Glycine max
  unsure (1)..(368): unsure at all n locations
  Clone ID: PAT_MRT3847_7558C.1
aancncanncacacnnacanaatcncncaatccanctcnannanccccaaaaaccctaatnnaantncnctccaccacacaacacacnacnnaananannnannncncncacnnnnccaannacnannnncannnannnaaaccnnnnccnaacacanaannnnaccancannaannaaccaanncnnnaccaacnacnnacaannnncacncaacccananncnacnaacncancccannncnnnncaaccacnnnancnancccncnnacnnccancncnnaccannncncnnnnnccanccaccnccccannanacnncnancaaanncnnncnnannnaaaannccnncanaanncnacnccaa

SEQ ID NO: 115813 - DNA, 502 bp, Glycine max
  Clone ID: PAT_MRT3847_75590C.1
ctttattcttgagcattagatggctctggagaaagacttttaggcttagttcaagggaagactgttcgtctgatgctgaacatagggcactcttagcaaaacggggtgagagtgggccaaacctcaatgaaagtagaggggaaagagcacgcaggaaagctgaggagaaaagacaggctaggctagaaaaagaacttttggaggaggaagagagaaaacagagggaggaggtttcaaggctagtggaggagcgtacgaggctgagagatgagaaaatggaagctgaaaaagaacgcagcaaatcatcatatcctagtaaggagaaagacagtaggaaggaagctgaaaggaagcaccaggaaaaaagaaaagagaaagataagggttctagtaagagcaactctgatgtagaagaagtggatagaagagccagcaaggaaagtgaacggaagtgtgactttgacaaaaagagtgaaactgaccgtagagagctccagaagtc

SEQ ID NO: 115814 - DNA, 260 bp, Glycine max
  Clone ID: PAT_MRT3847_75591C.1
gcctgatgtcatagcaataatgaaaatattatagacaaaaatttcattattgctatgacatcaggccggacgcgtgggccgccccgggaggaactggactgtaacctgctggcgtaccagcctattcagaggtgcgacgtgctcgggcttggcgaactattggccttagctggaaaatgacttcaccacgcttgggtgcaaccatggctatcatatcctatgcttgcttgcggtgcttttgtgcctgctggcataacgat

SEQ ID NO: 115815 - DNA, 567 bp, Glycine max
  Clone ID: PAT_MRT3847_75592C.1
cccgcgtccgaaaaaatcgccaaaaacaagaacgagcgaagaaactgaaactaaccaacgaacccttgaatccgccatgagcgaccaccaccctcggttgcagcaccttcgttcagcctctcacctattgaaagaatcattttcttctttctcctcaaatttcctcatatttttgttcctttctctcttaactctttcttttcgcaccctcgtcgaaaccggcaccgcccatgtcacctcctttatcgaccgcgacccttccctccgcgccctcctctcccgcctcgacctcgccggaaactcccacaaccaccataacggccacgaccttccttctccgaacaaccaccgccaccgccgccgccccttcctccacctcacccgcgtcggaaccctagacgacgacttcttctccggcgacgacgatgacgcccgctccctcttcggctccatccccaaaccctcagccaacgccaccctcctcgccctctcccccttcaaaaccacctccggcttctcagatctctttcccgacgacggaattagggtttcccaagtgatccggtc

SEQ ID NO: 115816 - DNA, 1576 bp, Glycine max
  Clone ID: PAT_MRT3847_75593C.1
aaacccatacttggtccggaatcccacgcgtccgtccaagataccacttgaaagggttaggtttcgggagaaaaaccaatccactcagagctagaagaattcaacgatgcctcgctatgatgataaatacggcaatacccgcctctatgtgggacacttgtcttcgaggactcgttcccgggatctggagcgtgccttcagcagatatggaagagttcggggtgtggatatgaagaatgatttcgcctttgttgattttagtgatcctcgagatgctgatgatgcaagatataacttggatggtcgggatgttgatggaagtcgtattattgtggaatttgcaaaaggggctcctcgtgggtcccgggaatatttggggcgaggtcctcctcctggctctggacgctgctttaattgtggccttgatggtcattgggcacgggattgcaaagctggggattggaagaataagtgttaccgctgtggggagagaggacatatagaaaggaactgcaagaacagccccaaaaaattgagcaccaggcgaggacggagttattcacggtcaccagtcaggtcacattcacctcatcgtggcagaagccgtgatcgcagttacagccgagatcgcagctacagtcgatcacgatcccctgtcagaagagaagaaagccctgttcgtgaagataggtcacaaagccctcaacacaaaaatagtcctcagccctccaagacaaggaagcatagtccatcacctgaccgtagcccacagaaaagaggtgacacatctcccgacaatgataggttgagtagaagccctgcaagggaccctgaagataggggctatgacagccctaaagttaatggtcgtagtggcagccctagctgtagccccagggatgatgacaggagccccattgacgatgacaacaaccaccgccactcgccaagaggcagcgagtcaccttaagtatttctcagagaaagaactctgtatgtggcctataatttatatctgctttggttatctgatgcactttgctgtgaagatcggggcaatttttagcttaaaaggaaactttatgaattgtttatggttatgaagaacggttttatgtatgggtattattcagtttatcttttgttgcgcaatgtatggcttacaaagaatataacctgcctcaatttgtgttgaaacattgtgaattatgagattaaagcctgcctgaatttgtgttgaattatggggtttctgaggttttctctaaacctggaggtctttgttgggaggttggacttggtggaattgatggaaattcctgtcgagtgttgactttggcgattctttctgtaatgttattgcgtgttttttatggaaatggcaacaatcacaaactggtgtttagttcgtctttgaggggtgatgtatcatacagttccagtagttaagtaatgatggccttattgtttctggcaaccatttccgcagaattcgaggtgtagatatgaagaatgattttgcctttgttgaatttagcgatcctcgggatgctgatgatgctagatatagcttgga

SEQ ID NO: 115817 - DNA, 361 bp, Glycine max
  Clone ID: PAT_MRT3847_75594C.1
tccgctccgagttgtatgttttgcagagctagaagaaatcaacgatgcctcgctatgatgataaatatggtaatacccgcctctatgttggacgcttgtcttcgaggactcgttcccgtgacctggagcgtgtcttcagcagatatggaaggtttctgaggttttctctaaacctggaggtctttgttgggaggttggccttggtggaatttgtggaaattcctgtcgagtattgactttggcgattctttctgtaatgttattgcgtgtttttttatggaaatggcaacactcccaaactggtgtttagttcgtctttgaggggtgatgtatcatacagttccagtagttaagtaatgat

SEQ ID NO: 115818 - DNA, 447 bp, Glycine max
  Clone ID: PAT_MRT3847_75595C.1
ttcgtgaagataggtcacaaacggggctttcttctcttctgacaggggatcgtgatcgactgtagctgcgatctcggctgtaactgcgatcacggcttctgccacgacgaggtgaatgtgacctgactggtgacgataggtcacaaagccctcaacacaaaaatagtcctcagccctccaagacaaggaagcatagtccatcacctgaccgtagcccacagagaagaggtgacacatctcctgacaatgataggttgagcagaagccctgcaagggaccgcgaagataggggctatgacagccctaaagttaatggtcgtagtggcagccctagccgtagccccagggatgatgacaggagccccattgatgatgaagacaaccaccgccactcaccaagaggcagcgagtcaccttaagaagtatttcttagagaaatgaactctg

SEQ ID NO: 115819 - DNA, 456 bp, Glycine max
  Clone ID: PAT_MRT3847_75596C.1
gcgtgggttcgggagaaaaagcaatccactcagagagctagaagaattcaacgatgcgtcgctgtgatgataaatacggcaatacccgcctctatgtggggcacttatcttcgaggactcgttcccgggatctggagcgtgccttcagcagatatggaagagttcggggtgtggatatgaagaatgatttcgcctttgttgtaagttgtcaccctttctttatctttgtctatttatttatttatttcctaggacttcaatttcttcttatttatttgctaaaatgtggcttctagtatctgcttggaggaattcagttgtagatgatggtatgatttctgtgttactttcttggcttgttccttacaacctttggacaggattttagtgatcctcgagatgctgatgatgcaagataataactggatggtcgggatgttgatggaagtcgtatta

SEQ ID NO: 115820 - DNA, 1087 bp, Glycine max
  Clone ID: PAT_MRT3847_75597C.1
tccgctccgaggttgtaactcttcttttctatcccaccttttttcttagatttcattctcttccctttcaattcgattcaccttttcacttttggttccgaatctctatcggattccgtctctgcatgcttattttcatcaatctcatcaattcccgattcaacaatttatcgagctagaagaaatcaacgatgcctcgctatgatgataaatatggtaatacccgcctctatgttggacgcttgtcttcgaggactcgttcccgtgacctggagcgtgtcttcagcagatatggaaggtaattttccctttatgattcatcattatctttcaaattatgtatagaacagtctttatccttcaaattatgcaatctcatccttttaaaaaaaaagttttttacttgcaaggtgttaaattggggctgtggcttcgtcacaatctttaatgttgtgggaaattttgtaaaaatatggcgatactgctgcaattgcggaagtcttggtctgtgactgttttttaaatcatttacttgtaaatgacgttggttatttagtctttttcatgattattatgattgcgtgtgtgtctatttggatttggatgaatgtcttataatttattagtacatcatttcttggttagagacggcaggatgttgtccgttgttatgtcctatcacactttaatgtgctaattgtttaacttgtgcaatttatgtttgaaattgtttaactttaagatttattgtttaaattggcgagggagctaagttggtgataagttgccatggggcgttgaccatgggatggtatacaggtttttcccaagctttgttatgagcttggagttatattggttatttgtcatattatgtgtgggaaccaaatcacctaggtgtcatgttttgacttgaatgatcttgttgaaggtttctgaggttttctctaaacctggaggtctttgttgggaggttggccttggtggaatttgtggaaattcctgtcgagtattgactttggcgattctttctgtaatgttattgcgtgtttttttatggaaatggcaacactcccaaactggtgtt

SEQ ID NO: 115821 - DNA, 233 bp, Glycine max
  Clone ID: PAT_MRT3847_75598C.1
aagggtttgggttttattttgaatttgtttgggtttcgactttcaggacatgacttgtatcaagtaattttttattttttttgctccttatattgtttaatccatgatttgtgcaattgggtaactatcatagttgtatctgcaattctgatttagggttccagtagagagaagctctcaaaagcacttctggcttgtatccaaacaggcccataataataataacaataata

SEQ ID NO: 115822 - DNA, 434 bp, Glycine max
  Clone ID: PAT_MRT3847_75599C.1
aatctgcaaaatgatattgaagagctcataaagtaataaaaaatatcagaagaatttgaaatggcatagtacgtgaaacaaaataagttttaaaaaaataacaattgaagctgacaagtatattattaataccaacagtatggaaatgttctccctgctcaagtatattattaatttcaaagtatattatgttaatcttgatatttaattgtacattaatagagtactgcacaaatcgggattaatggaaaattttatagacatggtatctgtgacaagacttttctatccaacggtggattttgtgataaaatgatccagtaaaaagctacttaatggtataatagtggttttcacttacatcgtgtgtgtgtgtgtgtaaagaataagttgagacatgccttaaccactcctctggatattttacaatgacc

SEQ ID NO: 115823 - DNA, 383 bp, Glycine max
  Clone ID: PAT_MRT3847_7559C.1
agctgggatttgggctcgcgcagatacaaaaatgctttcagttgcaaaaaggggggcttttaaatttgcatttataaacgctcctaacttctggagatgttatgcatttaaatttactgtaccagtacagagttccaatctggctcttactcctccaggattcaaaaagatcaaagtcgctaacccagtagtagacttagacggggatgaaatggctcgtttcttctggcaaatgatcaaagattatttgggcttgccttatttggatattgatatcaaatactacgacttatcttttcaaaaaagagatgaaactgacgatcaaatcactgtagactctgcaaacgccatcttaaaatacaatgttggtattaaaatgcgct

SEQ ID NO: 115824 - DNA, 345 bp, Glycine max
  Clone ID: PAT_MRT3847_755C.1
ggctcgagataaggcacgatttggttctggttcgaggaagcagaacgggttaggctgcatcaacagagcatgaggctgctgatgagggggccttagtctacgtgcctgtcgctaccattgttgccttcccacaaccgccgaatgttcaaatgaccacccttcaaccaagcaatcataaaatcccaacctaatggcgatccgtcacacagccttcattatggagcaccactgatcgtgcttccaaaacctcatttataggcaccgtgtgaagcaacgcgactcaacgcgactattgtaatctgtcccaagcgccctgggcacactaccatggtcgcctgcctacag

SEQ ID NO: 115825 - DNA, 426 bp, Glycine max
  Clone ID: PAT_MRT3847_75600C.1
ggctcgagcggataatgggaaggacatgatgaaagtttactcgctattatacctgcttccgggtgtggctctctcatggccaccatgggttgctccttcggtgtttactacgctgactgagggtcttgattctcctcatatcctaacatcaataggccgacccaggccccgctaactgcaactactgcttcttaggcttggtacttgagcttaaattactcagagtgctcattctagatcgtcaaatcatacattactgatacgatctaggacaagactaatgctcatcatgcctccgattgaccacacagggggggcatatccacaagacttagcctctgactgcagtgcgacatagaaatagctaaaatgttatcaataactacgcataggacaatagaagcctgtaagtgaatataaaagagg

SEQ ID NO: 115826 - DNA, 216 bp, Glycine max
  Clone ID: PAT_MRT3847_75601C.1
tacctgcagctcgagttgtactcactgggaggggaccttgcgaagaactcttctgcagacatcattgggaccagaaccgagcttggggacgagaagtccacaccgttccagccctacagtgaggggatcgggctgcatagggtccgggagtgctagctcattcacgggaaggtgggccatgctcgcgcgtgtcggggctctcactggctgagtggg

SEQ ID NO: 115827 - DNA, 292 bp, Glycine max
  unsure (1)..(292): unsure at all n locations
  Clone ID: PAT_MRT3847_75602C.1
ctaggatcctctagagcgggcgctcgcnntttttttttttttttttttttnncattcataaaacatagcaattgattaattcaccggtgtcaaacaaaatattatctaacatttcatccctgcactcatctttattccaaagtttatacatcgaaatattctttttctgctaccgttaaacaaaatggaaaataaaaaatggcaaaattaaggggactcgcaacctctctagcgtgcctaaaatgccaaacattttatcacacgactaaaatacatacttctctttctcccc

SEQ ID NO: 115828 - DNA, 252 bp, Glycine max
  Clone ID: PAT_MRT3847_75603C.1
ggggggtacaaaggagaacttatttgcagggtacttaaattattatgggggttgaactttagatttttattccctataaagattaatattttttactatgaaagtgacatattggatgtgctaccgctgcccaccatgaaacgtagtaactgtcatccattgcgctcattattgtattgctgatttggatgcacaaataagatcgtgtcttattttgtaatcattccataacgttacatatgggcagttgaa

SEQ ID NO: 115829 - DNA, 558 bp, Glycine max
  Clone ID: PAT_MRT3847_75604C.1
gtacccaggtccctgtacactgcacacccagtaaccctgtgctgttagtaagctgtgcaacattacaggtattcttgtgctaacaaccgtgtctgagatggataggtttgattggatagccagcatgtgcatgagattagttgtagtacgcctagcaactaaacgcatagtcgcggtgctgcatcatgtaactacattagcaaacattatgggtgtcaacttatatgtggggcctgtatttaaattacaattgcgctgtgtaacagtacaaaccccaatagctcgaaaagttggtcgctggatggggaccataggtatcggccgcttaaaaaacgcaattactaacccaactatcatggctctgggagcagcaataatctttagcgtgggccatattaggcgtcaccaattccagtgtaaaattaaccgtagcgtacagtggcaagtcggctggacaactaactacggtgagcattctgtgcatgctagtgaaaaatatactggttgtggagatcacgctgataatagtcaataagtcactggacatgtgcatagcct

SEQ ID NO: 115830 - DNA, 208 bp, Glycine max
  Clone ID: PAT_MRT3847_75605C.1
ggaccccttggtttacccggggaatgcggggcgggacccggaagggtaccaactttccctaatagggggcccatttaaacctgggggaaacactaggaaaacttggtcccgtgagaaaattgtatgcggtttgaattacaaaccaaattccgacccgaagcacaaaaggtaaaagccggggggcctaaaggggaagcctaccgaacat

SEQ ID NO: 115831 - DNA, 352 bp, Glycine max
  Clone ID: PAT_MRT3847_75606C.1
tttatgtttttgaggtgttttgtcctttttgtttatacgaggagccaaacataagtttaccttaggggaatggtggactaagatactatgtgcctgcatgggtacaaagccatgtaaggaaagtttttgagagcttctttgataaaaaaagttttttcttttcaacagaaaagttttgaaaagcttttctagcttgtatccaaacaggttttttttgtgttgaaacattccgaactccttttttttgggtgaggcattattattggggctattggtattaaaaacaggttgcttccatataagggcggcatactccggcgggaccacaaatggattccgattgggctgataa

SEQ ID NO: 115832 - DNA, 467 bp, Glycine max
  Clone ID: PAT_MRT3847_75607C.1
gttagatatttaaataattaaagtaaaaaaaatattcagccccccttttgatggggtcgtggatttgtcattgatctcgacgattctaagaggcgttcccctgcaacaattttgaaaaattaagatctagttgtcttattgttgcatatataatgagacattaattatgtgtgtgtgagtgaacaaaaataaaacagtgaaggaaagtagttgatagcataaactattgcattggagtttgcagggtaaaaaaaccctaacaccaaatcaagagaccaaataagggaggaacaaaggaagatcaggacaagagattaaaggggatgaaatgagtgaaagacatgagacaatgtaaagagagaaggaatatgtttatattatttttttagttattatgttattgatacaaaattcattgattttattaaaatagtaatttcgtcaaataacctaattaatcatttttg

SEQ ID NO: 115833 - DNA, 2768 bp, Glycine max
  Clone ID: PAT_MRT3847_75608C.1
cctcactggagttgcgtagttggaatagaacaatggcaaagacgacacaaatggagacaaagaggaacaaacgaaagtttgtgagatgattaagcgtggacgcaaacagagacgaagagaaaacacagtaagaatcaaattaggaggtgcagaattcaaatcccaaaagaggaaatgtataatatgaaaatggtagtttggggatatttaaaaattgggaggtagaggattcaaattccaagagtaaagtaagtaaaaggccaaggccatataacagatctgattccagaaatagcccccaggaagaatcaaatttgtagaaagtgcagctgcgaggcagcgaaagagaaagggatttacttctgagatcaaagatggaggacgagaaaatagttggatacgttacggcgttccttaagaagaaaggcttcacgcaaaccgagaagattttccaggaagaattccaacacaacaagtccaacacttccaattccgttctggaacccgacattgccaaccaccttgtcatgccctctcagtatttctccacctctgctgacgtgtcatttcttcaccaccactctcataaaccctattatgttgcttttgcagattggagactggtcctgctaggttccacgacggctatagcagactaagaacatggacttattcttcactcgatttgtacaagcacgagttgcttcgcgtgctttatccggtgtttatccactgcttcatggatcttgtcgccaaaggacatgttcaagaagctcggaacttcttcaatactttccgcgaagaccatgaaatgatgcacttgcgtgaccttcagaagttggaaggagttctctctcctaatcatctcaaggaaatggaatttgctcactcgcttagaaagagcaaattcaacataaagatatgtgagtattcctatgagcttttgttgcaacatctacacagtacgcaatccaccactatacttggtattatcaatgagcatattaactttcaagtaacccctggtcaacctagcttaatttccgatgatccggaagctgttacccttactggaagcagccaggaagcagcaaaccagataaatcaaaaagaaattcattgggggttgcttgaagactctcttgaagaacggctggagaaagccggggccttgcttttagactctgaaaagggtgaaggggaagcaaaagagggggagaatgatgagactaagaaaagatccattgaaggaggaaagcaaggtggtgcttcagtcaaaaaagtaaaaaaggacaagggtggaagtgcaactgggaaaagtgctaaaccagaagctagcactgtacctgcagctcctcgagttaagccagaactccccttgcccgtaatcccagctgaggcggaacagtccgtcctggaggatttaaggaaccgtgtacagcttagcagtgttgcattgccatcagttagcttttacacatttatcaatactcataatggtttaagctgttcatcaatatcccatgacggatcattgattgctggaggattttctgactcatcactgaaggtttgggatatggcaaagcttggacaacaacagaccagttctctttcgcagggtgagaatgaacaaatatttgggcaaggtggtgggaaaagacagtatacattgtttcaaggtcattcaggccctgtttatgcagcctcttttagtcctgtcggcaattttatcctttcatcctcagcagactcgacaattcgattatggagcacaaaacttaatgccaatcttgtttgttataagggtcacaattaccctgtctgggatgttcagtttagtcctgtggggcattattttgccagctcgtcacatgacagaactgctaggatttggtccatggacaggatacagcccttaagaataatggcagggcacttgtctgatgttgattgtgtgcaatggcatgccaactgcaactacattgcaactggttccagtgataaaacagttcgactatgggatgtgcagagtggtgagtgtgtccgggttttcgttggccacaggggtatgattttgtctttggcaatgtctcctgatggtcgctatatggcatctggcgatgaagatggcacaatcatgatgtgggacctctctagtggccgctgtctcacacctttgattgggcacacatcatgtgtctggtccctcgctttcagttctgaaggttctgtgatagcatctggatctgctgattgcactgtaaaattgtgggatgtaaatacgagcaccaaggtttctagggctgaagaaaaaggtgggagtgctaacagacttagatcgctgaaaactctaccaaccaaatctactccagtttactcattgcggttttctcgaaggaatcttctttttgcggctggtgctctatcaaaaagtggctaatatatgagtatgtctactaatagataagatcagatcaaagtggttgaagctgaatttctcgcctaaaaagcatcgcgcatcatagttatgtactccctctgggtcctatatgtagggcatctgcacaagaattaagaagtgtagttaatctagtgatgttaaatttgtcactaatctgtatatttttttataattaatcttaaacttattgataccatattctctttttcatagatgcatttccacttttgtaatgactagtgatcctttcatattttcacgagaatccaaaaaattaatttatcaaatttattgtttaaggata

SEQ ID NO: 115834 - DNA, 151 bp, Glycine max
  Clone ID: PAT_MRT3847_75609C.1
ttcacaatttccatagtttccttgtttccaattattgcatgccaatcatgtacaatttagagaagccacagagagatgataaacagtttctaactccctctttctcttccactctcctcgaccaaatttatcgttccatcgacgagggtga

SEQ ID NO: 115835 - DNA, 622 bp, Glycine max
  Clone ID: PAT_MRT3847_7560C.1
accagcggcatccataccctcgaagagttatttagaagtcttcagaagagaaatgttcagcttgttttggcaaatcctggcccaatagtaatagacaagctccacacatcaaactttgctgctttgcttggagaggacaagatcttcctcactgttgcagaggctgttgcatactgttcaccaaagctggctgaagaaccttgaaaaaatgtgatttttcgcatagttaggacatggaaatgaggtaaagtaatgaagtggggagggggtggtagagatcaaacctgtggctttcagccgagttacctttgtcaagagagcatggtcccactacaaaaagttgttactagtggactttaatttgtgctagttggtgcttttggggttccttttctataagtgaaaataaaaagttacatgttcaaaaagcattaactctggccttggtttgttttctcactcgaatttaaacccaagtgtctctctatatgaaatttctcttcttgttttgtattataagctcgagtgcctaccttggaaatggtctcttttttcccctttttatgtactggatgacaattatagcttcccaaaggaaagttttcattctccgtttcttgcc

SEQ ID NO: 115836 - DNA, 751 bp, Glycine max
  unsure (1)..(751): unsure at all n locations
  Clone ID: PAT_MRT3847_75610C.1
cccacgcgtccggttctttcttgtgcttttcctagtgtccagaaccatagctgcttctctaatataaagaacatctgatgctattgaattgatctcccaaatcctaatttgcaggccacaaaatacagaaaatagttcacatcaagatgaacatcctacgctctttttggaacagtcccactggcctcaaaacaactcatttttggggtcctgcctacaactggagcccttccttttgcggcagcaatggacacaaagaacccaccggaaacaatatctgtcaatatgaccggagtgaacagatgtgtggttattcggcactgtgcatgaggtttgtttggatggtacgttcaagaaacccacatcttcttgtatatcatgtctccaatgagacagtgcatttgtatcaactattaagatggttcagagctcaaaggggccttgagcagaacaaaaaggatgcagatgcagatgcagagtaaaactgatttatttatatattgaagctcaaagaaaatgtcttctagctttaaaaacaagtcttttaattatgacttgtcatttactattgattgttttaatttgcttagctatttcagcacaatatagctttttataataatgctgtattgatacaatttttttatttcatatatatatatatatatatatatatatatatatatatatatataattgcctattttcattatatttcttccgtttttaaaaatctaaannnnnnnnnnng

SEQ ID NO: 115837 - DNA, 265 bp, Glycine max
  unsure (1)..(265): unsure at all n locations
  Clone ID: PAT_MRT3847_75611C.1
caacaacacaaggccatcatcatggcagctgcttccccaatggcangccaactcaagtccaccttcactaggactcttgtagctcccaagggcctcnctgnntcnncancactgcacctcgtgcctgctagaangcaatntagcttcantgttnnggccatccaatcagagangcnaacctatnaagtgattnanccaatcancggtgacccattcattggaagcctgnaaaccccagttacatccngcctttgatcgcntggta

SEQ ID NO: 115838 - DNA, 571 bp, Glycine max
  Clone ID: PAT_MRT3847_75612C.1
aaaaaaaaaaaaggggaggggcttaggccccaccttagggggggggggaaacaagggaacaaatttaaatccccacacaaacgtcccggggggggacaacattttttcccaaggaaaggttttttttggaggaaaaaaaaaggcccgaaaaaaggccccccccgggtccgggaaccccaaaagacgaaacgttttttggggcaaaaaccgcgggttggggaaagggaactgtcattaaaccctttaacacgacgggggggtcccaagggttttttattcccgggagagggccctttccaacaacagaaacaagggggcttttcccccccccccctttaaaaaaggggggggacatgtccggatctctttcatgcccaaaagtccccattaaggggggaaacccctggctcatttccggaaaaacaaaaggaaacagggcccgggcacccatttccttcagcattttataaaaaacaacaaaggggggcaaaaatacgggggggaaaagaaaaaagaaaaacaatttttgttttatgccaaagggggattttaccccagggtccccccaagg

SEQ ID NO: 115839 - DNA, 341 bp, Glycine max
  Clone ID: PAT_MRT3847_75613C.1
gccacacgaccacacaattggaacacaacctaaaatggttccctacaaaaagccgctgctgcgcggttggtgaaaccatctaagtctgctccatccactcaataattctaaatattgcacggccgccgctgctttttttgctagatcacaaacacttacttacaagaacatatactttgtatggaaaagctataacaaaatgagcaaaacaaagagtacaacctcataattgagaacacccatcacgctcacatcttcattagtatgatcgtcaacatcatttcgtgagttggcggaattttcataatgatcaccatctgcttcctttccatcatatacat

SEQ ID NO: 115840 - DNA, 480 bp, Glycine max
  Clone ID: PAT_MRT3847_75614C.1
tgaaaaatgtccatgcaaacctacgaagatttggaagcgaaatatggaacagaagaaacgcctgaatcaatcctcctgcttgttcaaattcctgatggttttgcacgagagcatattggagccaaaattgagtacgagtttgcaagggtgagagttcatggtgagcgatcacttggaaacaatagaaggtcacgtttcaatgtattatatcaaattccagaatattgtgacattaatagaattaaggcaaagtttgatggcaaaattgtcaccatcacaataccaaccattccaggaaaagtctctaaaaaagaagcagaatcaaacccaggggatgaaaaagaaggtactcctacagatgatgatcaaaagaaaaccattgttagtgatcaggttcccaaattaatagttgagtgtaaagaagagattgatcatgaggcttcaaccccatcaaattaaggtcacagaagagtctatgca

SEQ ID NO: 115841 - DNA, 378 bp, Glycine max
  Clone ID: PAT_MRT3847_75615C.1
acgctcgtggaagataccaaggcgcatacatacgaacacagacacgatgaacgacgaaatgctcgacgaagtgctaaatagacttgaatacaagcattcatcctgtaattcaacctttacgactgcctttgaatccgctgctgagtccacgggcagacaaaaaaaaaaaaaaaaaagcggccgatctagacgatctaaactatccaaccttaccttcccatgcattcgatgttatatctcgtctattaagttaactaaattgaacgcactggtccaacgtttacaatgtcaaaactgtgaaaaccctgaacttactcaacttactcgacatgcagcatatgccagtttgggcagttgccataatacccaaaacgatcg

SEQ ID NO: 115842 - DNA, 316 bp, Glycine max
  Clone ID: PAT_MRT3847_75616C.1
tttttttttttttttaaaattttgggaatttaatttttttttttttttgtaactagctaattgttttgttatagaaaacaaagagcgatgactgtaacgtgcctaaggaactaaactcaaagtaatttttatttcaaagggattttctgccctattttaaattatattgttttttaaaaagtttggtaaataactaccattgaaaggtacacataatatttaaccaagttataactcgggattgacggtctacgctagcttcaacagaatgacgaatgctaatcttttcaccagcataggtctgttgaagccattc

SEQ ID NO: 115843 - DNA, 433 bp, Glycine max
  Clone ID: PAT_MRT3847_75617C.1
atacatgttatgaattcattgggggatctggtcatattagaggtacatccctacattggattaaaacaaaatgactcgatgatttttcaaatttaataacacccgaggggggggggccccacgaaaacacggaagcgcataccgaaacgagaaccaaattcccttaaaggaagggaagaaaaggatggctaaatggagagaaacagccggacgggcgggaaaaaagaaaggccccacccaaaaaccccaaaaaaaacccccggaataaaaaagggagaaacggggggggccaaagagaggccaaaccggcaaatagccgggtcggcgaagcgggcggaatctcaagggaaaaaaaacacggcccatccgaaaagaagaagacccaccccggggggaaggaggctttagcatagggccccggaggagggttttt

SEQ ID NO: 115844 - DNA, 462 bp, Glycine max
  Clone ID: PAT_MRT3847_75618C.1
agaagtgggttagagaggaagtttatgactgaatcaatggttagggagccttcaacaaaagccccgtgctcattgcctcctccgttggagccaacgtcgcggagggtgttttatgccaacaaactaaattcaattaggagagttgagaggtgggaagataactattggaaaaacagcactcaacagttgcatacacgcatttgaattaattaaaactcaacaattagcaacatgccttattaacacaaggtatgctacgcacactagttagtcaccctctgagaaagaattctggtaatgcaaagcctacaaaatataaattatgcgttcaggatttaagtttggatttaggatatttagaagagactgtgaatctagacagaatttgttcacatttatttatttatttattttccaggtgtatcaatccctaatcaatatccattcattttaaaatcaaaa

SEQ ID NO: 115845 - DNA, 461 bp, Glycine max
  Clone ID: PAT_MRT3847_75619C.1
acccaaaagcaggaaaccaatggagagcactgtgatagaaaaatctgcaacaagtaaattaatttgttatcagcacccaaatgaagtacatgatcctatcatatccaggttttccttcaaacagaactcattatatccatggttaagacgtcattatcccccaagcctcagcccatatcatttcatgactcgccagctccgtcttatttagaattcaacccacacatacaagactatctctgagacaaacaagaaaagactcattgatacccataactctatcacaaccaagatgccaattattatatatgtacccatttacatgctaccaattaagcacttcaagtcactgaagacttttctactgcaaaaattgtgatcacaaacagtggagtatccttcaattcctaatggatcgattgtaggcttcttctgcattcaatacaaaaattatacaagca

SEQ ID NO: 115846 - DNA, 632 bp, Glycine max
  Clone ID: PAT_MRT3847_7561C.1
atcgataccagtggcatccatgccctcgaagagttattttagaagtcttcagaagagagatgttcagcttgttctggcaaccctgggccaaatagtaatagacaagctccacacatcaaactttgctactttgcttggtgaggacaagatcttcctcactgttgcagaggctgttgcatactgttcaccaaagctggctgaagaaccttgaaaaaaaatttggaaaatgtgattttgccatagtggacatggaaatgaggtgaagtaatgaagttggggggtggtagagaccaacctgtggctttcagctgtgttacctttgtcaagagagcatggtcactacaaaaagttgttactagtggcctttaatttgtgctagttagtgcttttggggtccctattctataagtgaaaataaaaagttacatgtaaaggtgcgcttgttgtgcactccaatgagcattaactcaggccttggtttgttttcactggaatgtccacattatcaaaacccaagtgtctctcaatatgaaatttctcttcttgttttgtattataagctccagttcctaccttggaaatggtctgtttttttccactttatatgtactgaatgacaattgtagattcac

SEQ ID NO: 115847 - DNA, 254 bp, Glycine max
  Clone ID: PAT_MRT3847_75620C.1
gctcaacgtctgctgagaaaaatggcagttctcagacagttcaaaacgggcaaattccccaaactactcggaaatatccggatgtgcaagctaagaatggctcaaatttaggttctaacaaatctaaacagtgcacccaaaggactaagcacccactgcactcagcgcaggaacacccacagtaagaaacggtgtaaagtagttttgaaaagactcacgcacataatgtttcaaatggatctgaggttgttagt

SEQ ID NO: 115848 - DNA, 497 bp, Glycine max
  Clone ID: PAT_MRT3847_75621C.1
ctgaagggtaacaaaccggattttcacgttgcgatggcacctcagagagccaagccattctatgcctctttagttgacaggtttaggaatgcctataactctgatgcaatcaagggtatgttatgttatctatctttcaactttcatttctctttttctataataattaataaatacagtaaattcattataaaaaataaagacagcaaattaaactgagattttcacacacagacaactccttctaggttgtataatgtagtatttttcaaactatcagaagagctcagtgaaaaggggtgttagtcgggtaatgttttgtagtttgtaaacaacagggataaaaaaggaacagcattgggagaggggtgttcgcaaacgttgacaagtgtaccgattcgtacaagtagtataaaacagtaagaccgagtcgtatcctcagagaatgtgtttcactcagacctcgtatattcagtatgtaaacatttgtatggatt

SEQ ID NO: 115849 - DNA, 1495 bp, Glycine max
  unsure (1)..(1495): unsure at all n locations
  Clone ID: PAT_MRT3847_75622C.1
tttgtttttgtttttttttttttttttttttctgggttatgctgagaaaatacattaaagggcgacatccataatattgcatacagacagaagtttttcttttttcattcccataaaaacaaaaacaaaaatcgacaggcagaaaaaggcaaaataataaataaaaaaattatagtaaggattatttcatcgagtcacagattatctattttatgaatttttaaaaagaatcccatatattttgtgacactgtaaattacagattatatatggggaggggtgggggaaatgtgataagaatttcaacctgtcaagagcttaatttcgttttcgttatcaacttcagtaggttttccttggccaggtgccctttgcgcagtgcaagcaacatttttgacaattgatgagtaaaggtcaaactccgccttcaatttcaggcagcaagcctgtatccacttctctgctacagtggtggatacactgtcttggctatccctctcgtgctcttcaatggcaggccgtatttcatcgtataaggaatcaagagcagatgtagcatcgtcctttattttctcacaatttaaaatctcctcttgtgcttccttgaatgctaggagggcagcagcaaacttagcatcgattttcttctctgtgagatttttaaacctaacgccattatatgaccttgatcttttggtagacatggacctaggtccaagaagatagtttctgcctgcagtattacttcggatacgtgatattgcattctttcgtgaaagggtctgttcaccatcctggtagtacaagttcatatgctcatctgctacatcagttttaatcttcttcacatctaaatctttcatctgaactgaatcaaggggctgaacatggaaagcagtggactccaataattgttcagctttaattataacatccaaagagggttcggtttgtccattaaaatttgacaccggttcatcctctgcagaatcatatacaggaattttctcaactgaatacctgtcatcatcatcttcccatagataagtatcctcctgctccnaggttncccaacannaggaaaaaaagnngattgaaaancaataanaancaaggaaaaggaaaaaaaaaaaaaaaaagggangagcnnanagcnnnnccgnnnnnncnaggnnnnncccccccccccccccccccccaaaaaaaaaatgaaatgatcattggagcaagcattccactagatcaaaactgatacaaccaacaaaaatcaagccataagtgaggttgcttacgcggatcaaacaaagccataggttgtgtttgtttcaaggtatcaaaaaggattcctaggaaagtgaacttgggaatatcccattcccatgtttagtacaagttttgaataaatattcttatgaattgtagattcttaggaatataaaatgttcatgtttcacttgcttcttattcccatggtaaaggtgggtatattatattc

SEQ ID NO: 115850 - DNA, 152 bp, Glycine max
  Clone ID: PAT_MRT3847_75623C.1
ggatagaggattcaatggcgactctgcctgcatactgactcgtcacaattctctcctcaccggcatcttcagcgcaatgacctgcgtggtggtagttcatgcctgggtgttcagcatgataacgcatctcacgttcacagtatgggccgccc

SEQ ID NO: 115851 - DNA, 948 bp, Glycine max
  Clone ID: PAT_MRT3847_75624C.1
ggctcgaggacctttcattcatttatatcacacacaaattttcttagttatatgctctggctctctccattaggaagcaccacattcaatactcacgaaagaatcacaaaacaactcaggagatggcaagttcagttgtggttgctaatgggaacttgaatccaaatgatacaaggggaaagaccattacatgcaaagctgccgtggcatatggtcctggagagccctttgtggtggaacgtatccttgtccatcctcctcagaaaatggaggttcgaatcaagatcctcttcaccacaatctgtcacacggatctcacggcttggcaaggcgagaatgaggctcgacgtgcttatcctcggatttttggccatgaagcttccgggattgtggagagtgtgggtgaaggtgtaagtgacatgaatgaaggggacttggtggtgccaatcttcaatggggaatgtggggattgcaaatattgcaagtgcgagaagaccaacaagtgtgagagatttggggtggatgctatgaagaaggtgatggttagtgatggtgcaacaaggttttacacaatggatggaaaacccatattccatttcttgaacacttcaactttcactgagtacacagtggtggattcagcatgcatcgtcaagattcacattgatggtagtaatggcgatctcaaccgcaatatcaaaagactcaccttactcagttgtggcgtatcttcgggtgttggggctgcttggaataccgctgatgtgcattttggttcaactgtagctgtctttggtttaggtgttgtgggtctcgcggtagcagaaggggcacgagccagaggtgcatccagaattataggcgtagatatcaactcagacaaattcatcaaagcccgagaaatgggtatcaccgacttcataaatccaaaggatgatgagagaccag

SEQ ID NO: 115852 - DNA, 413 bp, Glycine max
  Clone ID: PAT_MRT3847_75625C.1
ggaaggaaatggaaaggaaaacattgagggaggaaccttgagtacttatcaaagatactcagggaacatggaaatagaaaaatttttcatttttaagatccttaggaaaaaaatttttccccctatccaagggacgagtgttccttgaaaaagataaaatggcttatatgacttgaaatttaaggcccaaataccataccttctgttttttcttcacgtggtaaaagaacaccgcccatttttatcgctctctaaaacttgggaagaccgcaacaatgagttttccagcattttctggcctctttgtttttttaaccgcggcagttgcagctggaccagaataatatttcccacacgaataattttttttttatgcaaaaaggttagcagttataatagctttttttcctgaa

SEQ ID NO: 115853 - DNA, 390 bp, Glycine max
  Clone ID: PAT_MRT3847_75626C.1
ccccccctgcctataacaatcaattttcagaatttgttgtgaaaatgttgcagtacatagggccattgctgaaattggcctttgcatttggcctgcagtactatggcaaaaaaaacaagtccactgagtcagaaaattgaatttgagtttgtgaccattgttttagtggtaataatagactggtggcagtgttgtttctttacttttctttttggggtatcatttaaaactacttcactatctcaaataccatgcggggattaattttgtattcttggtgtgttgtggcctcttgctcaagttatgcttgttgttatttaggtaccgttcgattgagtggaaagaaaaaaaataaaagttctaaatcagagtaaaaaggcgttggatctt

SEQ ID NO: 115854 - DNA, 393 bp, Glycine max
  Clone ID: PAT_MRT3847_75627C.1
cggtcaggaaatcccgtctcgaccacatccgcaagatcgcgacgaccgcgcgcgacgaattcggcgtgcgcgcggtgatccatccgcatgcgggcggctacatcgagttcgccgacgagatcgaccggatcgtcgccgatatcacggccgacacggtcggcctgtgcctcgacacgggccacctgcattactcgggcatggacccggagacgtggctgcgccgccatgcggcgcgtctcgactacgtgcatttcaaggacatcgacgcggccgtgtacgacgcggtgatgggcgagcacatcgcgttcttcgccgcgtgcgcgcgcggcgtgatgtgcccgatcggcaagggcgtgctccactacccgtcgattcggcgcgcactctacgaca

SEQ ID NO: 115855 - DNA, 125 bp, Glycine max
  Clone ID: PAT_MRT3847_75628C.1
ccggaactagaacaccatataaccggctcttatttcattgaagaccattgaccataggcttgggccacaggccagggatgacaccatcgtaaaatatagcctacagtgaattcgccaccacatga

SEQ ID NO: 115856 - DNA, 1224 bp, Glycine max
  Clone ID: PAT_MRT3847_75629C.1
gcgtccggcacataccaatattgtagcaacagttttcacttttgttccattattagttcttttagaaatatttcttcagcaattatggctagcttgaaagttgcatgtgtggctgtaatgtgcatggctatggtgagtgcaccaatgatggtgcaagccgtcacatgcaacgtgcctatcttaccctgatgcagggtggatcggtttcgatcggattcgtgctgtggcggagtgaggaacattctgggttctgccaacaccaccactgacaaacaaaccgtgtgcaaatgtcttcagcaagctgccaacaactatggaatcactaaaatttagtggcgctggctaattaaggaaaaactattcttaattactaaattagtgtcatatatgtttctttgcattcatcattctttaactttcacttcataactcatgtggcatggtttattcttgttggtggtgggcacaaatcaggatgattcaggttaggagatataaaattataaaatcgtaaagtcacacaacgtaaaaaattcaaaataatatttttctaaaattagtataggtttaagttggtttgagttatacatgctcaaatgtgataccctaaccaatgtcatcgaattgataattcttacttatgatctgaaaaagtctagatttttatcttcaatttgctcgagtcataatttggtctacccctaagcaatcagatgagggaataattagtatacgagagcagagagggaaaaataaatcaaatttaatcttcgtatcaattacccctttcctaattcaaattatttatattgttcgttcttgtgatagaattaactattatgtatatataaacgtttattagctgtgttaccggaaaaagttattgccagaaaatggtgattaaatatatgttgaacttcatgtgttttttatgtaatgctggcagcatcaggttttaaaggagcgggtagctttgctgatttctgccgtggaatactgaggcaacagtgtaacatttgctattgttagaataaaagaaatcgagtgtgactagggttccacttatgtgagcctgttattgtattagtttaatttctgttgcagcccctatagtctttatagttcagtgtgattaaattaatgtatcttaattagttgattgttgcatgcaacgatcacgtatttgatataatatataattccatcctcctttgattgttgcgt

SEQ ID NO: 115857 - DNA, 1060 bp, Glycine max
  Clone ID: PAT_MRT3847_7562C.1
ttcggttgcccacgcgttttacggctgcgagaagacgacagaaggggacaacccaaaaactactgaagattcccaaaggcaaaaaacaaaaaaaatacaagatgaagagcaagttcctttttgttttcctattattgggaattcttaactgtgaggcacaatatttcaatgccaacccatacgactatttacaactagccttaaggtggcctaattcctattgcttgacacatgaaggtggttgcagggaaatagtgccacaatattttactattagctaccttcatcccatgagaagaggaggccctgatctgcaaaattgcccctcaccatttaatatgccaaatagcactatggagataaacaagaatgacctactcaaatactggcctgatctgagaactgataattttattgagagcaagtcattatggagggaccaatggagaaagtttggttcatgctatagtatgatgccagatgactatattgtttatgcactcaacagtagaaagagaaatgacctcaagaaaatcttgacaaatgcaggtattgttgcaagtggaaatccatatccaacacgtaggatactacaagctttcaggaaagctttaggtgtgaatgttgacatagtttgtgagccagatagaagtggaaatgtttatcttgcagaggtccatcaatgtgttgatgctgctggaacaacatctatagactgtgacaataaggcaagaggatgtgatgatgaccccatctttccctacatgggattccaaccagacaaagatcccaagtaataagatcatgcaatcaaaatctcctatagttgtattacccctggaacaaatatatataaaaaataaggggctctaagggtatgttaaggaaataaataataaaatatctgaataaaattcaaaaaaaaggtttgacctttgaataaaattcagaaaagatttgcccaaaaaaaaaaaaaaaaaaaaaaaaaaaaagggggggcccccgaaatcatggaccttgtaacccggggaattattccggaccgggaatttggggggta

SEQ ID NO: 115858 - DNA, 107 bp, Glycine max
  Clone ID: PAT_MRT3847_75630C.1
tatcatttcaggctctggggctgctgtaaataaatatggatatttgtgtaactaagtcatcaattggaatgaaattacagagttttggccagcgtatccatgcaaaa

SEQ ID NO: 115859 - DNA, 690 bp, Glycine max
  unsure (1)..(690): unsure at all n locations
  Clone ID: PAT_MRT3847_75631C.1
tgggtccctcactaacactcatactacataccctgactccgtctggaatgcctctgttttgttctgtcagagtttcactccgataaggaacatagataagcattgtgaaagagagagagagaggaatagcaagagtcctttttccactttgcatataccaatcattcgttttacggttccctttgttttctttttttctctgctagttgagcaaaaatggaggaagcgagtcctaaaattttcattccaaacacgatccagggagtgagtgagcacgtgacggggcagattgaactgctctgggagttagtgaaagtgccattgatagtgcctctgctgaagcttggagtgtacatttgtttagcaatgtcacttatgcttttcatggagaggctctacatgggcatcgtcatcattctagtgaaactcttctggaaaaaacccgaacagcgttacaactacaagcccctccaagacgacgtcgaattgggctccttcatcttcccacggtcctaatacaaatcccaatgttcaacgaaaaagaggtaacaaaacgataaccagattttctctgtctctgtgtctttctgggttaatgaatattattattattattattattactattgttgntgtttctggcccaggtttacaagggtgtccatcggagcagcttgtgggctttcatgg

SEQ ID NO: 115860 - DNA, 219 bp, Glycine max
  unsure (1)..(219): unsure at all n locations
  Clone ID: PAT_MRT3847_75632C.1
cggttagcatcgtcaccgaagacgccaagacgacggcnccctacaggaaaaggacagccacgccctccaaagcacncggaaaagcggcggaggacaccatcaagcccgaggccccnccccacaagcgggggcagnnnggagagacncaggaaaaaggcgnaccgaaacagacacaagaggaaagncccacagctggggcaacacaggggcgncctacaa

SEQ ID NO: 115861 - DNA, 397 bp, Glycine max
  Clone ID: PAT_MRT3847_75633C.1
ttttaaaggcaactagcctgccattagcatttcatagtactacactggcttacatgctgataagacatgtaattaagccctatgagcgcatatgtcggatgctagcttagcggaaagcttttccaataatcacagaagagatgggaacatggtccatgctaggggctggaaaacaaagatcatgggctaagactggctcagtgagcatataaggtatcactggaaatctagcatcgtggaggtctagggcccccccttccaggacggcaggccatcaatgcgtaaacttcagtgtgtggtggctatttgaacccctgatcacaaccctggtgctgaacctgaataacccatacagtcttagaagtgtcacccttaataggtgggatagcattatgat

SEQ ID NO: 115862 - DNA, 352 bp, Glycine max
  Clone ID: PAT_MRT3847_75634C.1
ctgaagattgccttccagagtttaacaatcttatcattagaacgcaatcatctggtatgagtctatctgcattatgatacatgtttatcgggtttcttaactaaaaaaaaaaaaaaaaaaaaaaaaccaaaaaaataaataataagtaaaaaaaaaataaatttttataaaatttaaaaaataacaatattatattttcatatataacttctatatataaataaaaaaaaggccgaccactttaaaatacccaaactttcaaaccctctttatcaaacttaaaatttttttatttgtgaccccaaaatcaaattaattgccctcttttaaaaatcctgttatttgaaaaacc

SEQ ID NO: 115863 - DNA, 1079 bp, Glycine max
  Clone ID: PAT_MRT3847_75635C.1
gtgaatctgatgaagaacgtgaagctggtaaagcaaataaaatcgtaggtaatcaagtgaaaaaagctgtcgaaggtttatcagatgatcaacttaaagaagttgttattgcatatgaaccaatttgggctatcggtactggtaagtcatctacatctgaagatgcaaatgaaatgtgtgctcacgtacgtcaaacattagctgacttatctagtcaagaggttgctgacgctacacgtattcaatatggtggtagtgttaaacctaataacattaaagaatatatggctcaatcagatatcgatggcgctcttgtaggtggcgcatcattaaaagttgaagatttcgtacaattgttagaagatggtttcgcaaatcgtgaaagtgaacatggcaatgcagttaagcaagcacataaacctaattttgatcgatattatgaaaaatatcctacaacacaaatagaagctagtggcttagatgtaggtcttcctgaaggtcaaatgggtaactctgaagtaggacatatgaatattggtgcaggacgcatcgtatatcaaagtttaactcgtattaataaatcgattgaagacggagaattctttgataacactgtattaaataacgctgttaaacatgttaaagacaatggctctgcgcttcatgtattcggattgctttctgatggtggtgtacacagtcattataagcatctatttgctattttagaattagctaaaaagcaaggaatagataaagtatatgtccacgcatttttagatggtcgtgatgttgatcaaaaatctgctttgaaatatatagaggaaactgaagataaatttaaagaattaggtgtaggccaattcgcttctgtttcaggacgttattatgctatggaccgtgacaagcgttgggatcgtgaggaacgtgcctataatgctattcgtaactttgaaggtcctacatttacttcagctaaagcaggcgttgaagctaattataaaaatgatgtgactgatgaattcgtcgaaccgtttatagttgaaggccaaaacgatggtgtgaacgacggagacgca

SEQ ID NO: 115864 - DNA, 418 bp, Glycine max
  unsure (1)..(418): unsure at all n locations
  Clone ID: PAT_MRT3847_75636C.1
tggttgttcataaccagaaaccaatgcgaaatagtctaattttgatatcaataacatgaatattccccatttgaaaaacgaagaagtttaaaattttctcatgtctaacgatgtatgtaattttagttgacatagtattgttagtgctacaaatgttctatttgtgagaaaaaattaacatgtatacaatattttgaataattactccatatatttcttgttttgttgtttacaaatttttgaatgatgcttatattcacaactgttattgtataagttttacatatatttagttacatgagtaatttactggtatttaaaattatttaaaagaaggaaggatatgaaaataatttgattttatcaaggggtaataaatntcattctataaattaacctcaggttatgttaggaaaat

SEQ ID NO: 115865 - DNA, 140 bp, Glycine max
  Clone ID: PAT_MRT3847_75637C.1
gggatgcacagatggatggggggggcgggtccccggcacaagatgagtcaatggatgcatgtactgaggctcaacaaagaatggataattacttaacccaaatgaatgcgacatctaatagagaaggtacttctctaatg

SEQ ID NO: 115866 - DNA, 340 bp, Glycine max
  Clone ID: PAT_MRT3847_75638C.1
cgaagatgccttcttcgctgattacgctgaggctcaccaaaagctttctgagcttgggtaagtcttgatatttcttacattgataatttataaattcatgattttatgaagcttttctctccgttttacttgacatgttttgcgttgttaattgggtggttctgattcgtgtcatgactgttgcctctcaggtttgctgaagcctaagcaacgttttggggattgttggagaggcacggtgcccataatatttctctcataaattctatggtcatggtttctaatgcgccactgtgggttcctcaaatttttagatagctcttgaatgtattttgcttga

SEQ ID NO: 115867 - DNA, 374 bp, Glycine max
  Clone ID: PAT_MRT3847_75639C.1
gattttaacactgcccaagagtacgttaatctatccagctcatgactacaaaggattcactgtaaggacacccttaagctttttcttgccagatttgttgggtgttgcttatacaaattactgattttaggtgagcactgttggagaggagctgcaaaacaatccacgcataacaaaggatgaggtaatgttggatgatatccatatttatatgaaagttaaagtggttaatcatgagaaaagactcttttggatatcctaatggaagattatacatgtgattgtgatttagaatgcttaaaacagaaacaaatttacagcacagctgctgccatagtcagtaatatctaagctcttggcaaatataatagagg

SEQ ID NO: 115868 - DNA, 486 bp, Glycine max
  Clone ID: PAT_MRT3847_7563C.1
tgactatattgtttatgcactcaacagtagaaagagaaatgacctcaagaaaatcttgacaaatgcaggtattgttgcaagtggaaatccatatccaacacgtaggatactacaagctttcaggaaagctttaggtgtgaatgttgacatagtttgtgagccagatagaagtggaaatgtttatcttgcagaggtccatcaatgtgttgatgctgctggaacaacatctatagactgtgacaataaggcaagaggatgtgatgatgaccccatctttccctacatgggattccaaccggataaagatcccaattaagtaataaccccatgcaatcatgcaaaatctccttattgtattacccctataacaactatgtattcaaaataaggggtttaagtgtatgctaaggaaataattaataaaatatttgaataaaattcagaaaagatttgcccaaaaaaaaaaaaaaaaaaaaaaaaccaaaa

SEQ ID NO: 115869 - DNA, 206 bp, Glycine max
  unsure (1)..(206): unsure at all n locations
  Clone ID: PAT_MRT3847_75640C.1
ggcaaagacactgtnanaaccgagatctatccgggtatattcggaactgcggagtctgaccgccgtgcatnctactcagctcacactgtctctttctcactgtgggagtagctatgggaaaggtcacacttccttgcnttcccctcaaaccancagggnttncanttctcagtctcccaacgcactgcacacngctcncagcatcc

SEQ ID NO: 115870 - DNA, 477 bp, Glycine max
  Clone ID: PAT_MRT3847_75641C.1
gcttcgaacctggcttggaacctttgggctgatttatgtgcttgcatggtcgtgagaagatgatagaagggggcctcagcgcgcgaccgcccgccgccgcaatctgcctcctcctccccgccgcctcgcgcccgcgcccgcccccctctctattcgaaaacgctccgtcgtggcggcaatcgcggccgtggaagtcttcgtaagcgtggtaatggtcgtggaggtcgtaagacgcatttagatccgagtcatatcgagctaattattattgagattccggctacgggagcggtattcgccaaggtctaacccgagggcgtcgaaacgggcgcgtttgtcgagaatgacggtcgtaaacgcggattaaatcgtcttcgtaattttcgtatccgtaagcgaggcgccgggagagtaagtcctaagtagagacagtttccaaccaggaacaacgacaaatcaccaacgcgcagtccaaaa

SEQ ID NO: 115871 - DNA, 250 bp, Glycine max
  Clone ID: PAT_MRT3847_75642C.1
tgggatacacaattcactttcttcctctgcttcacattctcttctcttctctcatagggttagggtttttttctcttcagggctctctctgtccttttatttccatggttcagcaagatgctcacaatggtgggtcagagaatgccgctgctgctgtgtcgtttgtcgctttgaagccgcagctcctcatcgaactctcccaacacgaacgaccccgttctgttctacaaggccgcgtttgcctctgacg

SEQ ID NO: 115872 - DNA, 467 bp, Glycine max
  Clone ID: PAT_MRT3847_75643C.1
gcgcttgcgcaactagggcgtcgacaacacgcacaatcccgagtgtctcaacctgcgagttctatgaagtcggcgctacattgccagatgtgattgagcgaacagagcagctcattcacggactccacacagccgtcgaagcactgcgagcaacctatttccccacactttctgcgccagaagggatcgacttcacagcaccattcgctcaactccccttcatcccaacaatcgaaaaggcgatcaaccgcacacttgccgacctgtgctgaccaaccgccacaaacgacattcttgccctcttgaacgacctagacctggtgatcccacccaacccaacccttgcccgcctgctcgacaccctggcagagcaatacatcgaacccctctgcacaaaccccacttgtgataacacaccacccagagcccctctccccgtctgcaatgcttacatgtgccaaaccttg

SEQ ID NO: 115873 - DNA, 273 bp, Glycine max
  unsure (1)..(273): unsure at all n locations
  Clone ID: PAT_MRT3847_75644C.1
cggcccaagggagnttggcaaccagaatggtactggtangtngatggtttgcaccttgtgcaattccagtntccttattggcacttgctgctcagaagataccagaaaagcaaaaggggacttgtttctggagaaaattactgnaatccataacatgtgggntcacatcctcaaacaccaanaaatcagaattagaagcatcttccctactgcttagattcnatattgcaaggagtagtactaagcaaggtcgtatccatttcnangaaatcc

SEQ ID NO: 115874 - DNA, 720 bp, Glycine max
  Clone ID: PAT_MRT3847_75645C.1
cttatctatgactcatgttcctatttttgcaagactttgttctggggaccttaacagcagcaatgatgtcaaaatgagtgtttgggagatccatgtaaatggctggaggggatctcccacagtataagacattttttcttcattgtaattgaatatgcagaagtgtaatcatccatgtttcattgactgttgtctgatgagaaccttatataaatataagatactgcatttcatatacagacaaagttggggggatttgctataccaaaagaggcacaaggaaaagttgcaaaatttgatttccatgggcagccagcagagctcaagcatggcagtgttgtgattgctgcaatcacaagctgtacaaatacatcaaacccaagtgtaatgcttggtgctggtcttgttgcaaaaaaggctcatgagcttggtttgaaggtcaagccttgggttaaaacaagtcttgctccaggctctggagttgttacaaaatatctactccagagtggactgcaaaaatatctaaatgaacaaggttttcatattgttggatttggctgtactacatgtattggcaattcaggagagctggatgagtccgttgcttctgccatctcagaaaatgacgttgtagcagctgctgtgttgtctgggaaccgtaattttgagggtcgagtacatgcattgacaagagcttactaccttgcttctcctcctcta

SEQ ID NO: 115875 - DNA, 290 bp, Glycine max
  Clone ID: PAT_MRT3847_75646C.1
ggttctcaagtcatgatcaaattgccataattgtaattatgaagaggcaaacaaccaagttgaaaaaaaactgtgttcatgcatcgagactgtgtgcaaaaccatatttaacatagattggtaagtcctttagggcactgaaacagaaaattccctggcaacgaggtgtttgtgttcacaaaaggataccctataataaaaacctatgtatagccctatactactgcattaacttcaagattaaataaactccacataagctttaagcaggtttcttgcttgggtctcca

SEQ ID NO: 115876 - DNA, 422 bp, Glycine max
  Clone ID: PAT_MRT3847_75647C.1
gcataatattcttaagtgctatcttgaaatatcgcctgcatcatgaatctcctgccggtcatgttgataaaaggccggttctttgtatcacacattaatcttataaacctccatgcctcttggctgaatatccttaaccttatagactttgcaatggagactgatatactggtgtggtgatccatatggatgacatagagaatggattatatactatggtagaacatgcagtaaactggagaggatctggtgctctatgcttaaaaatggtatcctatggcgtcacctcatatctctgactggcgtcaagtgcttcatatgataaaccttattatcaactgttaggctactagcacaagctcgagctctagtcttggatgcaacttgagagggaatactattcttaattgatggcacagaaa

SEQ ID NO: 115877 - DNA, 1089 bp, Glycine max
  Clone ID: PAT_MRT3847_75648C.1
acggcgcattctcagggcgaaagaagaagaaaaatggccactcaagaagacgaagaagacgagataattaaccccttcacaatgctcctaatccacgaagaagacaaaccaagcgtctccgctaccctccccgcggctgcaccgaaccaccacctgctccagcaccaccccctccgttcgatccaatcaacggtcgccattcgccagctcccttccgagggcctctccttccagctctggcccgccgccacctccctcgtctccctcctcgacctccaccgcgaaaaccctccctccgccagccccctctcagccgcgctccacggccgccgccgcatcatcgagctcggctccggcaccggcctcgtcggaatcgccgccgccgccaccctcggcgcccacgtgactctcacggaccttcctcacgtggttcccaatctccgattcaatgcggacgccaacgccgcggttgtggggcccaccggaggggtaataaccgtcgcgccgctccgttggggccacgctgctgacgtggaagcgattgggcgggagtttgatctcgttctggcgtcggatgtggtgtatcacgatcacctgtacgagccactgctcgaaacgctgcgtttaatgatgctaagtgaaaggaatgggaagatggtgtttgtgatggctcacatgaggaggtggaagaaggagtctgcgttttttaagaaggcgaggaagcacttcaacgtcgacgttttgcacactgacacgccttgtgatgggtctagggttggtgttgttgtttaccgttttgttgccaagggataatagggtttgctgagagacatcaattcatatagaattattctaactttttaatttaatgtatcttgcaaagaatatcaaatcatttccatttcaacagtatgataaatacaaccaggaatatattagagaaagcatgagctatagatgctctagctaacttaggtggttttctcttgacatgatgaagtttaaaacctgaattagttgtaaggatgtccccagtatgatgtagcaaaattcatatatcatgacacattttgcaaaaactttatgcaa

SEQ ID NO: 115878 - DNA, 340 bp, Glycine max
  Clone ID: PAT_MRT3847_75649C.1
tacggctgcgagaagacgacagaagggggatatcatgtgcacaagaggtgattcaatatttggtgagggacactctgtctttctggtttatatcagctaccatgttcgcacaagatggtggaaaatctggagatatgggtgctaagctcaaaggatacgcactggcattttgtgtttttcatagcgcaacattcgcctggggtattgacaattcgtattcaccaacacaacgcacagaggttgtcctctcgcatttgaaatttcgtgcgcgcactctgcacaggcacggcgcagtgttctctcggtgctctacttggaaagcctatgtgtcagggataga

SEQ ID NO: 115879 - DNA, 570 bp, Glycine max
  Clone ID: PAT_MRT3847_7564C.1
ggctcgagattggaggatctcagatgttctttgcgttagcacagcaccttcgccagtacaaggcaccgtctttccccgaagatattgtggaacaaagcattgaagagattggtggcaaggttgtttctcaggtgggatttcaagaatcagccatcccaattggccaaaaccctgagaaattcagacccaaaaaagctgctgttttgatctgcctattcgaaggggatgatggggatctaagggtcattctcaccaagcgctcttccaagctttctactcactcgggattcaagaggcgctactcagtctcatttatcttttgtcattttgcacaaggcgtcaggctgaagtttaggtgtcctattagtgaaggatgtgccaggctgagaattgcctatagaaagcactactctggctgacttcaccctggcttcctcgtttgcaaaggaggtgtcaggctgagaattgcctacaagaggcaccactctggctggcttcaccctcgcttcattgacagaaacacctgacgcgagtcaaatttcagcctggcgcctcatgcaaaatgacaaa

SEQ ID NO: 115880 - DNA, 324 bp, Glycine max
  Clone ID: PAT_MRT3847_75650C.1
gaatcggtatgggtggtgtaacaggaacgccgcgagatgcaaacgtgaaatcaaaggttgctggagacaccacgaacacccaggacggtgtgagcgtcaaggacaatgccaaggccatcataagaggggcacacagacgcacacaggagcaagactctgagcacttgcatatcaaacgtcaactcatcactgacaaaaactgctaaaggaagctcaagggggacgaccacttcaacgacgactaaacatgcagacggattcgcaccgttctgaagcacgaggagaaactactcatacgcgcaaccaaaggatatcgatacaaaa

SEQ ID NO: 115881 - DNA, 837 bp, Glycine max
  Clone ID: PAT_MRT3847_75651C.1
cattcatcacaaatgaaacccaattctggtagaaatgcttcaccggaagctaccgatggcagggctgaaaaatggtttcaacacgttggagccggcatcatcacaaatggaaaccaattcaggtataaatgcttcacagcaagttactgatggcagagctgaaaatgagggggagaaggaatgtgaattaatgtctctggagttcagtggagaaaaatcaaaaaccccaaactctagaaaaaggaagcatttgtcagaacccctatctgaagcacagctggatatcaatggctcagcagcaagttcaccaaatgttcatctaacgcaaataggcaataaaatgaagacaaggaaaaggaaatgatgcttagttgagaagtcgggtttaaccttttcctaaggcttcaaattgcagtatccatccttttgtgagattgagatcccatgagatgatcagctcagatctcgatggatttgtttccatttaggaaggtaatcttgtgtgccattgtattttttaaaaatagctttccaggtattgatctctggtgagttgttttgcctctcttgcaaacactaaaaatagttcagttattagtttttaaatttttatttttttatttacagaaatctcattccttgttccaaatgatgttttttccctccttttaaggggtttactaacattacaaaaaagaaaagaaaaaaaacgatgaaaataggggaacaatttatttttgtacctcaggattcaatgccattactgtgttaacctgcagcctctgctggcggtgtggtgcggcccccccgttgcgccccgcctcctcccctctgggg

SEQ ID NO: 115882 - DNA, 1819 bp, Glycine max
  Clone ID: PAT_MRT3847_75652C.1
caatgaagaaagttcaagctctgatttcacatctgattccgaggatcaagagaatggatttggggataacacatcccctttccagaatgagatcacccatactagctttaaaaaggcgaataagctaagaatatctatggatgatgaactgtcatctttactagagccagattctcagcaacggagtgccacagcctgttaaggagattgacatggcgaaggcggaaactactcgaagcagattgaagatacggggatcagtgatactagtgatgatgaagattggaatgacgcagctgctccaagtagaaaaaagaaactcactggcaatgtgactccagtgtcaccaaatgcaaatgcttcaaataattctatacatactcttaagagaaatgctcatcagaataaagttgaaaatacaaatagttcacccactaaatcccttgatggccgttcgaaatctggttccagggataaaaggtctggatcttcagcacacaaaagactaggagaagccgtagttcagagacttcacaaatcttttaaagaaaatcagtatccagatagaagcacaaaagaaagcctggcacaagaacttggacttacttatcagcaggttgccaaatggttcgacaatacacgttggagcttccggcattcatcacaaatggaaaccaattctggtagaaatgcttcaccggaaggtaccgaaggcagggctgaaaagggatgatgaagattggaatgacactgctgctccaagtggaaaaaagaaactcactggcaatgtaactcctgtgtcaccaaatggaaatgcttcaaataattctatacatactcctaagaggaatgctcatcagaataatgttgaaaatacaaataattcacccactaaatcacttgagggctgttcgaaatctggttccagggataaaaagtctggatcttcagcacacaaaagactaggagaagccgtagttcagagacttcacaaatcttttaaagaaaatcagtatccagatagaaccacaaaagaaagcttggcacaagaacttggacttacttatcagcaggttgccaaatggtttggcaatacacgttggagcttccggcattcatcacaaatggaaaccaattcaggtataaatgcttcacagcaagttactgatggcagagctgaaaatgagggggagaaggaatgtgaattaatatctctggagttcagtggagaaaaatcaaaaaccccaaactctagaaaaaggaagcatttgtcagaacccctatctgaagcacagctggatatcaatggctcagcagcaagttcaccaaatgttcatctaacgcaaataggcaataaaatgaagacaaggaaaaggaaatgatgcttagttgagaagtcgggtttaaccttttcctaaggcttcaaattgcagtatccatccttttgtgagattgagatcccatgagatgatcagctcagatctcgatggatttgtttccatttaggaagggaaccctagtaaatattgcagcttatgtgtttgactgttcacaatgtatggatatggctctcatcttgcattgatcgtgtgtggttcgacattcaaggtgggttgttttcgggaatcatgaagctgctacgttggtcaattgttggcaatccccatttcctttaaacaaaaatttgtcatggatctgtgatttgagtaatagagtggggggatgggagcatcatatattccaattgctgcatgcacattgcttaacttaataacctattattattgtgaggaatggaagtaaaataacacattgaggg

SEQ ID NO: 115883 - DNA, 589 bp, Glycine max
  Clone ID: PAT_MRT3847_75653C.1
aattcggcaccagaggatgggttaaggaaaatagatcaccatttgaaataagaactccacctccttttgtgttgtctgatgcttatttaggaggatcatgctacttatgactgagtaaattgtcaatctagggattgactctcacctatgcctttaatggtctaatctacatttaagaagctatgttgtattctctggttttgggtgtcctttttcttgcttgaccactttcatttgcaagttttatcttgactgggtaaaaaaggaaataaatgctcataacttgaataattttcaagtgtacttttcatatgtatttctcttgtaggcggttgccagtgatactttgaaggtattgtgatatgtcactttacttcactagaagattgaaggaaagtaatttgacaactgaatgcaaaatgatgccagcattagctgcattcagatgccatttgcatatgctgacttcttttgttggggaattttcttattactaatgtttgagtgaaaaatcttttctcactatagtcaataaagtgatatttgtatgtttgcttaatggcatttgacatgcttacaaaaaattgtt

SEQ ID NO: 115884 - DNA, 176 bp, Glycine max
  Clone ID: PAT_MRT3847_75654C.1
accggttcggacacacccgtccgaccgccaccacccaaaaaatccatttaaaatttatgacaccgtaaaatccacatcttatcagtcatctttcagggcctatattacatacgtccttcatactcctacttaactctccaatatctttactcaccctaactatacaatcattctca

SEQ ID NO: 115885 - DNA, 271 bp, Glycine max
  unsure (1)..(271): unsure at all n locations
  Clone ID: PAT_MRT3847_75655C.1
ttttgggtttttttttttttttttttttttcctgagcaaaaactatgccattcgtactaaaaagaagatgcaaaagactaanctttacatgaggatatgaaccaccttttcctatcatatactttaatactcaaataggcgctaaagcaatatccaattatcctggaggcgttcaccaaatttacgaactcggcctttatctctcttagaatcgccaaggatccgtacaatttacctatctactctatccctgctaacatatgctctcaaa

SEQ ID NO: 115886 - DNA, 347 bp, Glycine max
  Clone ID: PAT_MRT3847_75656C.1
atggattacaccctcgaacacgctacgactcgggggtggtgggttgcttctcccctcgaacaggcagcatccgcctctgacaagtacccattcgccgaacatccccagccatcagcctcgtccattgtccgttaccgccggcgttgcgcgcctgtgctcctggcttcctcgcctcgtgccagcgatgtcatgtactgcgacggcatccggctccgcatcaacgcaaggaagcagatggtcacggagttcacggaatccccttcgcactacagcttacaccgctttacccagggcgaccgcgaggcgtgcattcgcatgacgacccgaccggatgttcgacgcgaagc

SEQ ID NO: 115887 - DNA, 1178 bp, Glycine max
  Clone ID: PAT_MRT3847_75657C.1
ggttaatctgtcgtgatggccttcccgaggctcttccacatgcgcaattctcctccttggccctcgtctggggagtccttagtgcagcgttcgctccgtaccctgccgtaggttaatgcacctctcattgtgtaagtttctttttttgatgcgtcatgtcagatattcactctatcagcagtaccactggaaaggatgccaaagtccgtcaaggaatgttttattgtgttaaagccaggaggcatggttttttttcgggactatggcctctatgatatgaccatgcttcgatttgagccagacaagcaagtgggattcagggaatacatgcggtcagatggaacacgatcatatttcttttgtttggatactgtccggagcctatttttgggtgcaggcttcaccgagctcgagcttgattattgttgtgttaagtctgtaaatcgccagaaaggaaagtccatgcaaagagtgtgggttcacgggaagttccagaagcctgcactgagttgtcaataatctcccttggtgtgctgtgtgaagtcggatgaaaaagtacacttattcaagtttatcattgattgctttcagcaacacagaaaagtataaaagagaagcaggtagaaaagacaagaactctgatgtttgtgttgtcctttttatttagtcttgcgtcaggaccatgaatatctcaccatccattaggttagcgactaattcggttcggttcatggtgcatggctgtagtcctttattttcacttctaagttttgtagtgctggaaatctgaatggctattttggataatctatttctgactggatttctgttgtttgtattcaatgagaatttgggaaaaaggtgcaggcttcaccgagctcgagcttgattattgttgtgttaagtcggatgaaaaagtacacttattcaagtttatcattgattgctttcagcaacacagaaaagtataaaagagaagcaggtagaaaagacaagaactctgatgtttgtgttgtcctttttatttagtcttgcgtcaggaccatgaatatctcaccatccattaggttagcgactaattcggttcggttcatggtgcatggctgtagtcctttattttcacttctaagttttgtagtgctagaaatctgaatggcttttttggataatctatttct

SEQ ID NO: 115888 - DNA, 443 bp, Glycine max
  Clone ID: PAT_MRT3847_75658C.1
tcctctcgcccgacagactccgagcctcccaaacgggggaatttttcgaagtccgggccctttatataacaatcctatgaggctctaatttttttgaggaccatgcggttgcgtgagtaaggattcggagttggagatgcttgaagagggaaagttacgccgccgtcggtggcaactgaggtccgcagtgcttctgaattctttcaaggttatattgcgcgcgtaccaagatcagggttaggagatcccaattaacggtgcggctctggagttgagtgtcccaaatgacctacactgagcagaccatccggtgtctcttatactccacgttctggaggaagagaaattcaaagaatcccgacacaagcttgtgaaagaattccgggttctttttcaacatgaagtactttcggggaaaaagccccggctggcaagcggcaaga

SEQ ID NO: 115889 - DNA, 554 bp, Glycine max
  Clone ID: PAT_MRT3847_75659C.1
aggcaagggttttttattaccaaaggcaaaacacctgccctgatacttcctttgggagaaccccaaaaaaaataaaaaatactgccaggacttttatgcttttgaaccatgtattgcacaacatttgcacttttttattacaaaaactcatttattggaggggggcctatcgcctcatttttgtataaacaaaaaactgggcatacaaaaccaattcaggcccctagtagcaaggtgcaattcatcttcccctaagcattttttttttttttgctcctattaaaaaatgccagcagttattaccccacgggacgttttaaacacagtctaatatagctccctggaccgggattcatttcacctaattcctcacacaactgaaattatacttccccaccccaccttttttaaaggatatgcaatttgccacagccctcaaaacaaattggaaggaataaaacaaaataaccaagctttttgggggattggttatgcaaaaataaataaagccaaatcaaatactaaaagaggtatcacacttactaaaacattgg

SEQ ID NO: 115890 - DNA, 1020 bp, Glycine max
  Clone ID: PAT_MRT3847_7565C.1
aagaaaatgacatttttaatccattctattctaattcattttactctattatattacaatcccctattcaattctccatcacaaatacaaatataggcttacattttacaagttatattgcattaccatcatttcaaaagaagttagttggtggagcgattacaaacacacctgcatggtaatgcaactactgcactaacctaactacgagacaaatacacctgcatggtaatgtgatccacgaagagtgatggcgtatatgcctaaatttacacaagtagatgtagataacaaaattgtcaggtcgaaaatcattcaacaatagtgagtgcaagtgaggccattatccgttgtcagcctcaaaagggagagtagtggcaggtatcaagcattgtaccattgataagctctgagtctaaaacgtgttctgtggattaatccttcttctcccttctcgcttataatatggagtttcatcgatcgttttccttacatagtctacaaatggttgaggtgttcgaggagaggagtcatttacaacagatgatggggtgcttctgtcaggagttgtgggcgctgcaatgcttggagtagtagtaactgaagaacttgtttgctgagatctctctggtctgtccaagaaacgtgtgatgatagcaattgataaaatcaacagcagcaaataccccaggatgcttgcccagaaggccttatttatggttacgctggatgatgctgtttcctcgggttcatggttgatgtctatctccacactctggcctgtagctcggggagtggtgagattaaactggtaaactccaacagacacttaaaccttgtttagataaacttctgtacaagtacttgaactgaaaaaaaaaaatgaaataagtttatcccataggttaagtttaacatatgcataagctaattttaacttatggagaagattttttaattttttcttcttattttcttctcctagaagtgtttctagagaagttttatccaaacatgcct

SEQ ID NO: 115891 - DNA, 2005 bp, Glycine max
  Clone ID: PAT_MRT3847_75660C.1
tcgctcgagtttattgctctcatggcttttagtcttgcgtggctagttattgaagctggagttggtgttgctgtttttgtgcgtttctttgttaacaagagaggaatggagtctgaaatcattgatagactcggaaatggattctctcggcccccatttgcagccgttgtggttgtatgtactgtagtttctatcttggcttgtgtgcctttgggtgagcttttctttttccacaggaaaatgaaagacatttgacatcaacggatgcccaagatggcagcatatcagtgaacttgccccaagagccaagatataaaagggattcactttcaaatcagcttcctgtgtttgtccctggtggatttgagaataaccttcaacctcgttctggcatgaattaacttatgttgttttgagattccaatgagtggacaaagtttttgttggaatcgaaaggatagtgtgcctcacttggagcctggaatgctgtagacacgtgttgagccttttgcagctgggattgcagaaagagggcaaaagatgccaaaaagacctgttcgtattagtgcttggaagcttgctaagttggattcacaagaggcagtgagagcagctgcaaaagccagggcatcttcttcagttttgcgacctgtagataaccaccgtctaccagatggagaattgagctctagtggcaacatgagcatcagaagtagtttgagcacagagactggaactaacaaggaaataaaacacgagttgagattgtctccagtgagaaattctattgctcctagtcaaggaagtcgtgatgagtatgagactggaactcaaagtatgagtagttttagtagtcctagccatgttcaagaggcagttacactcagccctcttccacaggaccacagtttgggtggcttcagggcaggtacctcaattcctagtttggtgcctgagcgtcctttaacttctaaagcaacattgtcaaacttcaggaacccaatatctagtccttctcttggatttgatgggaggacagcaatgccaaaaggaattggtaatgatccattgttgctttcaacttctaacacttctattctaagagacgtgaaacgggcatcagttgtttgggatcaagaagctggcagatatgtttcggttcctttattgccctctgaagctcgaaataggtcatccatgcgcatagaatttccaaatgtaaatgctgaaacaagcagtattgggagaaaatcagtgattcctcagcaggagttgtcatcatctgcacccaaatctcctgggcagcacatacagaatctgatgtatacaggagattctatcttttatggaggtccatttttgagtgcccctgttaaagatggtttgagaaatgaaagacatttggcatcaactgatgcccaagagggcagcatatcggtgaacttgcctcaagagccaagatataaaaggaatttactctcaaatcagcttcctgtgtttgtccctggtgggtttgagaatatccttcaacctcgatctggcatgaattagcttatgttgttttgagattccaatgagtggacaaagtttttgttggaatcgagaggatagtgaagagcaattaaaagggtctatgtggtagacacggttttagcctttcagaccatacaaatgaaaagtatggtgaacatctgactccaacaggtggttgtttattctgcctaatcatctagggttaacgtctgttgtcatcaaaatgcctctgggcgtttgagagagtgaaagaatttcattgtgccatttgctgaacatgccttgagaaatgtgaatcttcccttatgcggtagatgaaatctcaaagcagttatcacttattacttcagtaagcatgagcatgacatgagcctccttaatggattttaatttattattgtagcttttgttccactagatactaaaattgtcattatcttgccaatagagtattgtttggcctgtggcttat

SEQ ID NO: 115892 - DNA, 1033 bp, Glycine max
  Clone ID: PAT_MRT3847_75661C.1
ggctcgagctttttaattaattgggtactaggaaaaatatgcctgagatggtggatagtaatagcacaccctctagttccacaggttcaagaactgtccttctccttttgagggtcttaacctttgtgttccttctcattgcactcattctcattgcgatagtcaagcaaactgatgatgagacaggtgtggaaatcaagttcaatgatatctatgcttatcgatatatgatctctacaataataattgggtttgcgtataacctgctgcaaatggcgctctcaatcttcactgtggtctcaggaaaccgtgtattaagcggtgatggtggctatctatttgatttcttcggtgacaagatcatatcataccttttgatttccggttcagctgctggatttggtgtgaccgtagagctgggtagaggtgtaccctcaaactcgtttatggacaaggcaaatgcttcagccagccttctactgattgcatttttgttcactgccgtagcatcaactttcacttcctttgctttgccaaagaaagattaaaaataatcagctagcttaattgatgcagaaatgatgttcaaggattataaatttataggagtaattctttcttattggtatagttcaatttatttggtggtcaatcaagtattaaagtgtgactaattaatcgtcatggaataatttaatttgtattctgtctatctttgtgtttgtatttttccttcctaagatatgatgaagcaactgtacttgttttgatttttaatagaatggatttatcttaaaaaaaaaaaaaaaaaaaaaaaaaaaaaaaaaaaaaaaaccttggggggggcccggtacccaattcgcccttttaggaggcgtattacccccccttactggccggcggtttaccaaggtgggaatgtgaaaacccttgccttacccaacttaattggcttggaggacattcccctttttccagctggcgtaatagcgaaaaagcccgcaccggtccgccttcccacagtttgccaagc

SEQ ID NO: 115893 - DNA, 154 bp, Glycine max
  Clone ID: PAT_MRT3847_75662C.1
gaccggcagtggcattcataccatcagtcacagccggacaccattgctcaggtaggccacattacgcccgtgcgtgctcgtcacgctgatcactcttgctggtacttcctctgcacttagagggcccaatatcattcagcgacaatgcctgcca

SEQ ID NO: 115894 - DNA, 246 bp, Glycine max
  unsure (1)..(246): unsure at all n locations
  Clone ID: PAT_MRT3847_75663C.1
tatcagcagcagcaccagtgctaagggtgtcatcggtaccggtattatcatcagtgaaagtgtcatcgacaccgtgactgctttagcgtcccacatatccatccagcttagcaatcatagcaaggctgatgtacatgagaaaggtatacttggacaggctacatgattttcaaggaacatacctcgggcnaccttngcanctnncnaagatncatacgatcttaattttgaatgggacagtacttc

SEQ ID NO: 115895 - DNA, 291 bp, Glycine max
  unsure (1)..(291): unsure at all n locations
  Clone ID: PAT_MRT3847_75664C.1
tacctataaattgagggccttattgcgcactgcttgctgggtcctctcctgaacttnatttaacttctggcattaccaanatattnnaggagccaagggaattaanagagctccttaaanatgtcgataccccgacaatatgggggggtgaaccannccacaancatttaangacangtttacaacanagaaggctcaaatctgagaatattgagggggcttttnaaactttcccttattatctaagtgatacaacaaagaagggtttnattgcttctacatttattcatt

SEQ ID NO: 115896 - DNA, 494 bp, Glycine max
  Clone ID: PAT_MRT3847_75665C.1
ggcttggaacctttgggctgatttatgtgcttgcatggtcgtaagatgatagaagggggccgtaaaccgtaatatctagctagtatcgtattatcgtaccctaccctttagtccagtcataatcataagtttatgctgtccctacaaaattatatttattcgttattactatcccttttaaaatgtaatactactaaaatccaaatctagagaactagagagagagagagagagaaacgagcgaagaagttaaaaagaatcctgttggagtctcaatggtgaggtttaatcttgacgagttgaaattggtattggcgttagtcgcctttttgaagaaggctgctactaagagtgtcgacacgacttttgatacgtagaaggaggttgccgacactgttgctgttgtgcccgagaagcataacgcggagaaagatgccgtggagtagacaaagaaggagcctgacaagaggtacggttttatgcggtaccgcact

SEQ ID NO: 115897 - DNA, 476 bp, Glycine max
  Clone ID: PAT_MRT3847_75666C.1
tcggacgggcaggtggggattattgccatagagatcatgcctataagctccaggattacagccgaggcactgttgaaagatgagatgtgcgaggagattaatcgtatattaaaagcacatgggtggagtaggattgtcctcgtatcacactcgtacggaagcgtgcttgctgcgcatctccttcacactccacagactgcgcagaagattggaccggttgtgtttgttgatccggtatctttcctgctacatctccctgatgtagcatataactttatctgtcggaagccagcccgggctaatgaacacctcctctcttacttcggctctaaggacatgggcatttcgcacacgttattccgccgcttcttctggactgataacgtcttgtggaaggaagacatacgggaccatcgcgtgagtgttgtattagctggcagggacatagtaattgacacgaaaacaattggggcgta

SEQ ID NO: 115898 - DNA, 226 bp, Glycine max
  Clone ID: PAT_MRT3847_75667C.1
tttctctcaaacatttttcctttctaaccactaacaaactcaacggggccgtttcataacaaatgtgcgcccccaataatcccctaaactacttatacaggctcatcacatacactatcccatctctttaaatgcacaatcatcatcagcatacccaccactaattactttacgtcactcatcaatcaaaccaaccttcccaacatgcaaatttaccatccaagcc

SEQ ID NO: 115899 - DNA, 771 bp, Glycine max
  Clone ID: PAT_MRT3847_75668C.1
gccctcacccgaagaagatgtgtttcccctggttatatgtgctgaaactactagtaattccgtaatagatgcatctcctcacatgcaaattactcaagctgtcttagagaaaagcaatggtattggtcctttccaggtaaaagtagttaggcagattctgtggattgatgatattcgttatgagctgagagagttatatggaataggaagttcaacagtagcagattttgatgataatgatcctgggaaggagtgtgtaatatgcatgactgaacccaaggacactgctgtcttaccctgccgacatatgtgtatgtgcggtgattgtgccaaagctttgcggcttcaatcaaataaatgccctatatgtcgtcaaccaattgaggaactaatagagatcaagataaacaatggcaacgagtgacaggtttttgcctgatgcgaagctgaatttcatggtatttttattttgtctttgtaaattgcagtcaataatctgtttatagttcatatgtttgtgatcaaagagaaaaaagatcatatgtgcttttactattattgaatgctactctcgtgtcatcaatattgtacagattattattttttatttttctgtgtgagtgatatttaagataggatcatttgtaggtctgatttggttagccggaaaacattcattatgtatcttgaggctaaaggttcctctaatgaattatgtttgaaaattatatatgaaggttaaatttaatcacataaagttatagtgttaaa

SEQ ID NO: 115900 - DNA, 259 bp, Glycine max
  unsure (1)..(259): unsure at all n locations
  Clone ID: PAT_MRT3847_75669C.1
ggccaggtatgatgaaattgtgaaggaagtctcttcctacttgaagaaagtaggatacaaccctgacaagttcctttgttctatctctggtttggggagacaaacatgatgagagncacaaaccttgactggacaanggtccatctgttgtnattgncagatagtngccagagcctctgacagcctagctccctcagtggacagaatgagatgatgtcatggnggtgaacgtgctgagctgatgtgtnttnacatgntc

SEQ ID NO: 115901 - DNA, 509 bp, Glycine max
  Clone ID: PAT_MRT3847_7566C.1
agtagacaaagatgggtgactagacaatttggcttccacgcgtccggcacactccacagagccagataatccgattcccatggttaggaagcaaacagaaaagtttcgcatcaatggttcagcaaacccctgtactttacttaatgttgcagatttagtttccttgaaaggaaggtggtccaaatgatggccatccagaaaatggtgacgttgctggctagatacctgcaagtcatgtgcctccaccaccacacctatcattcaaagcccctttataaataaaaaaatgctatgcaatgcaaccttgtttcatagaaataaatgaaagagtgtgaaaagttggtgggtcagcacttgaagataaggagttaaaggtgcaacagagaaacaaatactactcatttagtgtttgtgtgtgtgtgtgttaactacagattttggcgcaggtgcaacctggggtgtgtgtgcgggtgttgttgtgtggtgcgttgcttttgttgtttttgttt

SEQ ID NO: 115902 - DNA, 160 bp, Glycine max
  Clone ID: PAT_MRT3847_75670C.1
ttttggggttttcttttttttttttataaggggaccaagtgctacaacttccagtaagtcctttactgggataacttccacgtactgcttctctacaagaattaaaactcacttccagtatcctactatcactaaggctacgtccaacttttttgtcagt

SEQ ID NO: 115903 - DNA, 136 bp, Glycine max
  Clone ID: PAT_MRT3847_75671C.1
gataactactattgaagaagcaaaactattctacccactgttcagactctaagccaatatagcccttatgttctctttcctgacagtcaaatacttttttaatcttatgcataatttaagtcctttaatttatagt

SEQ ID NO: 115904 - DNA, 267 bp, Glycine max
  Clone ID: PAT_MRT3847_75672C.1
atcacttaccgttgtatgtaactgcccttcagttagctcaccgtgacatatctgtaacagttgtatgtgatatatgaaagtggtgattgtgtttggtggagattagtgactatcatatttttaagttttgagatttcaaactttttgggtgagtcttgaagaatatatacatgcatatcaaatgtaaggcacacaatatggattgcaagtcatggctcaaagttgtattgctgtttagaagtagaaaaaaaaaaaaaaagggcggcc

SEQ ID NO: 115905 - DNA, 577 bp, Glycine max
  unsure (1)..(577): unsure at all n locations
  Clone ID: PAT_MRT3847_75673C.1
anangnggagnnngggggggnnagagnnantnnnnttatntanaatgagtnangtgagaannttaanaagaagnttgatttggtnaatggagtggtnttnantggtgggtgggntgtttntggttnatatttggatantnttggaaanatttttaagaaagntttagagaaaaatgatgntggagattattttttattaattgnnttnaanttaggtggaaanntngtaataaggatngtaagngagnaaantgatattnttgaannatttaatgggtngagtttgnnaagttntnttatattgtggaaggaaggaaatggtaaaggaaatntatttgagagattttgttgagatttgttgaaaaaggtgaagaaagattgtntnttantgaanaatnatngatatgggatatnnnnagggaaggtttaatataatangaagttatttgagttttttgagattttggaaaaatttgaggatagagatggaaagatttttgttttaaaaggaagaggtaggaaataatnagagaatgttaaattatggaaaaaagaagaaaatgatattgaatggggt

SEQ ID NO: 115906 - DNA, 294 bp, Glycine max
  unsure (1)..(294): unsure at all n locations
  Clone ID: PAT_MRT3847_75674C.1
gcgggctgtataagttatctggcaaagattgtggcaatcattgtaaacatgtacgatgacatactttagtgaaaatacaaacttataaactgaagatattgcagccccacctcccatctctcttttgtactgttctggccctgcaggctgtataagttatctggcaaagattgtggcaatcattgtaaacatgtacgatgacatactttagtgaaaaaaaaaaaaaaaaaaaaaaaaaaaaaaaaaaaaaaaaaaaaaaaaaaaaaaaaaaaaaaaaannnnaaaaaaataaaa

SEQ ID NO: 115907 - DNA, 411 bp, Glycine max
  Clone ID: PAT_MRT3847_75675C.1
tttttttttttttttttttttttttttttttttttttttttttttttttttttttttttttttttttttttttaccattacagcaggaaacatgcccaaaagggttataaataccaacaaatacaaacgggtttttttgagaaaggtcaaactaggtacaatcatgggagttttgggccccctcaacattattttgcaagaaaagggttattcttttcagggaatccaaaatcccatccttatcgtcctttttggacgtttgcaactttaacaatcttttcggaggtgggaacaacattaaaattttggccccgtgccttaaagaaaaattattttttggcctaaaaaacggtcaatctgaaacccgtttgattttcaaaaactggggatcttatgggttacccgggggtt

SEQ ID NO: 115908 - DNA, 488 bp, Glycine max
  unsure (1)..(488): unsure at all n locations
  Clone ID: PAT_MRT3847_75676C.1
cacaactccttcatcaaccctctctctcctccatctcttcccttgcctgtggcggcgctcatgtcattgccttgacctctgctgggaaggtactatcatggggtaggggcaattctggccaactaggccatgggttggttgtgagtaactctttgtatcccaaggctgtgacatcattggatggctacttcataacccatgtctctgctgggtggggccactctggttttgtttcaaataatgggtgtgtgttcacttgtggggatggctcctttggtcaactggggcatggagatcatgcctcacactgttctcctgtcaaantgtcatgctttattgatcaacatgttaagcangtggcatataacatgcaccattcccttatcttattaaaaaattatacaagaaatcaagtttatagattgtactctaggaagcataatcaactagatatcatcaacgataagatcaaatctattaatatttct

SEQ ID NO: 115909 - DNA, 390 bp, Glycine max
  Clone ID: PAT_MRT3847_75677C.1
aaacaaactcccacggattttggccatgcatgatattgaaatccagtaatcacttgattacataaagcatgcgcatcccaattcccaaggcgtaaggtcgagcagcctaaatgtacataccgcatgaaaagttgacaaattctatcactgtccctagacaactggtagatggcataaaactaaaaaagcccgcctaacaccatttccgctagatatattgagctgaagggaacacggggttttaaatgaacgacccaagatactggaggaacgctacctagctttcattttaggtcccaccaatggttcctggatccaacattccacatgattaatccaccggatacctccaaacgaaaatactcgtgtgtaaaaaagaaaacccttatc

SEQ ID NO: 115910 - DNA, 364 bp, Glycine max
  unsure (1)..(364): unsure at all n locations
  Clone ID: PAT_MRT3847_75678C.1
tcctctagagcggccgccctctgggttttttttttttttttttttttttttnttttttttttttcttttttttttttttccctttttttttttttttccctttttttctttttctccctctttttttttcctttcttcccctccctcttttttttttnttttctccccccaccaantcaaagaggaccgtcaaacccccgggaaaaaggccccaaaagacccgtccaaaacggccccccaaccggaaggaagaaacccctttttgcggggaaagaagcttaggaaatccaccaaaagncaaggggttgggaaagggaacccccgcgcgcacccccaaaagacaatctttttcccgagggaacgg

SEQ ID NO: 115911 - DNA, 1570 bp, Glycine max
  Clone ID: PAT_MRT3847_75679C.1
ggctaatttctctctcgcaattcccaaaccaaacacggaaaatcccccctcctcttcccaacgacgccgtcgcctcgagagaacactattttgtctatttaacactaaaaaacgccgtcgttttgtccttaaaacccgatccggtagacacgtactcccatagctaattgtgagaatttcggtcacctgttttatttttttattttgcctttttcggttgccctctctttaaatgctccctcctattttttttgttctctctctcgttttttgaagacgaacattaaacaaccgtgaagaagcagttaaagcaaactgcgaaacgctgaacatttgaagcaaattaaaaaaaataaaagagaagaaatcatcgttgttgtggacattgtgtttgttttctaagaagaatggaaactgtgtgtttaaaatctgggatggttcccacgatctctattagtgggtcgctggatgcacgtgccaatccttctcaggtgagcacggtggggcgcgccgccggggataaaccgccgcagaggtcggtgttttcgaggttttccttttggtaccctttggaatctctctggcctcgggggaacaacagcaggtacaaagggctggccctcgacgacgccgttttggcggacaacaacgccgaagcgaaggccgttagagatgacggccagggtgacggaacggaaaggcagaccggaaactgggttttgaagattctgcatgtgaagtccctgtgggaagggaaacagcgcaatgaagaggatggtacggttcatgatcaaactcaaaccaatttcgacgaggaggaggtgtgtgaatgtgatgcttgcggggttgatgaagatgacggctactgtgaagaagaagaggctgaattcgatagaggctcgttttcgagaatgcttcggagggtatcgttaggcgaagctagattgtacgctcagatgtcacacttggggaacttggcttacgatatacctagaatcaagccagggaaactcttgaaacatcatggtctgcgctttgtaatttcatcgatagagaagaaggaattggcagtggcagcaacagctgaaaaggatccccagaaagttggatcttcaatagagaagaaggaatttgcagcaattgctgaaaaggatccccagaaagttggatcttcaacagagaagaaggaatttgcagcaattgctgaaaaggatccccagaaagttgaaactgatgagaaggtagaagaaaaagaagaaacaaaggatccaaagaatgctggatacaagataagtgcaactgctgcttataatattgctgcctctgctgccacttatctgcattctcagactagtagcatatttccattcaaatcctcaaatgctgtgactggtgaaggttcacttgaaggaagcaatgaaagccttgacactgttaacatgctaaacacagaggtggcatctttgatggcaactactgattcagtgacagcagtggttgcagcaaaggaggaagtaaagcaggcttgtgcagatgatctgaactctgcacattcaacaccctgtgaatg

SEQ ID NO: 115912 - DNA, 456 bp, Glycine max
  Clone ID: PAT_MRT3847_7567C.1
agaggcataactttctagacaaatatgaacttcaatcttgcattagtgattatagtatccacaattttgggaattgggcttgaaggatgcgatagcaaggttgtgcagttcatttttggagactcactctcggatgttggaaataacatgcatctctcaagaagccttgcccaggcaagcttgccttggtatggtatagacatgggtaacgggttacctaatggaaggttcactaatggtcgcacagtggctgacataataggtgataatatgggcctccctaggcctcctgcattcctggacccatctgtaaatgaagaagttatacttgaaaacggtgtgaactatgcttctggtggtggcggcatcttgaatgaaactggcgcctattttatccaaaggttttctctggacaaacaaattgagctgtttcaggggacacaaaagttaattaga

SEQ ID NO: 115913 - DNA, 377 bp, Glycine max
  Clone ID: PAT_MRT3847_75680C.1
cccacgcgttcggaaagtaaaagaagagtgcaagtctctttacaaaaagtccacgccagaaagtgtaatccaacaagatatatcatttaaacatgaaacgtgacaacccaccttccgtctaatgatggcacacgatcatctatcgtatacattagggggcggctgagagtatatggagatactgaactgagatgatacatataaagtgtgggttcacttttcaggacaaaccttttgtcatggagctagacaaccgtgaacgtggtttcttacaccccgctcatgactgaactgctttcctgctatgatggacacctgttttaagatccatcccctaagaatgagagatatattgtggaaagaagccaatgcatatg

SEQ ID NO: 115914 - DNA, 690 bp, Glycine max
  unsure (1)..(690): unsure at all n locations
  Clone ID: PAT_MRT3847_75681C.1
gctaattgtgagaattattaattttattgtgcctttttcggttgcccttctttaaatgctctctctctctctctctctcgttttgaagaagaacattaaattaaaccacagtgaagaagtaactaaaccaaactgcgaaacgctgaacatttgaagcaaattaaaaaagaagaaatcatcgttgttgtggacattgtgtttgtttcctaagaagaatggaaactatgtgtttaaaatctgggatagttcccacgatctctattagtgggtcgctggacgcacgtgccaatccttcccaggtgagcacggtggggcgctccgcatcggataaaccgccgcagaggtcggtgttttcgagattttccttttggtaccctttggaatctctctggcctcgggggaacaacagcaggtacaaggggttggccctcgacgacgccgttttgtcggacaacaacgccgaagcgaaggccgttggagatgacggaacggaacggcagaccggaaactgggttttgaagattctgcatgtgaagtccctgtgggaggggaaacagcgcgatgaagaggagggatcgggtcgtgatcaaactcaaaccaattacaaggaggaggaggaggtgtgntgaatgtgatgcttgcgatgaagtagaggaggctcatttcgatagaggctcgttttcgagaatg

SEQ ID NO: 115915 - DNA, 341 bp, Glycine max
  Clone ID: PAT_MRT3847_75682C.1
cttgggggtgaaaaaaaaatttgctcaaaactcggaagtttttttcgttgtttctggtgcaggcgcttgacttgacattcttctcccacatactccacacatgaatctatctggtgatgtaaattcatcccgtttaggatttgatactcatggctatttttttgatgaatttgctagtattggtcctgaggttgaggcgacaattttggggccatttatgggagggatttgtcttttttgatgagactatccttgcattctttctgaaccccttggctgggaggggggataactttttgattgccctcggaaccaggggcccatttggggttggggttttt

SEQ ID NO: 115916 - DNA, 1712 bp, Glycine max
  Clone ID: PAT_MRT3847_75683C.1
agcacattgatatctaaggaaggaatggaaaagatgttagggagaaattgtgggaagttgaagaccaagattgtgtgcactttgggaccatcaagtaggtcagtggagatgctggagaagcttctgaaggcagggatgaacgtggctcgcttcaacttctctcatggcactcactcttaccaccaagagacccttgataatctcagaactgcaatgaacaacaccggcattctctgtgctgtcatgttggacaccaagggtccagagatcagaactgggtttttgaatgaagggaagccaatacaaatccataggggacaagaaatcacaatcacaactgattacagcataaagggtgatgagaacatgatcagcatgagctacaagaagttggcacaccatttgagtccagggagtaatattctgtgtgctgatgggacaattagtttcactgtgctagaatgtgacaaagagaatggcttggttcgatgtcattgcgaaaattctgcagttctgggggagaggaagaatgttaaccttcctggagtggttgttgatcttccaaccttgacagagaaggacaaggaggacattttggagtggggggttcctaataagattgatatcattgctctctcttttgttagaaaaggttcagaccttgtggaggtcagaaatctacttggaaagcatgcaaaaagcatacttctcatgtccaaggttgaaaatcaagagggtgttgcaaattttgatgaaatactggaaaattcagatgcattcatggtggcaagaggtgacctgggaatggaaattccaattgagaagatctttctagctcagaaagttatgatacacaagtcaaacattaaaggcaagcctgtggtgacagccacccagatgttagagtccatgatcaaatctcctcggcctacacgagccgaggccaccgatgttgccaatgcagtccttgatggcacagactgtgttatgcttagcggggaaactgctgcaggagcctatccagacattgctgtccaaaccatggccagaatctgttcagaggcagagagtttcatagactatggtgacctattcaagagagtgatggaaacagctccaactccaatgagtcctttggagagcatggcttcagcggcagttaggactgcaaattgcatcaatgctgcactcatcttagttctaactagaggaggaaccacttcaaaacttgtggcaaagtatagacccagcatgcctattctgtcactggtggttcctgagataacaacagattcttttgaatggttctgcagtcaggaagcccctgcaaggcatagccttatctaccggggactaatacctgttttgggcacaggttcttttggagattccatgactgaatcaacagaagaaaccatacagcttgctctttcatatgcaaagaaaaatgacttgtgcaagcctggagactctgttgtagcacttcaccgtcttgagtctggtactgtcatcaagatattggatgtttgttaactgaagtcgcaagtcaaggactaggactaatcccttgttttgttcagttttccactttttacttgtaggcttgttttcttgttctggttttcagaaaatagttctttgttctctttctgatttgattgacgatggtatctaatgtgagaattaaagaataatatactgaattattcctg

SEQ ID NO: 115917 - DNA, 974 bp, Glycine max
  Clone ID: PAT_MRT3847_75684C.1
tcagaattctgctcgttgctctacgcaccatagtctttgttttcatttactaccatatttagttatcagcaatggacttctactttggaaactctcctccttatcccaataattatgctcataattctcttaatatggctctatcttcccctgagattgcactatccgattatctcatgctcgatgactatgttgatcatcaagattctcgatcatcacaaagcaccgagtcatctgaaaaagcaaccttcaatgatgccactcacggattcagtactggtgcaacctctaagaataataacataaactgcaaaaatgggattaatgaaaacaaaggtggagtgggtccaaggatcgcgtttagaaccaaatcagagcttgagatcatggatgatggatacaagtggaggaagtacggcaagaagtccgtgaagagcagtcccaatctaaggaactactacaaatgttcaagtggaggatgcagtgtgaagaaaagggtggaaagggatagagatgactacagctacgtgataacaacatatgaaggtgtgcacaatcatgagagcccatttaccacatactacagccccatctccttcgtacattctgatactactttcaaatgacaccaacttcaaacccttttgggcatttacacctccctagcttaattatgtgccaagaaaaagcttggaagattcgatcgagcaggggaagctatgtatcattgcattgtctaatcaatcataatttattttcatgctgtaataggttgaagagagtttctatacctttttttggttccacgtttaatatatctctcaattaaaaatcagcctttgctagttcatgtaacaaggaacatgattctccatgtgtaaagttgttcaaatcttaaaagtaagtatcttgtattaggattagagtatctctcttgtactctgtttaataataaaagttttgcctcctaaaaa

SEQ ID NO: 115918 - DNA, 319 bp, Glycine max
  Clone ID: PAT_MRT3847_75685C.1
atgtttttaatatttactgtaagcatgcgctcagacaagggctcaccacaacagctgatggtggtcctcaccaagcgatgagagttgctgttttcttatgccgacaggtcaacccaaaacccaccaaacactgtgttcataccaaagtcctcgcatacctagacaatagcgcgacggcccccacgggcactgagctcctagcccagttgctcgttctagacctgtgccagagcccgagcccggtctccaataagtgagaacaccgatcactttgttaatcgcaccaactatcgatattatctggctctgaaggaccatt

SEQ ID NO: 115919 - DNA, 242 bp, Glycine max
  unsure (1)..(242): unsure at all n locations
  Clone ID: PAT_MRT3847_75686C.1
cttttaatttctctctttatctttctttcaagatcaaactttgcngatatcaccctccaccacgccgaccaccttccattcgccgttgccaactacgccttctgccaccattgagccttttctccacctcacctgcaacaaaaacttttgnnnnnnnnnnnnnnnnnnnnnnnnnnnnnnggttttntgtttagatttgaggcttgcggctcattcacagaataccgtagagtctgtgaacg

SEQ ID NO: 115920 - DNA, 275 bp, Glycine max
  unsure (1)..(275): unsure at all n locations
  Clone ID: PAT_MRT3847_75687C.1
gaatnaaccacgtnatcctctcaatatttctctctctntntctctntctcntctgtaacnaaatcaaaaaanaananaaggagtaactaaacataattctgatatagcagtaaagtatcanccaaaccaacaatccaacaccatgaaactctctgttttccacnatcagcanntcggntgantnncaattgcccccttaccntgacaagaacacacaaaagactaanaacaaaggttcntataggtggtnaccatgncnnagctcacattcttcc

SEQ ID NO: 115921 - DNA, 502 bp, Glycine max
  unsure (1)..(502): unsure at all n locations
  Clone ID: PAT_MRT3847_75688C.1
ctcaactcaagataagcaaatacctgaattanttacactttcattgctacctaagagccantggctaaacttaatcaactgggacattataaaagttcgcaataggcctattgaacctccaaaaaaacctaaagaagctccattcttcttaccttcagttccatccctctctaaaaaaatattattcgagtctaataagttatcatgtaaaaagaataataaaacagataatgaaaaacaaataaatacaagattagatataccacaatcacgtgttctatatcttctgcaatattcaaaaaagacagacaattatgcagcatgtactaattatattaagaaattatctccatcaactctggatataaagctgctaatatgtcagatcattaataataatgatgatcagcgaaagacagataaaagacctgagttagtatccattcagtaacttctacattattgtattcataagctgtcctacagangtaatgttgacttc

SEQ ID NO: 115922 - DNA, 372 bp, Glycine max
  Clone ID: PAT_MRT3847_75689C.1
ataagttctcacaatgggagaacttttgaaacatattaattcgagttgactaacttggacattatcaaccttgggaacaatatcttttttttaacagggcgcattgccgttggcctacacattcttggaatgcatccaaataaatttgagtttatatttcagtttgtataatcttcccttttgaaaagttcttccctcacccttgtaaagagacttgaggattccacagccgattaaaagccttattttataaaatacctttttctatatgggaaccccgaaaaaccatggtaacccccaaaatttcgacattgtcaaaaaacttggggtactgtgtgtttcaaacaagggtcatcaaatttctcaaaactg

SEQ ID NO: 115923 - DNA, 387 bp, Glycine max
  Clone ID: PAT_MRT3847_7568C.1
ctgggggaacccacttaattttccccattcattgtaccttaaataatatcaatcaaccttttggcttgggatgggttaaaaaacccaaggggtatgggtcactctctcttgtaatgagccacaccccaaagggggtcgcgtgggttgtgaacacacgatagaggtggggttaccaaaaaagaaaaaatggataaaaagctgtttatacaaaaaaggtgaacaccttctttcccccggaagtaggtgctggggtttactgggcaggcattaaagggctttattcctggggcatgaaccaaggaatctgcctcgaagcgggggggggtgccttcctcctgaaaaattcaatcatcctaactagggagaccctttttgaaaaaatatgac

SEQ ID NO: 115924 - DNA, 395 bp, Glycine max
  Clone ID: PAT_MRT3847_75690C.1
ataaactacaagttgagaattcggaaggtgatgaaactaatcgatgagcagcagtgaaacaaaacttgttggaaccccaattattaattattagtcaaattcaatggccaaccattcttcttcgccctctttactttgcgcttctttcaaccaggaccatagttactttgccgttggcaccagagatggtgttagaatatttgataccaatactggaagactttgttatgaaagagcggttggagcttttgttattgctgagatgctgtttagctccagtcttcttgctatcgttggagctggtgatcagccatctttgtcccctcgccgtctttgtttattcaatacaaccactggagctgctcttaaagaattgaattttctaacttccatac

SEQ ID NO: 115925 - DNA, 403 bp, Glycine max
  Clone ID: PAT_MRT3847_75691C.1
acaaggggaacccccccaaaaaggaaagcaaaccaaggggggggggccaaaaaaacccaaaagacaacccgcgcgcggagccacggggacaccccccccaaacgggggggcccccaccggggggcccccgcctgcccgcgaggcccctcttaaagcgggccgggggtttgccgcaagaaggtctcaccgggacactggtggcacccgaccattcctccccccgggccaaccccaaacagccagaaaaaaggccggcaaaacccccgggggggaaaaaattaaccaaaaaactaaccccccatagccgccccccccccaaaaaaaagcgaacaaccgggggcccaatgagggcccccacacccaggaaaaggccgcccccagagaggggccaaagggggaaaac

SEQ ID NO: 115926 - DNA, 397 bp, Glycine max
  Clone ID: PAT_MRT3847_75692C.1
ggatgagcagcagtgaaaaaaaacttgtttgaaccccaatgattaattattaatcaaattcaattcaatgaccaaccaatcttcttcgccctctttactttgcgcttctttcaaccaggaccatagttactttgccgttggcaccagagatggtgttagaatatttgatgctaatacaggaaggctttgttatgaaagaggtaaattcagttcctttaattaatcaccttttttcttgttaattttttcccccttccttcgtgtagcggttggagcttttgttattgctgagatgctgtttagctccaaccttcttgctatcgttggagctggtcatcagccatctttgtctcctcgccgtctttggttattcaatacaaccactggagctgctctt

SEQ ID NO: 115927 - DNA, 1584 bp, Glycine max
  Clone ID: PAT_MRT3847_75693C.1
agcaccaaacctcactaatccaatccaacttaaccctcctcatattttccattctccttagcttcgtagctaattaacgaagtgatcacaaagaataaagcatttagttcaggtaattgaacatagtatataagttgttgtaaacttcatatctgactttgatccttacggattaaaagaagaaaaaaaagtgatcacagagagagaggcacgatggtgaacctggtggcagcacagaggccattgttacatggcctcatgaagatggcaggggtgaggccctacacggtggagattgagcccgggaccgtgatgagtttctgggtcccttctgaaacacttacgaagccgaagaaaaaaaacgagaagcccagaatcagctcgaagcccagcaggcccgcggtggttctggtgcacggctttggcgccgagggaatcatgacatggcagtatcaagttggcgccttgacaaaaaaatacgcagtctacgttcctgacctcctcttcttcgggggctccaccaccgacaaaccccaccggtcgccggcgtttcaggcgcagtgtgtggtggcggggttgaggaagctcggggtggagaagtgcatagtggttgggtacagttatggggggatggtggcgtttaagatggctgagatgtacccagaagtggttgaagcgttggttatcacagggtccattttggccatgacggactccatcagcgccacctcactgcaagagctagggttttcttcttcctccgagctcttgttgcctacttctgttaagggtctcaaggcactcttgaccgtggcttcgcacaagaagcagtggtatcccaatcgtttgctcaaagattatctcgaggtgatgatcacgaataggaaggaacgaggtgaactattggaagccttagtagttagcgacaaagatatcatcatcccaaatttttcacagagaatacatcttttatggggagagaatgataaaatattcaatctggagcttgcgcaaaatatgaaagaacaactaggggatggtacaacatttgaagccataaagaaagctggtcacatggttaacatggaacgaccccgtctcttcaacagatgtctcaagcagtttattgcctccttcttggccccaaatggacccaaaaaataatgtccagggtctgtattctaaacaggcacactactttttcataagatgattttactgttcctttcttttctatttttttttatttaacgcaaaagttatgagcatttatctaaaaccatgttacacgataatttaacattattttaaataatgtaatgtgtattcaaacacactatatatatatatatatatatatattatattctttttttaatgtttttttattaattaaaattcagtctcactaattcgaaatgtgacttatgaaatagagaaagcaaattacccttgtattttggacacatgtttgtatgcacttgaatggcatccatgtagaatctacacaaaaaatagcttctacatgcatgtttggattggattgacattgacatataatagatattttctctgagttagagg

SEQ ID NO: 115928 - DNA, 226 bp, Glycine max
  unsure (1)..(226): unsure at all n locations
  Clone ID: PAT_MRT3847_75694C.1
aagcaanggattctagggttgaccagggattttcaaaaagaaaccagccggcgaaccagtgaacgctacagagagacgggtgacagcaaggaaaaacaggaccccaacgcggaaccggactgaaactggctgaacttaacaaaaatgaaagcagggggagcgaaaagcacaacagggtaaaactgggagaaacaaatgacggagcgaacacaaatgaaaaaagaac

SEQ ID NO: 115929 - DNA, 381 bp, Glycine max
  unsure (1)..(381): unsure at all n locations
  Clone ID: PAT_MRT3847_75695C.1
aattaattcccgggttttttttttcactaggnncnnaccatacattggtgatattgacacacgggtgtgagaggttgcgaatcccatcacgactatctatttccaggcgttttcctttggaagcaaccttgttcccttccttgttccaaccttgccggttaccttatacctggccttctttctcccttccatatgcgtcctgctcgttcatatgtaacacagtatgtttcttacttcacagtccgtgtttcacttcatgttgctctgtcttctcgttcacctcgttctatcttatctctgtgtcttatattgttaacaatttttcttgagttcatccttttttttttcctactctttctttttttgcttaataattttttt

SEQ ID NO: 115930 - DNA, 321 bp, Glycine max
  Clone ID: PAT_MRT3847_75696C.1
catgttcgaacatgaagaagcgaataacataaattattcaatgctaagttgtctccgggagattgggtacaacaaaacatatatatgaactactagcatagtgtactaaagcacaatgcagaatacaaactgaacttaattataatatttataacgctttcacatggaataacgttataaatatcaatgggataggatttttaaactaaatgacttatttaaccatgccttccatccaccattgctcttttgagacaccaactcagattggggtgctgcctttgatgactgcacctgctttttgcacagcacaaaattccc

SEQ ID NO: 115931 - DNA, 701 bp, Glycine max
  Clone ID: PAT_MRT3847_75697C.1
gaaacaaacttatgttatttatgtagaatataaggttcaatacaagttggactgaaatcaaagacatgttaacaagcaaaagatctagacgtccttgttaagcaataaacaacgtgattgacttgtttaccgacaaactgcacactacaatttctgagatatgataatttcctagcacaacacctgagaattatccctacttctgagtttgtaaaatttttcgagctcaagacatccacatttgctctacagtcaatttcgaaaatgatgttttggagatgaatttcagaagtcgaagatatggctgcaagaagtgatgagacctctgcctcatgtgtggtgggaataccttgataccagctagttttagctctgatgaagtgactagttgagtctttgaagcagcaatcaactccaaaggaacgtgaatcttggaaaatggcaacatctacattgcacttgatgtattctggtgcaggtgtgccccactgcaatttgcgtgttgatgctggttgaggttgttgtgttgacacctgccatggatggtcttccacagctccgtgtcacaactcttccacggaggttttggaaagcgaattgcacagagatacttagtggcttcacaactccgtcccatacttattcgttttatcttcgctaaagaacccaaaggatagctacgaatttttccacttgagttg

SEQ ID NO: 115932 - DNA, 1966 bp, Glycine max
  Clone ID: PAT_MRT3847_75698C.1
gctcatccgatctcatggggttccctcctttacctatgcccctatacctctctctgggttagtctccattgggttccgacttcatcgcaccgaggcagaaccttctctttcacttgaatcaaacaaatggctaaggttgacctatgacatccaatctgatcaaagtggaaaacttgaatgcctatctgttattgcaaaaattggatcacacttggcaatctgctgcagagctgaaagccctgcttcactggatagtttacctctttggacattggagcatcattgacaaactgttccaataaaagatccaatacttgtgttatctggtcagaagtccacccaagtttaggaaccagatccacaggtggatctgcatcttggtgccgctggtcctgcgctagtgggagaagttttcttggtacctgtaacattggtctccaaaggacatgatgtctactcaggtgaattgaagatcaatcttgtggatgtgaaggggggtggcttgtttagcccaagagactctgagccatatgctctggatagtcatcatgtccagttgcttggtatatctggaccagaaggagaagatgattctcaattggattctgacaagataaagaaaatacagcaatcatttggattaatttccgttcccattcttaaaaatggagcttcctggtcatgcaaattagaaatcaagtggtaccgacctaaacctattatgctatatgtatctttgggttatactccatttagtaccgaattaaatgcacagatggtccacgtacacaagaatttgcaaattgaagggctcactgctattcttcttaagcaccattatttgatgccattcagacgagacccattgttactctctaagaacaagcaagcctccgagtctgatcagtcagaatcactgcccttgaatcaaaaaaatgtgctcattgttagtgcaaagaacagcactgagttgccattgaggataaaatccatttccatagaagtagaggatgatgctgaaaggacgtgctctattcaacatggaactaaggagctttcaaacccctcacttcttgttcctggggaagaattcaagaaggtattctcagtcagttctgatatgaacatttccaagctcaaactgggaaccatgtgtttgagttggaggagagaccttggggttgaagagcaatctgcttctacttcaacattgccttgggttgtgactaaacaaaagctgccggatgtgaacgtggagttacctccaatgattgtgagttttgaatgtcccccttatgccgtagtgggcgaccccttcacgtataatattagaatttcaaaccaaacgcaattactgcaagaaatcaaatactcacttgcggacgcacagagttttgtattgtccgggtatcataatgacacaatatatgttcttccaaaatctgagcacattctcagctacaaacttgtaccacttgtctcaggcatgcaacagttacctaaattgtccatgacttcagtgagatattcagcagcatatcagccttcaaattcttcaaattctgtttttgttttcccttccaagcctcatttcaaggctacagtctcaactaactctagggtggagtcagttgctaatgaatagatccttgtaaacccttaattcctattcaattttttcccgttccttgtaaccctcgttcctccaagttttgggttggggtgaactgcatattttagatgaaaaagctgcatacatgatctgtgttggtttcctttttactagtttatcattgactgggttagtatatcatgttctttcattagctatacagaaatacactttccattgtataatattctaattgattttgctttaaaagtttttgggggtggattttttttaaaaaaaaaaaaaaaaaaaaaaaaaaaaaaaaaaaaaaaaaaagggaaaaaaaggagaaag

SEQ ID NO: 115933 - DNA, 581 bp, Glycine max
  Clone ID: PAT_MRT3847_75699C.1
cacgggaatatatatatatatatcccgggcccccccctcaaacgaaaaacacaaaaaaaagtttctggaaggcataattcaaagaaaaaaaagggcggatcaaatacatttttttttgcaaaccaccaagcatttttatccctccctattaaaacccttattttttactaacaaaggaaaggccctccttaacaaggggatctacattgggaaccgggggggggaccttaaaaactttaaaaaaagccgggttcttttcaggagtcccaccttcaaaaaagaccccaaaaactttcccatttttaatccaggttggcccaaacttaggctttgacaacccaagattggtgtccccaaatagtactggggcccccacattggccccataaaattgccaagacagatcaaatgaacgggaataaaagtttggaagggaatcatacccccaaacgggttttccttccccaggggccttgggggccctcacagcctgttaagttgatttgggaaaatgatcaacatggtcaactcttctcaattcaccgttaaatttcaaagggaaagtaccaacccggccccgg

SEQ ID NO: 115934 - DNA, 103 bp, Glycine max
  Clone ID: PAT_MRT3847_7569C.1
tgagtgcagctgagaattcatcactaatgcggagggtgattcccagtgattcagaagcttagtctgaggacgacgagaacgatatggaagatgaagaggattg

SEQ ID NO: 115935 - DNA, 471 bp, Glycine max
  Clone ID: PAT_MRT3847_756C.1
aattgccgggtcgacgggcttatcttttcggcggccgacctatgtttttatttttgaacaataaaagattttcgcattatgatgtcttttaacaagagcagattacaaaatgtgggactatgtgaaattgctgtagaagaaagttaataacgggtgattgagatccctggccgtatatggaagctctacactataccttttcataaataactaaggcgtgtccacatagcaaatgaatgcagatattttaaatattcaccgtgccctctactagacccatgaactactcattccaatctatgatgttgtatgtcaaaacccgaataaggggtttcttttgctctattttttcccacaaaaagaagggtgcgtgtaacagcgataccggggtatacactatgacaccacaggggcacctaccagctgcatatgagatcttatgctcaaactgtgtgttaagtgattacacat

SEQ ID NO: 115936 - DNA, 304 bp, Glycine max
  Clone ID: PAT_MRT3847_75700C.1
aaaaaaaagggttttggtataggaagtttaaattatccccatgaataaattttttaattattaattaattttttggcaattaaaaacaatttaattaatttttttaaaaaaaattttaaagggggtttttttactggacttaaaaaataatgtaaaatcttaacataaaataaaaaatgaaaaaaaatctttaaaaataaggtccctggggaacacttttattaaaaaaggctcttacaatccctacatgtgtgaatatggaaaacagggggcactccagcccaattcccagcttaccttcccg

SEQ ID NO: 115937 - DNA, 151 bp, Glycine max
  Clone ID: PAT_MRT3847_75701C.1
tatgcttgtcagaagagcaaactgtcaccactgtagggatttctcacttgcaaattgaatcttcacatctaattctgctatagaagatctgtgtatcaaatagtgattttattacttttatatatttcatgtaatactagatttcaaggag

SEQ ID NO: 115938 - DNA, 270 bp, Glycine max
  Clone ID: PAT_MRT3847_75702C.1
atcaggtgtaggggtttgagaagtatagaatagaattttgcatattcaggttcttcaaaagcgcttaatacaatagccagcgagtgagagacccttatgatctaaacgtgtgctccttacttgagatctattctgaatggatgatccttgtcagcctaactccattgtgggggattattatgctcttgtgaaggatcgatgatagtcagacatgtgatattgctactgagactcacctgactattcctgaagcattggtatgtaaccatg

SEQ ID NO: 115939 - DNA, 153 bp, Glycine max
  Clone ID: PAT_MRT3847_75703C.1
agataagacttccgactgttggttctgaatatatatttctgttttcggcaaggagtgtgtgttatcgagatagctcctttgactcatctatcagaatctgatggcccaaaatctagggtattctgttcctctttgtggatctgaattacattc

SEQ ID NO: 115940 - DNA, 919 bp, Glycine max
  unsure (1)..(919): unsure at all n locations
  Clone ID: PAT_MRT3847_75704C.1
acgcgtccgttcacatccagagaagataaccttgtactgggaggggtcgacaataaaggtaacaacgttctacacttagctgctgcgaagcagcaatcttcgtcacatctattaagaaacgcaaaggtggaaatgcaaaatgatctcgcatggtttaaggaaatcgagaagaaatttcatgaattcagctacaacacaatggtgaacgacaaaggcaagacaccagaggaggtattttatgatcaacacgaggatttatctgacaagattaaagatgattccaaagaaatagccaactcgggcatgattgtggcaatacttgtggccacggtagcatttgccgctgctctcaccgttccaggtgaaaagaccaatgcgtggtttgttgtcttcatattcacaaatgcagttgcattatttgcttcttcagcgtcaatactctctttcttgtcaaatttcacttcattgagattcggacaacgcgaatttgtcaaatcactacatccgagcttgacttttgggcccgtgttactttttatctctgttgttgctatggttgtggcttttacagcagcctcctttttgatatttgatcacacctccaagtgggtttcttacgcagttgcttcaatggggttttttccattactgctgtttattctgtttcaattcaggtttttcgacgacagcttgtggtctagatattatcgtctgtccaaatttgaaaaatttgagtaagttattacagagatacagcttgtggtctagatattattgcctagattgttgcttgtcagccggtcaaaagcttgggtttgaatttaagattattctgtattttctatcttagtgtttccgctttaatatgagactnnnnnacatattgtatttttcgaaaactagccccatattgtatttt

SEQ ID NO: 115941 - DNA, 172 bp, Glycine max
  unsure (1)..(172): unsure at all n locations
  Clone ID: PAT_MRT3847_75705C.1
cangcacgcgtacgtaagctcggaattcggctcgagcacagacatgggtgtgcctactcatctcctgggnttgttgctgctctggattacacatgccatatgtgatatccggatgacacagtctccagatncccctgtctgcatctcngggagaaactgtcaacatngaatg

SEQ ID NO: 115942 - DNA, 347 bp, Glycine max
  Clone ID: PAT_MRT3847_75706C.1
tgattttgtttattgtaaaatatgatttcattacatttttttaatggacaaattaatttttatgaatgtttacattaatttatttttctaaagaaagggctagaacaatccatactcacacagcacgggcctttaaaaacaggtttcagtgctaccaaatggaaacacatgttcccccccgctggggggataatggacggccaaacgtttttaaaaagcaaaacccacctcagcgccaaaagtgcctgtcattgctttagaacaatcaaacagggtacctgttacaacaatgtatggcatactggaaaaagatacccccagcggagaacgcaataacacctattgcg

SEQ ID NO: 115943 - DNA, 497 bp, Glycine max
  Clone ID: PAT_MRT3847_75707C.1
ggctcgagtcttattcttccagttatatatatggatttgtattggctaattgcttcaatgggtactattgaggaggcatatgacacatataccaagatcctaagaagatggccagtcttttactatggcatggggcacatgctcactgacatatctgctgctcgtaggttcacgtatctatcatcgatcttgacagatattggactttcacctagcagacagatgctccaaagaaaaggataacgaacaagtttctgatgaagattatcaactaaacacctgtggcatagcatggtcgcgcaaacacatctcccacaccccatggtgagaatgcacctgctgtgacgctgacaggacaagtggctgatggatctgccaccatacttggaggtgaactgatagacaggctcggacacttgaagatatggcatggtgctggatcttcatgggacgctagtacattttcgtcagtttttggcgggcgtttaccatgcaaa

SEQ ID NO: 115944 - DNA, 797 bp, Glycine max
  Clone ID: PAT_MRT3847_75708C.1
ttccggatagagctcgagccgaatcggctcgagacggctgcgagaagacgacagaagggggatcaaaccaaaccaaaacaagaatcaaggaaccaaccaaccaccccatttcagctctctctggatattgtaatggaagcaggtttagaatcaatgggagtatcagaggcttggaaggctcatgtgggcatggctctggtgcagctattctatggtggctaccatgtcctaaccaaagtggcacttaatgttgggatcaaccaactagttttctgcttttaccgcgatttccttgccttcactattgttgctccgctcgctttttttcttgaaagacggactagaccacccattaccaagaagctactgatgtcattcttctttcttggattgactgggatatttggcaaccagcttttgtttcttattggtttaagttatactaatccaacttatgctgctgctgtacagccagccattccagtctttacatttctgtttactgtgatcatgggcatagaaaaagtgaacttgctcagatatgaaggtgtggcaaaggttggaggaacgcttatttgtgtttcaggtgccatattaatggttttctatcgtggtccagctgggataggttggaggaacttggtcctgtgttttaggtgctgtactagtgcttttatatcgtggtccgccactgatagggtaatcagaaactgacttggtctcacacagtgagataagtgccaaaggtcaaccggagccttctggatggttaattagtggtttacaggatcttggat

SEQ ID NO: 115945 - DNA, 626 bp, Glycine max
  unsure (1)..(626): unsure at all n locations
  Clone ID: PAT_MRT3847_75709C.1
gaagatgtttcagagaggctgccaaganaacagagggatttctggccgcgagatcgccaaactcatggccagcgtccaagctgctgtttatgggcgcccagactgcatcttggatgcccagttgtttagagaaattgtagattacaaggtcgtggaacatcatcaacgattaaaactagcagctgaaggtggccagccttgccaaatataaatttgagcattttatttgcatccccattttgacctgctatgttagtgtttttgtcatgttatttgggccatgtggccgatgaggcagattcgttgaaaaagctacacctagatgcattttgtgagccaaatttgcaggatacttcggctttattaattattactttgttaggaatataggaggaggggctttagcctttaattacttggaagcagcatatcagaaccttttcacctcatcctatagagcaagaagccaggtttttgagagcatagaagtcaaattacatttattaataaatttatagaatatgctcaaagttgtaattttttttatttttttttgcgaattttatttcttctaaattccaatgaagattctaccaaatttgaatatgcaaaatattttttttctt

SEQ ID NO: 115946 - DNA, 272 bp, Glycine max
  Clone ID: PAT_MRT3847_7570C.1
gagaataaaaaattaacgtgcatatgccagatcgtgttacacattcaaagtagccgtaacccttagcataaggcataattgctttacagtccatggaacatttatacagaactcactgaaactggaaacgcccggcagaactagcatgtggcctatagggaagcattcattatagttcttagcccgctttgcagactttgctacaattgccaggaacgtctgaggatcccatcatagactcaggagtctttgtgcatattgcaagtgaagcc

SEQ ID NO: 115947 - DNA, 274 bp, Glycine max
  Clone ID: PAT_MRT3847_75710C.1
cgcgtgcgcaagattcggctcgggctccagacttcatccgccgctacttggctcgctgcggtagctctagccccgaggcgtatcgcgtacctcgacctgggtaggggtgcttgcgtccgggctgtccctccttatgtggctgcactttgcttcctcttcttacggggctcaattgcactccccaagtttgcgctgtaccttgggcatctggcgtgagtgggcgacgagatcgtagacactctagcgattattgcgagggcgcactctcgtggcc

SEQ ID NO: 115948 - DNA, 821 bp, Glycine max
  Clone ID: PAT_MRT3847_75711C.1
cccgcgtccggtcttcccaaaggttgagagggtgaaggaaggatgcgttaaacgtgcgttctagagagagaaaataaaacaaacaagtcattctctctctattctcttctgtaactctctttctgctctcagatcttgcaaaaccccttttcttcattactaaatcccttattctcttctcttaaagattcttttctctttctttctcacttctttttctttcctttttccgtttgtttcccgggaaaatctccaaccgcaacctcttcttcgatctttcccgctccctccaatcgcttcttgctccgtttttcccctcccgcatttcacctcactcgcattttccgcctcgtacggcatcgctgtccacagtgcaattattttccgggaaagtggggggttttcctggaaaacagagcattctcccgatgacaataccgttgctgtgaaaaggtgaagaaaatggatgatagaggcggttccttcgtcgctgtgagaagaatttcgcagggtcttgatcgaagcaacacgtgccattcaagttccgctgagtttgtgacaggatcaacagcatggcttggcagaggtctgtcctgtgtctgtgcacagagaagagaaagtgatgcccgaccctcttttgatttaactccagcccaggaggagtgcttgcagagactacaaagtcgcattgatattccatacgatggttctgtccctgagcaccaagatgccctaagagatttatggaatgcagcatttgccgaagaagactccatggtttgatttctgagcagtggaaggacatggggctgcaagggaag

SEQ ID NO: 115949 - DNA, 784 bp, Glycine max
  Clone ID: PAT_MRT3847_75712C.1
ggcccaaacccgtgtcttaaaaataactcatccaaccccttctctctctcttttttggttattataataagactttaaaacactcttctttcttgtatggtccctcccaccgtcctcgatggagacgaaaagccactcaggaagtggaatcagccctagcgcctcaccggaattcgagttctggatggttcgaaacccctctttcccacaaccaaacattctctccgccgatcagctcattgtcaacggggtcctccttcccctccacctcctaaacaaacccgacccatctcctgctataaccgactcctcctcctcctcctcctccgccgccaccgcgtccaagcgctggaaggacattttcaaaaagagtgacaagaaaaacacagacgccaagaagctcaaagagaaaaaaagcggtgtcacaacttcagcggagctcaacatcaacatatggcccttttcccggagcaagtccgccgggaacgcggctacccgacccaaaccattcgttccggcgacccggaaagccaacagcgcgccgtgttcgcggagcaattcggcgggagagtccatgtccagaatatggcccagcagcccggcccggcccggggtccatttaggaaggagcagcccagtctggcaggtccgccgtcccaagaatccagtaccggaacctctcaaccctgacatcaacaagtccaagcgagaaagtcaccggagcaaggtggtccgcgggagtggcagctcgaacacgaacgttttgaatctgaatgttccaatg

SEQ ID NO: 115950 - DNA, 1784 bp, Glycine max
  unsure (1)..(1784): unsure at all n locations
  Clone ID: PAT_MRT3847_75713C.1
aattcggcttcggatggtttaaaaaatgaaagttgtaggagagtcgtgtcaagcattgggagccttgggcgatgagttttcagtcaccgttctgatgggttggggttggtgagttgcgtcaatgtttatccaaatgaacacaaataagaaacgacccaagcttaaatctgggcgcttgcattgcctttgctttccacatacatatagcaattgttaaattatcaatcatcgttactcttttttaacaacgggaatgaagatcagatgaaatgaaagatttaacattgtagccagatccctaacccctccctttacgcacccaaacgtttttgttaattccccccaacccaacgacacgcttcgtatctctctctctctctttcccgcacttcaataaatccaccacccagaaaccatggtttttctttttcataatcaaccgatggaggtggttctcgttcaaatgctgaggctggcatgggtcgctgccacgttacccatcatcgtcgcttctattcccactcccaagctcaactgcctccgtggcaccttgctgggttttgctcgtagaggcaaaatcatgcactcttcctcccaaaaagtaactatttctcagaggttcttcttgcacttctacgttgtggcttttatatggacaacgttgctacttgttgggacttgggcatatgcgtacagcatggtgccacttgttgtggagccgttttcttactctactatcactagcttcttgactggtggttctactattagaactgatacgcataaattgaggcagggatatgtggcctggcaagcggtttttctgcttttgatgatggaagttcatgtcctcagacgcctttatgagacgatacatgtttttaactatagcccttctgctcgcatgcatgccgttggttatctcactggattgtttttctacgtaggagcaccactatcgctgtgtggtggttgtgcagtagaggtgtttaacttcctagcaaatctagtgactgagttcattgtcaagggcaagaatcacatgcaagtaacagagttagaattctggcaagttgtgaatcctctcttcaagcttgggtggaaccattgcattggtgctgatgctttcttatggggttggattcatgcttgagttttacaaatttggcagggttctctacgacattcaagacaagcagatgaatatgtaattcctcatggtgattgggttgaaattgtctcctctccacattatctgtctgaaatcgttatatacgctagttttgtggtagctactggaggatccaacctaacaatctggctgctttttgtttttgtggtggcaaatctgtcatttgcagctgtggaaacacatggctggtatcgtcagaaatttgaagattatccaagtagtcgctttgctataattccatttattctgtgagattgtgaagcaatgtgtaattatcacaattgatcacggcaaagaacttcattatttcccaaggtgtacttgtttagattaagctattttagtttagagaatcttatacttcaaatacctaaacctaaataatatttggctttgtttttggtgtaaaaatccaaacattcagagtcagtcgtgtattatttacccaccaaaataatacctaaaatagttatgattgcattcattatggaaaatactgtcgtgtattatttacccaccaaaataatacctaaaatagttatgattgcnnaaaaaaaaaaaaaaaaaaaaaaaaaaaaaaaaaaaaaaaaaa

SEQ ID NO: 115951 - DNA, 423 bp, Glycine max
  Clone ID: PAT_MRT3847_75714C.1
aaaaaagaaagaaaacacacacaaaatatgtgcaactcagatggtgattgcaggcccttgggttttctcttgggtcttcccttcgcctttctcgcccggctcgtctcaatcgttggcctcgtcgtctggatagttgggctgttgttgacatgcatatgcccttgctgcttgtgcgtaacagtaatagtggagtgtgcgttggagttggtgaaggctccactgcatgttatggagtggtgcacctctcagatcccttgttagctaccttctgttttcaccaattccgtcactaagttctagtgctgagagtgcttttgattgattacttttcattttatttctccttagtgagattgaaaatttcaacttgttattgcctctgttttcttgcaaaattaaatagtagttcatacttcatattgt

SEQ ID NO: 115952 - DNA, 252 bp, Glycine max
  Clone ID: PAT_MRT3847_75715C.1
aagcattgggcatttgccaaaaaaaccaacaatcgtaactttttactccaatctggggcatttttaacaaaggaaaaaaaatcccgagactgggccttcattaattttatgaaatgatcacttggcaaaaaaaaaactttagttttttttacgggggcaaaaaaatatagccccaaagcattttaccccatgagatatgaaatatcaggcattgcaaaaacccaagggagtccaccaaccatgtttttactt

SEQ ID NO: 115953 - DNA, 334 bp, Glycine max
  Clone ID: PAT_MRT3847_75716C.1
ctccaattgcctcaagcatttgttgtaccacggggctgggggtaactggcgagtaatggaaatgaaatcgccacagttcattaccggacgattccttcatacatttgaaccacgtactaaacggtacaggtccaccactggccccatcacgatatgttgaatgattgattgctagtcgagcatggtaagcacgttcctgatctgactaggcatgtcggggcccggtgtgctatacacgatagtcatatggggacccaaatccaggagagaatgccagggcctgaagggttgctcggtcacgatcgagcaagtaaggaccggaaccaggcgcatc

SEQ ID NO: 115954 - DNA, 654 bp, Glycine max
  Clone ID: PAT_MRT3847_75717C.1
agaacggcccaagctatatatgcataggcaaagctaagtttattcagttttgtagttgacattatacagagatgaaattaaacaaagccattatttattttcccatgatcatcaagggcaaatcaagtggctacatgacaccaggctttcatcttgacacaaaagatatgcatataatagagtaatagttaactcgatcgagacagcaaaaagaaattcaaacccaaagttttgtcaaagcaaactcatggaggctactaagaacctcaatttcatcctctctcacattcagatgttgccattgtttgaagcatcacgatggcagcacttgtaattaacagatgtcacctccatcacacgtccacatgtgggatttgggcatgttatagttacaagcacatttgcattgttcttaacaaaagcacattggtgacgagcatataactcatcaagcttgggcttataatactcatcaaaggctacgttaaacccttttttttggaacactttatctttccatgtgtcaaactcaaccaaaggttggcgcataggctcaccgtgaccaaaaatacttacgttagagcctttggtaaaaatacccctccttgttgatcttgtttgaggaaagaagggtttaaaaatttttgaatttta

SEQ ID NO: 115955 - DNA, 325 bp, Glycine max
  Clone ID: PAT_MRT3847_75718C.1
agcttttgatcatctcatcctggttctggaccagcccttttttttttttttttgactgcaacaattgtgcgcaacactttaaaaacattaaatgggggttccaagtgtcagacacttatccctgccactcaaataaatcattctcaaccgtgaaagttccttcctgaggaaatttaaaaacgggttttggggcaatatcccatctagaaaatctttttcacaaaatttgcgggggcctttagtctaacaaaactattgaaactcacaacgggttttattatggccctctaaaaaacaataataatagccctgcctcccccctgaa

SEQ ID NO: 115956 - DNA, 523 bp, Glycine max
  unsure (1)..(523): unsure at all n locations
  Clone ID: PAT_MRT3847_75719C.1
ggctcgagcctacctaaattttcccaatggcttccatttgaaaatttcttcctcaccaaacccaagtgaggggcagttttgatacctttccctgcacaaggccatctcaaccagcttattcatatcttacgcctaatcttatcacacaacataccagtccattatgtttgcactgtcacacacattcgtcaagtcacactacacgactcacaacttcatctccaacattcatttgcatgcactttgaagctctttcctttgtttcccctcctcccaaccctaacaatgaagaaacctattttccagctcatctactttcttcctttgaggtctctttgcatcttctggagcctgagaggaaacttcttcattccctatctcctcaagccaaaaggggcattgtcatccatgactatgtaatggcttcagcggcacatgatgccacaaacatgcccaatgttgagaatttcacttttcacagcacatgaacattntgcaccgccggttattattgggataaaat

SEQ ID NO: 115957 - DNA, 608 bp, Glycine max
  Clone ID: PAT_MRT3847_7571C.1
atatttccaaaaagaggagattacatcgtctttttctccccctgaactgtcgattacctcagccctctgtgttagatgcttcactatcttcttagggattcaccgttgccgatgatcttcttctcgcggttctacacttctcagcttctcagctgactctgaggactttcagagtgatttctgtggctctgcactcggtttattgaggatcttgaggcgccttttgcagcacgatgagactctgtgactatgccttctacagaaaagcaaggcttttcgttggccctttatctcgcttcgccgatccatatttggtcgcggagaggactcggtgcattatgtgcataccacgtaatcaatctgattcctgtaatttggacctcgctccattccaagagcgagctaccgatcgacttcaagaactttctgtacctcgtgatgaggaatttctctcaattgattggagtcagaaactcctcgtaacatatatctgctgccaagaagaattcacatccatcctgttgaatagctaagagcaggtccctacaccaccccttgatctgatgatttcagaattcgttgacaggtcagtgaaagagcttgacatt

SEQ ID NO: 115958 - DNA, 522 bp, Glycine max
  Clone ID: PAT_MRT3847_75720C.1
ggctcgagcaagactttataaaccttatctcctatttgaggctttgatgacaagaacgcagaaattttacggatggcaaaaaacaaagcaggagatgatcttgggagatttaactttgatcccaggaacattgattggatggactatgtgttaaacgcccacattcctggactcgtgaagtatgttgttaagtaagatgtaataatatatagctcttatgtttgcatatatatatatatatatatatatatatatatatatatatatatgcgtgtgcgtgtgctaccggtattgcttgtaattgaccttttgagtgttactggtattttttttatgctttaatataatttaatttgcttataaaataaagctgtaataatatgaaattcatgtgatgtagactacaaatctgttagaaataaaaactacaaattagatcatatttggaataaaaaaaaaaaaaaaaaaaaaaaaaaaaaaaaaaaaaaaaaaaaaaaaaaaaaacaaacaaacacacacaac

SEQ ID NO: 115959 - DNA, 1394 bp, Glycine max
  Clone ID: PAT_MRT3847_75721C.1
gccacggcgtccccttctcccgccccgtgcttacccccctgttcgaatcccctgcctgaagccctgcgcccgggtgcccaccgcacctgcgccccaacccccctcctgcttcatcctctgtccgatactctcacttcagtcctagcgacgggcttatcaccgttcctaagggtcaaaatgctttcaggttgctccttttacccgtttcatgttaaatggtactctctgttcagtgtttgttacctggcatcccacatgattgatgcagaacagatgcggatagaaaatgtgaaaattctctcgtggtctgtgttcaagcactgggagatacttattactttgaatctttagatgtttcaatgttttttctgctggtttaagaggagagaagttgcaattttcaagtgtaaggttctgtcttaagcataaaatttcctgcaaacttactgatgtgggaaatgatttaagctcatctaaggagcttggaaagtgtcaacctttggttaagatgtgtggcattacatcagctaaagatgctgcaatggcagctgaagctggtgcaagttttattggaatggtcatgtggcctaactcaaaacgttctgtttcgctttctgttgcaatggagatatcaaaagttgcaagagattatggagcagagcctgtgggtgtatttgtggatgatgattctgaaacaattctaagagcttctgatgcagcaaaccttgaatttgttcagcttcatggacatggttctcggttagcttttccgtccttaattcaggaaaatcgtgtaatatatgttctccatgtaaatgaggatggaagccttttaaacacaatttctgatgaagagtgctctctagttgattgggtccttgtagatagtgcaaagggtggcagaactaataagacattttgcagtggtaaagcattcaattgggaccagttgaaactgccaaacattaaaagcaagtatggttggctcttagcaggagggatccatcctgagaatgtttctgaggctctatctactctcaggcctgaaggggtggatgtcagcagtggcatttgtgcatcagatggtatccgtaaggatcaatcaagaatagcttctttcatgaatgcagtgcattcttttcagtattgatttaccttaaattattatgagtctcaagaaaagaaatattgtgatttggaaaaatcctcatgttgtattgttgcaattttgttttcaaatccgattgtatatctgaagttcttccttgggacctgttttctaggcatgagaatattataatggcgggggacaatgcatcagtacgatcttttatacaattaataaaaatccgaataaaagtttctttccagggcggcagccgactagtgagcac

SEQ ID NO: 115960 - DNA, 689 bp, Glycine max
  Clone ID: PAT_MRT3847_75722C.1
tctcagtttcctcaatattccctttttctctttctttcatacttacgataaaaaaatgatttgtttacttatttccttttttaaggctgaaacttagatagtttttaaaatatttttggtactattctcgtatcaaaaacaaatttagagtttcacttcagtaatttatgtttatgttgatatttaatataaatttttattgtaaattaccaagtgaaactctaattctttattattattatatatatatatatatatatatatatatatatatatatatatatataccaaaaagatctaactaactgtatttaagttttgtaccttttctaaatgatggtaaattccttgaacatgtagttttggagttaactattgttttgttcctattcatgtaaagaagattatttgaaaacagaaaaggtgggagtgattgaaggttgatgatggatgagaaagagtggcaggtaaagacaaagcagaatttaggttttagggttagtttatttccaattctcaatggatttgatgttaacattccctcagttatccgtggaaaggcgtagaaacccatagcttttacataccctctgtctgctatctgctatacagccacagattttatcaaaatgttcctatactttagttcatttttaataatattttgtgaagatttagtcataaaaaaa

SEQ ID NO: 115961 - DNA, 2510 bp, Glycine max
  Clone ID: PAT_MRT3847_75723C.1
tgcaaatatatattctaattttgagtataaataacagcatgtgagggtgcagcaaaacacacactgagtgcaacaaagttttaacatgaaaggcaataatacacttttgttgcatttattctacactactctcttcctgtttcttgtagtgtcaagttcatcttcaacagggaatgaaagtaacgatgacactaacagtaaagaagtttatatcgtgtacatgggagctgcagattcaacaaaagcttctcttaaaaatgagcacgctcagattctgaattcagtgctaagaaggaatgagaatgccctagtacggaactacaagcatggtttctctgggttcgcagctcgtctatcaaaagaggaggcaaactcaattgctcagaaacctggtgtggtgtctgttttccctgaccccattctgaagctccacactacacgttcatgggatttcctcaaaagccaaactcgtgtcaatatcgacaccaaaccaaatacgctgtccggttcttctttttcttcatcagacgtcattcttggcgtcttagacacaggcatatggccagaggcggcgagttttagcgacaagggtttcggtcctgttccatcccgatggaaaggcacctgcatgacatcaaaagacttcaattcctcttgttgtaacaggaagataattggcgcgaggttttaccctaacccagaggagaaaacggcaagggatttcaacggacatgggactcacgtttcgtcgacggcagtgggcgtgccggtgagtggcgcatcgttctatggtctggcggcggggacggcaaggggtgggtcccctgagtcaaggttggcggtttacaaagtgtgtggggcttttgggtcatgtcctgggtcggccattcttgcggggtttgacgatgccattcacgacggagtggatatcttgtcgctgtcgctcggtggattcggtggaaccaaaaccgatttgaccaccgacccgattgcgattggagcattccactccgtccagcgcggcatcctggtggtctgcgccgccgggaacgacggagaaccattcaccgttctcaacgacgcaccttggattttaaccgttgcagcttccaccatcgaccgtgatcttcaatccgacgtggtcttgggtaataaccaagtcgtcaagggaagagccataaatttctcccctcttttaaattctcccgattatccaatgatatatgctgagtctgctgccagggcaaatatctccaacataactgatgcaagacaatgccacccagattcattagatccaaaaaaagtcatagggaagattgtggtttgtgatggaaaaaatgacatttattattcaactgatgagaaaattgtcatagtgaaggcgttgggaggaataggtctggttcatattactgatcaatctggatcagtagcattttattatgtggacttcccagtaacagaggtaaaatcaaaacatggcgacgcaatcctccagtacatcaactcaactagccatccagtgggaacaatactagcaacagttacaattcctgattataagcctgctccccgggtgggttatttttcatcaagagggccttcattgattacaagcaatgttctcaagcctgatattgcagccccgggagttaacattctcgctgcatggtttggaaatgacacatcagaggttccaaaaggaagaaagccctcactatatcgcatactctcaggaacttccatggctactccacatgtttcagggcttgcatgcagtgtcaaaagaaaaaaccccacttggagtgcctccgcaatcaaatctgccatcatgacttcagcaattcaaaatgacaatttgaagggtcccataacaacggattcagggttgatagccacaccttatgactatggagcaggggcaattacaacatctgaaccattgcaaccggggctagtttatgaaaccaacaacgttgactacttgaactatttgtgttacaatggacttaacataaccatgataaaggtcatctccggaactgtccccgagaatttcaattgtcccaaggattcgagctctgatctcatctccagcatcaactacccttccatagcagtaaacttcactggcaaagcagacgcggtcgtgagtagaactgtcacaaacgttgacgaagaagatgaaacagtgtacttccccgttgttgaagctcctagtgaagtaattgtcacactctttccatataatcttgagtttacgacaagtattaaaaaacaaagctacaatattactttcagaccgaagacctccttgaagaaagatttgtttggatctatcacttggagtaacgacaaatatatggttcgaattccttttgtattaactaaatagtgaaattaaaaagtagcgatgaataaatgcaagctaaaaaataaaaaaagtaaatcttcttttctggctcccggctcgtcctcatcctgtagatgtttcttgtcctctaata

SEQ ID NO: 115962 - DNA, 1317 bp, Glycine max
  Clone ID: PAT_MRT3847_75724C.1
tcccacgcgtccgctctatctatcatcattcatcatccatatacatttcgtgtttcgccacaaagacttcattttttcacactccttttcttctttctttttctcccgaaatttctgtgtgtgtgtgtgtgtgcgttttggccttttgaagcttccgaggtggcaaagatgaactgatcccaaaatatataactcaagttttacaattcaagccaacatgaatcctgtaataccatgctctattggcaatgtttcaattattcctgtattcatctattcaacaaggaagaataacactttaacaagattcaacttgtcaaggagcactgtaaaacctggatcatcatcttggagatttctattaccttcatttgttgccagtggagcgtttccacaaaacaaaggaatacgctcttttcataagaaatctagcacctccatatcagccacagaaacagatgtaacagtggaggaaccaagtcctgttgctgatgaagatcctggtgaaattacttcaaatgaagttggaattagtgaagattcatcttctaagtctgatgccaaccctgatccagctaaaggtagacgttcaagacctgcaaggaaaagtgagatgcctcctgtaaagaatgaggatttgatacctggggcaacttttactgggaaagtgaaatctgtccagccatttggtgccttcgttgatattggtgctttcacagatgggcttgttcatatttcgatgttgagtgatagctatgttaaggatgttacaagtgttgtttctgtaggtcaagaagtgaaggtgaagctgattgaagtgaatactgaaactcagcgtatttctctctctatgcgtgaaaatgctgacactggtaagcagcgtaaagatgcacctgccaagacagagaaagctggacctgggaagaggaacagttcaaaacccagtccaaagaaagataatgtgacgaaaagcacaaaatttgccattgggcagcaactggttggttcagtgaagaatttggctaggagtggtgcttttatatcacttcctgaaggggaggaaggatttctacctgtatctgaggaacctgatgatggatttgataatgttatggggaacactacgctggaggtcggtcaagaagttaatgtacgagttttgcgtatcacaagaggacaagtaacattgactatgaagaaggaggaagatactgcaggattggactcaacatttaaccaagggggttgtccatgttgcaacaaacccttttgtgttggcttttcgtaagaataaggatattgcttcttttttggatg

SEQ ID NO: 115963 - DNA, 433 bp, Glycine max
  Clone ID: PAT_MRT3847_75725C.1
gagagagaactagtcatgtgatttctattctttatttttgtcttattaattcaaaatttgaagtttgaagtacagggattctttgtttgctattattcactctcaactagggattagacgtctcacatatcttgttaatatatcgcttatggataaaataattaaagttctggtctactaataaaaatttaattaatttttcaaaataaaaaggtcacatatgtaagaaaaagctcgacatataactcttctatttaaaatgaatttttctttttaaatttttattttggcctcacttaataagtgtgttgacccccatatgtctgaaagtagaggttttaagtaggaagttttttcaaaccttgaaacaaaccagaacatattgtatgcttctctcccaaaaatataaaactaatttttaaaataatggcct

SEQ ID NO: 115964 - DNA, 518 bp, Glycine max
  Clone ID: PAT_MRT3847_75726C.1
gtttgattccttacccctctcaatttctctctctactgttttggtagcaaaaagagacaaaacagctacatgcatgaattctgcagctatcaaatgtaactgtagttaaagaaactcaccagccagctgtgccaagagtagtgatgaaaagtgtgatgctttgttaaatagagtcttgagttgtcccaattaattcttcacaaattctcaatatgggttgtagtagcagatggaattgctgtgcatggtggggttcagaagcattttcaacactgaagctcttgttcttggtgcctctcattgtggttgttggctttgcttctgtgaagggtccaagcctttgcagatggggcttcattgcagattgttctgtctcatttactcctcttccttcttcttcaaattcctcttcacaaatacttcatcaatctaaagaaactgaagttttcaatgtctccaaacccgagttcaatttagctcctgtgaataaaccagatgaatctcacccaagactgaag

SEQ ID NO: 115965 - DNA, 257 bp, Glycine max
  Clone ID: PAT_MRT3847_75727C.1
tcgtgcatgtatacttcagatggcctgatcccacagtcggacactcttccaccctgacatcaccattcatcggcagaacgcacattgatgtgtgaaaatccttagtatattattgttcttcgtacgtcgcgttttcttgaagactgcttcatccttctggtgagagtgttattatagcaatctttgtcactcgaacgcacgcacgcacagtctgtagtggtaccgtgccggttcatttgcttcatgtagcacctcat

SEQ ID NO: 115966 - DNA, 342 bp, Glycine max
  Clone ID: PAT_MRT3847_75728C.1
gcttcattctctatagcatctcagtttaattccatcgacagactcacaccgatacagatgggctctaaaccgagggctggcaaactccgtccacaaatcacaagatcagcccaccacctccgacgtcagcttcaatcccctgctaacgctgcagcaccagaacacgacaggaacaactacaactttcagggaatgacattgaagggccttcgaataccccgaagaccactttacccatacgtgcagacaacatcatcggagtacccctgcatacttaacacgatgctacctttatacatctatcccttcaggaaccctgactatggcacccacttcaacggc

SEQ ID NO: 115967 - DNA, 2812 bp, Glycine max
  Clone ID: PAT_MRT3847_75729C.1
ctcactccgacaataatttagctctggagactcaagtggttctaacgtaatatccgtccagccctgctagctagtttcaatttcttttgttctattactgtctatagaaaagatatcacccacttgctactttatatttcacagcaaattaaatactctcgtctataactaactcctatttaatttcttgccccattacccctctttatatcctgcaaaacatacatagtagtagtattttatatttgctaggatttcaggtgtgcagctgaaacctccgtgtcccacgaaaaccttacaaaattgaattgtggtattacagtattccaacagcaccatgctggattctgccactccccatgacaaaatcaccacagcagcttctggcttcgtacttgaggatgttcctcatctatctgcttacatccctcacctccaaacatatcctgacccgttgcaagacaatccttcctattctgttgttgcgcaatattacgtgaatgtggatgatacaattgcacaacagatagttgtacacaaaaatagtccaagagggacccattttcgtcgtgctgggcctgctcagaaggtatattttgattcagaggaagtacacgcttgtattgtcacgtgcggtggactttgtcctggtctaaatacagtgataagagaaatagtatgcggcttatatcatatgtatggggtgcacaaagttttgggaatacagggaggatatccaggtttttattctcgaaatacagttcctttgacaccaaaggttgtgaatgatatccacaaacgtggtggaagcatccttgggacatcatatggaggccatgacacctcaaagattgttgatagcattcaggaccggggaattaatcaggtttatatacttggaggatatggaactcagtatgaagcagctatgatttttgaggaagttagaaggcgtggcttgaaagttgcagtggtcggaattccaaaaactattgacaatgatatcccagttattgacaaatcaattggtttcgacactgctgttgaagaggcacaacgagcaatcaattctgctcatgtggaagcagaaagcgcggagaatggaattggtgttgtaaaattaatggggcgttacagtggatttatcgccatgtatgcaactcttgccagccgtgatgttgattgttgcttgattccagaatcacccttttacctggagggtccaggaggactgttggagttcattgagaaaagactcaaagagcaaggtcacatggttatagtcatagctgaaggtgcaggtcaggagcttctttctggcaacccctccattgttaataagccagatgcttctgcagacaaattatttccagatgttggcctgtggttgtcccagaaaattaaggatcactttgaaaaacgtcaaaaaatggctataaatctgaagtacatagatcctacttacatgatccgtgctatcccaagtaatgcatctgataatgtatactgcaccctccttgcccaaagtgctgttcatggtgcaatggcaggatacacaggcttcaccgtgggcccagttaatggcagaaattgttacattccattccatctgataaacgagggagagaagagggttgtgataactgatcggatgtgggcaaggttgctatcttcaacccatcagccttgcttcttgaacccaaaagaaatcacaggagaaagagaggaaagaacggaaaaccaaaccacagatgggcagaaccattcagaaatagcagactaaacagggcatatacagagcacaaatataacaccaagttaaaatgcctttaaaatgtggtgatcaagttaaatgatcaaatttaattaacgtaagatcaactgattgatcattgacgttggacaaaaccaaatctagtacatcttttgcagtatttaagccacaatgagtaacatctatatttacaaacttttgaattacatcttaaatatcaaaagtgagatctgcttaatatcactagcatctcttaattatttctactgaatacagcgttaataacctctttcagatccttgcaacctacaactttcatctttcctagaccttcggtttctaaaagtttttcagcctgctttggtactacacacattctgtaacccaacttcaccaatgtgttaacccttttttcaattctaggaaccatgcgaagctctccaccaaggccaatttcaccaatgaatgcagtcccctctggaattgggaactccaagaaactggaaacaagaaaaaagacgagataatgaataaatgctaccaaaaaaaaataaattcaaaaaattttattggaaaaaaagaaagcattcatgttaccagtcccagttaacttgttgaacattggtattattaacaatcattcgctcgcgttgatcccattagatagtgaactcgaaactgggcaatgtgtaaggcaaagtgcctgaatttcaattaaaaaagttcttgacccatccatgattacagcaacagctagcccagctaatacttctgaatccgggtgctgttcactgagaaacatttcactggcatttgaaacagcctgaagtcctgactgcgacatctcaaaaaccccaagctcatcagcagatccaaatcggtttttcacagctcgaagcatacgatgagaagagtacttctcacctccatatacaaaacaacatcaacaatatgctccaagacacgaggtcctgcaatgtctccagattttgtcacatgtccaatcaaaagaactgggatgtttgctggtgccgaatt

SEQ ID NO: 115968 - DNA, 709 bp, Glycine max
  Clone ID: PAT_MRT3847_7572C.1
gctgcatagcccatcattgagttacacattttcgtctataaaagtcctaatatactccacaacaccagcagcgtccgctcacaaaacatctctaaacgcttgtaaagatctccatctcccattgatcctcctgaagtttttgtattcaaccatggctacctatagttggtcaactgagatattttcatttttggttctaacgttgttgtcgacaagcagtcacacaatggttgctggagcacgcaatcttctcgaatcaaccttgtcaaaaccagaagtgccaacacttcccaaacctcatgagttgccaccattgccggaaatccctgaattgcccaagtttgagtcgcctaagatccctgcactcccgaaacctgagctacctaaggtccctgaactgtctaagcctgacatgtctaaagttcctgagttgcctaaagtcccagaaaggcttaaagtacccgagatatctaagatccttgaattgtctaagcccgagttgcctaaaggaccagaattacttaagcctgagttacctagtgtacctaatatccctaaggttcctgaattgcctaaaccagagttgcctgaagtcccaaagttgcctaagcctgagttgccaaaagtaccagaattgcctaaacctgagttacctaaagtacctgaaatccctgaattgcctaatctggagttgcctaaagtgacacaa

SEQ ID NO: 115969 - DNA, 592 bp, Glycine max
  Clone ID: PAT_MRT3847_75730C.1
gcatgggtccgattatccggaatataatacctaaacctcccgtttaatagacaccatatatgatcgtatatggtccatcatggaacacaacatgagagctttaaaaacactatgcgaatgccattcttgttccaaatctgcaccagatgacttgtggacaaaagctcatccttggcctttgacatgcatgctgaaatggtaggggatccagactggatgggatatgaaagacggataagccaaagggcacgcaacgcgtcccttagctattagccgaagccccgattgaggaaaaggaagcccatgccaaggtatctgtgatgagggatctcagcaaactatttgagcaagaccaccgcataacctttgatacctgcaatctggatgcgcacacttacacacaccttgctttgacaggatagtgctaccggaagacaaggtgtaaagtagtggggctagaaacaatcgttgggtatcaccatactaaacaaaatatgttgtcttagcatgtgcgatgacaaacccaaatgtgtgtaccacggcttcgaactgctcatgggacatcacaatgtaggttttgaaggctaccagg

SEQ ID NO: 115970 - DNA, 287 bp, Glycine max
  unsure (1)..(287): unsure at all n locations
  Clone ID: PAT_MRT3847_75731C.1
gagcattagactgcgcagggtgcagnaaagagggaagaggagagtgacaccnngaaatgacgagcatntcgtatactaancancactctgctgccactgcanatcnnnnngtttcggccttctctatacactctntcntgctctctggcctcanatgtggacnccantcncanttcctacttccccaagngnggcnanaccctcgaaatggtgtgngagtcnctnnccttnaaagggangggnctctgnnggtcaaccanancggcttcgttgtcctatgcgacgag

SEQ ID NO: 115971 - DNA, 492 bp, Glycine max
  Clone ID: PAT_MRT3847_75732C.1
ccacgcgtccgaaattcttcaatcggctcaatcctttctcctccctctccttcacttgaacaattccttcttcttttccccctcaattttttctcttcttcaattttagccctacacacaacataaactacaacaacaaacacctaaccattcactcactcacacatttctctctcagttttagcaacagtttgatgaagtcgtcacaaaaagcaacggttttggcttaattattagtattattgttgttattattattacaaggatggagataataacacccacagcaacagccacaaacgcaaccgcaaaatcgccagaacccgacatagagacgatgacccggatccatcaaaacccgaacccgaatccaaagccggtgtctttctccaacggcgtcttgaagcgccaccatgtaaaccaccgcgccgcggggtttacaaggaatgcctgaagaaccacgtggcgagcttgggtggccacgctttggac

SEQ ID NO: 115972 - DNA, 613 bp, Glycine max
  unsure (1)..(613): unsure at all n locations
  Clone ID: PAT_MRT3847_75733C.1
ggtacgacctgcaggtagtctggtccggnagattcccggggtcgacccacgcgtccggcataacacagcagagagagctccctcggcgattctaaattcgcattgtggcgcgtggttcacactcgacgcgttttgcggaatttcgactggcccagggcaccgttactcttttttcgaatttcactcctcaaagagaggaatgtgtgatggattctgtggagagtcagggtttcagaggtgtggatgagagttttggagagtgcttctcctggtgaatctgtcactcatttgaatatggctttgcagaagtatgctccttctggcaatgcaccttctgttaatatgaaacatttgagcttctccagtaaggtgcctaagaaagctgagctcgatgaagcaaatctgaatcacaacatggatgtggatattgaccttagggaaatttattttctcattatgcactttctttctgctgggccatgtcataaaactcatttacaggtttggaatgagcttcttgagcatcaacttttgcctagaaggtatcatgcttggtattcaaggactggggcatgtagtggagacaaagatgatgatggtctatcattccctt

SEQ ID NO: 115973 - DNA, 306 bp, Glycine max
  Clone ID: PAT_MRT3847_75734C.1
aattttcatgaacacaaccaaaaataataaacctcaagtttaaggttgatggaatttagcagaagcttcaggttgtcaaggtcccaccacatactgctttcatctgaatctgtgagttcggaatgtgccaaaattgctggctatgagagactctcacaatcgttgaggctaagtggggaatatgatttcattgataagcagaagaagcataaaaggggtgtggggcttcttggtaaggttttctctttcagaagagtttcctctccccacggagtcggagagcctaataaggtgcggagacggtgg

SEQ ID NO: 115974 - DNA, 234 bp, Glycine max
  Clone ID: PAT_MRT3847_75735C.1
ctcttgtgagtcttctctttacaaagatgaaaaagtggaagctgcggatcttcttctcgaggagcgctggttctttgataacttgttaaagatagcaccaacgatgacaaggtgtcactctgatccttacccttctttcactggcctaatcagcccccccagatttttttgttgaagactcaaactcattatcaccaaataaaccacccaacaatggtgctattgttcattcta

SEQ ID NO: 115975 - DNA, 577 bp, Glycine max
  unsure (1)..(577): unsure at all n locations
  Clone ID: PAT_MRT3847_75736C.1
cctgctcgccgtgcaggactacaacgtgccgttattcgattggctccccgccggtgtcggacaccatccttcgccgtctccggccagctccaacgtccccgactcctccgaggtgctcaacacgccggcgtcgcctaatttttcgtcgatttcctcgtcgtcgaatgaggctacggtcaataacaactccgaacaacagagtgggaaagaattacaagaagaagaaggtggtaatggaggcagaggagataaccaagatcaagacaagactaagaaacagcttaaagcgaagaagaagaagaagaagaaccaaaagaagcaaagagaaccaagattcgcgttcatgacaaagagcgaggttgatcacctagacgatggttataagtggcgcaagtacggccaaaaagctgtgaaaaacagcccttatccaaggagctactaccgttgcaccagcgcgggttgcggcgttaagaagcgcgtggagcggtcctccgaagacccttccatggtggtgacaacctacgagggtcagcacacgcactcgtgccctgcttcngctcggtctagccttggcttc

SEQ ID NO: 115976 - DNA, 524 bp, Glycine max
  Clone ID: PAT_MRT3847_75737C.1
acggctgcaagaagacgacagaagggggaagttgaaggcttgggaagagagacaagaaaacaaagccagacatggaggggaattatgggagcacaagacgttatgttccccgagcagattcttccttgagcttcctttacaactacaactacaccccttatccaggaatggaagtgaagcaacaaacactggctggcacaagttcatccatggaaaaagtgaactgcgggaaccaggagaagaagaagcgattaacaagtgaccagttagattcgttggagaatagttttcagaaggagatcaagttagatcctgataggaagatgaagctttccaaggagttagggcttcaacctcgccaaattgctgtttggttccaaaataggcgtgcaaggtggaagaacaagcaacttgagcacttgtacgattcgcttaaacaggaatttgatgtcatatccaaggaaaaacacaatctcggggaagaggtaatgaagttgaatactttgctgagagagcaagctttt

SEQ ID NO: 115977 - DNA, 202 bp, Glycine max
  Clone ID: PAT_MRT3847_75738C.1
ggacaacaaacttattcaaggaacatgtaaaaacactagctaggatccaacaataaaaactgcagagaaagaacacccatggtaaataattctttcattagtatacatcagactattaatatgaacatagcagtaaactgcgtactacaagggatcggttggtgcaaaaacggcgctgcaaaggttataaacggaagaggaa

SEQ ID NO: 115978 - DNA, 214 bp, Glycine max
  Clone ID: PAT_MRT3847_75739C.1
cactggggtggctccagggcccatttgaacgcctatgataccaccctctatcacggacgaagaaacggaccaataagcagcgcaagtcccaatgaagagagctggtaaaactattgaggttgctacttacgatgcttctcttgcttccaacctatgctcctatcacatcactggacacgtccttgaccccaatggtggaaccgatgtgaatggc

SEQ ID NO: 115979 - DNA, 797 bp, Glycine max
  Clone ID: PAT_MRT3847_7573C.1
ggtactattaagtctgtgcttgattcgctctctgagtactctcagttcaccattgaacagatgccaatgagtagcaagttgtgtcttacttctgattacgggaagacatataggaaatgggggtttgagaagctggtgtacaaagattcaaagaaagggattagaagggatcgaaaatatgcagtgcaaccaaggagtttgtatgcaactggggttcacatgtcacaaaaccttgcaggaaagaccactcacaaaactgaagggaaaataatgtactaccactatcatggaaccatagctgaaaaaaaaaaatcatgtaaaatgcttataaattcaacagaaatcacatatgacaaaaccccctatgtgttggacaccaccatgagggacattgctggtgtgatcaaaaaatttgagctcaagatgattggagacaggctacaacacaagacacggcaatgacactgccaactttttttaatttattttttaaaactatataataatttaacttgtattttagagtagaaattcattgagcggtttttttttttttctttcctgtttgatagttttctttttttttttttcttaatttttttatgtggtatatttacagatgggtatatgatctttgtttcatttttaaatagttcttttgtgtttcctatttttttttattctttcttttttacattttgtaaaaaaataaataatgaataaagatgaatggttcaattaaaaaaaaaaaaaaaaaaaaaaaaaaaaaaaaaaaaaactcgaaactagttcctcgt

SEQ ID NO: 115980 - DNA, 299 bp, Glycine max
  Clone ID: PAT_MRT3847_75740C.1
tccgccacgccttcgacgggtgcgagaagaccacagaaggggactcactcataccataaaaaccagcttttggttctttgggaacatggagatgaagaaatcatgggggttcttcttcttggttcttcttcttggctttggttcccaagggggggtgccaacggaaggaaaaatgggggaatcacaaagccccgggttccatgggttggggaataaaaaacaccactgggccttggtctggaagaaccaaaggttcttccgtggccagggccaaaggtttccgccgccgttgttttgga

SEQ ID NO: 115981 - DNA, 484 bp, Glycine max
  Clone ID: PAT_MRT3847_75741C.1
accacgcgagaacctgccttggcttatagaggaaacccttgcctgtcgtgcctactgtgcttctacgaggggccactatgcggacggcttgactgacagctggaaatgcctcgaatatattagacaggctccagggtccagtgaatggatcatgttttgatgcacgcactgaaatggaccgacaactagctctcgccagatccttgttcttgacgtgattcttcaccacgaagctcggacagctcatatgaccgaccactgccgcttactgagattcttgccgctgctgagcatgctacgaagcatacattttctaatccagatctgaggaagtcattatcatcatcctaggagtttgatcgagaatatttattatctcactacaagtgctgccgacatacatcctcgatgctggtggagaagacacggtggtgcccttgatggggacatagcagctgtggatgctatgcacggatggtccgat

SEQ ID NO: 115982 - DNA, 351 bp, Glycine max
  Clone ID: PAT_MRT3847_75742C.1
aaattcttgtgcaattactgtgccaccctcaaaaattagaactgcagttgatctgctaggttactggaaggaccaattgtgcgggttttaaattccgggactcccattaagggttgcaactagacctcatgggtaactgatatcttttgcaggacataaatgttatcgcatagagaactgtaacatttttctttcaaaaatttagttttcaacctattttgtttagactaacacaaaaatgtcttcttttggtctacaggcgagggccctacgttattttaaaaaaggcgttgcaccattaaagatgctattgagcttattaaaaaatgaggggttttgagtgttgaaaac

SEQ ID NO: 115983 - DNA, 274 bp, Glycine max
  Clone ID: PAT_MRT3847_75743C.1
tggttaccaatttccgcgacttgtcgttatcctgtaagtcaattagctccagatccttgtgctgtctatgtagaatgttctagtggatcttgtggtttactcacctctgcttggattatttctgcagttaatggtcgctcctcagatatcaactggaatcaacgcacatcccatgggataggctggattattgattagcttactagagttggtcctcgaccagcagctttactggcaggccagtttggcgggaatgattaccttctgagttcta

SEQ ID NO: 115984 - DNA, 824 bp, Glycine max
  Clone ID: PAT_MRT3847_75744C.1
gggagaatatcttgggaaatcagacgcgcgccgtccgagcatcattgtcgttggtgccggtgctggaggcgttgcgacagcagcacggctcgccgcggcaggatgcaaggtcacagttgttgagaagaacgacttttctggggggcgatgcagtttgatacatcgccagaattatagattcgatcaaggcccgagtttacttctgcttcccggcttgttccacgagacgttccacgacctaggcacaaccctcgaagatgaaggagtccacattgtcaaatgtgaaccaaactacaccgttcatttccatgatgacactgctttcaaaatgtcaacagatattgcgaccatgaagagagaaatcgagcggttcgagggtaaagagggctttgagcgttatctcggttacctgcaagagtcgcatcgccactacgaactttccatcatccatgtgctcaagaagaacttttactcatatttgagtatggtgcgaccaactttcttgcaatatctccaaacacttcatccatttgagagcgtgtggggaaggacaagcatgtacttcaagacggagaggctgaggagagtattcacttttgcgagcatgtacatgggcatgagtcctttcgatgcaccaggaacttacagtttgctccaatacacagagttagctgaaggtatctggtatcccatcggtggcttccacaaggtggtggaagcactcgtaaacattggatcgccattgggcgtggagtaccactacgacagaccgataaaagagattcaattatcagccgacggcaaaagagcgaccggtgtcacat

SEQ ID NO: 115985 - DNA, 163 bp, Glycine max
  Clone ID: PAT_MRT3847_75745C.1
gtgaaaacagcacgacagagggggcaccaacacacgccgttgcaattatcctaggcgcgcactccctgatgagtgaagagaatctctctcctttttactagacccatacaatttagggcgcgctttttcccggccttccctcgccaccgcatatacatacata

SEQ ID NO: 115986 - DNA, 151 bp, Glycine max
  Clone ID: PAT_MRT3847_75746C.1
ctacagttttggagtggttttggtatagataataacagccatgaaagtggttgattttgcacggcctcagagtgaaatcaacttggctgcacttgctgttgataggatcaggaaaggttgcatagatgacatcattgatcccttctttgag

SEQ ID NO: 115987 - DNA, 301 bp, Glycine max
  unsure (1)..(301): unsure at all n locations
  Clone ID: PAT_MRT3847_75747C.1
cggaggttttttgaaaggggagcatggggacttcttataangccattctggannacngcgccaccgtctttgtgagagagggtgaangacatnncnntttccaaaaaagagttctaggcgcaaatggaggttgttgggaacgttaaccacatctatgtagatgcttttaaagcgttttactactctaaagatcagaacttgctcttatacgattacatgggccccggcagcttatcttcacttcttcaccggagcagaaggttaaggctaacgccttttgattgggacaccctaattaaaa

SEQ ID NO: 115988 - DNA, 245 bp, Glycine max
  Clone ID: PAT_MRT3847_75748C.1
ttcatcgattctctcccttctctttctctctgcgacaccagatgatggcgacgacggcgaacgaaaacgctgtcgttgcgccaatcgcggcgttgttgttagtggtgctactcgcggcgagtgtggtggtggaggctcaggagaactcggacgtgacgacgctggtgaagcacatgcacgggacgaagtactgcgacaacggatgggaatgtaagggctggtccatttactgttgtcaactcact

SEQ ID NO: 115989 - DNA, 1608 bp, Glycine max
  Clone ID: PAT_MRT3847_75749C.1
aaaaggggttaggaatcgagaaggagaagaagaagaaagggttggcttcggccccaaaacacacacacccactgcgagagagagagaaatgggagagggagagaacacagaaatagaaacagaaacagaatcagaagcaacatcgacatggagcctcggaaaacacactcagataatcgaactttcggagacgctgacgaacgggaacctcagcgccaagattgaggccgcgagggagataaggaagatggttcggaaatcgtcgtcgtcgtcgtcgaagacgcgcgcgaagctcgccgcagcgggtgtgattgaaccgctcgtgctgatgctctcttcttccaacgtcgacgctcgccaatcctcgctcctcgccctcctcaacctcgctgttcgcaacgaacgaaacaaggtcaaaatagtgacagatggtgctatgcctccactggtggagctcctcaagatgcaaaatagcggtatacgagaattagctacagctgcaatcttgacactctcagctgccacatccaacaagcccattattgctgcttctggagccggacctctccttgttcaaattctcaaatctggaagtgttcaaggaaaagttgatgctgttacagccctccataatctttctactggcattgagaattccattgaacttcttgatgcaagtgctgttttccctctgctcaacctccttaaagagtgcaagaagtattccaagtttgcagaaaaagccacagcactgcttgaaatcctttccaactccgaagaaggacgaactgcaatctcaattgcagatggtggaatcttaacgctagtagagacagttgaagatggatcacttgtcagcacagaacacgctgttggaactctgctatcattatgtcgaagctgtcgagataaataccgggaactgattcttaaagaaggagcaattccgggtctgttacgtctgacagtggagggcacagctgaagctcaagatagagcacgtgtgcttctggatttgctcagagattctcccccagaaaaaagactaacctcatcagttttggagaaaattgtttatgacattgctgaacgggtagatggagcagataaagctgctgaaactgccaaacggttattgcaagatatggttcaaaggagtatggaacacagcatgaaatgcatccagcatagggctgcatcttgtactcctattccatccacttgatgtgtaccttttttccctcatcaagcaactgcaaaattgagttttaacttgtatatatgtgttcttattttattttttcttctctggggggcaagttagtgtgttaattagatcaccatgcaaagtgagtctacgctgctctacatgactagtgtcatgatttttaccagactaacttgggattgatctgtttacgtcatcactcttgattaactacatttacacctcattacttcgacctggatggtgtctgtgctttgcacatacataaaggagtctgtacttgcatgtatttctttttcaccgagtcatgaacttgtgaaagattgctaattataagctctctagatcaatcaatggaaataacatgggacattactttt

SEQ ID NO: 115990 - DNA, 1873 bp, Glycine max
  Clone ID: PAT_MRT3847_7574C.1
aacaaatttctaagctcttctttctcactctcaccaccttcacccatggccaaagaccgagagaagaaactctacgtagccgtgctcggaaactacgccgccgaactcaaactcctcctcaccacgctcctcctcctctgcgccgtcgccacgctcctccagttcctcccttcccgcttcaccatctccgcctccgacctccgcgtctgcatttcacgcgtcacccaaacaactcccacactttccaactcaactaacgccacgtcaccaccagcacccccactcgttgcatctttatcttctcccaccacttcaccaccgccgccaccgccaccgccaccgccaccgccgtcagagcaagtcctccccgacggaacaataaagcgcgtgttcaacccttatggctccgcagcctacaactttattactatgggcgcttacagaggtggcctcaacacgttcgctatcataggcatcgcttcgaagcctcttcacgtctacgccaaacccacctacgagtgcgcgtggttctcactcgccggagacaacaaaaaagtttcctccaccgtcggttacaagatcctccccgactggggctacggccacgtctacaccgtcgtcatcgtgaactgcaccttcccggaacccttaaacgccgacaactccggcgggaagctcgtcctcttcgcctccacctccggtggcggcgacgccagcttcaacaccactgatagaatcgaagctctcacggaacaacctcgcaccctcgacacaaccttgttctcctcgaagcccaaatacgattacttgtactgtgggtcttcgctctacgggaacctgaacccgcagcgcgtgagggagtggatcgcgtaccacgtgaagttcttcggaccaaaatcgcattttgttatccacgacgcgggtggggtgcatgcgcaggttctggaggtgttgaagccgtggatggatttggggtatgtgacactgcatgatataagggaccaagagcgatttgatgggtattaccataaccagttcatggtggtaaatgattgcttgcataggtataagtttatggctaagtggatgtttttctttgatgtggatgagtacatctatgtgcctcccaagagtactattaagtctgtgcttgattcgctctccgagtactctcagttcaccattgaacagatgccaatgagtagcaagctctgcctcactgcggattacggcaagacatataggaaatgggggtttgagaagctagtgtacaaagattcaaagaaagggattagaagagatcgaaaatatgcagtgcaaccaaggagtttatatgcaactggggttcacatgtcacagaaccttgcaggaaagactactcacaaaactgaagggaaaattatgtactaccattatcatggaaccatagctgaaaagagagaatcttgtaaaatgcttataaattcaacagaaatcacatatgacaaaaccccctatgttttggacaccaccatgagggacattgctggtgtgatcaagaaatttgagctcaagatgatcggagatagggtacaacagaagacacggcaatgacactgccaagtgccaaccttttttttaatttattttttaaacaaaataatttaacttgtattttagagtagaaattcattgagcggttcttttattttctctttcctgtttgatagttttcttttttcttaatttttttatgtgttatatttacagatgggtatatgatctttgtttcatttttaatagttcttttgtgttccctatttttttttattcttttctttttttacattttgtaaaaaaaaaataatgaataaagatgaatggttcaattaaa

SEQ ID NO: 115991 - DNA, 383 bp, Glycine max
  Clone ID: PAT_MRT3847_75750C.1
gaataaccaatatcttcggacaaaaacctaataaaaccctttgttttcctgattgattagtcggttgaccccatatggagaaagggtacccagttcctttgtgaggcttaacgggcactaccatctctttgcggcgttggtctggattgcatctggggattgcgcactcttcaacgggcgtgtcggccgaagatcttggatactcagtgctgccaccattgatatggactgccaacaccagaaaaaattttggcgcgcctccgagacgttgaactgcgcagtgaacatccgaccgtaccctaaaccgtacggaaaaaatgctatcctcctcatgtggcacaacctgcacaccctactgcgcctgggcccgagctgtatggtga

SEQ ID NO: 115992 - DNA, 383 bp, Glycine max
  Clone ID: PAT_MRT3847_75751C.1
cagagattggcagaaaaattggttaaagggaacatatatgattgtatttgcaaatacgagcctgcaagttgaaagcttctatgctcgctgattgtctaatacatggcatacttgggggtgcatgaaagaatcctctaggataattgtgtataaaattttacctgtactttttggttctgtgcacagggaacatccgagcttggagaataagagttaaaatgtagctttttaactccatgatttttaatattagttttgtgcattagtttatttggatttatgttagatttaaaaatatcagctaatgtaattttagataagtattcatatctttagttcgatttttaaaaaaaaaaatcaatttttaaaactatctttttttt

SEQ ID NO: 115993 - DNA, 847 bp, Glycine max
  Clone ID: PAT_MRT3847_75752C.1
aactatatcattagcctttttttagcaaagcacttcctaaaaaactattttagtatttatatgtatgtacattctacaaatgctattaacgtccgatatggaagacaaaaaaattacatgaatcatgtttggaagatataacgaaatctttttgcccatatgccatgtaattgtttttctctcaaaaaagcaataagcaccggttctcagttagaacacagctcgcggctactttcaaagctaccacctattgacaaaaaaaatccaaaagaatcaaaatggaactgcgtatggcaacgcgtatatttcgacctcaggcaagtattgtgcacgaggccacatagaatttgaaagctgaaagacatcagaatcaaacttctgtttctttgagacgggccttgcctctgtcggttccgaactaaataaccaatcttcatctactgagtccaatgcatcatacgttagtggaggaatctgtaacaaagacttgtacaaagatcccactttttgaattccatcatcaactgcagtatctatgacatcagcaactgcattatctgtgaccatagcatctccatgaacccaattatgcaacgctttgcaatgtttagaatcagagtttccagtaacacatttgggctctgtaatcttgacacttttcaactgacgatcacttccaagtgtatttttggtgaccacagcatctccatgaactgaattctgcttcaatttgcagtttctaaaatcagaatttccaagaacccgtttcagctctgtaatcctgagacattgatcacttccaatgggatttttagtgaccatagcatctccatgaactaaattctgc

SEQ ID NO: 115994 - DNA, 300 bp, Glycine max
  Clone ID: PAT_MRT3847_75753C.1
accacgcgtacgaacagacgaccgacacatacatatagtggtagctacaatcagagataggggatgtcacctatgagtacacatctacttggctactaacatacagcctgatctttgttgaaaacctaccctcctccatggatcaggagccgtatcctgacacatggtcggcacagccactatctgaatcatccttgttagcctctctgacagctacaccgcctggaattcaatcataacatttatctaacacgacactatcgatatcaactttgccggcactcaacacatcttgtacat

SEQ ID NO: 115995 - DNA, 816 bp, Glycine max
  Clone ID: PAT_MRT3847_75754C.1
ccggaagacgaccgaatcgtcgcgagtggcgtggcgttgttgaaccctaactctcgtaaaccagatctgagattcagaacccttcgttcgcatcgcaaaaccctaactctcgcatcacggcgattattcgatgtcgagtttccacgtcggcggcaaggtcgtggaccaagtcgatttgctgaggaagaagcgatggccctggcgccttgacgtttggcccttcgctattctctacggcgcgtggctttccacgattcttcccagcctcgacttcgtcgacgccgccattgtcttcggcgccctcgtctcgcttcacatcctggtttttctcttcaccggttggtccgttgatttcaaatgcttcgcccattatagcaaggttaagaatattgatcaggcagattcgtgcaagattactccggcgaagttctcgggttcgaaagaagttgtgccgcttcattcacggaaaagttctgcagcttcttcatcagcggtggatttggaagagaactacttcgattttagaaagcaatgttttgtgcattcaaaggagaaggggaccttttgcaagctttcctaccctactaaagaaacatttggatattatctcaagtgtagtggccatggctctgaagctaaagttcttgctgctactgagaaatgggggcggaatgtatttgattatcctcagccaacatttcagaaattgatgaaagagcactgcatggaaccttttttcgtatttcaggttttctgtgtgggtctctggtgtttagatgaatattggtattacagtttgttcactctatttatgct

SEQ ID NO: 115996 - DNA, 178 bp, Glycine max
  Clone ID: PAT_MRT3847_75755C.1
taccaaaggccctgaagaagaaggccccaaaacagcgaagcccccccccaacaaagagcacacgggacctagcaacgccaacgaccttaccccaagcgacgcggcaaacttgcccgaagaaaaccccatggggaaaccggcactccgcgaacttgtcaaactgcagagaggtagaagc

SEQ ID NO: 115997 - DNA, 1102 bp, Glycine max
  Clone ID: PAT_MRT3847_75756C.1
ggctcgagctcagcctctcaccaagggtactcgcactcttccaatttctctctcatccattttattactatttgtgctgtttcactctgaacatatcgaagacttgcaggcgctctattacagcctgtgagttcaaaacatgtgcgaaatcgcataccatcctcttttcaattcagatcctcttgatgtgcatgtcttgagggttttttttgcagaatgatgaacattctcaataatgatctatttgcattgtttcgggcgttaccctttttttttatatttattttgtaaagggaacaatttttgcaagtgaaacttgttttttcatttgaggattttgtttagtatacctgctgtgcttatggacggtcttgtactgattcgttatgtcatcagcacaaaacataaacctaagctacatctaatgttgccaccatgaattttttgtgtgttccaattcatatgggaataacacttctgcattgtggcaaaagttataattactttctaatatcacaatctaaataatctttttcgagtcccatttaaggagttttaaatttgaagcctttttttggtttcacagaataattatgtatttttatggctaagctgtcagttatatttgcttttatttcagtcatagccaataatgcaatgaactctgtcattcagatagtatgtcaatgagttgaaacaatgatgtttcgtgacatgttatataggatgttaatattcaatgcaaattactagtattataataagatttgtgttgtattaggagtcaactttttcgtatccagtattattgcaactcccaattcttgcatatggtggtaagcaacgcgttgctttctagtgaaataagtctgtacttaaatctgctcttacgtggttccaactaaaagatgcgtagctatcagtagttggtaatgctaagagaattttagaagcaataggctcgtaatatctgtggattggtaaattagattgaacaaggaaggatgaagcactacatttcaaataggtttcattgtagtctttaccttcaatttttttatttttttttggtgaattttatccttataaattaatttgacgc

SEQ ID NO: 115998 - DNA, 117 bp, Glycine max
  Clone ID: PAT_MRT3847_75757C.1
gttgactgcccccctccctcaagctccggaattctgcgctccggatccagcactcgactccctcttttaataccgcgtctgggttcgcaactactctttcttccgtcacctcgaagc

SEQ ID NO: 115999 - DNA, 403 bp, Glycine max
  Clone ID: PAT_MRT3847_75758C.1
ctagacaagactctcacacacaactctggagatagaaagactggctctcaacacatagatgagtgctgccatctgagcctatcgatctatcatatcctcctcaaaatccagacatgtcgaagcacatactctatccagctttcatgccagcaatgcctcttcttctcgctgtaccatgagtgctgattggatgccttgccatcctactcccacatacctcgatggttcaccacctgttgactgtggattcaaccctattggtcttggcgaagtaccagagaactcttgagaggctcaaagagtcagaactcatacactgcagattgtccatgcttgctgttccagtgattctggatccagatgcatatggcttaagcaactgggtaaaggcttacgaatgggc

SEQ ID NO: 116000 - DNA, 279 bp, Glycine max
  Clone ID: PAT_MRT3847_75759C.1
acctaccaacacaaagtatcgggtgggtcgaatcttttgagataattgctactctctcctctgataaattacagtgtgggtagttctgcatctggcttttccacttaatttactaacctccgttgctttatctgtggctaaaaacaggtctttgggtcacaaaattgaatgagtagaatgggtctttttggtacccttctacttttttcggagcgtaccaagctcctttatgatcttacgctttccttaggtgatttttactgcttaaaaagacctttg

SEQ ID NO: 116001 - DNA, 481 bp, Glycine max
  Clone ID: PAT_MRT3847_7575C.1
ctcatctgatgcttcccaaatttctcccttcttttttaattcctgttcaactaactacgcgaatttcctgaccaaaggttagcacctttttcaagttgtctcctttgaatttcaaacaccaaactgaatgttagataagatttttcaagatttgctcttgaacccttcacccaaagtaccaaccaaatttgttttctctgtatcactatctctatattttaaaaaaaaaataaaattgtttacccttatcattagcataagctacaaaaccgaatgctgaagatttatttccctttttggtaaaggaacactgaacaattattttctgtgtgcttaagtggttcgacaagaaaaaattctgattcagttttggacctttttttgattgatttttatcatacttatgtgatctagatgagggtcagagcctgtttctttgtgctgttctcattgccatgccttctttgtgtgttactttcaa

SEQ ID NO: 116002 - DNA, 239 bp, Glycine max
  Clone ID: PAT_MRT3847_75760C.1
ggaagatggtgttgccggctctaattgccctatccaaccaggcactaactacacgtaccactttcaggtgaaggaccaaatcggtagcttcatatactaccctaacctagggttgcatcgtgcttgctgatgcttttgcgggcttcgcatgaacaaacgcctttttattaaaagttcctatgctgattcctttttttacttctcacttcttttcgattactggtccacttaaatgcttt

SEQ ID NO: 116003 - DNA, 628 bp, Glycine max
  Clone ID: PAT_MRT3847_75761C.1
cggccgccccttttttttttttttttttttgcaaccaaataaagcggaacttgcattaaatattggatgaatgtatatacatttaacagccctatgaaactaaaatagacaggtgttcctgtaggacgaagaggttggttatcctatcagtatccacactcacataggtaactcaacaacgacaaaatagaagttggcactcattgtccctttagctaacttgtcccaccaatacttgaaggcagtggctgagatctcatatgaccaattaaagccctacaaaagccaaacattgattgatataatattgtcacccgccaattaaaaatgacatatatatatatatatatatgatatataatggctccaaataaaagccaaggccttgaaaattttatctcagtagaaataatcagatctcaatattttttcagacacaagaccataagcagctaaaaaatattttcatgtcaaattttgacttgaataaaagaattctatgtttcgggtgatgaaagctattgcatctgcaatgagttagtttgtgtgaggacaaaatctactcgtgaataaaactatcttgcaagaaaaccaaaccaaccatctgcggaaaaagagatgcaatctt

SEQ ID NO: 116004 - DNA, 578 bp, Glycine max
  Clone ID: PAT_MRT3847_75762C.1
cgagaaattcaggtatcaataaatagaaggaaaagaaatgaagacgaagaagaagaggcagaggacagagaaaaggagagggacaggcgacttgcctaattgtgttctgctccagataatggaatttatgaacacaaaatattctgttcaaacttgtgtattattgtctaaacgatggaaggacctttgaaaatatctcactagtctctctttcagccgtttccaaagagataatttgtgtggccgtggttactttattacaaatttgtgtcttgggttctgtctagtcgagatggttccgtctcccttcttaatcttaatctctctgggccgatggtttgcaggggcgcccaacctcttgaataagcaaaatacccagcggctggcaatcgatgcagattacattcctgattgttttttccctctcatcttttgctgccagtttttgaccttccttaagctttccatttattcccatttgccaaaatctctgcagtttccagcattaaaaagcttgcatcttgttaatgttggatttactgcaattgaccgtagctgtgctgagcccttttcaactt

SEQ ID NO: 116005 - DNA, 361 bp, Glycine max
  Clone ID: PAT_MRT3847_75763C.1
gggaacgatgtaactaacccagtcccgtgacttggctttctggttcgagtcgatgctattctcagagatgcataagggcttgatgcatagctatggccttgctgtaattgtattggccttgagtttgtgtttgggttcatcatcgggacaatgacattcacgagaatgcgagaatctcagtttcatcggacgcgctttgtgctcagagtgcacaatcctctgagaatacttcaaggacagtcagttggtatcggactgtttcaagctgatgcacggaagactgcgaacgatgccactactatggttacttactcgggagctgtcttgagagtctgcatcaggaaacttgttttctatcctg

SEQ ID NO: 116006 - DNA, 831 bp, Glycine max
  Clone ID: PAT_MRT3847_75764C.1
tttctcaatcggaattgtgggaactctcttcattgcttcagttctgtatgtttgtgtttcacttgtgatgacaggaatggttcattacacccaccttgatgaaaatgcccctctgtctcaggctttcttctcattgggtcttgattgggctggatatttgattgctgcaggctctgtgactactatgactgctacaactttggtttctctcattggtcaaccaagaatcttttatcaaatggccaaagatggcttacttcctccaattttctcagccaccaaatggagtaccttattggggtacaattatcactggaatcatgtctggtggaattgctttcttgttggatctaggctcactagcaaacatgatctccattggaaccctattagcatttattgttgtttgtggtggagtagtagtcttgagaacccaagatgaaaagcatccttacaaaccttctttgctccttttgggcttcttctttgcatctactatttggggagttggtttcacctactttaaatccctgcaaccatggagtttcatctttactggattattggtgataggaagctacattcctctccaatttttgaagcacacagacattccaagcacattcaagtgcccattagttccatttgttccttgtttgggcatctttatgaatgtatggttcattattacattgcctgcagatgcactaattcgattggtggtttggactttcattggaatggtgatttactttgcatatggaattaagcactctactctatacttgaaccaaaagatgtccaagagtatttaacattgtttataactat

SEQ ID NO: 116007 - DNA, 199 bp, Glycine max
  Clone ID: PAT_MRT3847_75765C.1
cttttatcgttaaaataaacacaaagccataatgacagactggaggtgtctttcaagagaacaaagtaacatcccctctcgtgtcgctcgggctcgaccaaatgcactgaattactaatagtgacataaaaggaacactaggaaaacataaggccaagttccaaacgattattctgggatgagacaggccacctttata

SEQ ID NO: 116008 - DNA, 245 bp, Glycine max
  Clone ID: PAT_MRT3847_75766C.1
cgcgtacaaggctgaaacctttcttcacaaaatggccttttctacactaacaaccctctccctccgcatgctctcttatactacaccctcgtcctcttcttaccctacacacctctccgccaacccctcctccctccaattccccaacttctcccaccgtgccaccaccactcgctctgcccgctttgtcgtcgtctcccccgtcgaggcacctgataaaatcaccaatctctgctactaaatct

SEQ ID NO: 116009 - DNA, 639 bp, Glycine max
  unsure (1)..(639): unsure at all n locations
  Clone ID: PAT_MRT3847_75767C.1
attcgagctcggtacccggggatcctctagagtcgacctgcagtttcagtacaattccctaagtcgattaattggaaaacttgatagtatcttttaaggcaaggcatgcatgtgtttgaccaaatgtactatataaatatgcttagttgagatgtagcttgttgttgattgtaataagtgctgcctattttgagtgtgaacataattttttttcaatgtcagcttcgacattgcaatctggaagttttcatgctcctgttgatgaaatgttgattttgaaggtatagcatcgtgccctttgtcacttctaattgatttaagccatttcagtgtagcgatgctatagttacaatacaacatcaagacacgataatctgagctcagtttttgcttaactaataaaattgcagagtaaatcgcaagagatcgagccatatttaaatggacgctgtatatatcttgttgatcagtctcttggtattcgtagaagaccttaataaatttttctggtagaagtattatgtttgcattcattgcaagtatattattttgaattataaatgcangaatgatgggctctggaaagacaactgttgggaagatattgtcacaagtgctttcttattttgnttttgatag

SEQ ID NO: 116010 - DNA, 447 bp, Glycine max
  Clone ID: PAT_MRT3847_75768C.1
cttcgctgattattctcttcccttttctatcttcctttgcaaaaaccaagtaaatgggtcggcttaatcccctacttgggggggcactttttttaacacttttccttaattatttacccccaacctttggccaacttaatccaaaccactttgcttacctttgccccaaccctgaaaggcttggtagaacagcccgtacctataaagtcccaccaaactttggcaaccgtccaagccccctttggcttttcttttaacaatggtttggcccagggtgggatgccttccgtttggttggcttccaccgaaattacccagccgaagaaggtccaccagaacaccctgcctttgccggtggttggtttggccccagggtccaaaccaaaggctgcagaaattgccgtccttaatggcaaaaccaaagtctcgggtccaaattttctggcc

SEQ ID NO: 116011 - DNA, 310 bp, Glycine max
  unsure (1)..(310): unsure at all n locations
  Clone ID: PAT_MRT3847_75769C.1
ttatatgcattgctanatgaggaacatgctggaattatttcccgggtcgattgatgctactattcgtgttcctgccctttttttttttttttattattcttgtttttgcttcctccataggcacatatatttaaccgaagtgttgaaggtataatgatttcagttcacattgataatggtacagagagtattaaatatatatatatatatatatatatatatatatatatatatatatatatataaaactaagcataattactgcaaatacacatttataatcgtcaccctttgatataacttctttgta

SEQ ID NO: 116012 - DNA, 376 bp, Glycine max
  Clone ID: PAT_MRT3847_7576C.1
gccacttccgataaatttagcacaggtttggtttacagacttgcttcatgatgtggattccaaataccctcaggggcatcaaattcctaagattatcttgacgactgttttgcgtggctgataacttgatattcctcattaaaatcatggatgaaattcttgacatccacataaataatgattctaaaggcactattgtaaactgaatggtatcagtgattacacaatgattctgatcacttctaaattatgaatctatcaggcactaattgattatcttaataccgactgatatattattgattactgaaaaacattgattccgacttggaaagcaaaacaacgactgatcacctatgtcgcgtgccatacattc

SEQ ID NO: 116013 - DNA, 346 bp, Glycine max
  Clone ID: PAT_MRT3847_75770C.1
gacggttttgtgctgttgtcgctgcgcatcctccatagtctccttcctctacatctcaacatgaagccatggggaatacacatggaatgggagctgctcgcaagctcacagtctcaccgcacgaggcaaaagtgggctgatatgtcatacggtatatcccatcttgggaatccatggcagaaatcttttgccggttcagcccatgccaatggaactgtccttgaaagcataggtattgtatctggacatcccaactctgctattcgtaactgtgccatagttcaacttatcaataatgggtaataaattgcagcttttgtctctaatgatggatgcatgaactaca

SEQ ID NO: 116014 - DNA, 302 bp, Glycine max
  Clone ID: PAT_MRT3847_75771C.1
tgttcttttaatcaaactcaccgttaggtgggcgagacagagaacaaggcaacaaccgcaagcacaaactaattagcgtaatggtgcaagttaccacccttaaattcctcatgcgtggcgccgccaccgccgtcgctagcaccaaggagcgctccggcgttcgggccgtcgaggaagccgccaagagtgccatcggccccggtttacaacaagtttccacctcgtttccgaacaagctcgttccgatttgccaccgattcttcgattggtttgggtgggcaccggtcttacccgtattccaa

SEQ ID NO: 116015 - DNA, 123 bp, Glycine max
  Clone ID: PAT_MRT3847_75772C.1
aggctaacgaaacataactaaaggtaagatgtgtaacgagttctattcggagcatattcctagcaaggatgacctacaatattgcacattaaaacaaatggaccatgtgtctaactcaatata

SEQ ID NO: 116016 - DNA, 272 bp, Glycine max
  Clone ID: PAT_MRT3847_75773C.1
gctgcaagaaaccaccggaaggggccctggatattacccagggactgcatcctctctcaatcttaaaagattttgagcaccttcacacatgcttcgtacacattcaccttccctctaactatccctctcttaaaaacatctatagccacttcatataccataaccctttatcccaaatgttttttacatcaccctatttggaatcaccgcacacacatatactatgatatgtgggatgtgcgataaccctctatatacctcggttgacgaca

SEQ ID NO: 116017 - DNA, 256 bp, Glycine max
  unsure (1)..(256): unsure at all n locations
  Clone ID: PAT_MRT3847_75774C.1
ccttggcanncgtcatatcagaatatggatgaagagattgattttgagtcgttccttagggcacatttaantcttnaatcncngannaatagntaaagatggtggttcaaaaagttcttcnncattcctgaaggnagctanaanaactgttcatcatgcaattagtgaatctgagaaagcgtcttatgttgcacatattaacaactanttggctgangataaattcatgagtcagtttcttcnaattgcatccatc

SEQ ID NO: 116018 - DNA, 418 bp, Glycine max
  Clone ID: PAT_MRT3847_75775C.1
cccgcaaaaaatcacactgggctattttaaaatatggttgggggcccgaaaaaagaaagaaaaaccaaaagaatttaatatttttgaaatacagcaaaaccccttttcaagctttaattagcaaacccactttgcatcagggatcgaaatttttaaaaatccacaaacccatttccttttttataaacccctttaataatacccttgccctttttaaaactacaattatcaccccctaaattgatcaaaactttttgcagttccttggctgaaatcaggccatttttggcaggggcaaaaataaaaaaagcttccttgagggaacccccattatgctccatgccacttccaaattttttttttttttttttttccatgccattcatgacaattatgaactcatccaagtccacaaacc

SEQ ID NO: 116019 - DNA, 1786 bp, Glycine max
  Clone ID: PAT_MRT3847_75776C.1
gagggaaagggatggagaaggaaagatactccatctataagagtggagtgacgaaaagttggattgatgttaaaagagtcgaagttaggagtagcagcaaaggagaagaagaggagcagagtagtgaagaaggacagactcagcaacttacccgatgaagtgcttcatcgcatactttccactttggacgcaaaatcagctgttcaaacgtgcgttttgagcaagcgatggaggcacgtttggacttccctaccagtcctcaacttctgcgactcttccttcgacgattctctttacttccagtgtttcgtggaccatgttttatctcgcagagatgcttccagcaacgtctacgagctcaactttgcttgcacagatgaacttgaagatggccacatcgttgactccgtcgttgaccatgtttcactcacaccacccatcaccattcagggtctctacatcgtcgctgaatgtatcgttgggaagcttcctcaactctctctctgtcaatctctcactaccctcaaacttgctcacatatccactgaaaccacaacctttgacttcttatctctcacgcacttgcaccttttcgattgtcggtttgagtgcggtttggaagagcttctcgacccttttagggattgtcttaatctgaagcacttgtatcttcatcgctgtcagtactatggaggattccagaggtttaaaatctttgcccccaaactcaccctgttgagcattgccctgatgagagtagatgaaatgtttgattctgattgtaccatccagcttttcacgccaaagctccaatcttttacatactgtgactttgatctctatgatttttctattgagggggaccttccttttatagaagaagtggatattgatatgggctgtttggctaaggacacttattcactgcttcagttgattgaattgtttcaagtgatggggaatgcccagtttgtatccttatcacctgatatcattgatgttctagctacgtttcctgatctactggatggtcggtcatcccctttcactagagtgaggacttttgtgttgaacatggatacgccttcttcctcctttgttatacctcctaatgtcatggcctacttgtttagtggatctcgtggacttgatttcttgatttctatgaacgggaaggtgtggaaaaaggtatataaaacctcttttcaaaatgaaaaatgtaacacaatcactatttttcttcctaaatttttataaatgatttgccatgcttggacggaaaaaaatttgcagtgtagcattaccctaaaagttaactgttgtctaaatccaatgcaatatatcaacacttatttagttgtgatgggtaaatatggatcatatggtagagtatcggtcttcacaaggcctgcagagagaggttgtgatattttattgccacactgaaatcaaattataaatcttgtactttccgttacaggtgcaaaacagtgcaaaacaatctgattgaagatggcttcttgctaactttgacagttttatctttttgagattgaaagctgttttaacaaagaagactcgtgtatttttttgttctccccagagaaatagtggtcctgctgaatgctgataatttgctgaatatgcagcaaagatgggttgacgcattgttcataatctgtcatatttgttgctaacagttgttattttgtggtcttttaggccttttgctctctaatgttgtaaactgcatattacatatagagaatctcaattatatatcacc

SEQ ID NO: 116020 - DNA, 399 bp, Glycine max
  Clone ID: PAT_MRT3847_75777C.1
aacatataaactagacactttattccagcaatagtacgagtgtaatatcataagcagagattaataattctgatcaactggccctactttttacagaagcgaccaagcaccaaacatttatatatatatctgtagataaaaagcagtgcaccgtgaccgtgacacacccagtcactagtgcaaaacactcgaacttgctcatgggcaagaaatgaccactgtattctaagggaggatgtttagacacaaagcaccgagagagcatcatgatacatactacatgaatttcgtagtttcgaaaagagagagagaccttattagtatccctaagggccattgatgcctgaagctgtacgtctacaactgctcacttgcattagccggggttgcaggggctgt

SEQ ID NO: 116021 - DNA, 2499 bp, Glycine max
  Clone ID: PAT_MRT3847_75778C.1
cttcaatttgattccttcgttgtttcgtcctgagagggtcagccatgacccaaaccctctcattctctctctcaccttcccagaaaaccctagaaattaattaaaaccatccaatcttcttttctccatttccccgatttttttttttttcatttctatttcaatcgcaacctcctcctccttccaagtcaacgcggatttcagaattctcgatccatgtcgtccgagatcgaggttgtcgaggaggtgcagtcccgcgacgagcaatcgggggcggaggagagcctccgtaatgacgtgtacacggcggcggcttacggggatttggagaggctgcagagattggtggagcaagagggttgccccgtctccgagcccgacggtttgggctactacgcgcttcagtgggccgcacttaacaaccgcactgccgctgctcagtacatcattgagcatgggggagatgtaaatgcaacagatcatactggtcagacggccttacattggagtgcggttcggggtgctattcaggctgcagagcttttactccaggagggtgcttgagtgctgccgatatgaatggatatcagacaacacatgttgctgcacaatatggtcagacagctttcctttaccacattgtttcaaaatggaatgctgaccctgatgttcctgataatgatggaagaagccccttgcattgggctgcatagaaaggttttgccgattctatacgtcttctgttatttcttgatgcacacaggggacctcaagatacggggggtagcaatcctattcattgagctggtagtttgggcaactcgtaggcctgtagcgtgcaggagcaggctggtgattagtaagatattagtctcgacgaagatattgagtgcattgaagaattaggtagctcagaggagggtataggaatgatgcacatggcaagaagctcgaacttagcaaatggagactcgcataaccattccgaatatgcaaggggcaatggaaatggccatcatgttattaatgtgaattccaattccaacagtacccactccaaaacaaatcatggtcatgttctttttaccgcattgtagccataattaaaaccagggccaaacctgctttcgacgatgcgcccttgggttttaggtgttggtttgggaatgttttacaggtgttgtcagcaaggattcctggttatttcaggatgaataagcatgattatcacgaaacaaaagatgatgacactctcttgaagattgatataaataatcttgctttgcttgctggaaattggtcccagctttgtgcaacatgcaagattgtcaggcctcttcgagcaaaacactgttccacctgtgatcgttgtgtggaacaatttgatcaccattgtccttgggtatccaattgcatcggcaagaagaacaaatgggatttctttgtttttattgttcttgaagttctggcaatgttggttactggtggagtttgtcttacaagagtgtgaactgatccacttgcacctcattcatttggggcatggattcagtatgttgctaacaatcacattggtgcaatatcatttctaatagccgattttttcctcttctttggtgtgtttactttgacagttgtgcaggctagtcagatatcacgcaatattacaacaaatgaaatggcaaatgcaatgcggtatagttacctcagaggtccaggtggtagatttagaaacccatatgatcatggtatcaagaagaactgttctgatttcttgatcaatggttacaacgaagacgttgagtgcattgaagaattaggtaactcagaggagggtataggaatgatgcatatggcaagaagctcgaacttggcaaatggagactcgcacacccatactgaatatgcaagaggcaatggaaatggccatcatgctattaatgtggattccaattccaacagtaccaactccaaaatacatcatggtcatattaatggtcatgttcattcttcgcattgtagccataataaccatggcaaaaccagaaatgacaacgttcccttgggcttgggtcttggccttggacggaacagatctgttacagcctcatcatgatatttacatacatgtctggtgtttgaacctaacctgtaatgtaacataggcacacatctgggttggtttacgttaattcaatttattgtggctcttttctaccacacccccatgtgcaattttgtgctgttacatttagtcgtcctcttatcgttttttctttctactttttgtaactaatttaagttgcattttaaagatgataagccttgaaatctatgtatgaaattcgaatgtatttgctagagcctagaggtcccgccccccttccttcctatggcggttgctacttgctagtgtgcggatgaaacaaatatatatatatatatatatactggtacaacttattctttttaataaattttcttacatatttaattttt

SEQ ID NO: 116022 - DNA, 785 bp, Glycine max
  Clone ID: PAT_MRT3847_75779C.1
gtcgtccgagatcgaggttgtcgaggaggtgcagtcccgcgacgagcaatcggcggcgtctggcggcggcggcgatggcatgggggcggaggagagcctccggaacgacgtgtacacggcggcgtcgtacggggatttggagaaactgcagagattggtggagcaagagggttgccccgtcaccgagcccgacgggttgggatactacgcgcttcagtgggctgctctcaacaatcgcactgccgctgctcagtacatcattgagcatgggggagatgtaaatgcaacggatcatactggccagacagccttacattggagtgcggttcggggtgctattcaggttgcggaacttttactccaggagggtgctcgagtgagtgctgccgatatgaatggatatcagacaacgcatgttgctgcacaatatggtcagacagctttcctttaccacattgtttcaaaatggaatgctgaccctgatgttcctgataatgatggaagaagcccattgcattgggctgcttacaaaggttttgccgattctatacgtcttctgttatttcttgatgcacacaggggacgtcaagataaagagggttgcactcctcttcattgggctgctattaggggcaacttggaggccagtaccgtgttagtacaggctggcaagaaggaagatcttatggtgactgataatacaggcctgactccagcacagcttgcttctgataagaatcacagacaagttgcttttttccttggaaatgcccgaaggttgcttg

SEQ ID NO: 116023 - DNA, 526 bp, Glycine max
  Clone ID: PAT_MRT3847_7577C.1
gtgcgcaggtgcctgtacacctttgtgtgcgcgggagaccccttagtaggccatgggagcttttaagactggagagtggccacccaagagggcacccgcataaccaacccagtaaactactgctattttagcgggggtgtggcgtgactttacgtggtagccaaccccgcctaggtgtgcctagcggtgtaatgttaagcacactggggcgcttgcgtggggataatgtaaccaccaggggtattaggcgccaggcctggaccacgcacagtaataaccggaagcaacactatacgcccgtgcagaccaccagtgggcggcccacacgatggctgcgactgaatagccttggtgccgctggtaagggcgggccagggggcggcttgcgggagtggttaaaacgggggaacggcgaggatctgccgtataaacatgcagtaaccataaccacgtagcgacggggtggggcagcgagaaccgtggcaattagaagggatgcggccggacgcgagcagaggggtagacg

SEQ ID NO: 116024 - DNA, 211 bp, Glycine max
  Clone ID: PAT_MRT3847_75780C.1
cataagcagggccatgcgtcgagccagtgttggactgaagaaccctaaccgtccaattgccagcttgatgtttcctgggccaactggtgtggcgaactctgagttggccaaagcattggctgtatactactttggttctgaagaagccatgatccgggtagacatgagtgaattcatgaaaaggcacacaggctcgacacttactggttca

SEQ ID NO: 116025 - DNA, 1410 bp, Glycine max
  Clone ID: PAT_MRT3847_75781C.1
ggggagatcatattttattttcagtcgagtgaatatctagtttcaaattgtttgtagacacctgccgatggtatgaaaacacttttaattgagtttattattttttttcttattggctcgcgtccgctctcttgacagcaaggatcctggttatatcagaatgaatatgcatgacactcaggatacaaaagatgatgagcctctattgaagattgagataaataatcctgctttgctagctggaaactggtcccagctttgtgcaacatgcaaggttctttgctttctgttgattgtctgacttcttgctgtaaagctgatcaatgtcttgcatacacagactacacatgcccatctttctttgcattgaattgtttcatacacagttttatgttgccttttctttagattgtcaggcctcttcgagcaaaacactgttctacctgtgatcattgtgtggaacaatttgatcaccattgtccttgggtatccaattgcattggcaagaagaacaaacgggatttctttgtttttcttgttcttgaagtttcagcaatgttggttactggtggagtttgtcttacaagagtgttaactgatccacttgcacctcagtcatttggggcatggattcagtatgttgctaacaatcacacgggtgcaatatcatttctaatagccgattttttcctcttcttcggtgtgtttactttgacagttgtgcaggctagtcagatatcacgcaatatcacaacaaatgaaatggcaaatgcactgcggtataattacctcagaggtccaggtggtagattcagaaacccatatgatcatggtatcaagaagaactgttctgatttcttgatcaatggttacaacgaagatattgagtgcattgaagaattaggtagctcagaggagggtataggaatgatgcacatggcaagaagctcgaacttagcaaatggagactcgcataaccattccgaatatgcaaggggcaatggaaatggccatcatgttattaatgtgaattccaattccaacagtacccactccaaaacaaatcatggtcatgttcattctacgcattgtagccataataataaccatggcaaaaccagaaatgacaatgctcccttgggcttaggtcttggccttggacggaacaccagatctgttacaccctcatcatgatatttataagtctagtggttgaacctaacctgtaatgtatcataggcacacatctgggttggtttatgttaattcaatttattgtggctcttttctaccacacccccatgtgcaattttgtgcggctaaatttagtcatcctcttgtcgttttttctttctacttttgtaactaatttaagttgtgcatttaaaagctgataagccttgaaatcta

SEQ ID NO: 116026 - DNA, 297 bp, Glycine max
  Clone ID: PAT_MRT3847_75782C.1
aaagggaagaaaaatcacattgaaaatttaaaccacagtgtaagattctcattccgcactcatgaccaatgggtcaaaaattaaaaatctggatccttaataaaaactgcctcttctaacaccaaaacaaaaatcactctatctcaattctaataagcgggggggcacaacaaagactataatgcctaaacatttcccccaccttaaaaaaaaactccacctcttctaagaaagaatatttgtgcacatacgttcacaaaaacgcttgggtaaaagttctctttaacaactcccctg

SEQ ID NO: 116027 - DNA, 435 bp, Glycine max
  unsure (1)..(435): unsure at all n locations
  Clone ID: PAT_MRT3847_75783C.1
gttcttaacctatatatgttcttcctgatattcacatgaaagttatctttttgtttttccacataagcttactcttgactattcattgaacttaaccagatcaagatcaaatctcaagtagcggatttccttgattaggttttgttcctccttcgacaatgttttctccttcattttgctcactatatatttaattctctcagaaacatccatgccaaaattgactgaaactattttagttttctctattccatgattgacttgatttcatgcttcaccgttgatgctcttggtgatttaaatacaacccaagctaacaaacactgttcgcatcgatggtaatagacttgtctataatatagcttgtccttaatttaaaacatgcatacatgtatcaacacgcctacatataggccttattnttaattattatga

SEQ ID NO: 116028 - DNA, 501 bp, Glycine max
  Clone ID: PAT_MRT3847_75784C.1
ctgcttggggggggggggggggggggtattgaaagggcaaggcctggtgaggaggaggaggagtgagtgagtgagagcggataaagacatagtttaaattagctcgatgcctgggcaaatcaaaatacgctagaagatgccgaagggcggagaacaaacgcagggacaaatccagctaaccaaaatacatagggttgagcaactctgtttgaagttagcagtgggtagggctactgggtgttacgagtagagtgcatcaagtttaggaaggtgccgttgggaacgtggcccggaggtggcaaatgggtggcccacaatggccaaaaacacttcgagcgtcccaaacgattatagacagtaggcgggcagaccgtgaacagtggcaccgggtttaatggacgcacggtttgtccgaggtggttacgcactggcggctgcggcacgtctaacaagggcagcggccacaccgccacacccgcctgcgcagccagttacgcaccg

SEQ ID NO: 116029 - DNA, 319 bp, Glycine max
  Clone ID: PAT_MRT3847_75785C.1
ttttatttttttaatttttatttttttttttctggagtgttttttttttttttggaagcgaaaattaaaaccataattccattgcttacatttccttaaaaaaacaaacttatatactttctttttacatgtcaccaatttttttgaaaaaaaaaacaaccccaaccccaatgttttttccaaaaaatccaaatgcaaatgtgtaaaaaactgtaaatccaaccgattcaacagtttgtaagcctaatacctttaacttcaaatttaaccatgcattgctactttcctttttgcttataaaaccattcaaaaccttcca

SEQ ID NO: 116030 - DNA, 289 bp, Glycine max
  Clone ID: PAT_MRT3847_75786C.1
tgatggaaaagggacacctagcgcagatcgtgtttagtggatgttccgagtatttgcgcatgacagattttgggtattacatggcggcctgccgagatggcgagcatcaagttatgatgctgaatccagtgcttcaagcgatgctattcttaaggccagagctgctagtgaggctatagagaaagtatatatgggacagacagttggaccactcacattccaaactaaatatcagccatctctagttcggaacatcgatcaggctaagaaaaatatagcggacaaaact

SEQ ID NO: 116031 - DNA, 430 bp, Glycine max
  Clone ID: PAT_MRT3847_75787C.1
tcttgttatgacgcggaattgcgaagctataggtttaataaacgttgaaactattcctcctgcgccatctccattgctgttttctctctgcttgctattacaatccaattcaagaagttcgttcaactttgatgctcaagtctaacaacatatataaccattgacagatattcaaattcagcataattgtgattaaaattttggtccttccctggaatgaaaatactgtttgtcaataaatttgggagtgatttttgcggttatatttaatgggctgctactgttcaacttcaaagaaaaccgaagcacaaggttatgaggaacccactgttcttgcatctgtgacaccttttactgttagtgaagtagaggccttgcatgaactctacaagaagttgagccattcaattattgaagatggtcttattca

SEQ ID NO: 116032 - DNA, 2846 bp, Glycine max
  Clone ID: PAT_MRT3847_75788C.1
cttttcctgatttttttttttttttttttttttgacgaaaagataaaactaccttttggatttttttattaaaaaaaagctaataattatcatgtttttaagatattttattttttctagacacaatcaaacgtgctttaaatcgtcatatctacttttctcagacatttttcacctaaggtgccgactccccactttggccaatccttaaatttcttttttctactttctccgctgttagccacaggcaacagcatctccaaaagacaaaaacacgttaaaaaagaagactgttttagaattgccccagccaaactagtactgcgacaatcacactgttacagcaccaacatatactcgctacaagcacaaccacaaacttgtatcgggcattgatcaaacaaattacgctatattaacagctacgggcttccccctacccattgaaaatcctcttgtaccatccggcattcggggtccagggggttgcttggcaacgacttgatcagtgaaaattgtattatttgaagagggtgttcccacacgattattttgatgacaatgtactcggccacgtcccttaccccggccccggctacgaccttttctttgcccactctctttgtcatgaccatgctcttctcccaacatattcatgcagctgagtatcaggaaaggaagcatcttctaattgtttctcacttgcctgtggctcaggcacataaggagaatcctcttcacagccaacttcaacatcaagtcccttctttccccgtccttgagcaggtttagacatgcgtctaagcatcaggcgaacccgaaggctactccgccagtttccctcatcattcagctcagcaagagctctctcagtgagctcacaagattcatattcaacaaatgcatgcaacttgttagataaaggcatcccatcaacttttcccaatcttgaagcagaacaagccccactattggaagtttgaggtggacaggtacggatggtcttcacactcccaactgctgagaaaaccttcataagattctgatggcagtgatcctcaggtaggttttcagctacaacaatgcgagattgtagctcttctatatcagactcagtcaggggatactggcgtttgattttctttccatcttcactgaccacgagctttgacgagttccttaaaacagttgcaagttgggaatgactcgctatgagggccttaatcttcttgaaagatgcaacaacagatataggcacaaaaccttctggatctttgttgacgaacctcatcaaatgatcggtagtagctaagtttaaatcactgaaataatactccacctgattcaaaattttctgactggcttcgtcagacatcttgcttttggaagaaagagcatgatctgggtcaacttgagaatgctgcacggcagaatcggagctaacataatactgatgagggtgatgatgagagcggtagtgagccggaacatgatgctgatgagcaagatgatggtggtgattctggaccgggacgacatggccttgaatcggtacatggaactgtgaagttgggggtggtgagtaaacgtgtagtatacctgaagctggaggaggaggtggaggtggtacaacgagcctaggttgctgaaaatcggcccgtggggaggcgcgagtgggcacaaattctggtgcctgtgcgttgagccggctaaaagaaacgttccttgaaagagatggatctggctgcgattgtgcagtagacgaagggggcgagatatcgggggtttctgagagtgactcctgagccattttcaaagcttttctttttcgttttcttcgacgatctagctgccgatgttgtttagctcactattacagtcacactcttttgaaaggatagggaagtagcgggttcggagattttccgattctcactgcagactgcagctaagagaaatatcagaggttaatcgatattttttaacccctaaatcggtgtctttgacgacggagaaccattctcctgtcttctcccgggaattatggcctaaagcatagaatatgcgaatgccagtgctacttggtcctccaactacgagttaaaaattttcgcatgccaatcgaagaggacacgcacatatgcagttaaaaaccattgttctcagcatatcaaaggcatattaccaaaatgacccaaatcaaatttttctctgcgagaagacgacagaagggggaagggttcttaaactcgtgcgggaatgatttccaagcacacacgcactcacaaagacatatgctagaaactgtataatttggttatggagttaacaagggataacaaagagcctaagtgccgtgcaaaaaaaaaaacaaagagcctaagatgctaaaacttgcatactcttttggacaaaactcaggtacaacaccataaatactttagatgttttccaatcaaattggagttttatcttaatgcatgctgacatttaatgccaacctttactgcatgcattacaaataaaattctattttaattgaagaatagtacgaaaagcatcagtgatactgtacccaagttttgacatactcttaaaaagaccatgttatagaagaaggataaaagaccgggttttgttaagcctgatattgttggaattcaagaattccaattaacttgaaatggatacatgattcttctaattatttgctgttatgcaacaaaactttatatatcatgaacaatctgtcaatggaaataagcaaaagcacttaccacatattcatgcagctgagtatcaggaaaggaagcatcttctaattgtttctcacttgcctgtggctc

SEQ ID NO: 116033 - DNA, 971 bp, Glycine max
  Clone ID: PAT_MRT3847_75789C.1
gatacaactcctacatgaacgattttgatctataaatctaaactgttcggattgatttgaatcaattaatcactctggtcaatccttaaatttcttttttctactttctccgctgttagccataggccacagcatctccaaaagacaaaaaagaaaaaaacagaagactgttttagaattgccccagccagactagtactgtcacaatcacactgttacagcaccaacatatactcgctacaagcacaactacaaacttgtatcggcatttgatcaaacaaattacgctatattaacagcaaccggcttccccctacccattgaaaatcctcttgtaccatccggcattcggggcccagggggttgcttggcaatgacttgatcagtgaaaattgtattatttgaagggggtgttcccacacgattattctgatgacaatgaactcggccacgtcccttaccccggccccggctacgacctttcctttgcccactctctttgtcataaccatgctcttctccctgctaatttaaaggaattatggcctaaagcatagaatatgcaaatgccagtgctactttgtcctcaaactacgagttaaaaattttcgcatgacaatcgaagaggacacggacatatgcagttaaaaaccattgttctcagcatatcaaaggcatattaccaaaatgacccaaatcaaatttttctttttaagggctcaaacatgtttggaagggttcttaaactcgtgcgggaatgatttccaagcacacacgcactcacaaagacatatgctagaaactgtataatttggttatggagttaacaagggataacaaagagcctaagtgccgtgcaaaaaaaaaaacaaagagcctaagatgctaaaacttgcatactcttttggacaaaactcaggtacaacaccataaatactttagatgttttccaatcaaattggagttttatc

SEQ ID NO: 116034 - DNA, 331 bp, Glycine max
  unsure (1)..(331): unsure at all n locations
  Clone ID: PAT_MRT3847_7578C.1
gtttgatggctgaagagagacctttaaatttagggatcatggactcatgcctgagtcatggtgctcatctctctcgctctcttattttgggggcttcaaaactgccaattccacctttcacactgctaggccatgttacctttggatatctagtatccctgggttttggcgatggttcccatattaaattttgggaggacatttggccatctaggtgggtaaccttgctctttttaatgcttttccaagactcttctctatttctcccaatgcccctataatccaattntattttcttgcatccttataatccaatttcacccaaaggatc

SEQ ID NO: 116035 - DNA, 584 bp, Glycine max
  Clone ID: PAT_MRT3847_75790C.1
agtttaaatcactgaaataatactccacctgattcaaaattttctgactggcttcgtcagacatcttgcttttggaaggagcatgatctgggtcaacttgaggctgctgcacggcagaatcggagctaacataatactgatgcgggtgatgatgagagcggtagtgagccggaacgtggtgctgatgggcaagatggtggtggtgattctggaccgggacgacatggccttgaatcggtacatggaactgtgaagttgggggcggtgagtaaacgtgtaccatacctgacgcaggaggaggaggaggaggaggaggaggaggagaaggagaaggagaaggtacaacgagcctaggttgctgaaaatcgccccgtggggagacgcgagtgggcacaaattctggtgcctgtgcgttgagccggctaaaagaaacgttccttgaaagagatggatctggcagcgattgtgcagtagacgaagggggcgagatatcaggggtttctgagagtgactcctgagccattttcaacgcttttcttttcgttttgttcgacgatctagctatgacgttaagctaacttttc

SEQ ID NO: 116036 - DNA, 652 bp, Glycine max
  unsure (1)..(652): unsure at all n locations
  Clone ID: PAT_MRT3847_75791C.1
gttcgtcaacaaagatccagaaggttttgtgcctatatctgttgttgcatctttcaagaagattaaggccctcatagcgagtcattcccaacttgcaactgttttaaggaactcgtcaaagcttgtggttagtgaagatggaaagaaaatcaaacgccagtatcccctgactgagtctgatatagaagagatacaagtaatttttactaaaatgtgtgaccgactttaagttgtgcaagacagtttactaatgttgcatttgcttttccttaaaacaagcaataccatttgatgggttctatcatgacccatgcatatcatgtattcttttcaaaatattttattcaaatatgttgttgttgttaatgatgtttggtcttatttcttctctttctttgtctcacatctagcaatttttatttttctggggtagtctcgcattgttgtagctgaaaacctacctgaggatcattgccatcagaatcttatgaaggttttctcagcagttgggagtgtgaagaccatccgtacctgtccacctcanacttncaaatagtgggcttcttctgcttcaagattgggaaagttgatgggatgcccttatcttacaagttgcatgcattttgtgaatatgaatctgctgagctggctg

SEQ ID NO: 116037 - DNA, 176 bp, Glycine max
  unsure (1)..(176): unsure at all n locations
  Clone ID: PAT_MRT3847_75792C.1
ggggggggggcggttttatactataatttccattttggttttaaaacagctgtctccccnacctccaaagtgttttacacccgcgcgcatttatacttttgggttggccacgctcgcccaagcggccctatttcctaccccctagttagacatcccggcccgctgggtttcctact

SEQ ID NO: 116038 - DNA, 330 bp, Glycine max
  Clone ID: PAT_MRT3847_75793C.1
aattcgcgtggcggaacctgggaatgtccgaccgtttcctgaccgggtcctatctgcccttaatgtgagcttatagagagcttgtatagaaacttggctataactgggtgctgcgtgattccgtgatgaaatcagaatcccatacacaatacaacccggatacataccgtgaaaatccaggggagcctaatgggtgcgctaacagagatcaattgcattgcgattactgtgcgctaactagtcggttaacgtgtggggaaagctgcgtgcattattcgttcacgtaacgggcagaggctgtggtggtatcgctcaccaagacggctccac

SEQ ID NO: 116039 - DNA, 323 bp, Glycine max
  unsure (1)..(323): unsure at all n locations
  Clone ID: PAT_MRT3847_75794C.1
gggctgaaaaaacagacagaggggggacgaaaccaaacgtatcattaacacctcattgctgaagaagtcgaaaggtcgcatcctttcttcattctatcccttgagttgaaaactctttttccacattcttttatttcttgtctcacccgaaccatgctggcgtacccactactgtgattggtgtggcgacacttgttccttttgttttgtgcgcagccaccacttntcccaaccactgtcttaaatactgtgtgggggctccgacacttcctctacantttgcttgctcctgattaagccgccactttctctctctctccttt

SEQ ID NO: 116040 - DNA, 592 bp, Glycine max
  Clone ID: PAT_MRT3847_75795C.1
tagagcgggcgcttttttttttttttttttttttttttttttgcacagcaaaaatcaatatattatatattataaaagaattcagtactaggtgtactgaagatacaaggataaaagcaagctagttacaaagacggccccactagtaggaaccaaaagcaacccacagagccatacaaacccaacccctctaggagaaaacatcctttaaattggttgaccagaagttaaagtgcatttgagagtccttctctgcacattttagccaagaccaagtatggaacaaggtatcatccataacctttccagggtcaaacggctggttcttgaagatcatggcatttctatgatgccagatggagaaggatagagctaaccacagaaatttccatttgttgtttatactagctttgttgttccattgagtgaattgcaaaaagtgggttcttttgggtctgtggaaaaaggacccactctattaacccatctcaaaggctcccaccaaagtcttcttgtcattgtacaattgaaaataagatgattaatcgattcttcttcatgatcacaaagagggcagctataagtaggcatt

SEQ ID NO: 116041 - DNA, 515 bp, Glycine max
  Clone ID: PAT_MRT3847_75796C.1
aatctataccgtggcttgagtcgccccgttttttctgtatcgtgcagggttgccgaacttccttaccctatggagagtcagaccacagctggaccatggcgtggccagaactctgtcctgactggattgagatcacaccccaattccacataatatacgcaccccaaacgtgaagagactagagtgccctgcgagttaacagacccaacttactataattgcgcatgcgcgctctccccacagtacagtggggaggccacgacccccatgttgctgcttggatcagtctccccgcgaggagaggcgtaatgcggatcgcccgcgggggtgaattctctgatttgcgccgcgcgagccatcatatgcctgccctgcgcagcccgggcctgacagagttgtagaggcctggccacgatgacctgccacaccaggggatcatgctacgtggtgctgcttggcgataggacattacatgagcgggatatggtagtatccaactacagtaacccgagatc

SEQ ID NO: 116042 - DNA, 146 bp, Glycine max
  Clone ID: PAT_MRT3847_75797C.1
gacgtgaagttgaatccttgctgatgcccatcatgggaactacttttcctcctcactctcgctcgggaagcgtcaacatcaaatcttcagccgcaagaattctcttgggtccctcgccgcaaaccaggtcaggttctctcttttgg

SEQ ID NO: 116043 - DNA, 240 bp, Glycine max
  Clone ID: PAT_MRT3847_75798C.1
ctcgagccgctctgattccgatataatcgatccatagagagcctatgattagtccaacacgcaaacgttcagaatatactggcggatgggatataggcatgcgatctggttagggaatggatgtctggaaaagctttatcgatgctaatgctagggctggtggtacatattatgaagttaatatatgactctgggatcgacatagtattcattttgtgatggggataaggtgttttccag

SEQ ID NO: 116044 - DNA, 184 bp, Glycine max
  unsure (1)..(184): unsure at all n locations
  Clone ID: PAT_MRT3847_75799C.1
ggaacgnangtttntcgagagantaatatggtgantgttggatgtcaagcaagtaagaaacgatgcttcatgtcgtctancgngttggtgaacntgnatcgnaccatnaagtttttananctggacncttgggggaccaataaagnttggggggcnaaaggnngatgggnttnaagggtttgaa

SEQ ID NO: 116045 - DNA, 498 bp, Glycine max
  unsure (1)..(498): unsure at all n locations
  Clone ID: PAT_MRT3847_7579C.1
atggggctgatcgagctaangaggaggggtggcggcagggaggtggcgaccccctggcgaagtcgcccaacgtctcgtatttgcccggggggcagaacttgctcatgggtctcgggccttcgcggggatcattgggggggggatgggctcaaagatgctgtgtgatgacatgcttggatcatggtgggggtggggttttccnttnttgggaatatttttcttgggtgttcacttggagactctctcatttgagcatagttcataatgagtttaggagggggataaggtagaaatggatttggaccttcgttttttcatggggaaaggggctgtttagttgcagaggaataactatctccaaaggatataaggggagagagggacttgaatacttgattgggtgggtaatgtggggtctttgaccttatcatcaatttaccgaagtatttcaatacaggcggggccttcgggtcaattttatttgggaatttgggtttt

SEQ ID NO: 116046 - DNA, 280 bp, Glycine max
  Clone ID: PAT_MRT3847_757C.1
ggctacgagagcaacataatggtatagctagatctaaaacaaatgcagacgttgagctgctgggaatgctgtatgcatgtgcagacacactagtgtaccttgaacaaagatgcacagttacgtcatgaaccgatgcaagctgacactattgtcatcgcagatcacatgatgaagaccagaggtgacaataaccttgagtgctacaactactacatgggtgacatttactcacagttcgcgagcatcttacgttcttgatagcgaaacttagcatcatagt

SEQ ID NO: 116047 - DNA, 273 bp, Glycine max
  Clone ID: PAT_MRT3847_75800C.1
aaggccaaggccatcaatctttatttggggaggagaaacataaataaaactcaggaaaggacttgggaaaacccctacgggctttgggaaagaaatatactcaaaagttttttttttcctttagggctttcaaacgatcaaactttaaaaacaaaactacgttggaaaactaaggtttaaaaacaaattttaacacaaatctcatgaaaggaaaactttgttacacccctactggttacgggaaagcaatttactcagcagcatttttttttt

SEQ ID NO: 116048 - DNA, 297 bp, Glycine max
  Clone ID: PAT_MRT3847_75801C.1
caaacaacgaaaggggggttgttttattttggacgcctatttaaaaaacattgtccccccaccaaatgctgaacctcccccctaatctgtagtgaatgaccgactatcattttgctatggaaacaagcttttaatggcttaataatacactctatacatgccgggccttctcattttctcttttggataagtgccaccactgtaacctccaaaatgccctaaacgctttctgcacataagggggaacggaatccggtttccaactctgcttcaaggtggggctccctcttccactgt

SEQ ID NO: 116049 - DNA, 488 bp, Glycine max
  Clone ID: PAT_MRT3847_75802C.1
ggttagcggtaaatttcatttcatttcatcaaaaaaatgggtacattacaaagctttcttatatcacaaccaataacgcgccctaaaattcaaacaaagagggccccaagaggtttattttaacccaaacaacctatgccccgtctgattcaaacccaggcttcggccaacgtacgagctcggacccatggaataattcgttatatgcccaatggggacataacacaacaaaaacaaattaaccgggtaagaaacaaaataacaaacatgtaccacgtattaacgagggctgcctgaatggtgggaaccactgaaaatttaattaaattaaatgccaccaagggactctgggggggccactgggaaccctgacttatccctacaatatgacatagataacatggttcaaacgaacccacctgtacctttttggttcaatggagttaagggcttggaatgctggcccttcccaacagttacttgggttg

SEQ ID NO: 116050 - DNA, 243 bp, Glycine max
  Clone ID: PAT_MRT3847_75803C.1
tacgggcgagaagacgacagaagggatcattcacctttttaaatattcttttttctttattattttgaatatatagtagatcacgttaagatagaagcaattaacaaatcgttattttgtgtttttttctgttataatgtgaatcctactaacacacgattcactgtatcaacatgcctgtgatcttatcactccttagcacttctacatgattcatgttgtttgaagtatatgcacaactaa

SEQ ID NO: 116051 - DNA, 288 bp, Glycine max
  Clone ID: PAT_MRT3847_75804C.1
gacgtctttttttttttttttttttttttttttttttgtttttttttttttttttttttttttgttttttcgtgttaaaaaggaaaatactttttttcaagcaaaattcgcaaaattattttttgacccccccccgttgcaaatgtcttgtggggcaaaaatatattctgttagggcccaaataacaggttttcaactttccggggcaaacccccaaacaaaactaacggaatttaatcttaaggggccctggttcacaagagaaaataaattctcccggccgggggg

SEQ ID NO: 116052 - DNA, 227 bp, Glycine max
  Clone ID: PAT_MRT3847_75805C.1
caaagattctatatatttcccctacactacgattattaggagaaagagagaaacaatggagtctggatcaatgatcaattagatcttgagcagatgatcacaagactaattcaggaacttattggaggatgatggcgaggtgtccactttctatttgagattttttttcatttttacaagatagctaaaaacaagtatttttacaacctatccaagataaagacata

SEQ ID NO: 116053 - DNA, 549 bp, Glycine max
  Clone ID: PAT_MRT3847_75806C.1
cccatcgctctcttcctcggcggtctcggtctcttcgcctttctctggtcgctgaaaagcggccagtacgaagacctcgacggcgccgcctggcgggtgatctcggaaaatgatgacaggcccgacgcttgatacagcgtttaccggacggtcaaaattgactcttgccgcatcctctcgcgaatgcgagaaagccgcatccatgaatttgcatgcggaggcttcatcgtgcagcaagcggaaatcggactgatcggtctcggagtcatgggctccaatctcgcgctcaacattgccgagaagggcaatcgcatcgcggtcttcaaccgcacgcccgcccgcacggatgagttcctcggcgaagccggcgatctcgccgaccgcatcatcggttgccacacgatcgaggagtttgtcgccgcgatccgcccgccgcgcccgatcatcatcatgatcaaggccggcgaggccgtcgatcagcagatggcagcgcttctgccgcatcttgccaagaacgacatcatgatcgatgccggcaatgccaacttc

SEQ ID NO: 116054 - DNA, 250 bp, Glycine max
  unsure (1)..(250): unsure at all n locations
  Clone ID: PAT_MRT3847_75807C.1
tgatatagcatttcnctgatgangtgcgttncntggtgcttggtctaaaagcgcaanncattttgggttcgggaaagaangctgaagagaagggnctagaacaaccacaacactacggattgaatattgaantaaacggacggctcatanctangantgccgagangaagaaaccaaangacgccntactncaacgaacgatttcngcnncctggncggntggancnntanttcctgnangcccanacng

SEQ ID NO: 116055 - DNA, 370 bp, Glycine max
  Clone ID: PAT_MRT3847_75808C.1
ctgcgagaagacgacagaaggggatagagaagtaggaacttgatacttggttgcatcacattttgagttaatcgattgcatgagtaagactaattgcatactaatgagtattttcgtgaattgttgattctcgtgcaagcagacgtcagtgtaagtgatggagtgtgaactaatagcacaagaatgaaaaagttagtatttttgacaaaaaagcttggaataagaacctgaatacttcaatgaaaaccggtaagttgtgtgatctttaaattgtgggagaacaactagttttaatttcttgattttgcatgaattttggattgcttgaaatgtatgtatgatgtggagataatcatgaccttatttggta

SEQ ID NO: 116056 - DNA, 566 bp, Glycine max
  unsure (1)..(566): unsure at all n locations
  Clone ID: PAT_MRT3847_75809C.1
taagttgaattgctatactagatttggctcccttagtccaacagtttatggacaaatttcattataaattcattttcctttatattttccgtagagttgtctagtgcattatgtttgctttcttcagccaagttctgctctttatataagcccattagcccattcttgtgccaaaacacaattgtagttttttagtttttcaacagtcattctataggagctttattttaaagataaataaataaaagggatgagagtggttcatatttactcgcatcagcatattactaatactgggaactagcccttaaatctgatatctccttgattttttctttgacatcatccctgtagagagaaatctgtatttgtgttatatcagtggcaagcactgtcaaaagaggtcttgttattaacaaggaaaagtgcaagtatctgtctagtaccaattattcaagctgcactatagctatatgcaataacaatcatcgtagaaattaagaactaacattaatatcccaacattcctcagtgaatntcttcttcaacatgcataattaaacaca

SEQ ID NO: 116057 - DNA, 232 bp, Glycine max
  Clone ID: PAT_MRT3847_7580C.1
ttgatacctgtgtgtgactgtggggctctgtggtaacaaccttcactttagtgttgtgccagctaaaatgcaaggaggatttgaatattttttctcacaagaatgtcattagaaatgctggactacaacggtggcccatggtgaaccccctgatacagccaattgtctcttaccggtatgaatctattacaccgtgatcgcaatgaggaccatggatgtgacgagcaccaca

SEQ ID NO: 116058 - DNA, 1188 bp, Glycine max
  Clone ID: PAT_MRT3847_75810C.1
atggaagacctttttaagaggtggagtgaacatcttgacaacacatgtttaagggtcagccaaccaccattgaaaaattgtgatttttgtggaggagagcattacaatgataattgtcatatgtactccatgaataactttgggtggggacgggagttaagtccttataatcaatatgaagaagaaagaactcctagtcttgaaagtgtgtttgaagaattcatggcataccatgctagctctaaagccgatcaaacttcaatgataaatcaggaacttcaatttggcaagagctactccatagaagattaccaagggggactcaagttacaaccctacaatcaaaatgaagcagaaagaggttccaatctggataatttgttgatgcaattcaaggaaacaactgaatcaactcaacaaacattcaaaagtgcagaaattcaggttggtaagctagcagaagaagtgactcaatttgtggccagaagagaagaagatttggtagaggttgaagctcaagaggaaagccctgtaaaagagcatgaatcaagagaaaaagatgaagagaaaggtgaggaaaaagtgcaacaatggggggagtactcaacagtagaaaatcaacaagaaaatgcgctaagcgcaagggctcttaaaactcaaacgtcatatgggcacgctaagcgcagctgtgcgctaagtgcaccatacgaaactgccaaatattataaggccattcattgcatctaccctcaacttgcttcatttccctgcattcctgcacctttgctattctttgcattcatctacacaatccaaaggaacgtgctaagcgcaactgtcgtgctaagcgcgttcatcttctctattgagttatctcttgaactcgctaagcgtggttgtgcgctaagcaagtactatatggcttctcgtaaaaggaaggcaccaacttcagtgtcccaggcacgatatgacagatcaaaattcacattacaagatacctgggacagatatacagacaatattcttggccggaaaatccttctggaaaggaatgtgaagttgttctatgccgaatctgatgaatttagaagggaagttgagaggaggaactggcataaggagctcactaacttctcagagggaagcattgatgttgctattattaaggaattttatgctaacctctaa

SEQ ID NO: 116059 - DNA, 284 bp, Glycine max
  Clone ID: PAT_MRT3847_75811C.1
aaaaacggaggggaccaaaaaaaattcggtaaatgcatatcaaaaaacaagctggggataaaactgactaactcctaaaaatagtcacaataagcattagcatgatcaaaaaaacaaccaaatttgggttttttattcctttaaaagggttaaaaaaggcctccaagaacccttatttggaactacacaaaagcacaaataaacgtagaaaaacaatccattaaaaaagaacttttcatccaaacggtggcttgaatctaccaatgggtaaacaaaaaattcca

SEQ ID NO: 116060 - DNA, 349 bp, Glycine max
  Clone ID: PAT_MRT3847_75812C.1
cgaaaatcataaagtttaatcttgacaatatttaattttacatttaatttaaccaaatcagaggggttaacaccctataggtgattacacatatttcatacaatttattaaccaaaattcatatacacaatcatatcaacattctgacaaaaatttacaacaactatcacatctatatactcctatcctataattcactcatctaatattaatccacaataacccagatacctatatcgatcatatgttaaacatttcatactcatcaaccactatacaaaatgcacaaatattactagccttttacaattttacatctagaaaattcatatgtatatatataattcac

SEQ ID NO: 116061 - DNA, 733 bp, Glycine max
  unsure (1)..(733): unsure at all n locations
  Clone ID: PAT_MRT3847_75813C.1
ttttggtgaaaagggaagaatattttttttatttggtggataacagaaccgagaaacaagatggggaatggaaatgaaaacctttgggttaaagaaggggagagaactggaacctttggggcaaaccccaccctggattattacacccttctttttttttccttaccgaactaccttacattacattacctacccttccttggtggttttggtttctggttggttccctggacatttatatatgcatatatatccctcatctatatataccccgatatttatattatgtataattgctacacccacatgcatttggatccatggacacggaccaccacaataattaagaaaaataatagntataattgaagaaaaaacaagaaaatgatccaagtaggtatttgaatatntgttttctttgttcttgtaaaacaaaaacaaggcatgtgtgtgaggatataaggctgngtactacgaggtgatattattgcaagggatattcttttagcttgctgaggccgataaccgagacactgacaactcctggacgtggcagatcgggggattgagaaaatctgagccagctgctatgctggtaggggacgtgcgtgaggattaatgctctctgggctggctacaacctcaatgacccagtcaccgnacgcggagtccaatgacttacttgcggctcttgcgcctcggcttttgggcgcagtcagactcttaaaattca

SEQ ID NO: 116062 - DNA, 434 bp, Glycine max
  unsure (1)..(434): unsure at all n locations
  Clone ID: PAT_MRT3847_75814C.1
ttttggtgaaaagggaagaatatatattttatttggtggataaccgaacagagaaaccagatgggaaatgaaaatgaaaacatatggataaaagaaggggagagatctgcaacctttggggcagaccccaccctggattattacacctttctttctctttccttaccgaactacattacattacattacatacacctccttggtggttttggtttctggttggttccctggccattatatatgcatatatatcccctcatctatatataccccgatanttatattatgtataattgctacaccaacatgcatttggatccatggacacggaccaccacaatanttaagaaaaatnatagtaataattgaagaaaaaacaagaaaatgatccaaggaggtatttgaatatttgttttctttgttcttgtaaaaca

SEQ ID NO: 116063 - DNA, 136 bp, Glycine max
  Clone ID: PAT_MRT3847_75815C.1
attcaacgcaccattttattccccacttttagaaagttagtccaaactgaccatatgctaggtacctattcaagacgcccgctgtcttgaacttggcaataacgcttctagttgcctattgcctcttccttatagg

SEQ ID NO: 116064 - DNA, 303 bp, Glycine max
  unsure (1)..(303): unsure at all n locations
  Clone ID: PAT_MRT3847_75816C.1
cgcangcacgcgtacgtaagctcggaattcggctcgagnacggcttcncgtntnncntggnctccgttggggtancggnntccgacgacctccgtcggcgnnacctntnngcttttcaacgcnaccaccancangcnanctnccccgngaatcatgntgncgcggtggngttcntcacnntaatcggcnccancganccnncgacgaantncgnnggngtggacganaacnccctnacntcngctgcgtncngnaacttcgacatcgacganaattcggaaagnagggctacaccttgatcan

SEQ ID NO: 116065 - DNA, 475 bp, Glycine max
  Clone ID: PAT_MRT3847_75817C.1
acggctgcagaagacgacagaaggggttatagatttattagtatactattatgcgttaaatttatgtttaattggatcaaatatttttgtactctacaaaatcaaaggaaaataaataagttaaaaaaggaaattaattcatgtttcacattaaaataaaataaggggatgtactaaattgatcttcttacaaaattaacacataactttctataatttggtataggtctttaaagtaacaacaataataacaaacgagaaggtaattgaaatgaaaattatctttttgaaacttgaagtgcaatgtaacgtgaactaaacgggatgatatctcaagtagaattcatttatttaattagttcaattttttcaagtccatctaatttgatttatgaatcaaattaatgaatcaatttccaaattaagtctcaaattaatttcaaatcaatttgcttcaatatctaatcttgtaggc

SEQ ID NO: 116066 - DNA, 732 bp, Glycine max
  Clone ID: PAT_MRT3847_75818C.1
gctaatttctctcgttgtcatattctagtttcaacttatggagtttacctctaataatatgcttccttttgtttcaatgttttggcttgtgttcctaagtcctttagtgaactgtcaactttattataatttctatgactctacttgtccaaacctgaccggaattgttcgatccaacgtgtggtcagctatggccaaggatgcaagaattgctgcttctctcttgcgccttcatttccatgattgttttgtcattggatgtgatgcatctgtgctacttgatgatacgggcactttaaagggggagaaaaacgcactgcctaataaaaattcactcagaggatttgaggtcattgacacaatcaagtctgcattggagaaggcttgtccatccactgtgtcaggtgctgatatacttgctctagcggcaagagaagctgttaatcttagtaaaggtacattttggtatgtgcctctgggtcgtagagatggtacaacagcaagtgagagcgaggcaaataacttgccatcaccctttgaacctatagaaaacattaccgccaagtttatatccaagggtcttgaaaagaaggatgtggcagtactctcaggtgcacacactcttggctttgctcaatgcttcacgttcaagcctaagctcttcgactttggtggctctggtaaatctgatccagcacttgatgtttcactcctaccaaatttattgaaact

SEQ ID NO: 116067 - DNA, 593 bp, Glycine max
  Clone ID: PAT_MRT3847_75819C.1
aatttctaaattgagttgttagctaatttctctcgttgtcatattctagtttcaacttatggagtttacctctaataatatgcttccttttgtctcaatgttttggcttgtgttcctaagtcctttagtgaactgtcaactttattataatttctatgactcaacttgtccaaacctgaccggaattgttcgatccaacgtgtggtcagctatggccaaggatgcaagaattgctgcttctctcttgcgccttcatttccatgattgttttgtcattgtaaatatataagctgtctcaattttagttattcttttagttgggataattttatagattttttacatgtgctgcttctttcattttttgttacaaagggatgtgatgcatctgtgctacttgatgatacgggcactttaaagggggagaaaaacgcactgcctaataaaaattcactcagaggatttgaggtcattgacacaatcaagtctgcattggagaaggcttgtccatccactgtgtcatgtgctgatatacttgctctagcggcaagagaagctgttaatcttaataaaggcaccattttggaatgtgc

SEQ ID NO: 116068 - DNA, 446 bp, Glycine max
  Clone ID: PAT_MRT3847_7581C.1
cccacgcgtgcgcaacactatgaccctctcactatcagtctcactaactcccttaacttagtgaaaactcaaaacactttgcagtttcactatgagctaccacaagcgccaacagcacgacccatgggttgcacggcgtccaagctcgcaaaccaggacaccgtgcagccggtgcaagggagcggaaccacctcatgaacgaggcggtctacgcgcgccatgacctctctgatgtccactgcgactactgccggaccgtctgcctcatcggctccgtcctctccagcttatccgtctgcgaatccgtctacagttgcgaccacactctcgacgtcttccataacaaactccaacaccaccaacaacaccgtcgacaacaccgttagttaacccttcaccttcgcctacgctagcgacaaaactcgccagcagcaacacacggcggc

SEQ ID NO: 116069 - DNA, 233 bp, Glycine max
  Clone ID: PAT_MRT3847_75820C.1
atgaaaatgagtttcatgaataatatgaataatagaatcagaacatgacattagatgtttagatttttggttgattatgagctcattgtttacattagttgatttgcataatttccatttaaatgagttcaataaaacaaatttgacatcttgaatcattacactaatgtctaccatggtgtcaaacgaataactgcaggggaacgggcatttacgcattgggtaggcccggg

SEQ ID NO: 116070 - DNA, 441 bp, Glycine max
  Clone ID: PAT_MRT3847_75821C.1
gatggtcatgacggagtagttattccacttcgctttcacaaggtcagatactgggtaactttgagaaacttattccctgcgacgattgtgttgagctgatggttgccattctagttggtatgggccaccttcagcggcagggatcattgctgacggattctttatttacgacatggaagactgctttccagaggagtaatttcacgagagaaatttactaacttgtgatatcaacatggttgtatagcttgtgctgaatcctgacattagaaacgttgatgcattgactgggtacaccaatattgcccagaaaaaggatgtgattcttcttaaaatgagagaaagcccttatacatgtccaattcctttctactgaaggtctgaagctactcgagggcatactatattccaaaaacggagaatgggatactaatattgact

SEQ ID NO: 116071 - DNA, 1808 bp, Glycine max
  Clone ID: PAT_MRT3847_75822C.1
ggctcgagtctctctctctttctctctccctccaggctcaaccatggcttcttccacttgctggatctctctctcccaagccctcctccgccccaccaccacctctctcccctcctcctcctcctccctccgcctcacccccactctccgccctaccccacccgccctcttcctccgccgccgcctgaccacctccatccgcgccgccgcctccgtcagaaccgtcgagaaggcaaccgcggacgccggtccggattcccgggtcgacccacgcgtccgggaggcagagaagtaagaagaagatagccagaagtataggctaagattgtccacaacatgtggatagcaggaaaaacgagtgtatagatcaacaactacccttcccttttcttctatcactcccatcactcttcttcttcttcttcacttgtacactcttcaaccactcaacaaagtggttggtttttggttcttaagccatggcatccacatcctctctgcatctatctcaggcccttctggcacgtgctgtgtaccttcatggctcttcttctgaccgtgtctcactctccttcccatcattctctggcctcaagtcacattctccatgcaaagcagcagccacgtcctcacgtagaaggggtgcttgcgcttccaccagcgttgttcgagccgctgcggttgagacactggaccagaccactgaggtttctctggtggagaaatccgtcaacaccattcggtttttggccattgatgctgttgagaaggccaactctggtcaccctggtctccccatggggtgtgctccaatgggtcacattctctacgatgaggtcatgaggtacaatcccaagaatcccacttggttcaaccgtgaccgtttcattctctctgctggacatggctgcatgctccaatatgctctccttcaccttgcaggctatgacagtgttctggaagaagacctgaaggaattccgacaatgggggagcagaactcctggacatcctgagaactttgagacccttggagttgaagtgaccacaggtcctcttggtcagggcattgccaatgctgttggattagcactagctgagaagcacttggctgcacgatttaacaagcctgacaatgagattgttgaccattacacatatgttatattgggtgatggttgtcaaatggagggaatttcaaatgaagcatgctcacttgccggtcactggggtctaggaaagctcattgctttatatgatgacaatcacatttccattgatggtgacactgagattgcattcactgagaatgttgatcagcgttttgaagcacttggatggcatgtaatttgggtgaagaatggaaatactggatatgatgaaattcgtgcagccattaaagaagcaaaggctgtcaaagacaaacccactttgatcaaggtaaccactaccattggatttggttctccaaacaaggctaattcctacagtgttcatgggagtgcattaggtgctaaagaagtggatgctacaaggaagaatcttggatggccatacgagcctttccatgtgccagaagatgtcaagaagcattggagtcgccatacacctgagggtgctaaacttgaagctgagtggaatgccaagtttgtggaatatgagaagcaatacagtgaggaagctgcagagctgaaggctattattactggcgaattaccagctggttgggagaaagcacttccgacatacacaccagaaagccctgctgatgctacaagaaatctgtctcagcaaaatctaaatgccctt

SEQ ID NO: 116072 - DNA, 432 bp, Glycine max
  Clone ID: PAT_MRT3847_75823C.1
ttcttcttcactctacaaccactaaactaagtggttggttttggtttagtttcattttggggaagctcttaaacttaaggcttaagccatggcatcctcatcctctctgcatctatctcaggcccttctggcacgtgctgtgtaccttcatggctcttcttcttctgaccgtgtctcactctccttcccatcattctctggcctcaagtcacattctacatgctccaatatgctctccttcaccttgctggctatgacactgttcaggaacaagaccttaaggaattccgacaatggggaagcagaactcctggacatcctgagaactttgagacccttggagttgaagtgaccacacgtcctcttggtcagggcattgccaatgctgttggattagcactagctgagaagcacttggctgcacgatttaac

SEQ ID NO: 116073 - DNA, 894 bp, Glycine max
  Clone ID: PAT_MRT3847_75824C.1
ggaggcagagaagtaagaagaagatagccagaagtataggctaagattgtccacaacatgtggacagcaggaacaacgagtgtatagatcaacaactacctttcccttttcgtctatcagtccaaacactcttcttcttcttcttcttcttcactctacaaccactaaactaagtggttggttttggtttagtttcatttttttgaagctcttaaacttaaggcttaagccatggcatcctcatcctctctgcatctatctcaggcccttctggcacgtgctgtgtaccttcatggctcttcttcttctgaccgtgtctcactctccttcccatcattctctggcctcaagtcacattctacatgcaaagcagcagcagccacgtcctcgcgtagaaggggtgcttgtccatccaccaacgttgttcgagccgctgcggttgagacactcgaccaaaccaccgaggtttctctggtggagaaatccgtcaacaccattcggtttttggccattgatgcagttgagaaggccaactctggtcaccctggtctccccatggggtgtgctccaatgggtcacattctctacgatgagataatgaggtacaatcctaagaaccccgcttggttcaaccgtgaccgtttcgttctctctgctggacatggctgcatgctccaatatgctctccttcaccttgctggctatgacactgttcaggaacaagaccttaaggaattccgacaatggggaagcagaactcctggacatcctgagaactttgagacccttggagttgaagtgaccacaggtcctcttggtcagggcattgccaatgctgttggattagcactagctgagaagcacttggctgcacgatttaacaagcctgacaat

SEQ ID NO: 116074 - DNA, 180 bp, Glycine max
  Clone ID: PAT_MRT3847_75825C.1
gcaattgcaataaaccaacgtttaatagtggctgtctcgtttgcttggtcttatgtgtctctcatagttgtcgctcttttgctttctcgtattgttctctcatagtgtctctcttgttcttcaatcaagagaagatagaatacaccctgaagccatggaaggtggtgtgctagaagctga

SEQ ID NO: 116075 - DNA, 478 bp, Glycine max
  Clone ID: PAT_MRT3847_75826C.1
ttttggcgttcgacctgtaccttgatcttgcttctggtttgcacttctgcaacatcttcactctggtcaacctctgttctgcttgtgttgtggaacgtccggagagacagaatgatcgagtgaggacgtggtgcctgatttttctaagcaggctttctaacagacatgcagattgcacaggaatggggtagctttgttccattgatgatgtctctttttatgcatagctttatttctacctttgctgttttgtaggctctcttatccttcaaattccttaaaattccttatcttgatcttaatgaattccttcttttattaaaacaattagcatagagtaatatcatggctatgtagaaatctggtgaaagatggacaggggatagtcaccagactcttaatttaatgtgatgtcatcctcaatttatgttggtacacattgtggcatcaaagatatcacttaagaaagagatggatt

SEQ ID NO: 116076 - DNA, 261 bp, Glycine max
  unsure (1)..(261): unsure at all n locations
  Clone ID: PAT_MRT3847_75827C.1
gttaaaagncttagncttcnntanaactccanacaggnaagacatcntcatgtcatggctgcctccgttctccattgtcggagcngtcaacagagctctnntgaaccngaatggttctggagntggagctcagctcnnagttcagcctnctttgggaccagcttgaagaaggttattgtctcaagggtccngaacagcaaggttccggtgnaagcttcaagattgtgcttanaanggaaaacagtttgaaggggcccaccc

SEQ ID NO: 116077 - DNA, 322 bp, Glycine max
  Clone ID: PAT_MRT3847_75828C.1
ttgttaaggccgccaaacagcatgaggcttaccctgtgtacccttaggggtcccacatgataagcactagaacctgatagaccgcgcacaagacgggcacaaagaggggagcataacagagcgtgatcttgcaatatgttacaaggagtagaatgatggaccaacttagtaatgagggtaccctcttgaaacgaaacatggaaacgcccggattcaatcaagatcagggcatccctcacgggggagcggagcacactgctagagaactgcataaaaaagtgcctgatgcagctcctgctaaacatgtactagctggcggaca

SEQ ID NO: 116078 - DNA, 803 bp, Glycine max
  unsure (1)..(803): unsure at all n locations
  Clone ID: PAT_MRT3847_75829C.1
gcgttccttcataaactacgttaaccatccctattcttcattactctcatgttcttcgtgactcacacatcagtttgaatcccgcattctataatcttctttcattgaaaccgctaaactaaaagtatttttttctcttcttttaaaaccttccacacacatcgttaaatattccatatttgtattctgtcctttcataattataactgatagttttcttcacgtttcaaagcaaggctaatttcttgtctttgtcgtctatatagttttgaatcattttctttttgttcttgtttcttcttgttgcccatttttccatggctcctccaaacaatccagtgaattccaccttgggatttaagtcactggaaaaggtttttgatttatgtgacgggaaattcaccgtgagaggtgtgccattactctctcaggtacccaataacgtcactttcagttccttctcctcaatctgtgaaccccgtgacgccccaccttccatccttcaacgtgtcattgccgtgtcacacaaaggtggcttcttcggattctcccaggtttctccctccgacagattaacaaactccttangtagtttcagtggcagaaacttccttagcatcttcaggttcaaaacatggtggtctacccagtgggtaggaaattccggttcagaccttcaaatggaaacccagtgggtcctcatagaaatccccgaaataaaatcctatgttgtaatcattcccatcattgaaaaatctttcaaggtcgcacttcaccctggctctgatggcatgtcatgattt

SEQ ID NO: 116079 - DNA, 289 bp, Glycine max
  Clone ID: PAT_MRT3847_7582C.1
atggaaaatgggggggaattttgaacaattacaagagtgtcccatatgaaatttactcctacaatgacccacacatgagggggaaaaaggcgaacatggttaactaatcatgatggggatcatgctgctggtgatggcttcctttgcggatataaacggacgatgactcttgcgaatcacaaacctgtgttttaaacgctctacctaatttccgttcccagctactcccatccaacctccgactttggctgtaaacttccctaacttggaaaagactgtcttcatttac

SEQ ID NO: 116080 - DNA, 261 bp, Glycine max
  Clone ID: PAT_MRT3847_75830C.1
attgtgtgctttacttatttatttttttattacaaacacaacagacattttttcattttggccagcatactactctattaaataacactgccatggcagagaacaaacattcctcacaggatattattctgtaacgcgtaaggaactacttgcgtattgtacatatatcacttggtcacaacgcaccaacaaatttttttttattcacacaaacctgggaaaactataggaggaacgtattccttactcataccttggggg

SEQ ID NO: 116081 - DNA, 394 bp, Glycine max
  Clone ID: PAT_MRT3847_75831C.1
gccaaatattaatgcagctagctagcatagtaattcacgagcatgaagaaggtaagtaatttgttgcatacgttgaaaccagacatcttaatggtgtttgtgcagattgcatttgctgctgtgaatgtgatgtacaagctggccataaatgatggaatgagcatgagggtagcttctgcatatcgccttgcttttgcttcggctttcactgtccctgtggctctcgtctttgataggaagaagagaccaaagattacttggagggtgcttttattggcatttctgtgtggattggtttggggaagtttatttagtaacctttacctcgaagccatggcttttacgtcagcaacgtttatgttggccatggtcaaccttatccctggcattacct

SEQ ID NO: 116082 - DNA, 755 bp, Glycine max
  Clone ID: PAT_MRT3847_75832C.1
tccggaagaagaccacacaaaaccagagtctttaactttctttctctgcttcgactagctaattagaaacatgaccctaaacttcttagggttgattttctttcccttgctagtgcctgccttgcttatcatcaacaatgctctggcaagtgatccagatatcatatatgactatgtttcaccacagaatagcagtgtcaatggaagcttctttacttacactggattaagaggagtccttcatcaaattcctcaatctttcaaggcaacaaaagtaaccctggttgaatttcctgctctcaatggacaaagtatatcatatgcactatttcagtaccctgctggtagcatcaaccctcctcacatccacccccgtgccgccgagtttctgttccttgtaagtggctccctgcaagtaggatttgttgacactactcgcacactttacacacaaaaccttcaatcaggtgatatgttcatatttcctaaagggttgatacattatcagtataatccacaatcagttccagccactgctatatctgcttttggaagtgcaaatgcaggaacggtttcaatacctcattctatttttagtacgggaattgatgatgtaatccttgccaaggctttcaagactgatacttatacagtgaagaagattagatctggcctaaacaaaccttagaattgcaagctaagctttcatgtactacttccttctagtctctaaataaagttcctgtagcttctgc

SEQ ID NO: 116083 - DNA, 234 bp, Glycine max
  Clone ID: PAT_MRT3847_75833C.1
ggagtggcaaggattgaattcataatcagttggagaacatatctaggactaactcattgttaaaacttaagctattaatggagtgtaggaatggtttatatctgtaacttattactgccaagtattgcagctaaattaatattctaacttatcggctgtgaaaaggcactgtaattgtagattagatttgggacaactgtgcactataaattctacatttgacatcgtggttct

SEQ ID NO: 116084 - DNA, 154 bp, Glycine max
  unsure (1)..(154): unsure at all n locations
  Clone ID: PAT_MRT3847_75834C.1
tggtgatttganagataagccatggggcnaaagatgcaaacggtgaagagttggttgangttccgcganccgcatatggattgcttcagccctcatgntgcngttaactttggacagnatcnatatggagttaatccgaaacnngcgaacnatt

SEQ ID NO: 116085 - DNA, 1965 bp, Glycine max
  Clone ID: PAT_MRT3847_75835C.1
aattttttaaaatgaaaaatattgcagggctcgggccgctcctggttgtggtgtccggctgctggtggatctccagcggcctgccgccgggctgcccgtgccaatcacgtgcctgctttgcccgcggttgcagcattccccatcgagctgccgtatccacgtgatggctcaaatggtccatgttgagttgaaagcactcttccagttcactggaatgatgataccttaggatagcatcttgacttgctgctccttgtacgcatgtttgcgcgttgcctcactgccggctgacgttttcttgcagttccaaaggcatttcccgggctgcgtgggaaatttgggctttttttgctgtttttattccatttactttttggagtctcgattctgtagctgtttgtggacatcgtgcagttctttgctgatttgactgtacctggtgaaggtgttggtcttttttgcaggctttcagtcttgcttttcataatgcatagaaacggctcttctggtccggcttttgatgaatctcagaggattacatgcggcaacgttacctgtgcatggacacgtacatgcaccttcccctcctacaatgttggaggggtagtccctctagtggagacggttccaggtttatatccagggaaatgctatacagtactcgtgacaatcacttgggttctttgtggttggttgaagctaaccaaaacaatcatccttatcttcttgattggtactatacatcccgatctcatgacacaaatccaggagacgttcctttagaagaaccatttggatctcatgatgtgaatctgggagatgtgcatttagaaccatttggagtaataaagcatagttctagagagttcttcatggccccctccaacttgacacagaatgaaagtgggtatgaggaatactcagacgagtttcatgatggttgggctgcatcacatcttggaacttccacttcagctcccatcttcaggaaaagcgtgatccacaatcaaagttataatgaactgtcccatactaccagcagtcattggtgggctagaagtgatccacggggtggacagactcagacaagcatttttgagcctccagctttcaaccaccaaacatatgattatcatgataagttttctgatagagaatcagaggatcaagatcatgaacaaagcatgtattctaaagatgatcacagattatctagaacatacacagatgacttaggggcaggggaatttaggtcttcaatttgcaaatatttacagcagctctccattaactgcacctcacagcaagttccgaggggaagttggagaactcatttttgagctttcagagtatttaccttcatgggaacatgctcaagggaagcagtttctgcaaaatctgagaacagcaacttgtcaggacacgtaagccgacatgaatttccccctcttctgttctttgctacatgggaagcaatggaacgaaaacaggtttgcatccagggaaatgccatttagtacttttgcaactggcaatcatttgggttcattgtggctaattgaatcaagaaatcaaaacaatcatccctatcttcttgattggtactacacttcccaacctcatgatgcaacaactcaaagacatattcaagctgatgatccatttgaagtaacggagcatcaatccccagattggatgccctccatcttggtacaaaatgagcaacatgggcatgaagaatacataaatgagtattgcgatgaacgtgtcacttcccatcttggcgcttccacatcagctcccatcttcagggaaagcctaattcaggatcaacattccattgatatgcccctcactaccaggagtcattggtgggctagaagtcactcccagagtggacatggtcagacaagcttttttgagccaccagatttcaatcaccaaccagtatacaattaccatgaa

SEQ ID NO: 116086 - DNA, 291 bp, Glycine max
  unsure (1)..(291): unsure at all n locations
  Clone ID: PAT_MRT3847_75836C.1
aagncttcaaccatactaccatagtcatagtaccatacaatgtgagagccacaaagactaacaaatacaaacatcaacacctaaattatataggccgcttctcacgaaaagggtgcttctctgatccaatttgctagggaccccacagaacatatcattgcctttctagccaagccttgccatcatggctcagttgttggacctgcaccggatattcagactaagcatttcaccccttaaggcttgattccaccactctaaggggctggttggcagtgtatcctctgcaac

SEQ ID NO: 116087 - DNA, 502 bp, Glycine max
  Clone ID: PAT_MRT3847_75837C.1
gaaaaaaaaaaaaaccgggggggcaaaaaaccagttcaaataaaagggggccccaaaaaaatggtggtccttaaaaaaaaaccacccccgcccaagggaaaaacccccccccctttcacccccgccccctaaaatggggacaaattccggattttattaaaaatccaacagggccctggaaccccccggttttcaaagggcccccccggggaaacccacaaaaaaaaaccggccaacattggccgctccggcccaaagtcccccaaaacccggccaacggggggaagaacattcccggggggggcaaaaggggcccaaaggtcccctggggaaaaaaaaaacccccccctttgaacccggaaaaggggggaggcaacccgcggccccgggggcccatttgaccttttgggaacaggtgggctcccagccccaaggcccccaaacaggccggaaaacatccccaaccccaagggggccatggggcccagggccccccccggtt

SEQ ID NO: 116088 - DNA, 280 bp, Glycine max
  Clone ID: PAT_MRT3847_75838C.1
caagcgaaaaataagtgttaaaataggggtaactttctaactttcctcggcggaaacagagaattagcgtattttaaaaaaaaaaaaaaagggggggcgcccctaaatattcttaaagaaaaaactagccataagggacgagctctatggttatacccagaatagaattttgggaagggaaaattattccccctttctggaaaaccagaattgctgcatgacaattcagaagccgggactcttgttaagacgcgactcccgtggcgggggttttaccttt

SEQ ID NO: 116089 - DNA, 362 bp, Glycine max
  Clone ID: PAT_MRT3847_75839C.1
aaaaaaaaaaaaccccgcccctggtttaataaacaaaaacccttttaatacagaaatcatgaaacaaggcccccttccatgggttttttattcaccatttggggggagaggggggaattttccatattaaaaaaaaacctttttttaaaaccggacaaccccaacctttttttaccaggccggggaccccctgggggttattaaaaaccaacaatagaaaaaagggcccttaaaagttttaacccaaaaataacccccccttaaaacactatttttttcactggggggggaagccccccccctacaaagggtaaaacattggccccccaggttcaggtcaaattttcacaggctgaaacaaa

SEQ ID NO: 116090 - DNA, 719 bp, Glycine max
  unsure (1)..(719): unsure at all n locations
  Clone ID: PAT_MRT3847_7583C.1
ccacgcgtccgttttccatatatcatgtgaatcaagattcctatgttcaaaaaccaatcttaatgaagaacattttccctctttaatgcattagttttgagacttgttgctagagcatgcaaagctatagcctgtagtttttgggtaattttcatttcacataacatagttgtattccatgaaaatccaccaaagttgatagtgatgactgaagaagttagaatataaagaaaaatacacttttctccctagagagatacttaaattacattcttcccctctttatttagaagttgcttccctttttcctgagacatcagtatgaatacttttcttttttctttaactttgaaggccactgataattaattctgaacattgtattatcaacatttggactttaataatatgtaatgatattttgaattctcatactatcagctttgaaacttcacttggaatcattattcatcttctaaagtctcaaagttcatagcaagaattcaaaactagttgctgataatgttgaaagtcataagaaaaaaattaaccctaagatatttgtttatattaaaataagaagggtagggcggggtatttaaaacctctcttggggaggggagtatattatactctagaataaaatattanggtagtttcacactcgggaatttgtacattatgggcatttgttgacaactgaagctgactgttgcatg

SEQ ID NO: 116091 - DNA, 383 bp, Glycine max
  unsure (1)..(383): unsure at all n locations
  Clone ID: PAT_MRT3847_75840C.1
tgtgacacacgtatgaataaaaatcaagctcttttctttctagtttctttctagtaactaacgctagctatgcaagatacatcaaaacccagttgatcatgttgtgtatagctctatagcctcagttggaaaagacacatagaagaagatactgcatatgattggagaggacaattcaacatgcgggtcgacacagagaaaacaggtggaacacaaaatccacatggactgtctatatccatagaggcaaagcttaaggggaaaaaatttctttaagttgcttggggatggaattctctctcttcattncattntatgtgcattgggtaatcttgtgcttgtaattaaaccacatgtaacttttatgtattcacttttatgga

SEQ ID NO: 116092 - DNA, 384 bp, Glycine max
  Clone ID: PAT_MRT3847_75841C.1
ttttagggtttactttgtatttggaataccatttactagagcgggactgcttacggtcgtcgtcgtggtcagcgtcagaaccaatggcagacgcataattatacgacgacggatcaactagccggcatcaccctgagcggggttcacaaagctaatgtatccgaccgcgtgctcattcgatccatcatttaccgcaccgaccgcggatcgggcctagggggtaggaaggcgcgacgactgggctgggtgaagacaggacgcatagcctacaaggacgctattgcgtaactggaaatcaacgacggtagctgagccggcaacctccacgtcatcagagaagacttgcttgtcgaaatttgccaactgggtcctaccggaacatgc

SEQ ID NO: 116093 - DNA, 270 bp, Glycine max
  Clone ID: PAT_MRT3847_75842C.1
catggctcagattcatagctcatggaaccatcaggatttttttaactctttttggggttttcaacctcggcacatatgaaaagagtatcttgcatgcatttgatccttacaaattgcagatttttcccagacctccagtgccagaatatcttaatttcacttaagaagattttaggaatttcttcggggaccttttttgcttattcagtgagttaacttttgtcaaatgggtgttctgcacaatagctttcttgcaaatagaatattgtt

SEQ ID NO: 116094 - DNA, 413 bp, Glycine max
  Clone ID: PAT_MRT3847_75843C.1
cccacgcgtccgaaaaaatgtataaatgattttgtcccctttacaatctgcattctgcagctatcccaattaaatttcagagtacaactctacagtgattcctttcctgttaacaatttgactgccttttgttacttgatagcttcaatgggtttacaaatcatttggagttttgtgcttgctttaatggatttgtatgctttggtgagaaagaaggtcctcctcaacccggtactaattagcctctttgtagttggagattgggtaacagcaacactatctcttgcagcagcttctgcctcggctggtattacagttttgagaagtacaatgtggagaaagatgttgcggagcagataaagaaggagttcgataagaggcatggccccacttggcattgcatcgttggtcgt

SEQ ID NO: 116095 - DNA, 2038 bp, Glycine max
  Clone ID: PAT_MRT3847_75844C.1
gcgcccacgcgttccgccacgcgttcgtacaggttgcaaaagaacacagaagggggagcctttttttttcagtctaatttgttgtgttgtgtccacccagattcaaaattcaacttggaatctcttatatttgtcttcattttccagtcttatcttcctgtttgcttgtgacttctggtgtgtatcatgtgggtgtgaagtggatgttaaaacttaaaagtctcacctttttggctcattggtgatttgttttgttacattggtctggaatctgaagatggttgttcattgttaggcattgaggtttctgagcattgattttgatttggtggagaaagatgaaggatttctgtgggacacctggcactgttcttgggcttgttcttaagatgtcacagttcgtttttgctgctgggtctattgcttccatggctaccacaatcagtttctttaatttgactgccttttgttacttgatagcttcaatgggtttacaaatcatttgggagtttgtgcttgctctaatggatttgtatgctttggtgagaaagaaggtcctcctaaacccagtactaattagcctctttgtagttggagattggttaacagcaacactatctctagcagcagcttctgcctctgactccaccgcctgttttctacaatcgagcctgggcgtgaggtctccatatccgtagatgaaaacgttgccgaggagagtatgaggcatctctctctcatttctagaatgggacctgtgcgtggagtctccatctcacttgatggggtgagggacaagaaccttttgcagctcaaaactctcaatcacgctctttttcctgttcgggactatgtggtgtggtgttgctgttgcaaattgcaacactcagtcagcactgcaccactgcatttcatttcccagcttagctacaactacaagcccacgtcgctttcataaaaccacacccacctgccaccatcactttccccaaaacgcaacatcatcaaaacttaaactcagagaatcagagagagagagagagagaaatgagtgaagaagccaaaaagaacttcgccggagctctaacggcgaggcccaactccgatgagccgaaaccggcaccggtgccagctgttcccccgaagaaggtcatcatcaagagcgctgatatgatccccgacatgcagaaggaggccgttgatatcgccgtcgccgcgtttgagaagtacaatgtggagaaagacgttgcggagcagataaagaaggagttcgataagaggcatggccccacgtggcattgtatcgttggacgtaattttggctcatatgtgactcatgaaacaaaccactttgtttatttctacttggatcagaaagcggttttactctttaaatctggctagccttattgtggtagcaaagaagttgagatctatgggaattgtcttgtgattatgctgctgtatgcagtcccccatgtattaattccactgacactcaaaatctttgcaagacattcttgtgatcttgtccttgtatattggatgatatgtaaactagttatcggtttggatatgaatctaaggattaccttagaagagttttctaaaaaggaaatattatatcttaaaaaaaagcttgctgaagcatgcactgaaattcttaaaaaacttttatgtttaccgggttttcggttgctcactgtcgtttttaaaaaaaaaaaaaaaaaaaaagcgcagtacgccaatatcatctctaattatgctttggctattagctgcagggtagctaacgtttcccctagaattccctcatccaaccaaagttagtcttgttgaaaattttcttttcaaattgtttataggaaaggaatccctgtagagttgtactctgaaatttaattgggatagctgcagaatgcagattgtaaaggggacaaaaaatgtataaatggttttgctttgcaaagatataaacctatatgtttacgtgatagacaactttttttattcaaaaaaaaaaaaaaaaggcccctag

SEQ ID NO: 116096 - DNA, 488 bp, Glycine max
  Clone ID: PAT_MRT3847_75845C.1
tagccgaagtaggccgagtatctcttgctgaagtgagtgaccgaggtgaagccgcaggccaccgccacctctagcaccgacagggtggagtgctgcagcaggcgccgtccttcggtgatgcgcaattccaggtagtagcgcatgggcgcggtgtcgagctgctcgcgaaacagccgctcgacctggcgccgcgagcggccggcgtagtcgcacagctgctcgatggtcaggggctcctcgatgttggcctccatcagggtcaccacctcgcgcagcggcggcgtcatctgcaccttgagcgtcggattgacctggcggaagcgcgattcctcgaaagccaggatattgaccaggccatcggccagggcgctgccgcactgggcgccgatccattcgagaaagaggtggaaggcgccgcttgggctggcggcggtgaggcggtcgcgatccagcacatggctttccgccgaagtcttgcagccacgcac

SEQ ID NO: 116097 - DNA, 274 bp, Glycine max
  unsure (1)..(274): unsure at all n locations
  Clone ID: PAT_MRT3847_75846C.1
tttttagatcagcaagttcccaatttaacattaatggaagggaggtgggaaaaaatantctgaatgaacataatcatccaccaaaaacccagagtatagaaattaacttatcaggatccatgactgatcatttttatttacaaatttgacgaggcattgacccacagcagaaaacttttgacaacccgttgcaatctaaccattttacctgcagtaattggtcagatagcccaccaaaggcttaaaaaacttgccccctacgttaaaccacaaa

SEQ ID NO: 116098 - DNA, 545 bp, Glycine max
  Clone ID: PAT_MRT3847_75847C.1
gaaaatatcaaataacaatgggcgagctagcatgcatttttagctttaaaacttgaggacaaactaaatgggcctgttttcactttgatgggactcattattcggttttaaaataaaaggctcatgttgaaatccttcttccaatttgttatttaaaacacccttcccatttttgtaaatcgcgtatagcactaattgcatcgctcccaaaaaaaatccaataccgtttggcaccccggggataacattacgaacgaaaacagtttacaacaaccaaacgggcccgttaaaaaaaaaaaaaaaaaaaagcaagaatggcatttactccaccctttttgtagtcaccactgttttcatgacccacagaggggaggaatacataacaatttttaagcctgttcccataacaccaacagccccactacgaggctttccttttaatgctaattgaggaataattattattgccgtcaagattaccccatccaaaattaaagccaaaatagcggccctaccccttatcccttttggggcatttttgaaaa

SEQ ID NO: 116099 - DNA, 1357 bp, Glycine max
  unsure (1)..(1357): unsure at all n locations
  Clone ID: PAT_MRT3847_75848C.1
ggtaccctccnagtttggccggggattgatgttaaaaggtgctcgactttagcatggcattttgattttggtttatgatcttctgtttcaaattgagatgaaaactcgctatcacctaggttgagatgtttgcgctttttgtatgtgtattttgtgtgggatggacgtgttggtgtgcgtatgcttggcttcctttccctctggctgctttgtggggctgggtatgtatgcattggaacaataggttgcactaacaacaattatgcatcaagccgagaagtgcaagaagtgcggacaaccaaaggaggtagcagccatgccagcaattgcgatgaccggagcatctttccccacttattcacactatttttccagggccccaggagtaccagaacaaaagatgaatattggattgcttggcaatggtgcaccatcacagtcactgcatttaaactccaattggcctgttcctggagcagataagtacggtgtccagccactttccatatggctacctggtggaaattatggcactgtgcatcatcatgaaaattctaccaaccagaacctatctgttccaaagggatggcgcaatggggactggatctgtaactgtggcttccacaattactcatcccgctctcagtgtaaaaagtgcaatgcttttccacctgcagcttgggacaaagcggttagcttcagaagagttggtttatgattgggacaacaagagattgaatataggaactacacatgatcagcatcaaatatatccaggtttagaggaagtggtagggacaggtgcagatccaaaacctggactcttcccctcttatcccagcatgaactcaactacagctccaagtttgccattggccacatggcttccacctcaagcttctgcacctgccctccttggaaaaggagcaaggcaatggcgaagtggagattggatgtgctcaaattgcaacaatcataattatgcttcaagactacagtgtaacaggtgcaaaactcaaagaatggctcccatgcaacctgttaatgttgtgtaatgatgaattcattagttaaattgacgtcatgtgccctagtttggctgagttttgttttgattttctagcgtgtattttgccagcaaaacatagttgatattctcatcaggctcattatatatgcgtaacaacgtaagacataagtggtttatgcttagtggcatcgtatttttcagtttctgaaaggtgtattgcttactataaatagagcattgtgggtgagttgtgagtaaaaaaaaaaaaaaaaaaaaaaaaaacgagcgcccgctagtaaaggatccaaacgtacgcgtgcgtgcgac

SEQ ID NO: 116100 - DNA, 459 bp, Glycine max
  Clone ID: PAT_MRT3847_75849C.1
gcattttaactccaattggcctgttcccagagcagataagtatggtgtccagccactttccatatggctaccaagcagaaattatggctctggacatcctcatgaaaattctaccaaccataacctgtctgttccaaagggatggcgcaatggggactggatctgtaactgtggcttccacaattactcatcccgctctcagtgtaaaaaatgcaatgcttttccacctgcaattgatgttaaacttcatgctgtttccactttttggtgtgaagcacttgggacaaagcggttagcttctgaagagttggtttatgactgggataacaagagattgaatgtaggaactacaaatgatcagcagcaaacatatacaagtttagatctagtggtagggaccggtgcagatccaaaacctggagtcttcccctcttatcccagcatgaactcaagtacagc

SEQ ID NO: 116101 - DNA, 377 bp, Glycine max
  Clone ID: PAT_MRT3847_7584C.1
ctaaatgaaagaatacgaggcgaggagaatgatggtggggtaggagcaggatgtgtctttgtgagcgaacaagttccccgagagacagccgattgtgactgtggggctaagccatgacgtctgcaaggacttccaggagcctgctccggctccgatggttgacccgactgagtttacgtcatggtcgacttacagagcacggatagcatatgttgaggacacttttctgtttgtctacattaacgatttaacgcgctatggcagtcgccggggctaagtctaagtgtaccaccgctgggattcaaggaatcggttgtgccttcggagggatgatcttgttcctaagatactgcaccgatggcatgtgagggggacac

SEQ ID NO: 116102 - DNA, 3307 bp, Glycine max
  Clone ID: PAT_MRT3847_75850C.1
cacgagatgtctgtgaatgaggtgatccagcattggctcatttattcttggaacatacatgccacatttatctataaataccctcttctagacaaggcacaaggcacaaggcacaggcttccctccctcctttgaagaaacaaattagaagagtgtgttgtgttgtgttgaagtatcaagctagcaaagatgtttggcatcttaggaggcaataaggggcacaagatcaagggtactgtggtgttgatgagcaagaatgtgttggacttcaacgaaatagtgtccactactcagggtggtttggttggtgctgccaccggcatcttcggtgctgccaccggtattgttggtggagttgtcgatggtgctactgccatcttcagtcgcaacattgccatccagttgatcagtgccaccaagactgatggacttggaaatgggaaagttggaaagcaaacctatttggagaaacatcttccttcgttaccaaccttgggagacaggcaagatgcattcagcgtttattttgaatgggataatgattttggaattccaggagcattttacatcaaaaattttatgcaatctgaatttttcctcgtgagtgtcactcttgaagacattccaaatcatggaaccattcactttgtttgcaactcatgggtttacaatgcaaaaagttacaaaagggatcgcattttctttgctaataagacatatcttccaaatgaaactccaactccactagtgaagtacagaaaagaagaattggaaaatctaagaggagatggaaaaggagagcgcaaggaatatgataggatctatgattatgatgtctataatgatttgggtaacccagacaagagcaatgatctagctcgtcctgttcttggagggtctagtgcctatccatatcctcgcaggggaagaactggtagaaaaccaacaacaaaagactctaagagtgagtcaccatccagcagcacctacatcccaagagatgagaactttggtcacttgaagtcatcagatttccttacatatggaataaaatccatagctcaaaccgttttacctacatttcaatctgcatttggtttaaatgccgagtttgataggtttgacgacgtgcgtggactctttgaaggtggaattcatctccctacagatgcactcagtaaaattagccccctaccagtgctcaaggaaatcttccgcactgatggtgaacaagtcctcaagtttccaccacctcatgtcatcaaagttagtaagtctgcatggatgactgatgaagaatttggaagagagatgcttgctggtgttaatccatgcctaattgagtgccttcaagtgttccctccaaagagcaagctagatcccacagtgtatggtgatcaaactagtacaataaccaaagaacacttagagatcaaccttggtggactctctgtggaacaggcactgagtggtaacagattgttcatattagatcaccatgatgcattcatcgcatatctgaggaagatcaatgaccttcccactgcaaagtcttatgccacaaggaccatccttttcttgaaagatgatggcaccttaaagccattggccatcgaattaagtttgccacatcctaggggagatgagtttggtgccgttagtagagtcgtcttgcccgcagaccaaggtgctgaaagtacaatttggctaattgccaaggcatatgttgttgtcaatgactcctgctatcatcaactcatgagccactggttaaatactcatgctgtgattgaaccatttgtcatagcaacaaacaggcatcttagtgtgctccaccctatttataaacttttgttgcctcactatcgtgacaccatgaacatcaatggactcgcaagacaatcactcatcaatgcaggtggcattattgagcaatcatttctgcctgggccatttgctgtggagatgtcttcggcagtttacaaggggtgggttttcactgatcaagcccttcctgcggatcttatcaagagaggaatggcagtggaggatccatcctctccctatggccttcgccttgtgatagatgactacccttatgctgttgatggactagagatatggagtgctatccagacatgggttaaggactacgtctccttgtactatgccacggatgatgcagttaagaaagactcagaactccaagcttggtggaaggaagctgttgagaagggtcacggtgacttgaaagacaagccatggtggcctaagttgaacactcttcaagatctgattcacatttgctgcattattatatggactgcttcagcactccatgcagctgtgaatttcggacaatacccttatggcggtttcatcctaaatcgtccaactctaaccagaagattgctcccagagccaggaaccaaagaatatggtgaacttaccagtaatcatcaaaaggcttatttgagaacaattacaggaaagactgaggcccttgtggacctaacagtgatagagatattgtcaaggcatgcttctgatgaggtctaccttggacagagggacaatccaaattggactgatgacacaaaggcaattcaagcctttaagaagtttggaaacaagctgaaggaaattgaggacaaaatctcagggaggaacaagaattcaagccttaggaaccgtaatggaccggcgcagatgccctacactgtgcttcttcctaccagtggggaaggccttactttcagaggaattcccaacagcatctctatctaatgagagtgtgtggtgtgtggtgtgtggttttctttccttccaacgtacctctcattgacaaataaacgtgcaaacttatgtgtgcataattttcttatgtatgcttaagttttgtaattggatgctatctagtttttcatatctaatagggtgttgtgtcagtttttatgtatagtattgtgctcctatcatgttcacccgtatcatgttcacccgtatgtaagtctgatattctgatctatgaatgtcaaatcaaatttctctatgtcaccaacttggatttgatacccgtatgtaagtcctatcatgttacatatcttgactttgaattgggtacccgaattgttccccttaaatttttctaatcccccaaaaaaaaaaagaataagcctaattttttcatgattatgttgtgaatagcttcttggtgattattagatgccaatctattagacaatgagtttattacctacagcaatgttttgaatatcgagttaatttcaaatactttttatgggcc

SEQ ID NO: 116103 - DNA, 218 bp, Glycine max
  Clone ID: PAT_MRT3847_75851C.1
cctaaacgtccgaacttatggctgtaacctattcacgtacagactcgcaaaggcattcaaggcgaaaaaaagattcggggaggcgaaaataatcgaaaatccattgatacccgatataggtcaaaacatactaactgcatgctgaatccattaggctctcaatgatacaactctgttgaacttgaatacatcttaatagccatattgataataataaa

SEQ ID NO: 116104 - DNA, 527 bp, Glycine max
  Clone ID: PAT_MRT3847_75852C.1
cgaaagggaggtgggataatgatcaggaagctgaacatccagaaggtgaagattatagtccaactcgcaatatatcgtcttcaagatgggcagctggagataactctcctgttgatgagggtgagatcctcaatgatgaggaaatgcccaaacgaaggaggagggtgtctcctgagttattggatggtagactaaggaacaagctattaagccctgaggaatctaaggtagaaggtattgaaagagctagggccagatcatctgaatctgaagaaataggtgtccgtgggagaacttccagcggtgaagattttcctggcattgagtcagataagccatgcctacatgcagatctcatgcttcaggtccggacagtgtaaccaatatcagtgcttcagcgatggaatcttcatatgaatatgatggagggtctgagatgcatacgttgtgcatttgtttagcgctatgattgcctcgttgttccgagttactggtcatgttatatcagtcaccaaatgcatgtgtag

SEQ ID NO: 116105 - DNA, 213 bp, Glycine max
  Clone ID: PAT_MRT3847_75853C.1
agagggaccaatcggaagagtcggaagcggatgggaaggtttattatatattgaacatgtcacgcgtaccatatggtcgtcgaataagttggtgagcccacccatcacatagaacaaacactatacctttaataccactaaccaaccattatcatcacaaacacaataccaacccttgcaccctcttctacttcaatccatgcctggcaacac

SEQ ID NO: 116106 - DNA, 430 bp, Glycine max
  Clone ID: PAT_MRT3847_75854C.1
aataatttatatcatgatggtacatcttctgatcttcagaccttaaaaagtatcacattacaaagagaaagcataagtagtcccaacagtgcagctttatactcgttttgtatggagaatagggaacacttttctttctttgtgttgtataaatggaggaatgtaaatgaagaatgtattgcattctttccaaataccttctcaattttcactctactatttttcagctttccactgtcattcttgccagcacactcaatgctggtttccttaaaaaaatgttgaaattggaaaaagccctgccctatgagattatccattcctacttgactaaaccttggcacactcaatgcatttatgtaatttctgctttttaaaagtaatactgtctccattttatgttacacgaaattgtgttctctgtctattc

SEQ ID NO: 116107 - DNA, 357 bp, Glycine max
  Clone ID: PAT_MRT3847_75855C.1
tgacatttggggtatgttaagtctatacgaggcatcatatttaggtgcaaaaggtgaagaagtactacaacaggccatggacttctccaaggctcatctacaccagtcactggcacacctaagtcctgaactacgaaagcttgttgccaaagccttaacacttccaaggcacctaagaatgggtaggttagaagccaggaactacatggaaaaatatagccaagcaactaaccaaatacctgctcttatggaattggcaaagttagactttgccatggttcaatcaatgcaccaaaaagaattagcagaaatctccaggtggtggaaaaacttgggacttgttgaaagacttggctt

SEQ ID NO: 116108 - DNA, 265 bp, Glycine max
  unsure (1)..(265): unsure at all n locations
  Clone ID: PAT_MRT3847_75856C.1
aancatcctttgcaattgcaagaatcttctanttttnnnatttcttncccatcagtgtgctctttcagttgantgcctacttttaangcaggtacaaagaaggaagaagcacgcgtgggggtgtgggtgaatatatggcgaaaagantaccagtatgaganttgttggngttggtgttattattnttggcancaaanacncggcaatgagcataacaggaggtcatactanaagcaggggcanagagtcctctggttctagtgat

SEQ ID NO: 116109 - DNA, 751 bp, Glycine max
  unsure (1)..(751): unsure at all n locations
  Clone ID: PAT_MRT3847_75857C.1
ctctcgagccgattcggctcgggtgctttcgagcaaccacaacctccatgtcatgttcccgtgaagaagctcttgttacactcttctacaatgcctctagctcctttcaccttctcttcttcttcctcttctcctcttcagttcttcttttcaagttcataaacttcattggcagcttcaccatattccaaagagatcatcactatgaatatgtgtcttctgagtatgatgatgaagaagaagaaattcaagaaagttactcttatgtccatgattctattgagtcagatcatctagtagcagacatcatttgtggtggagagacccttttgtttgtgcacaagaaccagcctcagaggactcattcttcttctgatgaattcacaagcccccgggatagccttgttgaagacttagaagaaaactattcaacagaaaccttgtcttttcacaagtcacctttggtttcagactttgaaaatgaacaagatgcagaagaatttccagcagaagatgctgattctgttccaaattctggcccagctgaaagcaggcccacatggggcatcacacttggccctgacaggggcgacctgaggggacgggggcgggggctgtgacgagggatggtgggggggtgggggggggtggggggggggcaagcggccccgacggcgcgggcgcgcgcacatgggggatggtggggctgtggtagggcgctgtnnnnnnnnnnnnnnnnnnnnnnnnnnnn

SEQ ID NO: 116110 - DNA, 107 bp, Glycine max
  Clone ID: PAT_MRT3847_75858C.1
cgacaggtgcagtgcctacaccacgctcctacggaccgcgctgttgggaccagacttagagccggcgaccacgccggagagaacgggctagacggagatgacgctgc

SEQ ID NO: 116111 - DNA, 204 bp, Glycine max
  Clone ID: PAT_MRT3847_75859C.1
aactatcaacgctgactcgaagatctttcgtgaacatgtctagagatgtgggatactactggataaggattactaacctagttgccttaaccctgtccggtgggaaaatcctttaagaaatttggttcaattaaaaaaccaattttggaaaaaggacaagttgcccctttaaaacaaggttcacaggattcaagtccaaaaggg

SEQ ID NO: 116112 - DNA, 474 bp, Glycine max
  Clone ID: PAT_MRT3847_7585C.1
cttatgctgaaccttctcaaattcatgttccacctgctcatgatgaaaagggtccttccaatttacatgcttcctcgcaagttaaaccagtgcatcatgcatctacaaattcatatgagcagtctgcaagtggtgctgctagaaaggatcaatcaacaacatcaggcgtgtccaatttagaagtcagatcttcaggaactggaagtcaagaaacaaaatttcaagattcatactctggaaacaatagttcttttcctatgaataggcagaattggaacatgggattcaaggatgctgcctctgctgcgcaggcagctgcagaatctgccgaacgtgctagcatggctgcaagggcagctgcagaactttcaaaccgtgaaaatatgacaaggcagtattcaagtggatcacatagttcttctagaagcgggttgagagatgaaagatcccaagaatacacttttcatgatgaca

SEQ ID NO: 116113 - DNA, 368 bp, Glycine max
  unsure (1)..(368): unsure at all n locations
  Clone ID: PAT_MRT3847_75860C.1
ttttgtgcancnaacaaaaaaaattagttgcccaaatatattaaaaaaccccaaaattcaaactttttgtagaagattggctaagaatcccttcaatcaaaattatctagacccaaacccgagttcaattcaaagactcacaatgtggctcccactatgtaaaacgatctaattaaacaagccgaaacccatggcatcgccactttcttccttcacttcttccttcttttcctcggcggcgggtgcggcttcaacancggcaccaccaccaccgccggcgggagcggtaactgcaacggcggccccaccaccggctgcgttaaaaatgaggtcttcgatgttcttattcttggcgagctttgcgaaaa

SEQ ID NO: 116114 - DNA, 423 bp, Glycine max
  Clone ID: PAT_MRT3847_75861C.1
gtcagctggcaatctggctcgagcagaatcaatatcagatttgtctctttaactctgttaagcttgcacagggtgcatctgatgactttcatgcttgataagagaggtggctgaataaggcttagaagagaactacgcaagctttaggagcagaataagaattgactcagggagcacgggatctgaaacgaggacccgtctgatgcatgcttggaagttttgaagcggtaaagtgctcgactctatacggatacagaaaggacgatgtgacactgtcatcctgatcacgagttgaacatggccactgggcttcatcctgatgctgcaaacggttcaacattcgcacttgataaaatgaagctactagcttgccgctattgctgatcctgagagacttgacactagcgctacttagcatagaaa

SEQ ID NO: 116115 - DNA, 261 bp, Glycine max
  Clone ID: PAT_MRT3847_75862C.1
cattcattcacttgtagtttttgagtgcacggcattaaaaacaatttcattccttcaaaggaatctctaagaattgttcttgctcttgcctcgttgtcacaagcatctttttttgcttgtttgccttagtctttcctactttggtggctgttttttagatttttgaacaacaataaatctatggctagatatttttggctttctaggtagtggcaacagagtcacatgatgttgcaggtcttttcccacttcgaatatact

SEQ ID NO: 116116 - DNA, 161 bp, Glycine max
  unsure (1)..(161): unsure at all n locations
  Clone ID: PAT_MRT3847_75863C.1
ccagttggaggctcttatggtttgaggcatctgtnatggaggttnctnggaaatgggtgtatggtggtgtctggaaattggtggctattaagnnatgcnaaattaggacatntctancacctaaagcttcatgatagtcaggtntangactcatcgttgct

SEQ ID NO: 116117 - DNA, 601 bp, Glycine max
  unsure (1)..(601): unsure at all n locations
  Clone ID: PAT_MRT3847_75864C.1
ggctcgaggaggaactgatataatctatgcaacgcagcagtactcatctactgtcccacctgctgaagtacagaaaaaattaaaggacatggcagacgaattcttcattgacaaagctggacagtataacagtaggtttaatgcaaaggaaaaggttatgaaggataatgcgctaaatttcatggatattcaaaccagatcctactatgaatcagaggcgcaggatatcaagttcatgtgcaggaggaaaggtggaaatgggaaaagatctttgtcccatagtgagtggtgccaaactgttctgtctcaacctgatgtgatatcaatgtcatttgtaccaattacatctctacttggtggaataaatgggagtggatatttaactcatgccatgaatctctatttacgctataaaccacaaattgaagaactgcatcaatttttggagttccagcttccaaggcaatgggcccctgtatttggtgagcttgcccttggtcctgaaaggaatgccacaaatgctgcttcttacangttagtttcatgggtcccaagctctatgtaaacacaacaccngttgatgtgggaaagagcccgtgac

SEQ ID NO: 116118 - DNA, 659 bp, Glycine max
  Clone ID: PAT_MRT3847_75865C.1
aaaatcagtggacaattaactaatatttcgctgcacaaaacttgtgtagaatacaaaatacaagaaaagaaaaacaaaagaaagaaattcgaagctatgagcctctgaccaaggtaaaatggtacaatagttaaactaaacaaaataatggaccttgcagaaaacaattttgatcaactgtatatttatagacaaacataaattggcagccctagagggttaataaaagttattattctaattctctagttcccactgctttagttttaaaatctctatggtataacaaaatttctgaaaatacatatttggctcttctatatgtgtaaagcctatggagtatgttgattgcaattctccaaatcatagggtttgtatgaagttggattccttggaaaacaatgcaatcaacttatcctttgttacttgatcagggccttcggatttaactacaaatgtatggaaaacagtatcgtttgcaacagtaagtcttgattcaacaacaccaatttctgcctctttgcctcgtgcaatgacttttgaaacaggatgaacatcgatgggacagctcacctttacaatgaccccatcctgtgcagcttgcacgtccatatcaggagctccggggagatgatttttttctacttctgcattgacat

SEQ ID NO: 116119 - DNA, 406 bp, Glycine max
  Clone ID: PAT_MRT3847_75866C.1
actcctaattgtttaaacctaattctcatttcttcatcgatcgattattctcctcctaaagaagcggatcttcatgaaaactttgaccgcaaagaccatctccctggaggtggagtgcttcgacaccatcgctgacgtgatagcttagactcaagacaaggatgggataccacctgaccagcagagacttatctttgtggttcaacagtttgaggatggacgaacccttgacgtctacaacatccataaggaatgcactcttcaacttgtgcttcgcctgaggggtggcatgcatatctttgccaagactttgactgggccgaccatcaccctctaggaccaatgccttgacaccattgatcatgcctaggcctagatccatgacaaggagggtctctctacagat

SEQ ID NO: 116120 - DNA, 375 bp, Glycine max
  Clone ID: PAT_MRT3847_75867C.1
caaaaaaaaaaggaaattttaccccatcgttatttaatttgggggggatttttgatgtagcagtaccccacgtttaacctttaatcctcaattcccaggtaaaagtttaaagtactttaggacagaccgtaaaaaaaacctagttaaagggggtggttgccccggtcctttaagtcatttagcatttgcccttttttaaggcttttgcaaagtccaggattgttggatcaccaccccctttcttggttttggcaaagaccaagcaggctttttcccccttgctttaacaaacaaaaattgggaattttttatttttagagagcaggtttttagttgctccctggaggggttttttaaacaactcttgttgttttg

SEQ ID NO: 116121 - DNA, 334 bp, Glycine max
  Clone ID: PAT_MRT3847_75868C.1
ctattatacgcagtgatggaaaagtgaggagtgagggcaaatattgtttgaaagattatgtgggccgtgacaataagaatgagacttcaaccttacaacgtcatatggggaaatgtgatgtatatttgaaggcattctaatagtgatgttggaaatattattcttgatcatgctgggagattaagaaataaaaaaattgatcaaagtgtggtacatgagatgatatctatgatgattattgagcatgatcttccattctcttttgttgaacataggagggttaaagagttattacaatatttgcatcttgatatgaaagttccctttaagcatg

SEQ ID NO: 116122 - DNA, 765 bp, Glycine max
  unsure (1)..(765): unsure at all n locations
  Clone ID: PAT_MRT3847_75869C.1
ccccgcgtccgccgaaaaaaacactccccacgatcaacgaacccaaccaacccacctcaattttcacaaactccacattttcaattcacttaagatctctgcaggaagagcttctcacttttcaattcaacctcatccacgatccattcactagcattattatttattacatgcaatgctttgaccttcagccaccacaccacagcgcgtgtcttcgtcccgaagcaaaaccgaatgggtctctgcacttccaaacccactctttcctctcctcaatccgccacacactcccccgtggcaccttctcaaaacgacgccgtcacactcactcacagtgccgaacctcactccaatggcgaaaaccaaaacccaaaggagcctgagaacagcggtaagagatctccgtttttcccgttctacagtccgagtccgggccgctacgtgttcccggtctcgccgcggcgcttcttcaagcgcccgtttccgccgccgtcgccggccaagcacataaaggcggcgctagcgcggcggcacgggtcggtgaagcccaacgaggctgccataccggaggccgaggcggtcgccgggctcgacaagaacttcggattctccaagcatttcggaaacaaatatgaacttggaggtgaggttgggagagggcactttggaacacttgtgttgcgaaggtgaagaaaggggagctgaagggacaaacagtgggccgttaaagtcattccaaaagccaagatgaccactgncattgca

SEQ ID NO: 116123 - DNA, 378 bp, Glycine max
  Clone ID: PAT_MRT3847_7586C.1
gaatttgactggaactgctagatatgctagtatgaatactcatcttggaattggtatgctctcaatgtatctcttcatcaaacttcctttccattgtatttattgttaattgattctgaagtttggtattgccttttcattctttaatagagcaaagccgtagggacgacttagaatcacttggatttgttcttatgtattttttgagaggaaggtagttatccttgctcctatgttgttttgtctttctttatcacctacttctaatttaattttttacttggtatttctacagtctcccatggcagggattgaaagcaggtactaagaagcagaagtatgagagaatcagtgagaagaaagtttctacttctattg

SEQ ID NO: 116124 - DNA, 191 bp, Glycine max
  Clone ID: PAT_MRT3847_75870C.1
agcagatctttcaagaatggcacaaattaacaacatggctcaagggatacaaacccttaatcccaattccaatttccataaaccccgatgttcctaatctgttgtttaattgtgcatatgttgtatgtacttgaagtacacttgacaacaagaaagtccaataaatatgatatatgttcgtcctttcttcc

SEQ ID NO: 116125 - DNA, 1385 bp, Glycine max
  unsure (1)..(1385): unsure at all n locations
  Clone ID: PAT_MRT3847_75871C.1
cggnncgaccaacccttccgacccgccctccggctggaagcaggaggcggtggaaggcgagggtttgaggtgcgcaagcaaacaaagatgaaagaagcggatgagcaactatgcgaggcggccattaaaggtgacacgaagaaagtgaggtctcttatatactccggcgctgacgtcacccactttgacggcgatggcctcaatcctctgatgcacgccgcaaagcacggccatgcacccgtcctcaccctcctcctctccgtcggcgctccctggaacgctctttctccctccaacctctccgccggtgactacgccatgcaagaaggccacaacgaaaccttcgagcttctcctcaacgccgggatccaatctgaactgatactgggaacaattgcgaggaaggcaaacaagaacggcgattccggtcacgattatttggaagatagggtgagttttagcgaagacaagcttatggactctgaaagcaaggctgtgatgatggcatgggagaatccgttgatggaggctcatgctaaggcggtttgttccggtggtggccacgtactcaatattgggtttggtatggggctcgtggattcgggcacttcagcgatatgcacctgcttcacacaccattgttgaggctcatcctggggtttatgaacgcatgcttcgctccggttggggccagtaaggaaaatgtcaagattgtttttggacgatggcaaggatgttctgcctcagcttgaaacatatgatggaatattcttcgacacctatggggagtactacgaagatctgagggagttccatcagcatctcccggcattgttgaagactggtggtatctactcattcttcaatggcctttgtggcagtaatgcatttttccatgttgtttactgccatttggtatctcttgagcttgagaatttggggtattccacacaattgattccattgccggttaaggattgtttgggagaacaagtttgggaaggtgtgaaacaaagatattggcagctcgatacgtactatcttcctgtctgtcaggccatagagaaccctgagtgaggcaggaaatggatctcctgcagcttagaaagaactgcaccctgtgcagttacaaatttcaccatccatgcaagtttttttctctcctttatatattaaaattaaaggaatggttgaaatctcatgcagttttttttttaactgtagaggatcttaatcccagtgatgtatggtttgattttaataacatcgtcaattattctaacacgccatgtgtttttgcttgtgtaacgtatcaaatggaattgtaagaatacagttagagtcatattgaacttttgagctttatttgtaaatttcattannnn

SEQ ID NO: 116126 - DNA, 103 bp, Glycine max
  Clone ID: PAT_MRT3847_75872C.1
acgctggcaaaacagacagggaggtacagcacaaacaattaatctcaattcattcgaccaccatcatggccatgctaaaagtcagcttgtatgcttcttctcc

SEQ ID NO: 116127 - DNA, 158 bp, Glycine max
  Clone ID: PAT_MRT3847_75873C.1
gaagtgagggcctccgtcacactcacagtcagcatctttgattgtatacgaggcatgagttgtgtgcggactaggactcttttaaccaagggcgcatcgccacaaaaccccatcaacttcaatttatcatcaatccgatacgactccttgttgaacac

SEQ ID NO: 116128 - DNA, 2278 bp, Glycine max
  Clone ID: PAT_MRT3847_75874C.1
ggctcgagtcactgccgccgccacagcctatcgtattgcctcaagaaaacaacaacctctgcgtcgaaattcccgccggacaatcagataaatttgaagagttacaagtctccgagggtaccgcgaaggacaatggtgttttccagaacgtttctgctatggatatattcaaatacggtggtctgtattttcttgggttttttgtgttgcagacgatatacaccgtttggattgttggggtttacaaatccaaccagaaagacggggaattggagatagatggaagggaaaatagggatgagaaaactgtgtcattgcctgttaatggtgctagcaatgcttttctttctgaggagcaacttttaatggagaagaaaatcgaggaaattaagttaatggcgagggaagcgcggagaattgaatcagagaagaaagggaaagaggatgaggatgaggattttgaagtggatgatgatgatgacgacgaaggtgctgtttctggtaatagacttggtattgagaaagagattggtgagcgattgttaaaggtgcagaataggattaatggtagtgctaaggatatttcagcagcgttacagattaatattcgtgggaattctgcagctggagtggataggggtgtcaataagaatgtgaagaataagggaaatgaggcattggtgttcaagaagaagtttaaattcaaaagcccttctactaaggatacaaagactcccaagggctttccagggaaccgagattggaaagaatctaaggcaacgaagaggggttcagaaagtaagaaagcagctcaagatcatggaagtgatgatgtttctgatcatgcacaaatgttacatgaagataaacgagccaatcagccggagcttgtgacgcagatgagtgtttctagtgttccttcggaagtgggaggaaaagttgttgatgacaagtccaaggtgatgcaagacagtataaacggcaattcaaggcatgaattggctaaaaaaaattcacaagctaacagagtcaaagttaagcaagcgaatactaaaactgatgtgtggtggctgaacctccattatgtttttttaagttctcatgagttctttttgtttacttgtttctcggttggataatgtctacccattactgcaccaccatgaatcttcaaaaactcgccattcttaaaagcaatgaaagctttaattttttcttgttgtattaagtatatactataatttaatccttaaaaactttgacaaagccaatgtcctgcattgtaggacacgaagactctggctcgtctgccgtcggttagcttgaaccatcatttagttattatacatgtccctgtgtgtatccagttacatctgatcataaagtcactggcttgtctatatttgtgaaggtcattctcatgcaaagagattccgaggaaggatcagaaggtctctatgagggcctaaagttcacctctaaggttcgggagcgcagggatgttctttccgtttctgttgcttttgaggatcatgctgatgccaacaacttctgttttctattaaaatcgttttttgaagatttggggtcttttagtgctgatgcagttccaatgtcaatacaagtaagaatcttatatgccataacataaaactgaaatgtctcattgcgcctatgcagttccaatgccgatacaagaactgaatgaagaagtaatatcacgtgccaagaaagtggtagttgtgaaaaagaggcagcttcaactctatgctgggcaaccacttgctgatgttgaaatgcacttgcgctctataatagagcaagatcaaattgcaccataatcacatttatatgaccgttactttatcaagtcctacaataaatgtccatgatgaagtcttgaagaaacggcaactctaccacaattggtggtcatggtatatggggacacttagtgaaaatttgtagtgtttcacttccatcaaaatcaaaagttggagttgatggagccgattgctgggcacacaggtgaagaatgctttttagtgactgaatcttggtctatcttttgaaaaaatttcctagtattttttcaatgcacggtattccaaagggaagtgcccgtgctagagccactagatacttttatcatttagaagtcctattggttattgtgagtaggtgagggggcaggatatgtggggaaattagttgtaatgtaaattctgaaattttgaaaatcaattcaaattgcaagaataataaatttgatctaaaa

SEQ ID NO: 116129 - DNA, 453 bp, Glycine max
  Clone ID: PAT_MRT3847_75875C.1
cccacgcgtccgcccacgcgtccgcccacgcgttcgaagcaaatactaaaactgatatgtgggggctgaacctccgttatgtttttgtcattctcatgcaaagagattccgaggaaggatcagaaggtctctatagcctaaagttcacttctaaggaacaggaacaaagtgatgatgattcctatactgttgcttttgaggatcatgctgatgccaacaacttctgttttctattaaaatcgttttttgaagatttggggtcttttagtgctgatgcagttccaatgtcaatacaagaactgaatgaagaaataatatcacgtgccaagaaagtcgtagttgtgaaaaagaggcagcttcaactctatgctgggcaaccacttgctgatgttgaaatggcattgggctctataatagagcaagatcaaaatgcaccatcatcgccgtgatatg

SEQ ID NO: 116130 - DNA, 268 bp, Glycine max
  Clone ID: PAT_MRT3847_75876C.1
acagctccttttagtcttcagacagcgatccacacaactaagtaatagtgtcttttataacccccccaaccttaacaacaccatcttctttgctctctttctctcttttgccttcaccacctcatacctaccttcatccatctctcatttctttctctataataaacctaaccctccccaaaataattgcacatattacatctcatcatacataacatcattttatagaataaaatcacccccaacttgaaattaaatattccctctc

SEQ ID NO: 116131 - DNA, 582 bp, Glycine max
  Clone ID: PAT_MRT3847_75877C.1
ggttgtcgcaccttaaaaccggaaacaaaagcaatcgtttcttgattccaagaatttcttaatttcttcctacttttttgagactatttcttaagggaaagaaaattatttttgtgcagtccaagactttgtgaatcaattattttttcattcttatgttatttgctgaacactttcctatttgatattaggacttttttgtacagattttaaacattcttactgctttctttttacagtgctttgatcaatttcaagcttaagctggtgaaatcttggattagtgctcccactcttcttatcggtttaggactttgtggtgtagacttttttattacttttcttatatttcaactcttttcttctcacttgatccgcattggccgttaaaaaggtgtacttaattttgaaaaaccatcttgggcagttgggtgcaacatgtttgctttcattaaattatcttttggaatacaatcaaggttatctttagacaaccattttttaatttcgataattacggacatccttggttggtcatttatctattgcaacctaatttaataaaattattaccacatttaa

SEQ ID NO: 116132 - DNA, 420 bp, Glycine max
  Clone ID: PAT_MRT3847_75878C.1
attttcagtcagtggtagcctctcgaaacgaatattctttgcttaatttttcatactttttttattttatagaggcaccatctttttctttctcgaacagccactgcatccgatactgtttccctcatcatcttgagagcaattttgcttgttcctgtctcgaacctatcaccaaaagtttaagaaaatggatcaacaagttgagaggcagaagcgtggcaaggagatgaagaggaagtgtagtaaagtgaacaagcgcaacaagttaatgacatgttgtcgctgtccctgtcgtgcagcatcgtgcatgttccgaggtattgggaggtgcatgtttgtcacatgttaccctgttgtgcagtgcttgggcttggatgaacataggcatcgccaccatcatcaccatggcaagcactttga

SEQ ID NO: 116133 - DNA, 123 bp, Glycine max
  Clone ID: PAT_MRT3847_75879C.1
ggctcgagcaaaaatagacatatttctcgaaactaattttgtggagctctgtcggtgaagagagaagcgaacattctcctctttccattcgcacgttcatctgcacttctggtacgcttattt

SEQ ID NO: 116134 - DNA, 459 bp, Glycine max
  Clone ID: PAT_MRT3847_7587C.1
tttttagtgaaaatgagatttaatcaggtaaaatttacatcatgcattgcactagcatttagcattcccccacccccaccattgccaatatatttattagcaatggtggaaaaatatacaaagaagcacacatcgtttgcagtatgcacccttctccttactacccccaaaaccaaaaggcaaaaaaaaaaaaaaaaaaagcacataataactccgtctctgtcactcaggccaatcgaggaacttgtgacccataagtgatgggggtaagtaagtttgtgttgcggggggattgtcgggagtgtagatgtatcccttcccatatccaaaggccttcattaatttggttggagcattcctcaaatggagtaggcacaccctcattgggtccaaccgattccctcactgtcttctgagcgggtcctatgggtcgataaacagcaacatacttaagaagcc

SEQ ID NO: 116135 - DNA, 438 bp, Glycine max
  Clone ID: PAT_MRT3847_75880C.1
ctgtagcggacccacgctcacgtgcgcgaagacgccagaaggtgatgttcatatagtgacaaccatatctattctaacaggccgcatccatacgacaaacatgactgtgtaaaccttagcattaccaatctttattttgtcgttgaccatacaactttcgactggtgtcgttatagcaaaacaggaaccaccgcttgacacctcaaacacaggagctgacaacaggggtgatgtgctacaccctagcagcggttcattaacacgcgtggaggcctaacattctcacgacagggcaccatcacatgcccactctttgaggtgcaagagatgcttgtaatgttcaatgggctcctcagatacctcgacaccttacaatgccaaaagttatgtcattctatccttaaccgatctcaacataaagctctacgtgaaaagcac

SEQ ID NO: 116136 - DNA, 372 bp, Glycine max
  Clone ID: PAT_MRT3847_75881C.1
ccaaaacaaatagcttttttttataggaataggaaaaagcatcaacttatctttgtgtgtcccaaaagtgcgaaacgattcccaacaagtaataacccccgggcgggactatttttggggtttaaacatcgacaaagtcatcagaagggctaaccatacatttttttttatttttatttgattttgggagacattcccaatcccatttttgggcgttataaaaaaattatcacccccattttactcattcaaactggggaagagggaactttttttggaaaagtttttccagagggaaattggtgggggggccccagggagaagtttccaaattcaaaaaatcaattggcccccgccttctttggggggggg

SEQ ID NO: 116137 - DNA, 451 bp, Glycine max
  Clone ID: PAT_MRT3847_75882C.1
ctcacttcgtgcaggtaacgcatgctttttttttttgttacttttcgatcgaaggaaatgctgtttcattagatggatagaacccacaaattcaactggcttatcaccttcactattgttattactcctcggtggctcttcccagcgccatgaaaaattccaattaatgtactatcaacttgaaaatttgggctaatcccttctttttttcttctgggttttctcttgtagattgcaggagcatcaaatttataatgtgtcttgtgtttcattctattggctaccattaagttcaatttgcttacttgcttttgtttgttttattgcgcgctggttgtgattcaattatggttcctgttttgttgtgtatgaattgtgaaatatgcatatttcagtatctggggcagaaaaatatgagatgagcatttgatgttttgatttggattgtaaa

SEQ ID NO: 116138 - DNA, 535 bp, Glycine max
  Clone ID: PAT_MRT3847_75883C.1
gggggcgggggccctaaaaactataaaacaaccccaaaaaagatgaaaacgggaagaaacaaatcgggggggaacccaggtccccaagctcctaaaaaccgggggccgaaccaacaagatggaaaacctgggggcaaagaagtggcccctttaccgccaaccaaaaaaattgcccctcccttaacaaaacctaaaacccccaaaccaaaatggccctagggggaaaagaattttcaaaaaaacttagccggcctggccctgttttttttaatggctttgaaaaataaagtgatgggagaaaagggccccacttggccaccaagaattagacaaaccccacaaagcgggagggcccatcacccggaaaaggggcccccagggttaatgaatccccccccttgtgcggggcttttccccaaaatttgaaaaaacaggggggggcccaagcggaaaaagaaaaccgtttcggtccttgtaaaacacccggaaagccctcttaaaccccccccctgagaggggggttgttatttgggga

SEQ ID NO: 116139 - DNA, 301 bp, Glycine max
  Clone ID: PAT_MRT3847_75884C.1
ccgttgcgctcctgagcctggggttcctcgcctcgatgggttcggtgtggcggctatcaccgccttcatgaatctacagggcataaccggaagaacacctgaccagatagttgacaggccgtacaggatcatgacaagggcgtagacaagactcggcagaacaatcacgggtcaggctttaatctgactcgaccacatgatcgatcatctgtggatattctctttgctagtagttatattacattatgatgatgaatcatgattgacgtaaagttgaattgaactctcttttttggatttt

SEQ ID NO: 116140 - DNA, 310 bp, Glycine max
  Clone ID: PAT_MRT3847_75885C.1
cccaccccccccgggaaccctggggggacccctggggggaaccctggggggaaccctgggggggcccctgggtaaaacccggaatttcggaacgggacctggggggggaacaatttttcttaatggggggcgaattaaaacctgggggaaaaatgggaaaaaaatggttcctgggagaaaatggtatttcccaaaaatatcacacaaaaaaaaaacccgaaaaaaaaaatggaaaacctgggggggccaatgggggggcttccccaaaataaatggggggggcccaatggccggttttgaaaggggaaaa

SEQ ID NO: 116141 - DNA, 104 bp, Glycine max
  Clone ID: PAT_MRT3847_75886C.1
gcacgcacgcgcacggaagcccggacgacggctcgagagatccagtggcttcacctcccacgtcgcaatggcaatggactcaagggtacgtcaagcaaggagtg

SEQ ID NO: 116142 - DNA, 411 bp, Glycine max
  Clone ID: PAT_MRT3847_75887C.1
ggggccggtcaattctgtcttaccaacatgatatcttgcaaaatggtctaaacataatccaacgggaagggggcaagggcataacaagcgtacgagccactttatttcttcagtctactatggctgcaaatctagtaaatactttaatgctgggaggtcaactcatcttgctatatttttaaaattgggggccgagaacccaaacatcaggttctcagtatatgccctgcgatcattgtagtatgacacccacatagagtggtactgccctttcctacatcggggagggccttcacctgtctgaacaagagccgactacactggatttggattccaatctatctaggtacccattgcatcactgtttcattcacaccattacttccctactgtgccaccacttgactattc

SEQ ID NO: 116143 - DNA, 271 bp, Glycine max
  unsure (1)..(271): unsure at all n locations
  Clone ID: PAT_MRT3847_75888C.1
gggaattatatgatttctatctgctatcgntagggagcagctttttacagtccactaaactgctagcattattggggtttgctactcaacatcgctacccaagattaaccatttcactactagttacaagttaatgaagttacgcagtaccgtgctcacaatttccttggaaatacttggtacttggcagtaatgtggagtatacttttaatttaaaagcttgaggtataaaatacctgtgtatgatgattttacttctcagagattcaaa

SEQ ID NO: 116144 - DNA, 553 bp, Glycine max
  unsure (1)..(553): unsure at all n locations
  Clone ID: PAT_MRT3847_75889C.1
cccccttccttttgaatttcnanggagctccagcgcggtggcggncgctctanaactagtggatcccccgggctgcangaattcggcacnagcacacacatagtagctattatacnctctagagtaattgcggaatctgctagaattttctaanaatggcgaaagacnttgagcncgtcacagagcnaggtgaatactccgcgaaggactaccatgaccctcctccggcaccgttgatcgacccatatgagctcncaaagtggtccttgtncananccgccatagctgagttcatatcnacactcctttttctttacatcaccgtgttgacccttattggctacnanagacngagtgacncctnaatcccccggttnacacnnaatgtgaccgcgtttggcatttttgggccntcccttnggccttccggtggnatgatcttccnccctgtttactgcantgnnngaatctnttggggganacttcanccctncnggtgactttcgggttgttcctttggaccccaagtntcttttggtnaggggnttctttt

SEQ ID NO: 116145 - DNA, 347 bp, Glycine max
  unsure (1)..(347): unsure at all n locations
  Clone ID: PAT_MRT3847_7588C.1
tttaggcacaaggtttatcaaattaaaatgccacaacaaatgacatgaaatttctcagcaaacctctaagctaagatttcaacaaatttgagacaaactcaaggcgtggtaatgttcaggcttttggactcatcacaaccgcaatatattcttgtggaaatctagggtgaaccacnnnnccaagtggtgaacaggtggaaaactttgctgaagtttgttgaaagtggtccatggatgaggaagtttgttatcagccgttggatatatnntatttaaatnnnaacggtaaaaaagattggactgtgatttgatggggacgcatttctttgtttatttattaaattaat

SEQ ID NO: 116146 - DNA, 213 bp, Glycine max
  Clone ID: PAT_MRT3847_75890C.1
catatcaccaatcttcaacaaatgtcttggggaacacgggcacatgcgagtacgcatactctctcatttactcagatgaccaaaatttcgctctatctggcatacccaaatcattcttatattcttccttctaacaagaaccctctgtcaattcttcacgacggacatccttgacaatatggacgtactacttttctcaccaaactagtttat

SEQ ID NO: 116147 - DNA, 586 bp, Glycine max
  Clone ID: PAT_MRT3847_75891C.1
tcgtgtttcaaatcagaatactcgtggggtgaagaatattcatactgctgctgctgaacgcagtcacttagttaaaaattccacattgatgaattattctgttaggccttgttctcaaaacaagacattggggagggatgctcataatctgctggagtattttaagaagatgcaggctgagaatcctggtttcttctatgcgatacaacttgatgaagagaatcgtatgtctaatgtcttttgggcagatgcaagatcaaggacagcatacagttattacggagacacagttcatctggacacaacatacaaggtaaatcaatatagagtgccatttgctccttttactggggtaaatcatcatggtcaaatggttttgtttggttgtgcactcattttggatgattctgaggcatcttttctgtggctcttgaagacatttctcacagcaatgaatgatcgccagcctatctctataactactgatcaagacagagccatgcagacagcagtttctcaagttttcccacaagctcgccattgtattagcaagtggcaaatcttgagagaaggccaaaaaaagttg

SEQ ID NO: 116148 - DNA, 431 bp, Glycine max
  Clone ID: PAT_MRT3847_75892C.1
cactaggtctgcggccgccccttcttttttttttttttttttttttttttttatttttttctgaagagccaaaaagctaaaccacgactttccgttatggaagacgaattgttctgcgtgttttacacaaaccgagtactcggacggggcgctgtgactcccgagaactttttccggcgggaaaccacagcttcttaatgtcctcccccgtccggattccgaagtttcggatccgacgagcttgtatccgccgccaccgccggggacgaacccgggccctagcctggcgccatcctcgtgccgggaatttgcgccacccgattcctcctatgtatccaagccgagataccctctcaccttcactaccgttggcttttacaaggctacatgggacgccttatggtggtaacgcccccagagatcgtgtgttt

SEQ ID NO: 116149 - DNA, 116 bp, Glycine max
  Clone ID: PAT_MRT3847_75893C.1
tgtccttttttacgaaccgctctcctaagaaggggacgggcaaacaagacagcgagaggaaccactccgcgtacccaacaatcatcaatatggctgctactggagagccgaccacc

SEQ ID NO: 116150 - DNA, 215 bp, Glycine max
  unsure (1)..(215): unsure at all n locations
  Clone ID: PAT_MRT3847_75894C.1
tagtcctcaaccacccttcttcacttcccttcacattgcagaagagatggctcttgtgaaaccaatttccaatgncantnccnaanttnggnagangcccaaganggggntnacatcaatncgacctaatanatgcgcatgcacccacacacacctcatcaaagcatgagacagaggactaggcttgatcagtcacatntgggnggcttcaaggc

SEQ ID NO: 116151 - DNA, 224 bp, Glycine max
  Clone ID: PAT_MRT3847_75895C.1
gagagaaaaggatcaaatagttacaacctttgattatttccctacataattttttttttattttttccattcaacagcgcatcataacaccgcagcctgggacagacaaacatcattaacacaaattacaatcctcataccgtacaataggtctttagagattacaagggttgcatatctgctttaattaaagccctcaccactgatgttcaatagacctacca

SEQ ID NO: 116152 - DNA, 364 bp, Glycine max
  Clone ID: PAT_MRT3847_75896C.1
gatcaacgagtataattcttcaaaaaattatatatatatatatatatatatatatatatatatatatatatatatatatcaaatgtgttattattttcatacactcatttttttctcccaacccatttcctccctatctctttattttccatcatatctatcaaatatttcctctatttcacccctacaccgtaaaaatgaagcgtatatttaccatctaacatatttatattaataatttatgtatgaatatctataaataaaaatacacgtatggtaatacgcccagagctcgctttattggcaatttgagagggaaaaagcggagcatccgcacaggaattcattcttcatgaatcatgac

SEQ ID NO: 116153 - DNA, 1787 bp, Glycine max
  Clone ID: PAT_MRT3847_75897C.1
ggctcgagagctcgtcgcgttcgtctctctctctctgagctcgatttattgggctcttcgaattcggttcccgatttccgacgagttctatcattcacttcaatcttcggaaatgcctctcagactcgaaatcaagcgaaagcttgcgcaaagatcagagagagtaaagtctgtggatctacatccaacagaaccatggattctagcaagtttgtactctggaactgtctgtatctggaactaccaatctcagaccatggccaagtcttttgaggttactgagttaccagttaggtcagccaagtttattgcacgcaaacagtgggttgttgcaggggcagatgatatgtttattcgtgtatataattacggtacattggataaatgcctagtattggtggtagatacagattacattccggaggtagctttaatggctcgatcttatcttctaagtaaggtatcagatgaaatggccatttggagaaaagacctcaataaggttaatccaaaagctgctgaatcattggctgatcctgaagaatatccaaatttgtttgaagattggcaggttgcactagctgtcgaatctaaagctgtggaaacaaggaatgtgtaccctcctgcggagcagtacgtcaaccatgctgacaaatcacaaattacccttgttgaagcctttagaaacatgcagattgaggaaggagaggagcatctggagaatggggactctactcatgagttgacagaacaaagtggagaagagcactacacagaggatcaggaggaacagaatggagaggaaggaagccaagaggaggcagttgtagtggatgcagattctacagatggtgcagtactcgttaatggtaacgaggctgacgaagagtggggtacgaataatgaaggagccccgtcagcctaaaagcaattggttggggtggtgtgaaaatcaaaattttgtctctgtgcttgcgccacatcactaggtcccatcaagacagttggttccagcttctgggatttctatctgaggtcttctcaaggtgccacgaagagattttatggactggttgtttgtttcctggtgttgtggttttgtagtgccctgaattttgtcattttgcgcgtggtatgaacaatattccttagggtcagttacaatttactagagtttatatatagcacattcttttggggcttttacctcaatatactcgtgccattgtgaatgtagaaaagcggaactagggacgggtgcctgtttaaattttagatagttatttttttttaatattttttcttgatcatttttttaatttttatattttcctggattgtaaacatggatggttaatagagaaaataatgattcttcccaaggatgcttcgggttgtgataggctatgatgaaggtactattatggtcaaacttggccgagaagaacctgtagccagcatggataacagtgggaaaataatttgggctaagcataatgaaattcaaactgtcaatataaaaagtgtaggagcaaatgtggagattgctgatggagaaaggctaccattggctgttaaggagttgggcacctgtgatctctatccccaaagtttaaggcccaatcccaatgggaggtttgttgttgtttgtggaaatggggagtatattatatacactggtttggcatggagaaatagatcatttggttcagctctggaatttgtttggtcttcagatggggagtatgctgtaaaagaaagtacatccaaggtcaaaattttccgcc

SEQ ID NO: 116154 - DNA, 3751 bp, Glycine max
  Clone ID: PAT_MRT3847_75898C.1
cgcgttttatctatggtcttgaaagagtctgggctgggggatacttgaagagttctcggggggttgcgattggctatgatgaaggaacaattatggacaaacttggtcgagaagtacctgtggctagcatggacaacagtgggaaaattatttggtctaagcataatgaaattcagactgtcaatataaaaagtgtaggagcagatgtagaggttgctgacggagaaaggttacctttagctgttaaggagttgggcacctgtgatctctacccccaaaatttaaagcacaatccaaatgggaggtttgttgttgtatgtggagatggtgagtacattatatacactgcattggcatggagaaataggtcatttggttcagcactggaatttgtttggtcttctgagggagaatatgctgtcagagaaagtacatcaaagattaaaattttcagcaaaaatttccaggtttgtacttttttaaaaactttgtttcctctctaatctcgtgcaatcttgttctgtgtgtaatgaaccaacaagttcttgctatttcttaaaaggaaaagtttaacaagatgctgccattcttgtaccgtgttagactgttaggcatcccacagttgcagaagttatgagaggggaaaaaaggataataatgagggggaaggatcagaaagaggaactaggctgtaatgaccttgcttatgtggcaaggggtgtgggaagggaatgtgggggagcaaggatgaaagttagaagaggatgcaacgataaaagttagaagaggatcatagtggattcattcagtcgtggagtaaggaaattgaagcctttgggcaaggatgaagcagcctccctatgtattgcagtatctctgtctattctttctatttctgttctgttttccatagatgtatggattagatcctggactcatatcagtaacagtgatcatattccgggtattcaataaaattattgttatatttgtgggttcttataattctgtttttgacaaggagtgtgtataaaactatgcaagctattaattttccttatgaaaatcatttatgtctgaactagagattgacaaatttgcttcaaagcctgtacaaagacttctttactttcattatcgtttattgactgccttggttatcactctggaaggttcacaaaaatttaatcctatcattgttatagctgtcttcgaattgaaataaatttgctctagggaatacttagtttagttggaatttaaacaatgggtatttcaggaaaagaggagtgtccgaccaacattttcagctgaaagaatattcggtggcactttactggcgatgtgctccaacgatttcatctgcttttatgactgggctgaatgcaggttgatctatcgcattgatgtcaatgtgaaaaacctctactgggctgacagtggtgatctagtaacaattgctagtgatacatcattctacattctgaagtacaatcgtgatgttgttgtatcacatttagatagtggaagacctgtagatgatgaaggtgttgaagatgcttttgagctcttacatgaaatgaatgaacgtgtcaggacaggcatctgggttggggattgctttatctacaacaatacctcttggagacttaattactgtgttggtggtgaggtaactacgatgtttcatttggaccgccctatgtacttgttgggatatcttgcaaaccaaagtcgtgtttatttgattgacaaagagtttaatgttatgggatacacactgcttttaagcttgattgagtacaagacacttgtgatgcgtggtgatttggaaagggccaatgatattctgccatcaatccccaaagagcatcataacagtgtggctcatttccttgaatcacgagggatgatagaagatgctcttgaagtagctactgaccctgagtacagatttgatctatcaatacagcttggaaaactagatgttgcaaagagtattgcaatagaattacagagcgagcctaaatggaagcagttgggagaattaactatgtctactggaaagttagaaatggctgaggaatgtttgaagtatgcaatggatttgagtggcttgttactgctatattcttctttaggagatgctgaaggaatatcaaaacttgcaatccttgctaaggagcaagggaaaaacaatgttgcattcctttgcttatttatgttgggtaaattagaagactgccttcaactgttggtagaaagcaatcgaattccggaggcagctttaatggctcgatcttatctcccaagtaaggtctcagagatagtggcaatttggagaaaagacctcaataaggttaatccaaaagctgctgaatcattggctgatcctgaagaatatccaaatttgtttgaagattggcaggttgcactagctgtcgaatctaaagctgtggaaacaaggaatgtgtaccctcctgcggagcagtacgtcaaccatgctgacaaatcacaaattacccttgttgaagcctttagaaacatgcagattgaggaaggagaggagcatctggagaatggggactctactcatgagttgacagaacaaagtggagaagagcactacacagaggatcaggaggaacagaatggagaggaaggaagccaagaggaggcagttgtagtggatgcagattctacagatggtgcagtactcgttaatggtaacgaggctgacgaagagtggggtacgaataatgaaggagccccgtcagcctaaaagcaattggttggggtggtgtgaaaatcgaaattttgtctctggtgattaattgtttctgaagtgccatttctaactaccatttgacaactagctgtttttactataactactaccacctgagtcctaacaattctaattcctctcaatttttaatgtattggatactactctgcaattacgctgtatatttgggaatcagggaggaaataataaaataacgtccattgtgtcaataatgaaacattgactaaatcttgtgactattttcccatgattatatacaactattgggtttgggagtctgtaaaagtcacctcaataaagctctttcctttttaaatttgttccgattggttcttagtcctaacttgaatattcatctttgttggcagtgcttgcaccacatcactaggttccatcaagacagtctattccagcttctgggatattttatgaggtttatcaatcgattaacagtttttggttattattatgatcttattaccacccggatagactatttttggtttgataaagcattccttcattcaatttggatgctcacatagacgagtagtgttgcaaaaagaagacatgctcgtgtttatgtgcatccgcaggtcttctcaaggttacatgaagagattttttggactggttgtttgtttcctggtgttgtggatttgtagtgccctgaattttgtcattttgctcgttgtatgaacaatattccttagggtcagttacaatttactagagtttatatatagcacattcttttgaggcttttacctcaatatactcgtgccattgtgaatgtagaaaagcggaactagagacgggttgcccgtttaaactttagataagttttttaaaaaaatattttttcttgaccattattttaatttttatattttcctggattgtaaacatggatggttaatagagaaaataatgattcttccc

SEQ ID NO: 116155 - DNA, 1705 bp, Glycine max
  Clone ID: PAT_MRT3847_75899C.1
ggcggagcttgtattcggctggcgctgttgtgaggctctcttggattgatgggggtgtggctcatttcctggaatcacttagggatgatagaacgatgtctcttgaagtgacctgactgacacctgagatacagcattggatctatcaatacagcttggaaaactagatgttgcaaagagtattgcaatagaattacagagcgagcctaaatggaagcagttgggagaattaactatgtctactggaaagatagaaatggctgaggaatgtttgaagtatgcaatggatttgagtggcttgttactgctatattcttctttaggagatgctgaaggaatatcaaaacttgcaatccttgctaaggagcaagggaaaaacaatgtcgcattcctttgcttatttatgttgggcaaattagaagactgccttcaactgctggtagaaagcaatcgaataccggaggcagctttaatggctcgatcttatctcccaagtaaggtctcagagatagtggcaatttggagaaaagacctcaataaggttaatccaaaagctgctgaatcattggctgatcctgaagaatatccaaatttgtttgaagattggcaggttgcactagctgtcgaatctaaagctgtggaaacaaggaatgtgtaccctcctgcggagcagtacgtcaaccatgctgacaaatcacaaattacccttgttgaagcctttagaaacatgcagattgaggaaggagaggagcatctggagaatggggactctactcatgagttgacagaacaaagtggagaagagcactacacagaggatcaggaggaacagaatggagaggaaggaagccaagaggaggcagttgtagtggatgcagattctacagatggtgcagtactcgttaatggtaacgaggctgacgaagagtggggtacgaataatgaaggagccccgtcagcctaaaagcaattggttggggtggtgtgaaaatcgaaattttgtctctgtgcttgcaccacatcactaggttccatcaagacagtctattccagcttctgggatattttatgaggtttatcaatcgattaacagtttttggttattattatgatcttattaccacccggatagactatttttggtttgataaagcattccttcattcaatttggatgctcacatagacgagtagtgttgcaaaaagaagacatgctcgtgtttatgtgcatccgcaggtcttctcaaggttacatgaagagattttttggactggttgtttgtttcctggtgttgtggatttgtagtgccctgaattttgtcattttgctcgttgtatgaacaatattccttagggtcagttacaatttactagagtttatatatagcacattcttttgaggcttttacctcaatatactcgtgccattgtgaatgtagaaaagcggaactagagacgggttgcccgtttaaactttagataagttttttaaaaaaatattttttcttgaccattattttaatttttatattttcctggattgtaaacatggatggttaatagagaaaataatgattcttcccaaaaaaaaaaaaaaaaaaaaaaaaaaaaaaaaaaaaaaaaaaaaaaatcaagaagaaatcaagtaaaaggtgtagacagtaagttgtgatatgctcgaattagaacactccgcagatgcaaga

SEQ ID NO: 116156 - DNA, 879 bp, Glycine max
  unsure (1)..(879): unsure at all n locations
  Clone ID: PAT_MRT3847_7589C.1
caacaaggggaagctcttctatcatggaagagaaccctgaatggatccttggaggtattgagtaactgggacccagttcaagacaccccatgtagctggtatggggtgagttgcaacttcaagaacgaagtagtacaattggatctgaggtatgtggatttgcttggaagactccccactaatttcacctcattgctttccttaaccagtttgatcttcaccggaaccaacctcactggttcaatcccgaaagaaataggtgaacggctcgagctcggctacttggacttgagtgacaatgccttgagtggtgaaatcccaagtgagctatgttacttgcccaaactcgaggaactccatctcaactccaacgacctcgtggggtccattccagttgcaattgggaacctcacgaagttgcagaagcttatcctctacgacaatcaactcggcggcaaaattcccggcaccatcgggaaccttaagagccttcaagtgataagagcaggtggaaacaagaacctggaaggccttttaccacaagaaattggcaattgttccagtttggtcatgttgggtcttgctgaaactagcctttcaggttctctacctncaactcttggccttttgaagaaccttgaaaccattgccatttacacttccctactctcaggtgaaataccacctgaacttgggtactgcacagggctccaaaacatatatctttacgagaactccctcactggatccataccaagcaagttgggaaaccttaagaacctcgaaaaccttctcctgtggcagaacaacctagttggcaccatcccttcagagattggatactgcgagatgttgtcagtgattgacgtgtcaatgaac

SEQ ID NO: 116157 - DNA, 545 bp, Glycine max
  unsure (1)..(545): unsure at all n locations
  Clone ID: PAT_MRT3847_758C.1
tatgacgtacgcactgcaccgcgctacgctaagcctatggtatncctnnctagaagacggcacgcacccttttcttcttttcttttcttttcttttcttttcttttcttttcttttttctttttttctttttctttttttcttttttttttcttttttttttttctttttttttttaaaaggaaaggggaaaaaaaaagaaaaaattttttttaaaaattggcccccgacttaaaaattggtaaacctttttaatgggggggctaaaaaaaaatttttttaaaaaaaaaaaaacccccgggggttaaaaggaacccttccccttaaaaaggcccctaacccaacaatttgggggggcctttaatcccccccaaaatcacaaaggggacccccgggggggggggccctggggggtgggggaaaaaaaaaattttctttttttaaacccccgggggaaaattgggggggaaaaaacccaactttgttggcccaaggggggggggggggggccaaaaggggtcccaaagggccctttcccggggcaaa

SEQ ID NO: 116158 - DNA, 3516 bp, Glycine max
  unsure (1)..(3516): unsure at all n locations
  Clone ID: PAT_MRT3847_75900C.1
gcgagttcggtcatccggctctctctctctctctctctgagctcgtcgaattcgaaatctgatctccaacgattgatctcggtagagagctagtgcactctccaatctgcaaaaatgccctgctcagactcgaaatcaagcgcaagcttgcgcaaagatcagagagagtgaaatgtgtggatctgcatccaacagagccatggattcatggctgagtttatactctggaactgtctgccatctggaactaccaatctcagaccatggccaaatcttttgaggttaccgagttaccagttagatcggaaaagtttattgcacgcaaacagtcggttgttgcttgagcagatgatttttttattcgcttatataatgacaacacattcgataatgtcaaagtattttaagcacatactgattagactagatgtgtaaaatttccaacatatccttcattaagtgctttaatcatctcatgatatgctcataaatcatgtgggtcctgaaaaaagggtggaccagtaccagaattcatgaggaatgttttaattatatcatccacctaattttttagttcatgggcatttgccaaaatatctgaaagctctcttgtcagttcaattctgatatggaatcttggctctcctgatccttgtgcaaacttttggttgcttagcataaaggaatttattattttgattattttacaggaggtaacaaaccatatataatcactgggtgtgatgatcacactgctatgggatgggtttatcttatcaaaagttgtgtcaagtccctatatcatagcacacacaatgtagcttgatatatgctttcatcccgtactatttataaacttctactggttctgtggatggcatagtacgtatatggatctccacaacttatggttttgagaacacattaaactatggtcatgaaagagtttagattaatttgtttatatcaataggtatggtatcgtcatgggcctgtgcaatttcatgcttgttttcgaacttcaaagtgacaacttgccaacttcaggtatgtcgctccaagccttgatcccatgatttggcgagcttgaagcaattggcggctttatcgaagagatcggcggcatcttcatacttggagccaaacaagccccaaccgctgagcttcttctcagcctttttctcgaattcctctcccttcgataactgatcggccattttcctccgatcgaaacaaagcaattgaagatggattgattgatcgaattcagtgcgttgcaggaacaagaagaagaagaagaagaatcttaatgaaagaaggaaaaagatgttaatgagaatactttaaggacaaaatcttaaccaaaaaaaacccgcaaatgaagaatatccgaagcagattttcacctgaaagaatatttggtggcactctactggcgatgtgctccaacgatttcatctgcttttatgactgggctgaatgcaggttgatctatcgcattgatgtcaatgtgaaaaacctctactgggctgacagtggtgatctagtaacaattgctagcgatacatcattctacattctgaagtacaatcgtgatgttgttgtatcacatttagatagtggaagacctgtagatgatgaaggtgttgaagatgcttttgagctcttacatgaaatgaatgaacgtgtcagaacaggcatctgggttggggattgctttatctacaacaattcctcttggagacttaattactgtgttggtggtgaggtaactacgatgtttcatttggaccgccccatgtacttgttgggatatcttgcaaaccaaagtcgtgtttatttgattgacaaagagtttaatgttatgggatacacactgcttttaagcttgattgagtacaagacacttgtgatgcgtggtgatttggaaagggccaatgaaattctaccatcaatccccaaagagcatcataacagtgtggctcattttctggaatcacgaggtatgatagaagatgcccttgaagtagctactgaccctgactacagatttgatctagcaatacagcttggaaaactagatgttgcaaagagtattgcaatagaattgcagagcgagcctaaatggaagcaattgggagaattagctatgtctactggaaagttagaaatggctgaggaatgtttgaagtatgcaatggatttgagtggcttgttactgctatattcttctttaggagatgctgaaggaatatcaaaacttgcaatccttgccaaggagcaagggaaaaacaatgttgcattcctttgcttatttatgttgggtaaattagaagactgccttcaactgttggtagaaagcaatcgaattccagaggcagctttaatggctcgatcttatctcccaagtaaggtctcagagatagtggcaatttggagaaaagacctcaataaggtcaatccaaaagctgctgaatcattggctaatcctgaagaatatccaaatttgtttgaagattggcaagttgcactagctgtcgaatctaaagctgtggaaacaaggaatgtgtaccctcctgcggagcagtacgtcaaccatgctgacaaatcacacattacccttgttgaagcttttagaagcatgcagattgaggaaggagaggagcatctggagaatggggactctactcatgagttgactgaacgaaatggagaagagcactacacatgctccagctcattcggtggaagaagagcggtggtgtgtgccacgtgggcaccaaggtggagggagtgaaggtcagaaagggttggatgaggactctgacaaagagaaaaacaactaccatggggatcctgtaaaggatccatatttgtttgaagatcctcaggttgcactagctgtcgaatctaaagctgtggaaacaaggaatgtgtaccctcctgcggagcagtacgtcaacaaagctgacaaatcacaaattacccttgttgaagcctttagaaacatgcagattgaggaaggagaggagcatctggagaatggggactctactcatgagttgacagaacaaagtggagaagagcactacacagaggatcaggaggaacagaatggagaggaaggaagccaagaggaggcagttgtagtggatgcagattctacagatggtgcagtactcgttaatggtaacgaggctgacgaagagtgggtgcttgcaccacatcactaggttccatcaagacagtctattccagcttctgggatattttatgaggtcttctcaaggttacatgaagagattttttggactggttgtttgtttcctggnggttgtggatttgtagtgccctgaattttgtcattttgctcggtgtatgaacaatattccttaggggtcagttacaatttactagagtttatatatagcacattcttttgaggcttttacctcatatactcgtgccattgtgaatggtaaaaagcggaactagagaccgggttgccccgtttaa

SEQ ID NO: 116159 - DNA, 417 bp, Glycine max
  Clone ID: PAT_MRT3847_75901C.1
ggaaaaggggacaaacccaaatatgggcgctgcattgtcacataacccccaaaaccttgaaaactaacaccactcaaatttgcccccctttgggaatttgaatacaaaaaccgggcatagttaataaacccctatgcccagagccaatggtggactgaaatttgataccgaccattatctatttggtatcaaaaaaaaagggcaaaaatctttatgtcccctcccccattttgggaaaaagggggaagggcatccagctggggcttaaagccttcaccttccctttaactaaagaatgggctcccatggcaggttaacatttccttaaactgataaagccctggtgcccttgttcttacctccaaagggccaagggggttctcctggagcacccctaaatgccttcaccccaaaggg

SEQ ID NO: 116160 - DNA, 264 bp, Glycine max
  Clone ID: PAT_MRT3847_75902C.1
tttgataacccaaccagtctctgtattcgtgcactggtttatacttgtggctgtggtatacattactctccaacctcttcatttgaaaatggtgaacggccgtcagatcgttgcaaaatcctatccgcctattgattcaatcaacaccactctgtccaaccttcaacaactccgatcgcactttaacgattttttgtctctctccgaccctcatactctctctcaaatgcccacctcttcaactggctcattccctcttcatac

SEQ ID NO: 116161 - DNA, 426 bp, Glycine max
  Clone ID: PAT_MRT3847_75903C.1
tacggctgaagacgacagaagggttatatacaaagtcaacaaagttatcacaatttaaattacaagaaacacatgttaccattgcatgtaaacaatgaattcaaattgtttgaaattttttacaatcacaccatcattcactcagtttgatagtagattccactcttcattgcccaagtcgtgtatttgtaatatcttaaatctcaaatataaaaaaaaaaaaaattaatattatctgataaattataagttaatattagtaaaaaaatattttaatatttttgttaaacaaaatacattttaatatttttatttaaatttaagtcttctatattatttttttaatttataaaataaataataatccttaacataagaaaaaatataaaaaatatattaaataaaataatataaaaatatagaaaa

SEQ ID NO: 116162 - DNA, 486 bp, Glycine max
  Clone ID: PAT_MRT3847_75904C.1
attaatgtgcacaaggatctttgttggttcctggaacattggaggcattacaccacccaagaacttggacatggaagactggcttgacacacaaaataattcagcagatatatatgttctggggttccaagaaattgtaccactaaatgcagcaaatgtactaggtccccaaaacagaaaagtttctatgaaatggaattctctaattggggcagcccttaacaatagaacaccaacaaaggttgttgaagaaaataaaacagctgaacctcagaagatatatcctttgaaggagcacatttatgcagagggagaacatggacaagattttcagtgcatcataagcaggcaaatggtgggaatgttcatcaccatttgggttcgatgtgacctctatcaaacgatcaggcacttgagtatcttgtctgttggctgtggaatcatgggttgcttaggaaacaagtcatctagcatctggtgggaaag

SEQ ID NO: 116163 - DNA, 182 bp, Glycine max
  unsure (1)..(182): unsure at all n locations
  Clone ID: PAT_MRT3847_75905C.1
atttgtcagggcatgctagataaatttattccttagaaaatatataataactagctcccaaacataaataaaatatactttnagtgagaaaataattcaagcttngtggttatttttctttttttaagttncattgaccgaaatattaaaagcttnctgacccggtcaatggcnaacctcct

SEQ ID NO: 116164 - DNA, 330 bp, Glycine max
  Clone ID: PAT_MRT3847_75906C.1
cactaatataaggccgaaggatagcaatgaggaataggggcccaaaccatcagcccaagggcagcgggaccccactaaaaaaagaaaaaagaagctcctatgctaccacaaagggaaatagtaacgggaaaaatccaaaaaggaaagcgtaacaatgacgcctcgggaatagacaggataggaaaggacaattcccccccaataggatggatcagtacctgcagggagcaggctaggatggaccctcaacaggcacactgcagcacccagctgggactttggaaagcttggagagcctagctccaaactggccaagggggagagaagcca

SEQ ID NO: 116165 - DNA, 469 bp, Glycine max
  Clone ID: PAT_MRT3847_75907C.1
cttatatattttttttaatgcggggacccgtgtttttacccgaaaaaaagggacgggccgggaacccggaaccgttacccgtaaagtacagactggacaaatggggggaacaatgaaaacttgtggtaaggggggaaaaaggtgatccgcgcgaaaaaatggaaaacgttcgccctggaagaaaaaagtgtaccccgtggcgtgcaaaataagggccggaacccataatgagtgagctgcgcccaattaacggtttagagccgagagcccacttgcgcgggggaaaacaaaaaatcccccctcgacaagggaaacgcgcatcgcgccaggagcggcggggtggttattggttacaagggggggactttttttacccagagggccgtgcccatctggactccagagagcgcctgacgctgggaactctgcttaggcccacaacggaaaattgtgcaggaggcggaaaacg

SEQ ID NO: 116166 - DNA, 423 bp, Glycine max
  unsure (1)..(423): unsure at all n locations
  Clone ID: PAT_MRT3847_75908C.1
gcgaaatgctaaggaaagaaagcaagcaatacaaaaaaaaaactcggattctgcgggtcaaatcaccctctttctcccatataagctacgactagtgtttagtgtcattccgcttcttcactctacactctctcaacacatgctttgcttagatcacagggttatgtggagagagaaactactctgattggatccctcactgtgcgggagtttctgtattattcagctcttcttcagcttcctggtttcttttgtcagaaaaagagtgtggtagaggatgctatacatgcaatgtctttaggtgatcatgcaaataaacttataggtggacattgttatatgaaaggacttnctagtggagagagaaggcttgttagcattgccagggagcttgtgatgagaacgcgtattttatttatagac

SEQ ID NO: 116167 - DNA, 421 bp, Glycine max
  Clone ID: PAT_MRT3847_75909C.1
tctaccctgaggttagccagtgataggatttcttattttcaacactacaaacaacctttaaggaaaagaggattatacagggatggatgcatcgccctccttagggacacggtagaaaagaaagaatcagaattgcatgcccttttggcagactcttctttggaagggtttccccaaaaacaacaaataagggggaccagggggaccccaacccaacttgtgggggggacgtcatgattaacgaatggcccggataagaagattgtttggggacaaaaacgacgttgccggtgaaaccacgaggattttaaaagaccctggccttgacaaacggggactcctaacagccttcccctttgaaggccatgttttttgtaacgaccggggccaccacctaccctgaagaagttttaattagggg

SEQ ID NO: 116168 - DNA, 1177 bp, Glycine max
  Clone ID: PAT_MRT3847_7590C.1
tcgcttacgcgtccgttcctatttacacattttctgtgcgctttaacaaacattcttgttcacacggtccgattctcgggccgattcgactcgaccaattggaacgagggaagtgttcccgccatgggaatggagcgagtgcagtgtgcctatgcctctctggacgaagcgttcgaaatagggaaagaggcgtatcaggggcagcagtacagccagatttacttcgcgcgccttcatttgatgcgaacacttttatattccctcgttcctcattggaaacccaattttcccgtgtgcacagtgctgggattggaagaggggaaggagtgtgtcattgttggaaccctctataaacacatgaagctcaaaccttgcattcttgatgagtattccaaggagagatcagtggtttccacttgtcaagccacataacttcatacacccggatgatcacctagttttggaagatgaaagcgggcgggttaagctcagtgggagtatcattttgccatctgaatatgtaacaggaattgtggttgctttacttggaaaggaaacgggggcaggtgactttttggttcaggatgtcctacatgctggcttaccaccacagatagaatttccccttaaatcaagggaagacaaatatgttgttcttgtgtcagggttaagtgttgggagcagcagctctaatcctcttcagtttcagcttctcattgatcatattacagggcatttaggagatgagaaggagcaaagtatcgcatcacaaatggctcagttgtctttgcatttattgagcgacctaccgaccgtattaatcgtcatttggctgtacagccagatttacttcgcgcgccttcatttgatgcgaacacttttatattccctcgttcctcattggaaacccaattttcccgtgtgcacagtgctgggattggaagaggggaaggagtgtgtcattgaaggaaccctttataaacacatgaagctcaaacctttgcattcttgatgagtatttcaaggagagatcagtggtttcacttgtcaagccacatatcttcatacacccggatgatcacctttttttggaagatgaaagctgtcgggttaagctcagtgggagtattattttgccatctgaatatgtaacaggaattggggttgttttacttgg

SEQ ID NO: 116169 - DNA, 519 bp, Glycine max
  Clone ID: PAT_MRT3847_75910C.1
ccacgccgtccgatgacatcatcacctcctacacctccctctccacttcccattagttttggaccaggcaaccggacatactccttctctgtatcttcaactacttccccacctttctctctggttccttcctcccacccatctgatgacaatcttcccctaattttgcacaagatcactaatgttccaccatcaatattttcattggatctccaacaattccaatccaatactacatgcctcaaggacttgttggaatggtttatacaaagatgttgcagttgctgtaacaaatttccttgaatcatcctaacgacacacaacatctcaagaaatcaaagtgttcaacagaatttgttcccagtgcttattatatatttagggactccaaattttccgcgtagacaacatctaacatgtctgctaaatctccttaaccatctttattttacctcttttaattttgccaactgtatgtattctcatttaataatgggtaaaataagtttggaatttcgt

SEQ ID NO: 116170 - DNA, 203 bp, Glycine max
  Clone ID: PAT_MRT3847_75911C.1
cacactcgtccctcaccagcacctcagctttactaccaaaaacactgacagtgcggagaggtgcaatatgaacgcatttctgtctttcatctcctacggttgccataagatacctagtttgtatcacagatcctacatgctctaatcgtgcctagaattataccacaacagattactgtgtgatgatttaaaagcttgattca

SEQ ID NO: 116171 - DNA, 377 bp, Glycine max
  Clone ID: PAT_MRT3847_75912C.1
cattggttccctgactgaaacgtagccattctcctagtggatcgatattacaaaaatatacactacctaaaaaaaaaaaaaaaaaaaaaaaaaaaaaaaaaaaaaaaaaaaaaaaaaaaaaaaaaaaaaaaaaaaaaaaaaaaaaaaaaaggggggcccccccttggggtttttttttttttttttaaaaaaaaaaaaacgcaccattaaaaaaaaaaaattttaaaaactccaaatgaactaaaaagggtttaaaagggaaaataagggtttttaaaaaaaaaaatttttttttaaagtgggccccctggggaaaggcccgttttgcgcgcgggaacccacgcgcagcgcgaagttggggtctcttttgccccccc

SEQ ID NO: 116172 - DNA, 350 bp, Glycine max
  Clone ID: PAT_MRT3847_75913C.1
ggccgcccttttctttttttttcctctgacaaactcaacgtctgctcttattgaagtatcaaaccaatgtttgttttgactacaaactaacgttacggatcctggctaaaggttctaccatgttatctttgccacttttgcaggattcggatttactacgccaatcaagctctatggggcatcttgacaactattgcggggctttatttcattgatgggggcccaaggattaacgtgggaaggaactatagctcccttgactgtgataactggtcctctccttgataaaacgaaacctatttgtgccaatcttatcactattaccttgctaggtttcgtggatggttata

SEQ ID NO: 116173 - DNA, 595 bp, Glycine max
  Clone ID: PAT_MRT3847_75914C.1
ataaaatatgggcatcaaagcgattgctttgtagcaagcgtgttgttgactctctatgccagtgtcggtgaacttgtggatgtggaaaagttgttcagaagaattgatgataaagatattgtagcatggaactcaatgatcttggctcatgctcggttggcacagggatctggtccctctatgaaactattacaagaacttcgtggaacaacctctttgcaaattcaaggtgcctccttggttgctgttttaaagtcttgtgagaataaatcagatttgcctgcaggtaggcaaattcattcacttgtagtgaaatcaagtgtaagtcatcatactttggttggcaatgcattagtctacatgtactctgagtgtggacaaattggtgatgcatttaaagcttttgatgacattgtctggaaagatgatggttcttggagttctatcattggaacttatagacaaaatgggatggaatcagaagctttagagctatgcaaagaagatgttggctgatggaatcacttttacgaagtatagcctttctctgtctatttcagcttgctcgcaactttcagctatacatggtgggtaa

SEQ ID NO: 116174 - DNA, 368 bp, Glycine max
  Clone ID: PAT_MRT3847_75915C.1
ccttgttagtggtgcttctgttcttggtcctgctattgatggtggctgtggtgctgctcctgctgcacctgtaagaactttgcagccttttcaaatttcttcttatacttctcccaccaccactaccacagccttcgaacccttttcaggtgtgatggcggcttcattggggtttcccttcacaagtgcacaatggagggagcttgaaaggcaggctatgatatacaagtacatgatggcttcagttcctgttccacctgatctcctcattcctacttcactcacatcctcttctcgctcttcctgcagtatgaccctttgttttctctggatggtggtttcaatctgaggttggcaaatagcactga

SEQ ID NO: 116175 - DNA, 694 bp, Glycine max
  Clone ID: PAT_MRT3847_75916C.1
cctttcgtcacctactccttcccttagcttcatgcatcaaaacaaagcaggtttatgtagttgagttgtttggagatcacactagtgatgacaaaacactgcatgaagttgagaatagccatcactcttatttgctttcggtgaaagaaactgaggaggaagcccgagcttcccttctttatagttacaagcacagtatcaatggctttgcagcattgcttaccccaaaagaagctaataagctctcagaaatggagggagtggtctttgtgcataagaaccagccaaagatctactctttgcacaccacaagatcatggaatttcgtggggttagatgggcctttaaatccttgggaagaagaatccgatcacacagatggaaacttgctagccagagcacaatatgggaaagacatcatagtaggaatgattgatagtggtgtgtggccagactcaaagagcttcagtgatgaagggatggagccagttccaacaaaatggaaaggagtgtgccaaaatggaactgctttcgattcgtctcaatgtaatagaaagatcattggagcacgttactacttgcatggttaccaaagtgcatttggccctcttaacgaaaaagaagactacaaatcagcacgtgacaaagatggtcacgggaagccacacagcttgaatagttgcagggcgtgtag

SEQ ID NO: 116176 - DNA, 141 bp, Glycine max
  unsure (1)..(141): unsure at all n locations
  Clone ID: PAT_MRT3847_75917C.1
cgccggcacncncagccgcgancaccaanccaatccctactacaccaccgaggcgnaacacagcggagcgagngaancgcagccaggaggagaacaggctaacacaggaggcaaagcggaggaggcccaagaancaaagga

SEQ ID NO: 116177 - DNA, 413 bp, Glycine max
  Clone ID: PAT_MRT3847_75918C.1
tacaagcctaattagctttctttctttgacatcaattcattagagaagaaagaatgagaaagagtcacttgcaacaaccttcatcagaagtgcaaagagagggagagagcagcaagtggatagagaagagaaacccaagttcagatgatggggcaaagaagacgactgaggccactggtcagacaaagaagcctattaatgaagacatcaatgctagtgctgatgccttcatcaagaacttcaggcagcaacttctcattcaaaggctccaatccatagagaattacgatcaaatgcttgcaaggggccactagctacctaatatatatccttaatttcacatttatatgggcgtaaacagctatatatgtaatgtaagctattatatgcatgcatgtatcatttctatatct

SEQ ID NO: 116178 - DNA, 167 bp, Glycine max
  Clone ID: PAT_MRT3847_75919C.1
ttcaatcttacaataccaattgctccagtatcttgcactaaacaacatggcggacaaagcagtcaccattcaaaccaggaagtttattacaaacatgcttctctccataaagcagctcatccctcatgtccttcatccaaggaaggctaatatttccaacgctgaac

SEQ ID NO: 116179 - DNA, 564 bp, Glycine max
  Clone ID: PAT_MRT3847_7591C.1
ctttttttttttttttttttttttttttttttttttttttttttttttttttttttttttttttttttttttttttttttgagcccccaaacaatcccctttttaaaaaacaccccccaaaggcaaaaaaaagggcccccccccttccaacgggcaaaaaagaacccccccccccactttaaaaaagggaaccccagggcaaaatggctttttttcgggttcttcaaaatggggggggctattaaacccccccgggtttattttgccccccagagttcccaaaaccaccggggagaacccccaattcataatttttggttcaaaaaggaaggggaccttctcaggggggggccggggcaagtaaactttgggaaaaacaaaatacccccctaaaaaaaggaaccggggtgccccccccaaaaaaaaaccctctctaacccggggggggcccggggccttttttttccggacaaaaagggccgggaaagcccaatttggaaccacccagttggcgcgacaaatcaaaggaaaccgggggagccggggaaattgcgggacccccct

SEQ ID NO: 116180 - DNA, 543 bp, Glycine max
  unsure (1)..(543): unsure at all n locations
  Clone ID: PAT_MRT3847_75920C.1
ntagtcccnggcnanncaggccnaacggctnttaaacgggtanaaggcnttccgggggnaaatttcccgnggcttccggaagcaaggcntnggaatggttgggcccttaaacnccaaattaaaggcnaacnaagnaatttgggaaacggangtttccccaaattttcccgnatttggcaangaaaggggattggaaattggaaaattggctncccctngnaaatnttcnaaaaattgggaattaanataantntgggattncctaaacctggtttcggaaggcaatttngaatttntgntttcgggggttttaaaccaaaggggangnccagggttaaaaaaggcttttttnccccaaaaaaccaaaggatttggttctttgggatggatnaaagccttgtgcttggggctaaaacaaccacccaaaggaaattcctttggaatgggaaaattttcccagtgggattcctnggttacccattttttgtgnanttgtctttatcctggtaagtcaattaaccttncagaagctgtcgttgtaaa

SEQ ID NO: 116181 - DNA, 386 bp, Glycine max
  Clone ID: PAT_MRT3847_75921C.1
ggcttgaggaacggcacttgattgacaatggccgtcacgaaaagcctctcaaactttctattcatggaaatgagctgcgtcgccgcatctcaagcagggaacttgaacatcacatattactgcacctacacggtgtggggcggtgccgtgcccagtggctgcgcatggctcaaccccggcgaatggtggaacataacacgtgacgaacggctacagaggatgacgcctctggggtcgaacaaactgcaccttcaacagcgcgggacgcgggaagtgccttactcacgactgcgatggtgtaatggtatgcaacaaaacaggtgcaccccgaaacacggtcgttgattatgcgttgaacgaacatatcaaccttgacatttacaaca

SEQ ID NO: 116182 - DNA, 557 bp, Glycine max
  Clone ID: PAT_MRT3847_75922C.1
gggagacagcaagggccatcctgagcagcctattatcatgaaaatgttggagaagttaggtggattgttaagggaagctgggtactgtcctgatggtagctttgtccttcacgatgtggatgaggaagagaagacacatagcttgggttatcatagtgaaaagctagccgtagcatacggactcctaaaagtgccagaagggatgccaattagagttatgaaaaatttgcgggtttgtggtgattgccattctgcaattaaattgattgcaaaagtcactggaagggagatcattttgagggatgctaatagatttcatcattttaaggatgctcactggtcttgcaaggactattggtgattccttggaacagtatggcataagatgtgacaaccggttgcttagttcctgaacatgatggacttgacaccatgtactttggtgccctggattttaaaatcggactgccgctccccttaaaaactgcagtggcaccaaaaaacacggaaagagcgtgaacgggcggctcgcacgcaagcccgcccataggaaagca

SEQ ID NO: 116183 - DNA, 1894 bp, Glycine max
  Clone ID: PAT_MRT3847_75923C.1
aattcggctcgagctcgagccgaatcggctcgagtacggctgcgagaagacgacagaagggggatctcaaacacacaaatcaaatgcacaatattcgcaccattgggtccgaacccaattgtgcatttgtgcattccattccatcacagtaaaattgaattgacacccccattccctcgctctctctctgctaccaaattgtctcactcataaaggtgctaaccactacgcagtaactaccactgtttttgacaaaactagaaaaaaaaaaaaaaaagaagaagctgtaaatcaacacacaacacaacacaaccaaagccaaagacaattctgacaaaacatgaaaaagttgtaagtcacaaacaacgaaaggtcacgttcaatcttcgttttgctgctgaggcaaactacgataaagagctttcataagcaaagacaacccaagaagggtatctgatctgatacaacacttagtgccaaaaatccaccttcacccacaaaacaaaacacaattctaaagcttcaaacttattggcatcaatccagcgacccagttgccggaagtcccattttccgggcgaagaatggcggtggagagtgacaaagtgggttctgatagggaaagtttggagcttttgcagaatcgcaccattttgcaaaaacatcttatctaccttcaggtgcttctgccacgatacttccaatatgatctactttttatatgcaccagaaaagtaaggaaggagaccaattatttactagaaagcttgaaactttgcagacaatttctgagacccagttgccggaagtggcagttcccattgggaatggaggtggagactgaaaaatcagggtctgatgggaagggttggagtttttgtagaatgccattttggcaaacaactcacactccttcttcttctactacttccatgtcttacatgcacaatgttcatccgcaaaatcagaataactttcaatctgttgatagatccagtcatcattcttcaaccacagtttcatctatggccaagtctctgctccctacgaagaggaggctccatcttgatccttccaacaagctctactttccatatgaacctggtaagcaagttaggagtgcaatcgcaattaaaaacacttgcaagtctcatgtagctttcaagtttcaaacaactgcacccaagagttgttatatgcgccctccagctggtattcttgcccctggtgaaagtattattgccaccgtattcaagtttgtggagccaccggagaacaatgagaaaccaattgatcaaaaaagcaaggttaagtttaatattatgagcttaaaagtgcaaggtgaaatggactatgtaccggaactgtttgatgagcaaagagatcaagtggcaatagagcaaattctgcgggttatttttctggaccctgaaaagcctagtcctgtcctggataagcttaaacgaatgttggctgaggccgacgctgcacttgaagcgcgaaagaaaccactggaggagaaaggtccttgtgttgctggggagggccttgttatagatgaatggaaagaaagaagagaaagatacttggctcaacagcaggtccaaggtgttgattcagtgtaaagcatttctttcttcctttttgttgggtcaagcccttaattttcttcaatgtatgttctgaaattgaattcctagctcactgatctgatctgtctcacgtggttgagtggcctagaaagttgctatgaagcaataatgaaatcctttcatttttcttttcaattatgtttgtgatgttaaatgcgagtgaattaatactataatcagctgtacttaattgtacttttacatcataatctataatttatacatagacatctacaaatgta

SEQ ID NO: 116184 - DNA, 725 bp, Glycine max
  Clone ID: PAT_MRT3847_75924C.1
tggagacttaattaaaagccctttgtcacggcccctatttattgctgctgaatctgggatacctgagattgtaattgagcttctttactcatatccagatctactttggaaagttgacggccaaaatagaagtctttttcacattgcaatcatgcatcgtcaggagaaaatatttaacctgatttatgacataggggcacacaaggatctgataacttcatacagagataataacaatcacaatatactgcatttggctggaaaattggccccttcagaacaacttcatgttgtatctggtgcagcgctgcagatgcaaagggaattattgtggttcaaggaggtggaaaagatcatacagcctctattcaaagagattaaggattctgaaggtaggacacctcaaatgttatttactgaggaacacaagggtttagccaaaggagagaagtggctgaagaacactgcttcatcatgcatgctagttgcaacacttttatccttctcccttttccctacacctcaacccttctcccttcctctctctcatctctccatcgcttctcatcctcttctcttctctctcgtctccctcagaccacccaatctgttacggattttttttttacataagggaatcatcattcggcgaagaatcatggttttgtattttgtaacattccaatttttcgtaaataaatttaaaaagctttttagtaataaaa

SEQ ID NO: 116185 - DNA, 1279 bp, Glycine max
  Clone ID: PAT_MRT3847_75925C.1
cgaaacctaaaatttctgagattaaaaaaaaaaaatggaattgtattttcttcttcttacatgggctgataccattgttttatattttttaatttaaaaaaaacgcttaattttgcagcttggaaagggaacgaacgacaaacttggcaacaaagagcgccgggttggggacggggtgctggaaaaagcacaagacttttcgataatccatttgtgttagggtttggtctctctctcatcccatctaacaccactgctatcagaataaacacacacctcaatagcaattgcgacacgccgaagcttcattcatactcaattcttcaccgccggcgacccatttcgatagatgcattgttaggaaactagggtttaaggaagcttttgctttggatcatatggaggggtctgctggagcaagtgagaatatgattttgtagttttgctcagtgattgtgagaaggttcttgggcgaaatgacaatatccaatcacagtttttctcgaattgacacattggagctgaaagctctgattgttcggaaggttggtcgtcagagagctgacaagtactttgatcagcttcgaagattattgagttcaaagataagcaagtcagagtttgacaggatttgcactgtgataattgggagggaaaatatccctcttcacaatcgactcattagagcaattctgaagaatgcttgtctggctaaagtcccacctgtgagaggctctgcaagagttgggagtgccaccagtgtaaaagattcaaatgggtcgcagagaggctctgctcaatcgctgtttggggaagcatttcctccttccatgcggaggatcagctctttggctgctcgagactgtagattcaagggacgccataatgcttttgggccgctgggcaagccccattttggtcttgcgtctgaagaattggtatataagacactggagcagcagagtgcaacagaactgaattcccttggcagtagacctccgatatctgttgaagagggagaggaggttgaacagatggctggaagccccagcattcaaagtaggagcccagttacagctcctctcggtgtatccatgcattttggtcgtagacttcatttcaatgtatcattatgtagcaaagattatccagagacctgtcacagcaatggatctctccctgacactagatctttgaggagtcgtttggagcaaaagttggagaaagagggtttaactgcgacagtggattctgtaaatctgttgaataatgcactgga

SEQ ID NO: 116186 - DNA, 878 bp, Glycine max
  Clone ID: PAT_MRT3847_75926C.1
cgaaacctaaaatttctgagattaaaaaaaaaaaagggaattgtattttcttcttcttacatgtattctatttttatatattttttaatttagcttaattttgcagcttggaaagggaacgaacgacaaacttaacaacaaaagagcgccggttgggaacagggtgctggaaaagcacaagacttttcaataatccatttgtgttagggtttggtctctctcatctcatctaaaccaccgcgatcagaagaaacacacacctgaatagcaattgcgacacgccgaagcatcattcatagtcaattccccacctccggcgacccatttcggtacgaatctttatttcccctaacttcattgaatttcccaactttcttcaaaatcttgcaagggtctttcttctctgataatcgtgcttatatttctcaaatttgttcgttttacaatttcccccaatcgcgtgccctgtctttctcagcaattgtcccctgatttggtatttctaatcagtgaatggttgaattcgattatggtttctgattgaaaacttaatgaattacagatggagacattgtttggaaactagggttagagggagcttttgctttggatcatatagggggtctgctggagcaaatgagattatgattttgtagttttgctcagtgattgtgagaaggttcttgggcaaaatgacaatatccaaacacagcttttctcgaattgacacattggagctgaaagctctgattgttaggaaggttggtcatcaaagagctgacaagtactttgatcagcttcgaagattattgagttcaaagataagcaagtcagagtttgacaggatttgcactgtgataattgggagggaaaatatg

SEQ ID NO: 116187 - DNA, 284 bp, Glycine max
  Clone ID: PAT_MRT3847_75927C.1
ggctcgagccgccacttttttttttttttttcttgtgtctaactctatgtgctgatctgcttccaaggactggggaacgtatgacggctgtgtccagcgctactctcgaaaacaacgaagatgacacagaccacaatacgttcttgatctctgagatctctgaagaagaaccttagacagtaccacggcatataccagcagcgagaacttcaggatcacgacgaagcctatgtcgtgcctcatttgtagacagacatgctcagtctaagcatcgactgccctgt

SEQ ID NO: 116188 - DNA, 1181 bp, Glycine max
  unsure (1)..(1181): unsure at all n locations
  Clone ID: PAT_MRT3847_75928C.1
ctgcgagaagacgacagaagggggtagctgttggatgagatgatagacaatggcttccccttaactacagagcgtaggatcctgcgagaaatgaggactgcgccnaatatggttgacaaagccttgagcatcgtcactggtagcagttcaaatgtgagtgatacccttcctggggctgcagcatcttgtgttccctggagaacggcagagccaaagtactccaacaattcggctcgagtgtagatcttgttgaagaaatggatgcaacaataaacagggatggagttctggtgaaatgtgagatcaatggtgaggttcaagtgaattcccatatcacaggtcttcctgatttgactctttcatttgcaaatccttcaatccttgatgatgtgaggttccatccctgtgttagatatcggccctgggaatccaatcaaattctttcattcgtgcctcctgatggacaatttaagcttatgagttacagagttggaaaattgaagaacaccccgatatatgtaaagccacaattcacttcagatggtggaagatgccgtgttagtatattggttggcataagaaatgatcctggaaagacaattgataacgtcactatgcagtttcaacttccttcttgcatcttatcagctgatctgacttcgaattatggaatagtaaacatccttgctaacaagacatgctcttggtcaattggtcggatcccaaaggataaagccccttcaatgtcaggaacattggtgctggagactggattggatcgccttcatgtctttcccacatttcaagtgggttttaggattatgggtgttgccctctctggtctgcaaatagataaactagatctgaagaccgtaccttaccgtttttataaaggttttcgagctcttactcgggcaggggaatttgaagtcaggtcataattttgtatttaacattgagtgatcttagacttgtaatgattctggacatgaaattttgttgcatgtacacggctagtttcatttgtaaagagttgatagtgttctcttctgatttcaaattattttatttttagtagtgaaatttgtctcggctatttctggatttatgagagaatcgcacgagttgtattttgaatctgatttctttcattaacggttgatattgttgagaatgaaaaa

SEQ ID NO: 116189 - DNA, 130 bp, Glycine max
  Clone ID: PAT_MRT3847_75929C.1
gagtagaagtaccttttttttgaccaaacacaaagcacacatgccatgtggaatgacctatataaggcgctttttacttagtggaaaaccttaactttgaataagggaacccacttccccgttttcacaa

SEQ ID NO: 116190 - DNA, 737 bp, Glycine max
  unsure (1)..(737): unsure at all n locations
  Clone ID: PAT_MRT3847_7592C.1
cgtgtggcggcgagagtctcacaggaaattctagctcccaggcatgggtccttgggcttcctgcctcgaaagcgcagcagccggcatcgtgggaaagtgaagagcttccctaaggatgacgcttccaagcccgttcacctcacagcctttctgggttacaaggctggcatgacccacatcgtccgggaagttgacaggccaggatctaaggtgaacaagaaagaagtcgtggaggctgtgaccattgtggaaactcccccaatggtggttgtgggcattgtgggatatgttgagaccccacgaggcctccggaccttcaagactgtatttgctgagcacatcagcgatgagtgtaaaaggcgcttctataagaactggcacaagtctaagaagaaggctttcaccaagtactgtaagaaatggcaggatgacacaggcaagaagcagctggagaaggacttcaacagcatgaagaagtactgccaggtcatccgcatcattgcccacactcagatgcgtctgcttcctctacgccagaagaaggcacacttgatggagatccaggtgaatggaggcactgtggctgagaagctcgactgggcccgagagcggctggagcagcaggttcctgtgaaccaggtgtttgggcaggatgagatgattgatgtcattggcgtgacaaaggcaaagggtacanaggggtaaccagtcgttggcatacaaagaaactgccccga

SEQ ID NO: 116191 - DNA, 156 bp, Glycine max
  Clone ID: PAT_MRT3847_75930C.1
aatgcggttcgccctttttttttttttctggaaaaatttatgtttatttaatggtacatatgctccttgggctggggacttcttaagatattaaatgtcctgaactcaaattaccagattcagcttttaatattggaatggatctaatgtaactgg

SEQ ID NO: 116192 - DNA, 557 bp, Glycine max
  unsure (1)..(557): unsure at all n locations
  Clone ID: PAT_MRT3847_75931C.1
cccttgtgtccgattctattaataatacaaaagacagaagtttgattcttgcttgaatcattaattgtatcatagaaatgtcgatccgtgaaaaagtgaatagcattttttgccctttcacatctgggtgtccctagaaattccctttcaactattgtacccattgtgttgacttatttgatagttataaagacattagaatttactgatttagaagctaaacctatttttcaaattcaacacataaaattaaaaacccaaataattttcaaggtttgtatactttgcatggagctggatagaaattataaaggacaattagtatatagggtaggcctaatagtaaagtcggtaaaactctcacatttagtatccaaaaagtaatttcacttactagataatttttttaaaaaatagtgattaattcataaataatattattttattaagcgtgacttaatattttttcttacaaaatttngtaaacaatgtaactttatatatatattattaattaaaaataattattacaattcaatacctatttgatacattaa

SEQ ID NO: 116193 - DNA, 329 bp, Glycine max
  Clone ID: PAT_MRT3847_75932C.1
tccacgcgttcgcccacgcgtccgcaaaatgtggatgctttcatgaaattgaaattatcaagggaaaacctcgtccgaggaatgctgtttcatcaacagtggaaggatcttcgaacagtacaaatcctttagatgttgcactatcatgggtacaaaggtgtatagggtttgacactaaattctcaactttgaggtgcctaatagccattccggtcgcatatgagatttatttgccagatttcgcttgactgtatcctacttcacaacatgaagtccatttaaatcatggttttcatgcattttgctcaatggtcaaaaggcctgccatg

SEQ ID NO: 116194 - DNA, 354 bp, Glycine max
  Clone ID: PAT_MRT3847_75933C.1
gcgtgcgcgcgctcgtaagctcggtcgagggctcgagatccaacttatacacttcacaaagaagaaatactatatgatttgtcatgttctgcaaacacttacggtacgggagaggagatagaacaggggtctgtgacgtctacaacatcctcgtaaacctttgatggtggggaacatcattatcctcacctcaatatagtagatccggtgcccaaacaacagttaaccctagagtcgtctgggtctcctaagagaatgcattggtacacttttgtacagtacctgcggcacccaagggcttctggggctctttttcacagcagctacaaccatgtctttgacttcattcggtcc

SEQ ID NO: 116195 - DNA, 311 bp, Glycine max
  unsure (1)..(311): unsure at all n locations
  Clone ID: PAT_MRT3847_75934C.1
gaaaagcaaaaagaacaaaagccccacagacctaatgagcacanaangacaaggaaggaacctgagnanaaacaacccacacctgacaaaccaacaagaagaaggaccacgaaacaaagaaaccgaatcacaccacgnaggaaccaacaagagacacaaccactgaaccncnaagaaaccaacacaacaagnnctgcaacaaactgaactaaacccaggtacggaccangaanacataaaccctgcacnncacnaatcatattaannnatatcgaatgnaacgcccnccatgcttaccaccaaacaacaca

SEQ ID NO: 116196 - DNA, 146 bp, Glycine max
  Clone ID: PAT_MRT3847_75935C.1
ggttaaactaaaacaaacgtgggggcttagctacgggccaagagattgccaagccttgatctgacggatcataaatagaatgagtgggctcacaagccttaccaagggctacttatgcttgggtcccgaccatttggaatcaacaa

SEQ ID NO: 116197 - DNA, 212 bp, Glycine max
  Clone ID: PAT_MRT3847_75936C.1
cggctcgaggaaagattttaaaatgttaaaaatattgaagtcaaatttcattttctgcattgggttggacttaggattgcaattctagtatttgcctacaactttctgctgagatattgacatggtgctttattcctaatttttgtgggggtggttctcagctacctaggattcaggtcacagatcctgttgcaagatattatggattgaag

SEQ ID NO: 116198 - DNA, 241 bp, Glycine max
  Clone ID: PAT_MRT3847_75937C.1
gcaagctaggactcaaagagaaacttacaatggctctcgagtggagtaaattatacaaaacagaccaaaaaactggatttactttgacattgtaataacttttccatcaggtagaataactatgcaatcaatattgcgcgtgggatccactttaaggaatactaaagccgggattaaaatacattctccacacctgaggcctacgattttgacttatagtgggttattatatacgtgaaag

SEQ ID NO: 116199 - DNA, 489 bp, Glycine max
  unsure (1)..(489): unsure at all n locations
  Clone ID: PAT_MRT3847_75938C.1
nnnnnaaaacttttttaaacttcacaccangcagcacccagaaacaaacgggccggcggataaagcataaaaaaagacaacgggacggaacagaacaananncnnanccaanaacanaacaaaanaaggggcgctacgggcacaacaangagccactcccgacaaaaagaccnacggaggggggggggcagaagacaaaccacaagccgctgggcaacaaaaagctataaaagggcagggaaaccagcatactgggcgtccgtagcacaaacaggcaaggaaaaggttgtttgaccattagaccttaacatgcgcgcggggaaagtgtgacgaccgtaaagtttcctgagcctcatcaccgagattgcggctcggaatacctagaataagagcagaaggaaccaacgccgctgcgggcgctggaatccaaaaacccatatcccaacgattaaggatgccctgactgggacagaaaaaaacaagggcaac

SEQ ID NO: 116200 - DNA, 528 bp, Glycine max
  Clone ID: PAT_MRT3847_75939C.1
ggagtaagataatttatatatcaattattacgcataaaaagctggtaattgtgaagggcgtgagtgggaacagccagcatgaccttgacactgagacactgatctctgaccggcaaaaacaagcagtacctatcgcagcacacgggtccgacgtgaagaagcttgcccatacccaggtcaatgttctccaaacccagcctggaccactgcgacactatgagcaccccaaccgggtcagggcacgcttttctctcccacaccatccccatcacgcccctcacgtgctcattcccaaccctctccttcgcccgcttcaccaaacccgacccgaaccctatccctctttcctccagctccttcgctctcgtctccgcacaccccaaaacaaacgcattcccataatacccctctggtaaacccggtttaaccctgttccttacgtttatactgaacaccagcttcaacttttgattcggcggaaaccttattggttctgcccagctttttcacacgtgcgccggcagcacc

SEQ ID NO: 116201 - DNA, 193 bp, Glycine max
  Clone ID: PAT_MRT3847_7593C.1
gcctatatggttcctgctcatagtcttgccattctttgggcccataaattcacctgtagaatctctattagtgaacttcactgactacctcatccctgctctactccgtatgctcacttactgaaaattctctgccaaacagaatgcttcagagatgcctcctttcttcctgccgagatggactgaaatgtat

SEQ ID NO: 116202 - DNA, 419 bp, Glycine max
  Clone ID: PAT_MRT3847_75940C.1
ggctcgaggttttggagtgttgctgctagagatagtcactgctagacagaacaacaggagcaaagcatcagaatattcagacagcttagttacagtggtcagttgcagatttctacaatgaagtcaacataattagtagtgtggaacacaagaatctagtcagactgttgggatgcagttgttcgggacctgaaagcctgcttgtatatgaatttctacccaacagaagtcttgatcgctacattttcggtaattactgaactgatgcagtaggcttgactgctattttcacctataacacctcattctgatcactataagtgattatcaattcatcataatgtgaactaaatataatatttctcaatttatacatggcagataaaaacaagggcaaggaatttgactgggaaaagaga

SEQ ID NO: 116203 - DNA, 113 bp, Glycine max
  Clone ID: PAT_MRT3847_75941C.1
gaaaggtccaggactctactcagacatcggcaggagagctcgcgatcttccgatcacggatgatcagaatgaccgcacgagcgccatcgccacgcgcgaatccacagaacata

SEQ ID NO: 116204 - DNA, 305 bp, Glycine max
  Clone ID: PAT_MRT3847_75942C.1
atcatgagaacggcaatacccgctattacgttactttcaaaaattaagacaattctttccagcaacgccatattcatcccggacaccgtgagcatcaaagtctcattccaagatcatctaaattcaaggccccctctcaaaattgatgctagacttcaagcatttcaatctcgattttcatctcattactgacgaaaactctaaaaaaaaccttaaaatctacccatgaattgcatcacggaaaacatacaccaccattcacaccgtcttaaaccacattgataatcttatcaccggcatcacca

SEQ ID NO: 116205 - DNA, 233 bp, Glycine max
  Clone ID: PAT_MRT3847_75943C.1
agaaaggaggtgtactatctatggctaaaggcacacaatatagtcccaaagaatttgctgctgcttatattcaaactctcccgcattccaaagatgtaaaggagtttaatagcaatgcctgttattgggaatacttaaaaaaacgccgcaatctttatttcaatgagtacattgacgcaatagattttgctgatagttttggtaagtctagtgtagaaatcgataaagaataa

SEQ ID NO: 116206 - DNA, 466 bp, Glycine max
  Clone ID: PAT_MRT3847_75944C.1
tccaatggacagattaatttgtggagatgttgattttggtaaaactgaggttgcactacatgctatctcctgtgttgactcatctaaaaaacaagcaatggttctggcacctacaatagttctagcaaaacaacattatgatgtattcacatagcgcttgtctgtatatcctgatattaaggttggactactaagcaggtttcagaccaaagcagagaaagaagagaacttggacaagattaagaatggtagctaggatattatcgttgggactcactcactcctaggagaccgagttacatataacaaccttggtctgcttgtggatgatgaggagcagaggattgctgtcaaacagaaggagaagattgcttctattaaaacttctgtggatgtacttactatatctgcaaccgctataccacgaactctttatttagcattaacagggttacgtgatgctagt

SEQ ID NO: 116207 - DNA, 376 bp, Glycine max
  Clone ID: PAT_MRT3847_75945C.1
ggaggcagggggatccttaaagactgtaaaattccaaccctatacatcaggttttttatatatcacgatctacaaaaggggcaaatgaaaaaaacggttttagaaagcatatccagatcaagtgcttttggtttttaaggattcggaaaaacaaaattttgaagcacctttttcctaaggaattcatgctctcctttccagggtgtcaaaaatatgggaatgatcatatcttttgcaatctttttctgcaacaagaggttcaggatgcacttgacccacaaattgtcttttcactttgggacgctgctttgctagtttttttctgctctcatatggaccctgttaaaaagttttaaaaaacagtttgctttttttg

SEQ ID NO: 116208 - DNA, 216 bp, Glycine max
  Clone ID: PAT_MRT3847_75946C.1
ctcgagccgcttaggtttcatctttacaaggagaacaaagatacccacgaagccttgggggttattggaaatatgctcagtgtccagccaaaatcatttggatttgcgggtacaaaggacaagcgtgctgtcacgaccaaagggttactgtttacaagcagcgagcaagtcggctagcttcccttaacaagcgcttgttcggtattaaactgggtg

SEQ ID NO: 116209 - DNA, 355 bp, Glycine max
  Clone ID: PAT_MRT3847_75947C.1
gttaatgttattattatggctgtgagcgatggcaatacgattgcggtgaaggaagcagcttctgcggggattcacaacgtagagaaactcgtgaacatgattttgaatcaacacaacgagggtggttctgaattggaggcagttgctgacgtggcggtgaaccgcttcagagaggttatttcgctgcttgagaaaccaattaccagaaccaccggtcacgctcgtttccgaagggcccctacaacagtgccacctgtccctgttgttcagttgcagcaaatggtggatgatgattccaaacacaaactgcagaacaaaacagaacaaaaacaaaaacaaagtacctctgctttta

SEQ ID NO: 116210 - DNA, 185 bp, Glycine max
  Clone ID: PAT_MRT3847_75948C.1
agatagtccttatacttgggagcgatccctctacttacaacaacaacacattactatggcttttgggaggctagcttttcaacgctactctaatctggttacctcttaaagggcattttcactccacacaatgctcccatccccgtacgcatacccatccacagcttctcctacaccatatatca

SEQ ID NO: 116211 - DNA, 370 bp, Glycine max
  unsure (1)..(370): unsure at all n locations
  Clone ID: PAT_MRT3847_75949C.1
accggnatggaatacccgggccgacgcacgcgtccgaccgcttgcaaaaaaccaccaaattgagttttgaggattacatccaatattatgagcccgtgttttctttacggtgcttatagcctctaccttaccatggatcctcatctatccaacaaaagctcccaaacacttcttacgcctaatattgccactattttctacacgaaatcaactacacttacctataatcataatccctactctatgcaaatacaattgatgacctttatgacacttcattgtacgctatcaacatccaatgacttatgctacactttctattgccgtatggagcctgttatatatgaacttacgtctacatcataataaa

SEQ ID NO: 116212 - DNA, 935 bp, Glycine max
  Clone ID: PAT_MRT3847_7594C.1
cactgagctagtgctagctcattcattctcaccctcttattttcttgaatctttgagtgactaacaccaacaccaatcacatgccatccaattttctagacctacaaaacacaaaaggaataacggtgagaggaaggtttgtgagaaaactaaaactcgtcccaaccataaccaacttgaagaaacaaggcctagttcttcaaaaaaagttcccaaccccatatgatgactacaaaggaaacaacctgtcggagctagtagttgaggatgataatcattttgaggaggaagaaaccaccgtagggtccaaaaagatcacagaagtcgcagaagaaaagttagtgggaactaaaatgccatcatgcaacaataataatgaatacccatctctcagtgatttcaaagagttatgtccaccaggggggagtaaccattcaatcattctctacacaacaagcttgagagggataaggaaaacctttcaggaatgtaacacgatccgtttcttgttgaggagcttcaagataatgtatcatgagagggatgtgtctcttcacttggagttcagagaggagttgtggaaaatcttgggagggaaagtgattcctccaaagcttttcatcaagggaaggtacattggaggagctgatgaagtggttgggttgcatgagatggggtggcttgggaagtttcttgaaggaacaccaactcactcaagtgattctccatgttctggctgcgccaacatgagattcgctatttgttccaactgttgtggaagttgcaaagtgttcactgacaacaacgatgaatgcttcgttagatgttctcagtgcaacgagaacggccttgtcaaatgccccgtttgctgctagaaagagatatttatctcacctttggtgcgttttgttttcatttttcagttgatatatttt

SEQ ID NO: 116213 - DNA, 427 bp, Glycine max
  Clone ID: PAT_MRT3847_75950C.1
gattaggcggatctccggcggcggagcgtccaatgacggtttcatcgaagaaagcaacaccgaattcgtgtcgtacaccgtccatatccctccgacgccggaccgcaggccgctgacggcatcggaggacggaaagagcggcacgagcttcatctccggcacgatcttcacgggagggtacaactccgtgacgcgcggccacgtcatggagtgctcgatggagagcgacgcgcaggcgaaaacgtcgtcgtcggtttgcggaatgaagggctgcgacgaagaagcgataaagggaaggctgtgtggtgggccgtgcgagtgcgggttcaagatctgcagagactgctacttggagtgtggtgggaagaacggtggaggaaagtgtcctgggtgcaaagagccctataagtatgtgagtgatgatgat

SEQ ID NO: 116214 - DNA, 220 bp, Glycine max
  Clone ID: PAT_MRT3847_75951C.1
gctgtgtctatttgctggcctaagttaggtgtttcttatgtggagagattgcatactagggctacccacaaccttcttgatcgctcatgaaatgtagaatatatcaaatgtggctacacgttattaggtgttaaacttttatacacaaactttgcatgcaaactattaaatacatttatgaaactaaccatacacatactgttagctgaaaataaaacaa

SEQ ID NO: 116215 - DNA, 395 bp, Glycine max
  Clone ID: PAT_MRT3847_75952C.1
aatgaccggaccgacccactcgtccgcccacgcatccatacattagttcttctcattcattattcattctcagctccttgtcttctggacaacttaaaagggcactttgcacatccaatattgatctcctttacccatcatcatcatggagctcctcagatacctcaatcagggtcacccttctatctgaacaccacttgttattactctgtaatcaattccatctacacttttctccttctacactaacacacataccttctcttcttctacactgacggaactgaatcctatcaaacctattcactcacatattctcactaacgccgtgcaacatgactctactacttcacaactttcttaaatatgatcacctcttgaaatcgctatatctc

SEQ ID NO: 116216 - DNA, 1118 bp, Glycine max
  Clone ID: PAT_MRT3847_75953C.1
cttctctttgtgttcctaaaaaacacacagcacaagtagacaaacacaaaggaacaaattgcaagttgagaaaattaacatggaaaacagtgacatttcctctgccccactttctcactcccccactaattcctcttcttcctcaccaacaccaccttcacctcctactgttgtgatgagtccttgtgctgcatgcaagattttgaggagaagatgtgctgagaaatgtgtcttggcaccttattttcctccaactgaacctgccaagtttaccattgcacaccgggtatttggtgccagcaacatcatcaagttccttcaggagcttccagagtctcagagagctgatgcagtgaccagcatggtgtatgaggctagtgcaagaataagagaccctgtttatggttgtgcaggggcaatttgccagctccaaaagcagatcaatgaacttcaagcacaattggccaaggcacaagctgagcttgtgaacatgcagattcagcaagccaatcttgtggctctaatttgcatgaaaatggcacagagtccacaggaatcaccacaacaattagtggatgatttcatttcaactcctccccacagtggtggtgcctatcaaagtggcatgaacttctttgaggacaacactagcctaaactcactatgggaacagcccctttggacatgaaggagaatcaatatcatataaatattaattaaatatagaatacggttagacattcacaaagtggttcgtatgattgtctcccaaggagaaagttgaacgaatcaattagaactaataaaaagttaattcaaattaagctaggatttatgcaattatgttaatttaattccctgcatgaggaaaaatttggagggaaagaatatgatttactatctagtaagaaggtcctgcattcaatcctttgagcatgttgatcaaatttgattcctaactttgtgtataaaaaatgcattgttaggagatgtattcgatcacttgctaggcaaaaaacatcaacctaaaaataatagatggtgttttactccatgtaatatttggaattgaagagaaaggaaattgtttggaattgaagagaaaggaaattgttacg

SEQ ID NO: 116217 - DNA, 343 bp, Glycine max
  Clone ID: PAT_MRT3847_75954C.1
cagtactgcgctgcgttgttgcgacagtgttaacgacccctacgtcactgtacacgctggagatcatcgattgatcaagacctccgttatgacgaataggttgaaccctcaatggaaggaaagttttgttgtaccgatcagccaccatgtggaagcactcgaattcagagtaaaggactcggacttcaacggtgcgatgaaccttctcgggaagacatttctctctataagtgatatacttaaactcaataaagagggaatacctcgcaggacagggattcacaaagtcgttcatttggatggaaaacctcgacatgggtcgtttgcatacattgtggagtac

SEQ ID NO: 116218 - DNA, 144 bp, Glycine max
  Clone ID: PAT_MRT3847_75955C.1
gattagggttcataccctcatctccgtggaataataattgtgatctcgccgccgcaccagtagggccgcaggggccccaatcctatatccccgcaccatatttttgcatactgccgtcactataataaattttttattggaacg

SEQ ID NO: 116219 - DNA, 246 bp, Glycine max
  unsure (1)..(246): unsure at all n locations
  Clone ID: PAT_MRT3847_75956C.1
gtcggttttcgtcaatcaaatnccaatncaatattcaaatatgagtcgtcatccngangttaagtnggtcagnggcttgacnangtcnaatatcagggngcnatngctgattnccaaaantgccaaaantggatcttangccagacggtatttntactnctccngtagtggctggtgctgaagaacnatcagnatgagntanaaccgggagctcntggataaaggttaaggttgngganagcaaca

SEQ ID NO: 116220 - DNA, 753 bp, Glycine max
  unsure (1)..(753): unsure at all n locations
  Clone ID: PAT_MRT3847_75957C.1
tacggctgcgagaagacgacagaagggggagactgttacttgcaaatagttaggaaaagaggagatagttggagtgtgtggtttgctaatagaaatgaacctgttgacgcggaatccgcagttctgttgctagatcactctggtgtactgaaaatagaatcaaaacacagggaattacccatcattctttacttttcacctcaaccagccaacaacactatggccacactcttagatacaggcaactttgtgctgcaacagcttcaccccaatggaacaaagagtgtgctgtggcaaagttttgattatcctactgataatttgctccccgggatgaagttaggagtcagttacaaaactagtcataattggtcactagtttcatggctaacttctgaaatcccaaatcttggagctttcagtcttgaatggcaacccagaacaagagaattgatcatcaagcgacgagaacaattgtgctggacaagtggagaactgagaaacaaagagggattcatgcacaacacacactacaggattgtatcaaacgaaaacgaaagttacttcacaattacaacttcaaatgaagagcttacaagatgggtgctattagaaactgngcagctgataaatcggaatggaggcgatgacgttgcgagggccgatatgtgttatggatacaacacagatggagggtgccaaaagtgggacgagatacccatctgcagncatcgtggcgatgcatttgaggac

SEQ ID NO: 116221 - DNA, 1520 bp, Glycine max
  Clone ID: PAT_MRT3847_75958C.1
tggttgttgcggaagacgtcaaaaagggaacgaaagtgcgtttgagacggctgcgaaaagacgacagaagtggagcagtggtggaagggttgttgagaaggggttttagaagtccacatttttcagatttgattcgcgttcctcttctctcttctcatcatcaatggcgacccccattcctccccctcctgccgccgccgccgccgccgccgccgacaccaaggtcgattacttgaaccttccatgtccgattcccttcgaagagctccatcgcgaagctatgatgtctttgaagccagatctttttgagggcatgcgttttgatttcaccaagatgctcaatcagaagttctccctcaatcacagcgtgttgatgggacctactgaggttccttctcagtccacggagacaattaagattccaactgctcactatgagtttggctcaaccttcattgatcaccctaggttgttgctctggggcagaattttgactgatgggaggctcaatgccagagtcaagtgtgatttgtccgaaaatctcacttttaaagccaatgctcagctcacaaatgagccgcatatgtctcatgcgatgatcaactttgattacaagggaaaagactatagaacacaatttcaacttggtaatggagccttgctaggagcaagttatattcagagtgtgacacagcatttatcattgggtggggaggtattttgggctggtcagcatcggaagtctggtattggttatgctgctcgctacaacactgataagtcggttgctacagggcaagttgctagcactggaatggttcttctaagctatgttcagaaggtatctgagaaggtttctctagcatctgagtttatgtgcaactacttgtcaagagatgtcacagctagctttggttatgactacatccttagacagtgccgccttaggggaaagattgattccaatggctgtgttgctgcttttttggaggagcggttaaatatgggtctgaattttattctttctgcagagcttgaccacaggaaaaaggactacaaatttgggtttggtttgactgtgggagaatgaataaaccgaactggagctgtgttttcattgctgtacccagcttagcaagctttcttgcatctttttccttgttggagatttttctttccaaaaaagaaaagaggaaatatcgtttgtgtcgggaaacactatttacaatccacaagtagctgcagaattttcaatagtcatcaatttatttggaacttgggcagaaaaaactcgatttatttggatctattgccctgttttcccttgagggggatgtagagtgatatcagtttaatccatattgtgagatcaatttccataatgtttctaatgctcgtgtatctatccctgtcctatacttaagtttaaatgacccatgcatgcatgggatggaatcgtcgcagcaagaatgacttggtccgtcatttttctggctgaattcaatgcatactttagtgat

SEQ ID NO: 116222 - DNA, 1043 bp, Glycine max
  Clone ID: PAT_MRT3847_75959C.1
tcctattttttgtaaaaaaaaaaatcaaaacatttggttcggcgcgatgtggagaaaagcagtcacctcccgccacgaaaatttctttggctctgtgctttgagtccgagtctctcccacagcgacaccatccatcttctttcacattttccactacgttagggttcgtcttcatttcgaattgaaggattcaacaacttagcaaaccacgccatggcaactctgcaatctctgccaccttctttccgtccatcaatcccacccccaaattcccactctttcccagccactccctttaactattcccccaaattgattgcctcaaagggtgtcagcgttaccctcaggaactctatcacttctcccagggtttcggtttccaattcggagtatagtccccaaattgcggaaaatctcggtgacgttaccattttcaccgctgccggcgagccagtaaggttcagtgatctctgggatcagaaccagggagtagctgtggtggcaatgttgaggcactttggatgcatttgctgttgggaactttcgtcaatccatccagtatcaagcaagatttgatgcctgcagaaagctgtcaagaactaatagccactccagatgatagaagtggtgtgttgcagcagggagggatgtttgtgttcagaggaaaacagctactctatgcgaggaaagatgaagggacaggtgatcatgcccccttagatgatgtttttgatgtctgctgcaaagctccagtggcctaatgttgtactttataaaattttcaatttgcataagattaggaaatttcagtttaggaagatttgttttagtataccagatttctctgaatgatatcggtgacaaaatattgcaagttgtggatgatatgattaaatatcataaacaaatattataaagttcaatctataaatatgttgtctaaaatagtatatgagcacttgtgaattcaatttcacaaatctatagtaacaatacttcatttagaaatggtgattgtaatatatgtaatatgttcatgtttt

SEQ ID NO: 116223 - DNA, 263 bp, Glycine max
  Clone ID: PAT_MRT3847_7595C.1
tcctaagctttctgcttaatttcaagttcaggctggtttaatcttggattaccgctcccactctcctatctggtctaggacttcctgggccgacttacctattggtgtcctatcctccactgtatagaactcactgatccgcactggcgtccaaagtggccgaatatgaaaaacaccagggctgttggtgcaaacggaagcctcgccaatttgatctggagacaactggctcactgagacatcaaatgttacttgcagagatt

SEQ ID NO: 116224 - DNA, 359 bp, Glycine max
  Clone ID: PAT_MRT3847_75961C.1
ttcttttgcgcgtagcatccaaattgacggaatatttacctactggcgttacgtgtcctgggctaaccacgataaaatacttgcttggacagtgtatgactggagagatgagcattgagatcgccgcattcctgatgatgttctcgggatgcgagctcaagaatttgtacaacatgtggctcatgaaagagtaaagggtcaaattcccgctattggcaaggagtgttgtactaaggataataggcttgcatgctgaatgatcctcaaacaaagcgcaggagttgaacttacacgtcttacaggtgggtcgctgggttcgggtaaccgtattcgtcgagctaacttgaacgaagggtaat

SEQ ID NO: 116225 - DNA, 323 bp, Glycine max
  Clone ID: PAT_MRT3847_75962C.1
aaaaaaaaaaattttgttttgttttgggaacaaatctcaaggggagttcccacccccaagccatttttttctccccccccccccccaaaaaaaaaactccccctaaaaaaaaaaccccaggttcctaaaaaaaattttttaaacggcccacccccccccctttttttgtttaaaaaaccaatttttaaaggcccccagcgggggtttttccaattttctttaaacccttttttctaagactggggaaacaacataagcccacttttgggttggctgaaaaaaccactggaaaaccctttcccatttgtttaaataaaatgggg

SEQ ID NO: 116226 - DNA, 423 bp, Glycine max
  Clone ID: PAT_MRT3847_75963C.1
tacggctgcgagaagacgacagaaggagcatgtttggatttattacttacatttttcaacagtgtcaggttgatcaaactagcatctatttcaatactaatcacgtgtcacttgggcttaaatcatgtatgcaaagactagagctttagatcagcgggtaaaccaacctttgaatttcatgcacattgttcagtcaggcagtggaagaaaaccatcataagcaagtcagctttttgccttcaaaagggggagagggggacaaaaaccattttatcaagcaaaatattatcccttaccttttgagaaatggcaagaaaataggtgaggatcactttcaggctctctaagaatcttttgactgggatattctgattttcctcctaacaaatcccaaaactgttcagattcggaaccttccctttg

SEQ ID NO: 116227 - DNA, 188 bp, Glycine max
  Clone ID: PAT_MRT3847_75964C.1
attctttatatattgtaatctttcttttttctaaatcagaaaaaaaaaattttggcgaccgttctcttttaaactattcaacacgtgaattaattccatacctatatctcccatttttcaaattttatatattgttcaccacattatatattgttttcacaaagggctttactgacacctttcataaa

SEQ ID NO: 116228 - DNA, 434 bp, Glycine max
  Clone ID: PAT_MRT3847_75965C.1
tttgtattttcgataaaccgtgatcacaggttgccgaaccttaaaaccggaaacaaaagcaatggttacttgactggaagagtctctcaatttctggctactggtgtgggtgcgactgttgaggggagggaacaccactctctgcgctggccacagacatcgagaagtcattggctgttccactcttggtttatttgctggacactctcctattagatatagggacttcgcgtaagacttaaagctcttctggctgtggatgagggtgatgttgaatggcagggtcaagctggtgaaagcgaggattagtgctcccactctactatctggtatggactttgtgggtagacttttctatctgctgtgcttgctacactctgttcttctcactgatccgcattgccgatcaaagtgggctgatttgaaaaacactt

SEQ ID NO: 116229 - DNA, 421 bp, Glycine max
  unsure (1)..(421): unsure at all n locations
  Clone ID: PAT_MRT3847_75966C.1
caatttgtttggattgaggttggctcanatagaaattgtataactgttctgattggcttagctctaatcatttatatgagccaatttgagttgagctggatcatgcatttcactaataggttctttaacatacatattatataaatttgtgtatgggaatatatattagtttggataatatatttttatcttttttttattttatttgacagagtttatgaaccaaacaagttgactgtgtcatgaggcaagcttctaggaaattctttaccaagtctaactatttggttcatgtactagagtctttgggacttaaaagggttgagtagtgaccctgcttggttcattgcccagtggtgggaatgttttgaattctatgtgtcacttcctcggatctattacctgaatactgagatctaaa

SEQ ID NO: 116230 - DNA, 897 bp, Glycine max
  Clone ID: PAT_MRT3847_75967C.1
gctcgatctcgagccgagccgaatcggctcgagacggctgcgagaagacgacagaagggtaggctcagaccaattggtctgattggtcggaccggaaacaggccatgcaaccagacccagtctgatattattagatcagttatgtacttaaaccaatggtaattgtaataaaataataataaaattaatttcaagtcataatttaacaaaagtaattcgtggtaagggctaaaaattaagggagaaaaactttggagaccaagatcggccaatttttttattaaggactaaaaatgaaaaattaaaaaaattaagaaactaaaagcataattaatccttttttagtgaaaatttttcattagaagttgaaaggctggtttgcatacattgtacaaggctacaagcaacgaaagtgaagttattgtgtacattattcaagagtaaagcatgttgtttctaatgaagttattgtgtacattattcaattttattattatattatataatattaaaaatacatatcatatatttatattttataaaaattattatataccaattcatgttgttcaattattaacatattaatttgacggctgatctaatgatcgtgatactgtggatctaatgatcatgatactgtgtcttgattgaatcgataatcaattttattatcataacagtgcttaaagctaacatctcaaaatccggttactgttgttgtactactctccttttgtactatttttctttctttcttttttggcaaaagtactactgccctgaatctatttccatcgatcttttgtgttttacaatctcccattatattgaataaagtaagcaaaaaacacataacattttgagtatttcccaaacaccaataatctttttcat

SEQ ID NO: 116231 - DNA, 632 bp, Glycine max
  Clone ID: PAT_MRT3847_75968C.1
gctagcttgcattgctaaggccattcatgcagttgaaaaggagaaagagcaatttgcttttgcgttcacagtggattgcagggcgaggttggagcctccaatccatgataattattttggcaattgtgtgtgggggcatgtggtggatgctgaaccattggacttcataaaggaagaagcttttgctattgttgcaaagagtattcatagtaaaataaagatgatattagatgaggggatttttcatgggatggagagtgcgttttctagatatgagtctttgggaaaagacggagttgaaatcatgggaattgcagggtctaaccggtttggagtttatggaactgattttggttggggaaagcctgctaaggtggagatagcatcggtggatagagccttaaccattgggtttgcagagagcaaggatgggaatgatggtgttcaagttgggctcgtgctgaagaaacatgtcatggatctcttttgtactttgtttcgtcaaggaatgttagatgattgatcataaattcggaacatgcatattgacgaaactagaaacaagaaagtgcactaacttgttcgttttgttattttattaaaacatcaaaagtcttctagatttgcatcaa

SEQ ID NO: 116232 - DNA, 534 bp, Glycine max
  Clone ID: PAT_MRT3847_75969C.1
ggaagaatcacggaggaagaaattaaagagattatctgccttagcgccactaccaacaaacttgcaaacatacagaagcaggcagaggaatatgcggctttgatcatggaagaactagaccctgaagacacaggatttatcatggtaaacgatctagagatgctcttgttgcatggaccaacccattctactagaggagatagcaagtacctgagtcaaatgctaagcttaaagcttaagcctatagatgaagacaatcctattaagaggtggtacaaaagcaccaagtacttcctgcaggataattggcagagaacttgggtattgctactgtggattggcgtgatgttaggtctatttgcctacaaatttgtgcagtatagaagacaacctgcatatgaggtgatgggccattgtgtatgcatggccaaaggtgcagccgaaacacttaaattgaacatggctattatcttgctaccggtttgccgaaacaccatcacttggctaaggaataagaccaagcttggcattatg

SEQ ID NO: 116233 - DNA, 659 bp, Glycine max
  Clone ID: PAT_MRT3847_7596C.1
aaggggggggggggttttattcccccaaaaaaaaaatggggggggggggccgggggaaaaagaaacccaaaaacaagggggggccccattcaatggaaaaaagggaaacaacccaaccgggcccaaaaaattcgggttatgggaccccaaaaacgggccaaaccggaaacaagaggcaaaaaaggccgcccaaagggaacacggagaaccaaaagggagggggcaaaaaaaaaaaatgaacaggggcccaaaacaaccccaaaaggggggccttccccccagcaaaaaaaggctttgttaaacccccccaaaggggaaaaccccaaatgggggggctttttggggggagccggcaccattaggggggtttctttggggggaagttaaagggggaacaaaggggggtgctatccccccggggaacccaggggaaaaggccccccttccccgcccaatatggggcggcccttttctccccccaaaagggggagaaccccctccccctttcccgggcaaaagggggtcccaagggcgagaaacggggaggggggggggggaaaaaaacaccgcggggggggcccgggggggggaaaaaaaaaaagaggtttggcccccccccccccagccccctccccccgggcccccccccaccccccccc

SEQ ID NO: 116234 - DNA, 176 bp, Glycine max
  Clone ID: PAT_MRT3847_75970C.1
cgggatgtgtccaccggcaacaaagataatggcatttacgtacgtgacacttgtcactctgtctaaaggatcctaccttaccatcgcgtacattctatgctataccaacactctattgtctacctcgcttcaatttacatggccctgcataacaatgtcgctactggtaaatccct

SEQ ID NO: 116235 - DNA, 283 bp, Glycine max
  Clone ID: PAT_MRT3847_75971C.1
ggctcgagaggcaacgaccatgcttataatatgtctagatatatagcgacatccaattctaaaacggggatcccatgagaatggagacgcagcacactgtaaaaaacgagtgcgccgatattcgatgactagatggcagaacccaacgatgaatatccgccttgtgtgtcgaaacaatagagcgcggcatgatcctcgcttgtgggtcccaacaagcaaaaggtgtgttcaatatccttgggaggaaaaacagcacagaggggacttaaattcaaagagaagt

SEQ ID NO: 116236 - DNA, 192 bp, Glycine max
  Clone ID: PAT_MRT3847_75972C.1
tattaaaggaaagaagaactaacttatcttaccaggaaaccacactgctaggagcaataactttagttatagcccttcactccttacttaattctctaagggctacaaccttgatgggtatgtgtctacctacagaactgcatatacatatatactaggttgaccggccctccttggtgctggaataatagg

SEQ ID NO: 116237 - DNA, 723 bp, Glycine max
  unsure (1)..(723): unsure at all n locations
  Clone ID: PAT_MRT3847_75973C.1
ttactctcacaagaaggaacacacgttaagatttaagaatgtacaatgctctctacaaccatgccctctgtcatttaaatcaattcacattggaggaaaattgtaaagaaaaccacaaaaaagaaagaaaggactttggcttcacacagacatctacccaatcaagtacacaaatgtggctcaatcgacatctaaaatgtacttcctaagataaaattcaaggttgacatacattattaaaagagagctgagagaacagaaccatggcttaggatacactgagcacaaaatttgatggaccatcatcccatacaatgccatgtttattagggagcagaagacatccctgtcttttttttacctttatggactaaggagattctctttgtattgatggaggagttggtgggttcattgttccatctttacttctttcaggaacctcttcttttacagtagatagtgacctctctggactataataccccttaacaaaaccgcttgaatttagaggactagatggcttgatcatagaaggggaagagttgttacccaaaggagaacttgtgccagatttgcttgatgccacatcttcacgaggcaaaggtgacattagctgttggtcactagaataaacttctttcctgcataatttatcttctataatatcatagctattccccgttcgcacttcttgagcaagnnagcaccagcaacagcata

SEQ ID NO: 116238 - DNA, 434 bp, Glycine max
  Clone ID: PAT_MRT3847_75974C.1
atgacatgggagttcgcagaagtgccaaaagttgtgttgtggataagtctttgattacttctactgaggaatcaaacagttctgtgaagctatttgggttccctctaagtggccgaaagagattgcaccctgataacacaaattgttgatttgtcctattatggttagcttttctatttgggtggccatgactgttcttgttgagattgtagaatatctctagtcatgtccaggagtgattactaggtggtcctggactatcatctttcatggttctgatcaatatctatgtgacacctatttaagttttttaatttttgaaaaaaaaattaacaacacttgattgtgtcacggagagattggtcaaaccaaaaactaagatggtttagaatcagctaataatttctgcatgtataacagagtggctaatgttt

SEQ ID NO: 116239 - DNA, 381 bp, Glycine max
  Clone ID: PAT_MRT3847_75975C.1
aggcgttagtacacgtccgagaggacagctgtaggtggtagtacactagatccacacgcatgatgagcttctcaaatacagccgtgctcactggaacgttccaatcatactgctcattgatcaccacgtagcaaagcacctagtaagcgtctaatacccagatctgaccttgagtatcaaccaactactacctgtgtgtacttaccacatagccatggctcggttaccgttgctattcatgggatgatgaaatagccagtgcattctcgaactctgatcacaaagctgacgatacagagcctgagacgaaggattgctaaacacatgaagactgatatgcgcttgcaaatgcactctatgactggattgcatgaagctgat

SEQ ID NO: 116240 - DNA, 172 bp, Glycine max
  unsure (1)..(172): unsure at all n locations
  Clone ID: PAT_MRT3847_75976C.1
ggtccggtnttctccgttcgacctcctcttccgttttttctcaaacaaactacgactttctctttcctagctgtttttattccaaattccaaacgcaccgagatatttagcttcgtgtgaaggctgttagttcgatttagaagtggatattgctaatttgcttgtgatgggt

SEQ ID NO: 116241 - DNA, 470 bp, Glycine max
  Clone ID: PAT_MRT3847_75977C.1
ggggtcgacaagggggctacccttgctcctatgtatccttaggtgcgatgaggaattcagacctacgtagttctttacaagtgagaatgtttgggggtcaaattgttttttatgcttttggaaggttcatttttaattaataagaacaaaatgagtcattaaggcgttggacattgaatgatctcaagttactttgatggaaaaaaattcagttatgcattggttttattaactttcaatgtctttaaaagacaactttacagcgctaatgattggttaagattaaccttcacaaaaaaaatgaaatttactgatgatagatggaggaaatgaatatgcacaaaacaacaaggggagccctaaaggtgcatagatcacattcaaatcttaaaaacaaaactaaccgactgtcgtacaaagaacaccgaacaaggaacgatgtaaagattgatcacattcgtgattggtag

SEQ ID NO: 116242 - DNA, 254 bp, Glycine max
  Clone ID: PAT_MRT3847_75978C.1
ttttatatacaaagtgctcagccatatacataacaaaattcttattacccctgcacttgatgatactttactcaatgcctcattcatcggtcttcaatcccatcacaaagttatccgaacattcattccaaatttcaatcttcacgcgctgatatttatgtctctctaccgctacaacatgtgctgaatcactcaaataatatccacttgcgcacaaaaaattcccatttatactcaattctttgcttgtttga

SEQ ID NO: 116243 - DNA, 435 bp, Glycine max
  Clone ID: PAT_MRT3847_75979C.1
tcgagatacaaacattcgtactagcataagtactgcaccaaacagcagtgttccaaattttaaacgcttcagaaaggcacaaactcaatctggtaatagctttgagaatcttgttccatttggaaaatatccatacaaggattctgactgtgggaatgaggacgtgactgagcttgtgaaggaggagaaaaggcgaaagaaaatggaagctatggcagatgacatgtttaataatgaggcaagaaaacgaggcacagctggttcacgaggcactgttggttctcttcgtggcattcttacttcatgaagtgggcatggttctatgctatagtagagagctttctccaaagatatggctttgaagatgctgcacatttgatgtgtgttccaattgaaggctaaatcgttcacttgtctcttgtttgatcgagaatg

SEQ ID NO: 116244 - DNA, 564 bp, Glycine max
  Clone ID: PAT_MRT3847_7597C.1
cggcctgccctattgcttggtatggtaaataacctgttatgctatacagatacgcgagtaaaatgcttcggcggacacttcaatattatttcccttgcccatttttttatattattattagtatttatccctgtaaacctttatttgggaataaggataatactttaccaatataggatgaataattatccttatttttatcaagatacgggaactacttattaagatataaaatggaggtactgatccaccaacccgatagttctttttatgaggcacaaacggaataatttatcctggaagcgccaagagctactgaacatgcgagaaactatcgcaagggtttatgaacgaagaacggccaatcctttatgggttatatccgaaaacatggaaagggatgttattatgtcagcatcagaagcccaagcttacgggatagaacatcttgtagcctgtgataaaaaaacaagtggcatggattattctaaaagatacaggatttgaaatttcatttttgaatattcttactttcattctagtatcacatctctattagctaat

SEQ ID NO: 116245 - DNA, 227 bp, Glycine max
  Clone ID: PAT_MRT3847_75980C.1
ggtttttttttatcaaatttgtttccttataatttcgccggcccaaaagaagggacataaacctttatatctctatttatgaatatattaaatccctccgctgcagggaaagcaagaggggcgtttattagtaataaaaaaaacttacgggccttttccaggtgtttgcttttttttttagctgactactaaactcattaggcccaaactttttaagagagccttgg

SEQ ID NO: 116246 - DNA, 139 bp, Glycine max
  Clone ID: PAT_MRT3847_75981C.1
gagatcgaagcttgtactcgaatgagagtttagagtaagcaccttgcgaccagcgctctccgttcactatatccccgcacactgtcgtattcacgacggatttacgggttactcgctcacggtgcggctgaagtttcct

SEQ ID NO: 116247 - DNA, 385 bp, Glycine max
  unsure (1)..(385): unsure at all n locations
  Clone ID: PAT_MRT3847_75982C.1
actttttataatacctcattttaaaaaaaatccagtgaatccggtatttcctgtggcaaatacgtctncctcatttcacgcctttcctgctccccaccacactagtgccctctccacccgccccgcccctgccctctngttcttcatcagtatttgaaagtgaatgatttgtaaccaagactctntntcttaggatcacatttacaatttacagattcgttttcttgggaacaaatattttttgtatgacctgtctaaaacccctcgcctgagttttgtggtaaaagtattgtttgtggttgtgatcttattaaattgataacaaactaagctatttgacagcagtgggaaagcagattgtcttgggcaaggagaaaaatccccc

SEQ ID NO: 116248 - DNA, 1224 bp, Glycine max
  Clone ID: PAT_MRT3847_75983C.1
tgagcatttatgtgttatataaatcatttagcgtatacctaaagtcgttagaatagaggtcattctgatttccactatccatatggtggttttgtggttggccactccatggccaccattctggtagattggtaaatattggtatggagagtgtcagggaatgtagaattcaattctagtggaggttaagaaaatttaaatgaaagatcactatagattagccttacagtagtataggtaaattatttctgtaaaacctttgggttcttcagttatttttgcattgctaaatccttttaagtgaaagtaaaaagccagctttgtgtaagagaggaatgagagcgttatggattattgggttggcatatttcatggcatagatcagaaccactaatgacagtctacacattaagaacttgtgatgtttatagatatattttgtccctatatggtggctgatttgttctaattgagttttaacttttattatcagtgtcagggatagttgttcgactcgagttgccatactcagagatagggaaaaggatcgcagtgatccagattatgaccgtagttatggaaggtatgctaggagtatcccagcctctgctgttaacttggtgccatttaacttgcaaaaagctcaaccttcatttgctcaatacgatgctacatttaaccagttgggtcagatgtcacaaactcaagcctcacttggctatgcacctccttcaaccccgataatgagtccttttggcaccccaggattgaatcagacatctagtgagggtgcttacctacagtggcctagtgctgcaatgatgtatgctcattcatatgaccaatttagacatggtgttttccaggctccatttggtcaacagccgttgagctttgactattcacagaactattagatgacatttagggggagaatattcaatttggatgcaaaaagttatgttagcttttttagaatttcatgttaagttcatttgtcagttctgtcatagacccttattgtagggatatggctttggttttcagttttgatggttatagtaaatcgttgggtacttttaatgtgacagtttataaaatagtgaattgtagtgtatcactggatttgcaatatatgataaggtttctgtggttgctttattaaaaaaaaaaaaaacaaaaaataaaaaaaaaaaaacaaaaaaaaacagataaaaaagatag

SEQ ID NO: 116249 - DNA, 378 bp, Glycine max
  Clone ID: PAT_MRT3847_75984C.1
tccaaacaaaacaacgagaattgcacaatgatgcagacagaggcaccatcttctccaagtttcagcttccacaacaactcttccgactccttccctcacgtcgacgatgacttcgagttctccttcgttcccagacacaccgactcctcccccgtctccgccgacgacattttctacaacggccagatcagacctatctaccctctcttccaccaaaacgcagtcgttcacgcttccgctaccaccgaaacggcaccgcacgagcctcgccgtcgtcgttacctctcaggacgctgatgttcgaggaggaggaggagcgagagacggtgaagatcgatagcagcaacgagctttacggcgtggctgagggaacctact

SEQ ID NO: 116250 - DNA, 1753 bp, Glycine max
  Clone ID: PAT_MRT3847_75985C.1
attgtggaaagagggaaccgtacaaagaagataacgctaacgcggtgaccctttttgtctgttcacattaaagaatggagaaagagggatgaaagaagattttgggaaggaaatataaaacatttattcattgtcaccaaattttgttccctgcaagagagagaagaagaagttgttgggttgagttgggtttggattggatttctaatctaatctatacctttctttttcctatgcttttaaggcacaaatccttctcccttctctcttctttcttcttcttctcctgacccttattattattccttgcccttaccctttaggcaagggaaggaagaaagaataactatattattatctttattgtaatctatctttttattataattataattataattattgttgttattattccttaaatatggattcgccgtgtctctccaacgattcggtttctggattcaaagacaaggagtcaatggttgacccctttttggtcgaggctctccagaaccctcgtcaccgcctcaccattttgaggatggagctggagatccagaagtttttgaataatgctgatcagctgcattttgagtttcatcatttcccttcttcctatctccgactggctgcacaccgtgttgctcaacactacaacatgcaaacaatggttcaagataatggcttagatggccagggaagtaaaattctggttaggaagttacctgaaagcaagtaccctgtagttcgattatccgaaatacctgctaagcagttggaaaatgataaatctgagcagaaaaaaattgttattagacctaggcctaataaaaacagtttgaatgatgctaacggagttgggaggaaaggaaaccctttaagaagtgtggaagaaaggaaggaggaatatgaccgggcacgggcacgtatctttagtagccctagaagctctgaatcaggtgatacctcatccgtggttccaatggatgggagatattcttctactagcaaggatgagaatgaaactagcaagaaccccatggctgattcagaaagatatatcagtaccagggatagttgttcgactcgagttgccatactcagagatagggaaaaggatcgtagtgatccagattatgaccgtagttatggaaggtatgctaggagtatcccaacctctgctgttaacttggtgccatttaacttgcaaaaagctcaaccttcatttgctcaatatgatgctacgtttaatcagttaggtcagatgtcacaaactcaggcctcacttggctatatacctccttcaaccccgataatgggtccttttggcaccacaggattaaatcagacatctagtgagggtgtttacctacagtggcctagtgctgcaatgatgtatgcacattcatacgaccaatttagacatgctgttttccaggctccatttggtcaacagccgttgagctttgactattcacagaactattagatgacatttaggggagaatattcaatttggatgcaaaagttatgttagcttttttaaaatttcatgttaggttcatttgtcagtgctgtcagagacccttattgtgtttcagttttgatggttatagtaaatcgttgggtacttctaatgtgacaaatttataaaatagtgaattgtagtgtattactggatttacaatatatgataaggtttctgtggtggttttataaaaaaaaaaaaaaaaaaaaaaaaaacccccgc

SEQ ID NO: 116251 - DNA, 940 bp, Glycine max
  Clone ID: PAT_MRT3847_75986C.1
ccacgcgtccgcggacgcgtgggttcacattaattaaaacaatggaaaaagagggatggaagaaaaaagattgggggaaggaaagaaattagaaatatttattcattgtcaccaaatcttgttccctgcaagagaaagaaagaagggagagaagaagttgttgggttgagttggattggatttctaatctaatctatacctttcttttttcctatgcttttaaggcacaaacccttctttcttccctcttctttcttcttcttattgttattccttgcctttaccctttagggaaggaagaaggaacaactatactactattatccttattattgttattattgtaattaatctttttattatagttattgttgttgttattattcctcaaatatggattcgttgtgcctctccaacgactcagttgtttctggattcaaagacaaggagtcaatggttgacccctttttggtcgaggctctccagaaccctcgtcaccgcctcaccattttgaggatggagctggacatccagaagtttttgaataatgctgatcagcagcattttgagtttcaacatttcccttcttcctacctccgactggctgcacaccgtgttgctcaacactacaacatgcaaacaatggttcaagataatggcttagatggccagggaagtaaaattctggtgaggaagttaccagaaagcaagtatcctgtggttcgattatctgaaatacctgctaagcagttggaaaatgataaatctgagctgaaaaaatttgttattagacctaggcccaatagaaacagtttgaatgatgccaacggagttgggacgaaaggaaatcctgtagaagtgtggaagaaaggaaggaggaatatgaccgggcgcgggcacgtatctttagtagccctagaagctctgaatcaggcgatac

SEQ ID NO: 116252 - DNA, 600 bp, Glycine max
  Clone ID: PAT_MRT3847_75987C.1
ctcttttctttttcattctcagttcacctgcaagcaaaacgccatgtcgcttattatagcagtccacgcccactcctcacatgtcgtttccgcacccgatctcctttaaacgacacctaagactccccaaacacgcgtggtgaaaagcctccaccctgaaaaaaaattccgaaagaaagagacacccctaaagatctgaaaatcgacaaattcagattcaaactcaagttttgaggctgattcagattctgggcgtgtggaattcataaagtcaggttcaagataaagttttagctcaattcatattctgggtgtgtgaaattggggagaaaagaattcaaatttgggggtgcaaagtggtttaatttgattaggtgtgtgttagttaacatgggtgctagtttttccattctgggtatatgcaattgaaaaattcaggttccatatctagttttgagttcaattcatattctgggggtgtgtgttaagtgttaacatgggtgctagtttttcctcttgtgtttgtgatggggatggtacccctttgagaccaatgcttggggacatacccgagagctgtgtggcattggtgttgatgta

SEQ ID NO: 116253 - DNA, 1170 bp, Glycine max
  unsure (1)..(1170): unsure at all n locations
  Clone ID: PAT_MRT3847_75988C.1
ggtttaatttgattaggtgtgtgttaatatgggttctattttttcgattctggtgtgtgnaattgaaaaattcttaagattctagttcacctgcaagcaaaacgccatgtcgcttattatagcagtccacgtcccactcctcacatgtcgtttccgcacccgatctcctttaaacgacacctaagactccccaaacacgcgtggtgaaaagcctccaccctgaaaaaaaattccgaaagaaagagacacccctaaagatctggtctcggcttctcacctttccttcaaaaatctcatgtatttcactccaatcgctgttctcttaacttttccctctctagctctttctcagaaaatcgacaaattcagattcaaactcaagttttgaggctgattcagattctgggtgtgtggaattcataaagtcaggttcaagataaagttttagctcaattcatattctgggtgtgtgaaattggggagaaaagaattcaaatttgggggtgcaaagtggtttaatttgattaggtgtgtgttaatatgggtgctagtttttcgattctggtgtgtggaattgaaaagttcaggttccatatcaagttttgagttcaattcatattctgggggtgtggaatttagagaaaggaattcaactttggggggtgcaaaggggtttactttggtttggtgtgtgttaagtgtcaacatgggtgctagtttttcctcttgtgtttgtgatggtgatgctaccccttcgaggccaaggcttggggacatacccgagagttgtgtggcattggtgttgatgtatttggacccaccggatatttgcaagcttgcacgattgaacagggcgtttcgcgatgcttcggtggcggatttcatttgggaatcgaagttgccttcgaattataagttcattgtggagaaagctttgaaggatgcctctgtggaagaattggggaagagggatatttatgccagactctgcaggcctaattcgtttgacaatgggaccaaggaaatttgctgatacaggtggtgtgtgtttggcgatttcttcccaagctttgaggattacagggatagatgatcggagatattggagtcgcatttcaactgaagagtcaagatccacacagttgcttatcttcacaaatttggtggctt

SEQ ID NO: 116254 - DNA, 326 bp, Glycine max
  Clone ID: PAT_MRT3847_75989C.1
ttttgtacttactcacagatatatattggttttgtgcatacatcatatcctccagagctttcagttcgtgtggttcatatttgttcttcttgtaacatacgccctctgaaacaccccgcttaactgaatccctttaagttaatcatgtgtgtgttaagctaacataatcggggttgtatattcaatgaccaaaaaggaaactgacaacgattttatgaaagccaggtgttatcagaaacgagatccaggctttattgacgacttaaggtaggcaaattaatttgaaaaattattgtgtgctgtgaaaccaaccacgagggaaattc

SEQ ID NO: 116255 - DNA, 538 bp, Glycine max
  Clone ID: PAT_MRT3847_7598C.1
gggggaaaaggggatcaaaaccccccccccattaattttaaaatttgggctaaaaagggctaaaacaaaaaacaaaattaaggggcatttcaaaaacaaaaccgccaaattgaaataaaaaaaaccccccccctttgaaggaaaacccaaaaccctttttaaggggggcttttaaaaacctcaattgcccccccactaacaaaaggcaaccccatttgcgggccccgaaaacttccccttttaaacgggggcccccgggaaagggaaaccggtgaaaacccccccccagaatcatttggccttccccaacggaaaaaggccttagtaaccccccccgggccccccaaataaaaaaggcccttgcattttgggggaaggcccaaaatgccctcagggcaacccaaaaatttcgggaagaatctgaaacacttggccacttggccccccctaatctttaaaaaacccaaaagctgaacaagggccccagccccattaaaagattcaatttctttaaaacagggaacattggcccaacccc

SEQ ID NO: 116256 - DNA, 493 bp, Glycine max
  Clone ID: PAT_MRT3847_75990C.1
ccaccatatgctttgtgatggccttattgaaaaatcacttaaataagcataaccatattgaagaggaagatcaacatcaagacagtgcaacagctgatgatgatagtgtttggaagaaagcactcagaattggtacaggcttttacaataatgtgaataacaaaactttaggtagagctgcaacttttggtggaatgcagcttacacgtcgccggaattcctcaagatggcagagcataagcacttctgatgatgtggctaatccacagagttctcaatcagcagtcaaagatatgctgtaaactactactaatatggtgtagtctgcatagttgacatataaccttgtcccttgaatatgtggtcaaggattcaatctaagtttgtgtgtatggaaaaatctaatccggatcagttggggttactttgctcctgagccttaatttcaaacaatttcatgaaatagcaactaacaagtgctgctttcctaaaa

SEQ ID NO: 116257 - DNA, 439 bp, Glycine max
  Clone ID: PAT_MRT3847_75991C.1
ttagtttttaactttgtatatattacattgggtcttttccacattttgaaataaaatacagatttgaagttttgctattatatgattctctaacgtaactattatacacatttaaatgattacctaggtatttgatcaaaactaccctgaatagcaacccataaaatattactcaaatacaactattgtacacaatccaccccccccccccccccttctggattcaatgaccaaactgaatgtggacgttcaagcacaagtaatctgcctccggttaaccatcttctcgtaattctcagaaaccattgcagtcaaaataggggctccatatacaatctctgcgccaacttttggggcaagtacaagtttttgaacctttttgatgggtgaacttgctgcataaagagatattttcccaaccttcaaaacttgaagcttt

SEQ ID NO: 116258 - DNA, 354 bp, Glycine max
  Clone ID: PAT_MRT3847_75992C.1
gaagaaagttgcttgaggtcactatcggcctacttcgacaagaggtttctagtgtagcagccgggccattgtttcctaggttgagagatgattgtgacaactttcagaaagatttggtgctcttgaaggaaagaagagcaatcttttgtgaaatgaacaaccttggtagtggtcagattgacaatgaggaagtttctcaaggggcagttggtccaatgcaattagagctggatgacataagaaagagttgttactggtggaaggatatctctgatcttctgaaccaaggggatggtcacataccatgcaccaagaaaaaatgtcttggtggatatctctggggtagctttaaac

SEQ ID NO: 116259 - DNA, 360 bp, Glycine max
  Clone ID: PAT_MRT3847_75993C.1
tgaattgccgtgtcgaccgactcatacttccactcgtccctacagcttcttttatacttcagtaaccgactcaaacatatgagtccccggttaaatatttaagctagttaccttattctatctcatggtaaatttttccttatccaatatcctattcatccttctttccacacttaacacttttctcaatgttatttcttgtacctattgcccttaccttttttcctatcctccaataacaccattcttttttaatcctcctattaaaaaaccaccaaatcttttatcacctcctctttcatcttcaaaactaccctatatacacctctcttatttttcataacctaataactaccttaa

SEQ ID NO: 116260 - DNA, 355 bp, Glycine max
  Clone ID: PAT_MRT3847_75994C.1
acaaaaactgaaaaatacccttaaaaaatcagatggttgttactgacggatatcatgcacatatctaagctggcataatcaacgactcatgatcatctgctcgaaaagatgcaaaactttttccagaagtgaatgactttcaaacaccttagacacatttatttcgggaagggcgtacattttttatgcttccagcttacaggtgactgatgaatcggctcctgctattgtggacgtatatttaatggttgcaaatggccctgtgaccctaatccaacaccaagctttgtttgggttggactcagagattgggttaccaaaacatgcctgttgtgccctctggggaagcttaaaa

SEQ ID NO: 116261 - DNA, 543 bp, Glycine max
  Clone ID: PAT_MRT3847_75995C.1
ccacaaccagtttctttaatttgactgccttttggtaattaatccatttccttctcctctcattcaagtaaagattttgtttttgtttttgttttctgaaactttaacctgcattcatttttgctttgtgtgattttcattagtgttgtgttgtgttctcaaaagacatttgtcatatcatatgtgatatgttaagtaattgtttatgcttgattcattttcatggctgagtttgtacggatgtcaagagatttcatgcattcaaccaatcagaaccattgggtaaagattgaatgactcatatttcatctcacaaatctaactaaaatatgtatattagatgtgaatcatcagatcttcatccaatagtaacgatttatgaatgcgtgaatgctgggatcttcgtgtctggccaacaaaatactcgttgatatttcatattttattactcactttagctatatggatgtgtctcgagttcttaattgcaaaactctgcctgctctttgattttcaaattgtgaggacacaacctagtgcttg

SEQ ID NO: 116262 - DNA, 594 bp, Glycine max
  Clone ID: PAT_MRT3847_75996C.1
gtgttgtccaccaatgaagtcatgtccctccaccttagtggttcactcactcaactgctgaaaccatatcgagctttgtcttaaagaggagtgcacatgcaaattaaaaagcgttcctgctaccttattggaagaataaacacatgcagtatagtagtaactactaagtcgatctaatataattggatatatggtctatgtattgatgcatgtgtgaagtagttaatttctagcatttgattattagctatatataattaatgtaatgtgttataattattcttaatgaagttttatttgtattgatgaaaaaaaaaaaaaaaaaaaaaaaaaaaaaaaaaaaaaaaaaaaaaaaaaaaaaaaaaaaaaaaaaaaaaaaaaaaaaaaaaaaaaaaaaaaaaaaaaaaaaaaaaaaaaaaaaaaaaaaaaaaaaaaaaaaaaaaggggggggcgttttaaaaattcaaatttttgggccccgggggtgaaaatttttttttttttttttggggccccaaaaaaaattaccggggggggggttttaaaaagtggggagggggaaaacccggggggacccaacttaaaggggttggg

SEQ ID NO: 116263 - DNA, 1627 bp, Glycine max
  unsure (1)..(1627): unsure at all n locations
  Clone ID: PAT_MRT3847_75997C.1
ctcagacccaccccgccccggtggcccttgtcaccgatcacggcaaggaaccgaacggccacgcgtccgattgcttcaagttatccttcattattatcacagctgctactttctttggtgttattgtttcactcatcttggtagctaggacaagaaccttgttcataagtgacatatacaagagataccgggatgctgcagccacggtgacagaagctgaaatggcgaaggtggagaacggaaacaacgcaaagaaagatgagaaacatgtggtgccaactcatgagtaagacgctgggtttcttatgatcatgatcactgtacagaaaaaaagtcaaatttactcagagtgagtttggtgtcaaccttgctattgtgctcttattgctcctcctcccacttgctgttgtttctatagaggaatataaggtctggcagagtaaaaggctcgctttggttgacccctccccggtgaaaatagtaaccgatcagggtcaaaaggtgaaaccgaatgagcctactaatgatggcaacaattcagtttccgatgacacaaagtggtgggaaaatgtctttagtccaccagcaagaggtgaggactatacaatacttcaggcgctattcagcgtcgacatgttaatacttttcatgacttgcatatgtggtgttggaggcacgttgaccgcaatagataatcttggtcagataggaacctcgcttagatacccaaagaaaactagaagcactttcgtgtccctagtaagcatttggaattatctgggaagggttttctctgggtttgtttctgaacattatctacaaaagtacaagttccctcgtcctctcatgcttacactaaccatgctcttgtcatgtgctggtcaccttctgattgcatttgacgtgccaaatggtctttatgcggcttcggtgattattgggttttgttttggcgcacagtggcctttactttttgccattatatccgagctttttggacataaatattatgcaactttgtataactttggaagtgcagcaagtccactagggctatatgtgcttaatgtggtgatgactgggcatttgtatgacaaagaagccaagaagcaacttgcagcattggggcttgagagaaaggaagggcaggaattgaattgcattgggatccattgcttcaagttatccttcattattatcacagctgcaactttctttggtgccattgtttcactcatcttggtggctaggacaagaaccttttacaaaagtgacatatacaagagatacagggatgcagccacggaggcagaaactgaaatggcgtgagaaagattccaaacatgtggtgccagctcagacgtaggactaatggtaaaagatagatgttgcttgaagatcaatgttcaaacaagaaattaattaattaataatgtagtcatacatgttggacaatatgtaatattcaacattatagtttgctacattttctttgccgtgatgtatacttttcattttctttgtcacacaaaacgacgtgcaatttttttcgcgtttattctagaacgagtaaaataaaataatagaaacatggttgctgtgttagtgcaatagttgatnnngttta

SEQ ID NO: 116264 - DNA, 345 bp, Glycine max
  Clone ID: PAT_MRT3847_75998C.1
tcctagtcggcggccgcccttttttttttttttttgtttcatgttatgagcacctgggactgcagtggatagaaaatgaactgcggcagcactctgagcgggtatggcctatatcaaagccaacatccgcgtagaagcggcagcactggcaactattagtggctgctaaataaaattcatgcggcgtatgcttgaaagctccatgatcaggaaatccctggggatgaccaagtgcgtaggctatgagatcaatacatgttacacagctgtcaccaaaacatactggtccagggcgatcatactgcccagcggacctcagccggtgtgcgcaagggtactgctctg

SEQ ID NO: 116265 - DNA, 397 bp, Glycine max
  Clone ID: PAT_MRT3847_75999C.1
tccaaggagaggtttcccgatcatcacgtgtatgacgtcctccttctttgggggggggggggggggggggggggggggggcaataattaacaaagtggaagaggtaagaacggtttagggtaagaagccggggaaaacctggaaacatggaaataaggcgacgaggaggaacgagaattggagaaacaagggaaaaaaaaaccggagtcggcaagggggattgtactactagttagtactggtacctggcaaggaggttgcaagcattaaacgtgccgaaaagcggggggtatatcccgggtatagggcccccgtggtggtgcgtaagattcgggtaaaccctggtaatgagtacgcgttatttgtggggatgggttgacatgccgacgtaacatgc

SEQ ID NO: 116266 - DNA, 371 bp, Glycine max
  Clone ID: PAT_MRT3847_7599C.1
aaagaaggcaaaatgaaggagttgcgggacacaaagttaagctctgaaccttaaaagggggccagggtttaaaaattagattggaaccagggaaggttccagggccattgaggaattaaagccaaggtccctccattggaaccaaatctttttcttaagggaaaaccctttttttaaaataatgcatcattacctcacctcccctcctggttaagggctaagggctggtgctgcaaaggaccttgccttacccttaacataaatttgggtaattgtttggaaaaaaattcccaaaaaaggaaaacaagcgagccgaataaccttgtctgtatagcattatttttcatataaataacttttcatgagcctgt

SEQ ID NO: 116267 - DNA, 759 bp, Glycine max
  unsure (1)..(759): unsure at all n locations
  Clone ID: PAT_MRT3847_759C.1
gagttgaaaccccgatatgcccactacggcccatttctggacgccgatagcaccgtgctggacgaaggcctggccctgtattttcctggcccaaactcgttcacgggtgaagatgtactggaactacaagggcatggcggcccggtggtattggatatgttgctacagcgctgcctgcagttaggttgccgcttggctcgcccgggagagttcagcgagcgggcattcctcaacgataagcttgacctggcccaggccgaagcgattgctgaccttatcgaggccagttctgcgcaagcggcgcgcaatgcgttgcgctcgctgcagggggctttttccctgcgtgtgcacaacctcaccgagcaattgatcagcttgcgcatctacgttgaggccgccattgatttcccagaggaagaaatcgacttccttgccgatggccatgtcctggcaatgctggataaagttcgtgatgagttatccacagttttgcgtgaagccggacagggtgcactgctgcgcgacggcatgacggtagtgattgccggtcgtccgaatgcaggcaagtccagcctgctgaatgccctggcaggtcgtgaagccgccatcgtgaccgagattgcaggcaccacccgggatatcttgcgtgaacatatccacatcgatggcatgccngctgcacgtggttgataccgccggcttgcgcaataccgatgaccaggtcgaaagaatcggcgtggaacgcgcgctcaaggcgat

SEQ ID NO: 116268 - DNA, 286 bp, Glycine max
  unsure (1)..(286): unsure at all n locations
  Clone ID: PAT_MRT3847_75C.1
atcaaatctctcatacttctnaagnaacatanancggnntcttcatttctcactctccggaacattntgttnnntaaanaaagaaaaggggaaaatagaaaganaagaaaaagggagaaggagtgagaataacatgaacaaanaantcangntnatctgtntntttatcctcttntcatttctcagngtgggtttcgcnggngccggagaggnggcggagaaaaancntttnaccccaaaagcnttcgccattcgttattgggacaaagagatnngcagcgggttg

SEQ ID NO: 116269 - DNA, 243 bp, Glycine max
  Clone ID: PAT_MRT3847_76000C.1
ttcctttttcgacccacgcgtacgcattagaccttaaaaaaaccatctatatatccaatctgtttaaatctcctaatctcaataatgtcaattgtgcaatattccatgggtaattggcttcctaatcactaccctactactaatactcctttattttctattcttctaaaaattaataattttctatgttttaacactcccaataaaaaactttcatatcatatttcttaattcccatctcaa

SEQ ID NO: 116270 - DNA, 606 bp, Glycine max
  Clone ID: PAT_MRT3847_76001C.1
cttcatgagacagccccgcatctggtggattccatatgtgcatatcgtggtggctacggggcaaaggaaagaagaaaaatagagagttcattttttggtggtaaaatatgtggtgttgctgcaactaatgctcttgagttgggcattgatgttggagaaattgatgccactctgcatctctcgagccgtggtaatattgcaagcttgtggcaacaagctggtagaggtgggaggagagatagaccatctcttgctgtctatgttgcatttggtgggcctcttgatcaatacttcatgaaaaatcccaagaaactctttgaaagaccaattgaatgttgccatgttgattcccaaaacaagcaggttcttgaacaacatttggtctgcgcagctcatgaacaccctttgagtgtgaactatgatgagcaatattttggtccttgcttggagagtgtcataatttctctaaaagctagaggatacttgagttctgttctatcatctgattcttctagaatatggaactacattggtccagagaaattaccctcacacgcagtcaatatccgagcaattgaaactttaagatatagtgtcctagatcag

SEQ ID NO: 116271 - DNA, 432 bp, Glycine max
  Clone ID: PAT_MRT3847_76002C.1
atttttatgggaattattttattccaaagaaattttgggttttggattgggcctaagaattcttttttaatttaagttttaattaatccgggaaacctttttttaaaaaattaaatgaataggctccaccctggccggccgaaaaggaaaaataaaaaccgggttaaaggccattcctaataccgggtttaaggataaaaatggaattaaataattttgggggccccaaatcaaaaaaaaaaaaattgggggaataaaaaagctggattccttagaccattggccgtaccataaatatggaataattaggagttattatcattccaatggcggttccaaaagttataagtattttggggataaaaaaatattttgggctagtaataattcccaataagactatcaattttgcaccaaaaccgctcatgcccg

SEQ ID NO: 116272 - DNA, 151 bp, Glycine max
  Clone ID: PAT_MRT3847_76003C.1
gtctataccaaaaaacatagaatattcagaacaaatgaatcaaaatcaaccaatatgaaactatgtcctaaaatgatgaatgtgttgagccaatagcaattctctgatggtggtggtgttgatgatgtgtatggtgatggggtatatagag

SEQ ID NO: 116273 - DNA, 568 bp, Glycine max
  Clone ID: PAT_MRT3847_76004C.1
gttttttttttttttttttgacccaagtataagcagtggtttttatttttataatttttatcatacatataaacttttataacaacaaaaggaataagaaattaataatcttctctgtaaatagtattttatgtatataaatattgaaccaccctaaagatttaaaatagtctaactccgccagagttgcatccactaggtggttgttttgttggtgtttttttgcttgttgtcattcaggaaatcaagcaacacagtactcttgcacttggggcatttaggatttggatcatcctttgaaaacaaaacgtacatgaggcatcgcagacaacctacgagaaccatggatctaatctcttcatcattagtctcggaagatacgcatgagtcaggatccgatgatgaatacaaacataatgatgattctgaagtcgataactcggatgagtttgcagttcgtgggggggacaacatcagatcaaattccaacctaggactccttgctctttcattactcatacctctccctgcttgttggaatccttgtatatagtaattgaaaagaaac

SEQ ID NO: 116274 - DNA, 393 bp, Glycine max
  Clone ID: PAT_MRT3847_76005C.1
atcagcaaagataaattatatatatattcgagtaccagaggtacaaagattacataggtgagtttgtccaggcaattggttccaagtatcagacttaatacagggtgttacatatatgaatctataacctactgatgtcctatgactgctaccctcggatgataaacaaaatcttttctaagattaatggaccattggttaaagtgtgttgctgtctccagatttctgaaccatgtccacagtaagaatgttgcatcatccaatagtttgttgccattgaaggtgtcattggaaaaaagtatgttgttcctctgctgccatatggtctatgtcaaagccaaccatcagcactaccatctgttagcccttattccatcagccaaaccaaataca

SEQ ID NO: 116275 - DNA, 1106 bp, Glycine max
  unsure (1)..(1106): unsure at all n locations
  Clone ID: PAT_MRT3847_76006C.1
gcttcatttcccaagccgaacgcatggattctnacgtagttcgtacgttccagcagaagcatttccccacatnntggtcaatggtctcggaaacaccgtcgagtacaatgtcaaccaccgacggcgttgagcacgtgcgactctcgcacgcttttgcgttcgacgatccgttccccaaggagaggaccaggagatcctccacgccgttaaccaacgggaaatcgcgcttgttgtggaggacgtgcgtcacggccgccgccgtagggttgttcatcacaaggccgccgtccacggcggagcagtaggtcttgccgtcgacggaagctaagtcgaatggcttgaagcggctcggcgtcgctgacgtggctcggcacaccttccagagcttgaagtcgaagctcggagactcggacgcgtcggcgcgcgaaaacacgaacggcgcggaactcttgaggtcgaagcaaggaataaggaccggtttacacgtgtccttcaaggtcaacaaccgtccgtcctcctttctccggaacacttgcttcaacgcgttgtccatgctactggaggagaatctccggcgccggcggaagattccgccggatttcagcttgtagagttcggagtttctctccgaaacgagacggacggcttccctggcggtgtagagcggcctgccgaaggcgtcgccggcggtgatcatggcggcgaggatggcgccaatgccggtgccggcgacgatgtcgaagaaatcggctacctgagcgtgaggatcggaggtgtggagacggatctgatcctcgaggtagatgagagcttcgccggcgacaatggcggtggttcctccgccgtcaatgctgagaatgcgggttttgttggtagctttacaatgagagagccatttgtgctccagtttggagaagatctccagagtgactttactaaactccattcgctcactcaatctcagtctcttaggtaaattctttgcttttaatttttagaaagaaagagatttgaacagtgtcgctgtaatgcaagagagagaatgaaagaatggaaggtaagaaagcaaatagtgtcacgctttggtgctgagaggaataaatggc

SEQ ID NO: 116276 - DNA, 292 bp, Glycine max
  Clone ID: PAT_MRT3847_76007C.1
aacctgcagatgcggggactgtaataagcgcggaggcgccctgtacgtggactttgccatagacggcatccacagcattgggtacgccaactctacactggagaagaacttccgtatgaacgaagtcaacaggctgggagccatctctatatgacttaaatccgagacaggtacgcgtatggacatggtgcattacagccactagggcacctttgatgccatacagctggacgactaacatattgactacctgtcgagcttcacagaagctgtcatgaacctagagtggatt

SEQ ID NO: 116277 - DNA, 602 bp, Glycine max
  Clone ID: PAT_MRT3847_76008C.1
ccacccgtccgattcattgtcgaattcgtcattcatcttccatcagtccgccactttcctcaatcttccattccagatctctcaccttcttcttcttcctttgtgccacccttttgttccatgattgtttttgtgcctgtatcagcttgatctttttgttttttttccctgttgtaaaaacatttcaatctgcaaggtatgtactgggttcttgtttgaattgttcttccttcttgtcatgccacaaagtatttgaatttattggtagtgtgattgcgttgcagttttccatttcctcctcttgtgaccatcaaaacacatgtccctgaacatcaagatagctttttgttgtcatgttctgttctgtatctcagcatttaattagttttattaatctgagtgaaatttttgagtgctttcatatttacaaatttatatatcacttaagaattaagatcttcatcttgttattttgcatacatgttagttttgattactcattttgtcttggtgattcgttagatgcgatcaaattttaatgaacattcgtcagatttatttgggaagtctatggcttccatttccatgcatcactgcttacc

SEQ ID NO: 116278 - DNA, 250 bp, Glycine max
  Clone ID: PAT_MRT3847_76009C.1
tgtgattcttgctttgaagaaaagcaacattactactatagtactattcttccataagaaaccggaatattaagaagctggtgacttcaagagaaagaaacggctttctatccaaggggcagtattgtttggacagggggaaaggaagtggcaaaaaattcgaaagaagatggtattctgataaagagcttcttttcctttgttttttgttttttgttttttgagggattaaatgatgctttttctttat

SEQ ID NO: 116279 - DNA, 1046 bp, Glycine max
  Clone ID: PAT_MRT3847_7600C.1
ctaaacctaaaccaaaatcacctgcgccagttgcaactcacacttctaaaatggaccgcagaagcctcctctgcctcgcaatcatcggcattgtcgtcgccgccgtcggaggtcagtctccagcggcggctcccaccacttcctcggcatccccagccacagccccttctaaacctaaaccaaaatcacctgcgccagttgcttctcccacttcatctcctccagcttcatcccccaatgctgcaaccgcaacccctcccgtttcgtctcccacggtagcatctcctccgtctaaagctgctgctccagctccagcaaccactcctccggtggccacacctcccgcggccactcctcctgcggctacacctcctgctgtgacaccagtgagctcgccgccagcgccagttccggtgagttctccaccagcgcctgttccggtgagctctccccctgcactggcaccgacaactccggcacccgtggtagcacccagcgctgaggttcccgctcccgctcccaagtcgaagaagaagacgaagaagagtaagaagcacactgcaccagcaccgtcgccggcattgcttggccctcccgctcctccggtaggagctcctggatcaagccaggatgcgtcgtctcctggtccagctgtatctgaggacgagagtggagctgaaaccatcaggtgcctgaagaaggtgataggatgcttagctttgagctgggctacccttgttttgttcttctagagaagaagctgaggattcattgctgttgttacatagtattattgtatcatttattgtcttttttggaccctgtcgggggctaaaattaaatttattaccattgttttcttcaatctcttattattttataattgatgatgtttgttgacattattattattttagtactccttgctcccttgcttcgtgtgtgttgtgttttaccttgggattgcttgaagagggtaggcaccgacactacgatacctttctatttttataatgaaaaaactttatgaaaaaggtcccctaaaa

SEQ ID NO: 116280 - DNA, 1865 bp, Glycine max
  Clone ID: PAT_MRT3847_76011C.1
cggctcttctcctttctttttcccatttttttcctttccaccatctgataaaggataaaggacccaaagaaaaaagttaacatatttgtttgtatcataccactgctgttgtaatcccctctcaaagtgtaataaataaaaacacccttctttgtttgcttgttttgtttgtttccttcctaagactatctttttctcagaagcaaaggttttgaatttcagttatggccttttgctgtctttttgtttttattgttttgaaaaaaattggatattttttcagggtattggagtggttaaacaacctactatggaaggaggttcaaagcctcctcctcctcctatgttggagagaagggcaaggcctcaaaaggatcaagctttgaactgcccaaggtgcaattcaaccaacaccaaattctgctactacaacaactatagcctctctcagccaaggtacttttgcaagacatgtagaaggtattggactgagggtggttctctcagaaatgttcctgtgggtggtggctctagaaagaacaaaagatcaacctcatcagcgccaccaccatcatcagcatcagcacaagcaaagaagcttcctgatctcacaacacctaatttccctcaatctgcttctcaggaccctaagatccaccaaggccaagaccttaacctagcatatccaccagctgaggactacagcactgtctccaagttcattgaggttccttacagcactgaattagacaagggtactactggtcttcatcaaaaccctacttcctcatcaacaacaacatctgcatcttctcaccatcagttgtctgccatggagcttctcaagactgggattgcagctgcttcctcaaggggtttgaactccttcatgccaatgtataattcaacccatgggtttcccttgcaggactttaagccaccacatggccttaacttcagccttgaggggtttgaaaatggttatgggggtcttcaggggattcaagagggtcccactggtggtgcaaggatcttgtttcctactgtggaggatttgaagcagcaagttccaagcacaaatgagtttgatcagcagaatagaagtcaagagggttcagctcacgggtattggaatggcatgttaggtggaggatcatggtagatattattagtgaagaaaaaagagaacaaggggttgctgttttagcctttatttttattttattttcttaatggggggagtgtggttgtgtttggagtgtgtgatctgaaccactaacaaaaaataggatacattgcttcttctgttttgcttctctttaatccatttcattttttttggtcttcttttcctttccccagtagtcccactttgatttttagcttttggtcccgaagaatgtggctgtattttgaagctacctttcattttaatttttaggtttaatttcaggagcttcgagtccataacctatagtatatcatatatcataatcaagagtaggactgatttttcatttttggctttcccgtgagaaaaactcttattctcttattcttgggggtttgctaagatctccgcccttattcttggggtttgctaggatctcggcttggggtttgctgctaccacagcaaggaaaggattccccatcaataactattgtcaggtatcaagagagtttggtcggtcttgcataatccttgaaatttaatggccttctaagtataatttatttaggttataaaataaggacactttagaagctagtgcaacaaattaactagtttttagtatttatatctgtaaattccaaacttggatttcgggtaatttatatagtcctgggacataaagtgagttg

SEQ ID NO: 116281 - DNA, 215 bp, Glycine max
  Clone ID: PAT_MRT3847_76012C.1
gaacttcgttactgttacacatgtctcgctccgagcctatggtttgaagcatgattgacttgcttttgcttctggtggccactgatatgatggggccaacaatggtggcagaagcaagaacttgtgagtcatagagccaccgattgaaggggccatgtttgagtgacaccaactgtggctttgtttgccgcaccgaacgtttcactcgaagacac

SEQ ID NO: 116282 - DNA, 232 bp, Glycine max
  Clone ID: PAT_MRT3847_76013C.1
acggacagtgcaccttcctctgttttgtttctttgtttaagccttatcataagcttaggggggcacacaaggaatgttgcattgccctaattactctcattgttctctttgtcaacaccaacctgcatggttccatggctgactattgtcgtggttggcagagtgctcatgccactttctatcgtgggggtgatgcttttaacacaatgctttgcgcatgtcggtttggaaa

SEQ ID NO: 116283 - DNA, 167 bp, Glycine max
  Clone ID: PAT_MRT3847_76014C.1
caacgtcctcttcactatacattctggtcttccataatggaagcacaacaatgaatagactcctattattgccggttctattattcacaccaacatcttatacaaccatctctaccatattcctatgatattctatcttactattaaccataatcaatattttctaa

SEQ ID NO: 116284 - DNA, 231 bp, Glycine max
  unsure (1)..(231): unsure at all n locations
  Clone ID: PAT_MRT3847_76015C.1
gtcacaaaaagttaggatagttggatttgttctaagtttgctaatccatggagtgttgtttatgagttgagtctatgcttattgcttaaggaggggttagttttcttttttgtccctagttggttgcattggattttgaagaaatttaggcagagttctcggtcttgagtcagggatacagctctgacattacatacnattgcatgatgtttgtcttattttgggtactta

SEQ ID NO: 116285 - DNA, 293 bp, Glycine max
  unsure (1)..(293): unsure at all n locations
  Clone ID: PAT_MRT3847_76016C.1
cgacccctattgatccagaatgcattatttgcagaatagactcgttatgaggattctcctctttttttttattatgaacaacaagggacacagtagcttgcacttgtcccttatatgcccctgacaactgtgcaaatctctttgctatggggactatgatgttaagccttccattctcagcaacgataacacggatgtgtctttnnnncattcgaacacttgacttccccacaaagagcctggataacttttcactctannatccttagccacagannngtnncttataaact

SEQ ID NO: 116286 - DNA, 335 bp, Glycine max
  Clone ID: PAT_MRT3847_76017C.1
acccgttacatcataattatgtatcacatgtacacatttttctcttctatctctctaggtatatagatgagcacatggatttccaaggatcatttctattaagattgagaacatggtgcatcagttgttctaaactctttgcatttatctttgattcctacgaataaaaaaaatgcaaaatgagaaacaataatagctacctaacctggtgaagcaaaaggggaaggactactgggaagtggcggcggcgtcaccgaaccacccctgatttgggccttatggaattgatatgattcgtatctaacaacacaactgggatatattattgttccccc

SEQ ID NO: 116287 - DNA, 249 bp, Glycine max
  Clone ID: PAT_MRT3847_76018C.1
tgtccgaatgacatatggccatgaaaggaaacgagggagttcaagagagagagaaattcattcattcattgccattgggttcctcgaacaacctcaaagtttcaaatccagaaaagagaataaaaccaccttcattcccatcctttctatctgtcaaattgtacattaaattacatgacatggcataacacacaccacgccaccctctctgtatgtatcacaccctacccctcagattcggacacccag

SEQ ID NO: 116288 - DNA, 493 bp, Glycine max
  Clone ID: PAT_MRT3847_76019C.1
cggaattcggctcgagctctctatctgtccgtaatcactatgtttttttttttacaatggatacgagccaagaagggagggcatctcacaaccgagaactctccgattttttaaatcaaaatgttgtatagggcatatacattgacgaaatcataaccctaattatccacaagcgtcaccgcctaatcgttaacatatccgatctacacaacttcgttgacttggaaacacgattcttatgagtccacgtgcgtatcatgcaccgttctgagacgcagacacggaggctacttcgtgctatccgatcccaattattttaaggaaggcgaacaagtgcttgatggatttgaagggcccttttgtatttctcagccgcggccacgctccagatgtactctctttctgaaatcataggtttcatgtgctgtattgagggcattgacactaaatgatctcttgcaaggcccaaggttgttaaaagtgttcatttttt

SEQ ID NO: 116289 - DNA, 241 bp, Glycine max
  Clone ID: PAT_MRT3847_7601C.1
aatggaagggaaacttggctccctttctactataaaaaagggccaaagtttgtttgataaccggggtttaaaaacaaaattaacccaatctcctgaaaggacattaaccctactggctaccggaaagcaatttactcagcagctttttttttttttttgggcattttgtatccaccaaccacacaggggtgggccctttaaaaagggtaaagggggacttgcccaaaagggttgaaatgaa

SEQ ID NO: 116290 - DNA, 284 bp, Glycine max
  Clone ID: PAT_MRT3847_76020C.1
gacggttcaagagtttgttgtgagctactagctactttatcgtgaggataataggcctttgtttcttctctgcgttgcttttggtgtcatggtagcaccgtgcttccaaggtgtccgctctcgaaagttccatcgcctatgtgagcccgtgctcaggtggtggtacctccgaggtagaagcctcctgttgtaggcctgctgatcattgcgcattgcaaccaatcctttagaatgcttcgtggaaagtgcgttgtacctccatgggaattcatttatgtcaaacc

SEQ ID NO: 116291 - DNA, 1380 bp, Glycine max
  Clone ID: PAT_MRT3847_76021C.1
cccgcgggaccggcccggaattgactggctggatctacccaccgtccgtacggctgcgagaagacgacagaaggggaattcagagagagcgagacggcagcacgcgcaaaaatggtacagagagagaaaaccctagagcatccatcacaagagaggaagagcataggcacaaaactggtgccgtttatggaaccaaacaaagccgtcatcgtccttcgcggacgccggcgagcataagagccgtgacaggggaacccttcgacgaccgcacgcgcgaggcccgctacaggaatacagtgagagcaaaaaccaagttgaaccatcaacagttgaggaagaagatggcggaagttacttaagccaaacaaggctgtcatcgtcctgcagggccgctaccgccgggagcaaggccgtgatcgtgaggaccttcgacgaagggaaccagggagcgcccctacggccactgcctcgtcgccggaatcaagaagtaccccggcaaggtcatcaagaaggactccgccaagaagacggccaagaaatctagggttaaggcgttcgtgaagctcgtgaactaccagcacctcatgcccacgcgttacacgttcgacgtggatttcaaggatgctgttacccctgatgttctcggcaccaaggacaagaaggtcactgctctcaaggagaccaagaagcggttggaggagaggttcaagaccggcaagaataggtggttctttaccaaactcagattctgatctcgcaatcgtgaggttttattattagggcttttggaatgttgccttttttttaatattgtattcttgttttgcaaatcttatcaaaactattattctgctcttaagatttgtcgtcatcgacttcttcttttgtgagcggccagcatacatgttcaccaatgaccaaaggcaacaagaacgaactgggagatatggaacttccagagtggaattccttcaggacctttgatggataatggttgtttcagaaattggtgactcagtttcagaacacatctgaggatgaaacaagagagaaaattttagcaaatttggccaactttgcctatgatccttacaactacaacttcttgcgtcagcttaatgttttggaacttttcgttgactgcttaactgaacccaatgaaaagcttgtagaatttggtataggagggatctgcaattcttgtgttgatccggccaattctgcaattgtaactacgtggggtgggatacctcttataatgcaatgtgtatcaagcccagttaggaacactgaaaattatgcacttggggcactttattatatctgtgacgaatctaacaaggaggagattgtaaggccccgaaggtggtggtggcatta

SEQ ID NO: 116292 - DNA, 326 bp, Glycine max
  Clone ID: PAT_MRT3847_76022C.1
tttaaaccaaaaccaaccaaattttcctttaactttggccattaaaccattaccttttcctttcgttggtggccaaaccaggaccagagcaagggttcccataactaacaacccccatttttccttttcattacactgggccaagaagaaaccaccaaaaccggacctccccaccagttggcgggctagtcctcaaaacatataaaaaactttggaaaaagggaggttcttaaactcaacattgtagctgctgctgcaaaaaaagcacctccaaaggacaccaaggtggtcccttgagtactaaccaaactcatggccccaaaact

SEQ ID NO: 116293 - DNA, 265 bp, Glycine max
  unsure (1)..(265): unsure at all n locations
  Clone ID: PAT_MRT3847_76023C.1
cacacacaactactacaancacctnccntacaatcannancaagnaacaactaacggcaagttatgcaaaagcnctacgangatcagggncgcaaggttgacgagtatggcaacgttgagaagcaaaccgacgagtacggcaaccctgntncatgctgcnagngncnccgatgtagcnacnagaactggcgctggtgggagagngggatgnacattaatggcaacanggtagcncnatgcnaagggggtngaccngggaggncag

SEQ ID NO: 116294 - DNA, 241 bp, Glycine max
  Clone ID: PAT_MRT3847_76024C.1
caaaaagtagtgttctcttggaaaaaccaaaaccctacacggttaacatgaatctaccttaggtttcaattggcctgaaaaaaaaggatttgttccaaggatcggcttcaacccccctaccaaatttttcaatagccttaaacaacaattccccttacttttttcaaaaggagtttgtcggacaaacctaagcccttttcctttacaaaaaatccctttttacacgataggaccaccgccc

SEQ ID NO: 116295 - DNA, 1986 bp, Glycine max
  Clone ID: PAT_MRT3847_76025C.1
gttggcctttcgtgcggccacgcgttcgttcaaaggcatgctgaattgactagaaaaatgaagtctatgaagggtagcagcagtagcggggaagatagcagggaacaggaagaggatgacaactctgctggttctgatcaggacatggattacaagattttgggaaaagctaaagaaaaaacaatgaaagtgttggaggaagaggaagaagttcccaaatcaggattgctttctttgccttttatgaggcgtggattggagaaaagaaaagaggcagctgttgaagaagctaaccttgctttccaagaatacgaagattccttgaagaagctggagaattctggtggctcagaagatccaaaagctgcttctaccagtggcagaagagtatttggaacggctaaagcccagatagatgccagtaataaggtaaaatcagataactgctatgatggcagtgatagtgaggatgacttggggaccagcaaaagtggcaacatagagaatgagggaagcgaccttttgcataaggatgtaaacaaggatttggtggtaattcaagatgacactgatactcaccaggaatcagtttttaagaacattgatgagattattaaaaagcctgggccaaaaactacatatgaagtttccatatttgtgtcagatacatggaaaaaggctaaaaacaaaaatgaagacatgacgatgaagaagtctccgatgcttacagaactagatatgcaagctataaaagttactgaaaaggaatttggagaggatagtgatacagattgtgaaggacagatggtggatggaattctgtcttctgtttctaaagtaccttatgaacttccttctcaagaggagctcattcggcaagcttttgctggggatgatgtagatgatgattttgaaaaagataagcaggagatcctcaacgaagaaaatcctgagccagagaagcctctattacttcctggctggggccagtggacacatgtacagcaaaagaaaggtttaccatcttggatgctgaaaaaacatgaagatgcccagaaaaaaagggcagaagccctcaaaaaaaggaaggatgctcagctaaaaaatgtgattatatctgagaagatagacaagaaggctgagaaactacatactaaatcattgccatacccttttacttccaaagaggtctttgaacagagcatgcgtgtgcccatcggacctgaatttaatccagcaactgcaattggtcctcttaaccggccggaagtggtaaagagaccaggggttattataaaaccaatagagttcaaagaagtgaatcctcatgaaaaaacagagcaacggaatggagataagcgtaagtttaagaaaaataaaggcaatgctggcaatatcatgaaaaaggcgaaggtgggaggaaaaagttaattgacatgagttttggttctgttccagttctagaaatattctcagttttctgtcttttggagagaataaactgtcaggttaaaagaaaaaagactgaaaaaggaggagaatttagtaggcacggaggcttatggcatgcaagaaattgaagaaaacagaatttaagagcaagagttttgtttttgtgtgggggtggcgggggtgtttctccttttgcattatcgttcaggttgaattattcattttttttttggtgagttatttattcattattttcacacccaacgaaaatgctattttttaattttgtccccaattgatataaatatcccaaggaagtggaaaagagtgttatttatctttgacagatttcttctctttatagatgccgtcagatttcattgtttcattgtaatttttttttttttttatagattatccctcttctcagttctcaggcttttcaacaaatgtactctagcaaagcttttaagttttaacatctgtaccatttatgccctgtttttaaaattttattaacccttaccttagttt

SEQ ID NO: 116296 - DNA, 251 bp, Glycine max
  Clone ID: PAT_MRT3847_76026C.1
tgccaattggatatttccttggtttcaagcaccattaaggggttaatggtctgtgggaaggcacaaggggcgttagtgtgcttcaaattttaagcggctaactgataatccgtaaaaccaactggaccaaggaggtggagcaaactgttcttcgcatgcaattttggaacgttaacattttccgctcagactgggcaaaaattgttcatgaatgagaaggaaaaaaaaaacattgttaacaatgcactttt

SEQ ID NO: 116297 - DNA, 430 bp, Glycine max
  Clone ID: PAT_MRT3847_76027C.1
acgagaggaagtataagttgagaggaaaaaaagtgtacatggggagggaaaaaaaattaaagtgaggtttatatgaaatttataaaatattgtataagatcataaaataaaatttatcactaaaaaaaaataggacagatcttataagatttttaattttaaataacactataagattcacaaaaagtaatcttagattccaatttgaaatttttagagtttttactcctttataccatagtgttatagtccaggcaaaaagacactaaaagcttgtggccttatagaacatatatagaataaacattttttgttcacaaatatagtactaaaaaaacaaaagggaccattacaaaggtagtacgaaaaaacttctaaatttttcttattttgtggtctgcataatatttgtatatgtaggtttttaatt

SEQ ID NO: 116298 - DNA, 437 bp, Glycine max
  Clone ID: PAT_MRT3847_76028C.1
gaaagagtcagtccctgaaatgctcacgcgctaccccaaccaccctaaccactttaactaacttattcattgtctcccgcgctattaccgaccacttttaccatgtcccaggaattcttcctccttcttttcttcttccctttctctctctcccagacaccccccagaggcttactcatcaactgcggggcccactccgctgcccaattcgataaccgcacgtggctccccgactcgggcttcatctcttcgggctcccccaaaaccgtcaccacccctgttcttttcccaactctgcacaccctccgctccttccctcgccaggtcaagaagcactgctacaatattcccgtgtaccgcggcgcaaagtacctcgttcggaccacctacttttacgccggagtcaacggcgctgaccacccctaggcggcgggctt

SEQ ID NO: 116299 - DNA, 361 bp, Glycine max
  Clone ID: PAT_MRT3847_76029C.1
ggtcgacccacgcgtccgaaaaactctcgttattcattgcaccacattcttatttttattttccattcattccttcaccaactcccatggcggccgtcggtggatcctacgacgacgacaccacctgctactacctgttgtgctgcgcccgattccgacactccctacgaccaccgacttgtaaactgtagttactacgcacacgctatgccgtgaacgccacatgaacctagttgtacgatgacaacaatggccttgtttaaaattttgaatgtaacaaacagtgccgtgtggtgttggtgaaagttagctggtgttactgatatacaaaggaaaagaggagatttataaggtttgggtt

SEQ ID NO: 116300 - DNA, 314 bp, Glycine max
  Clone ID: PAT_MRT3847_7602C.1
tttttttttagtaacaattgacaaattcttgttaggggcggtaacattgtattttgaggatacatcattatgacaaatgacaacacaatagtattgaacccaagtgttgattactttctctctctctctcattctctctctctaattaacatcttattctgcaggaaattatgaactggaaactggacatatgacgcacataactcttttgcttgcttaagtatatagaaacctgaaatggttgacgtatagagatctcactgagatgatcccttaagctattttaccatggcccgtaatagatctccctttgt

SEQ ID NO: 116301 - DNA, 356 bp, Glycine max
  Clone ID: PAT_MRT3847_76030C.1
acgtaaaacggcggttcattctaggtggcacttggccatgccggctatgattgttgaaacatgcgcgagaacacttaacagcaagttttacaagcgaaatttgcttctttaacacgtaactgcagacgctgaacctttcaactgccccaaattcataacttaaccattcctaggtggatcaaggaatcataatgcttctattaagctttattggaaaccagggaaaggtctgtgccaaccattgagcccctaaatggggataccgttgggaattcctctgaaagggaatccctcctcactagaagggtaaagccaagggtcaggcattttagcccggccactgggggtcttcaacg

SEQ ID NO: 116302 - DNA, 375 bp, Glycine max
  Clone ID: PAT_MRT3847_76031C.1
gttaatagatctgtgaggaactcatgactggttcggtcaaagaagtgtcttaatcatcacaactagagatctacacctactggacctacttaaaggggattatactttatgaaattgaggaaatggtcgaaactgagtcccttcatctttgtagttggcttgtcttaggacaaccaaaaccaagagaagacttcaatgaacttgcaagagatgtacttgcttattgaggaggattaccattagctcttgaagtcctagggtctcatgtatttagtacgacagacacagagcgggaaagtgcattgcctaggttaaaaatgactcccaatgatcaatttcagcagatattaagaataggggctgatgatctatatg

SEQ ID NO: 116303 - DNA, 509 bp, Glycine max
  Clone ID: PAT_MRT3847_76032C.1
cggctcgagcagatgatatcaagaactggtggatttggggttactggatttcacctttaatgtatggacagaatgcaatagtggtgaatgaattccttggagatagttggaaccacttcaccccaaattcaaataagacgttgggaattcaaattttggagtcccgtgggttcttcacacatgcatattggtattggataggaattggggcgttgattggatttatgatccttttcaacattatatacactttggctctcacttacctcaatccatatgatacgccacagacaacaataactgaagaatcagaaagcggtatgactaatgggatagcagaaagtgctggaagagctattgctgttatgagttctagccacaaaaagaaaagaggaatgattcttccttttgaaccatattctatcacatttgcaaatagtttactctgttgatatgccactggaaatgaaggatcaaggtgtaagggaggacaggttggtgcttttgaa

SEQ ID NO: 116304 - DNA, 270 bp, Glycine max
  Clone ID: PAT_MRT3847_76033C.1
ctcgagccgctactgaggatgcgattttcttgaggcttgtaaagtcgtgattgaaacgggcaaaaattggggtttcggaatgaaatgaccaaaagaatttttggaattttaaatgctttgatttgattatgtctttacagtttatgaatgtcgggtggtttaaaagcgcatgcaaatcaatgatgaaaagccatgtaaatgttgcttatttagcccttgacagtatctcttgctatatgagtggttggaatatattttataaatatcaga

SEQ ID NO: 116305 - DNA, 538 bp, Glycine max
  unsure (1)..(538): unsure at all n locations
  Clone ID: PAT_MRT3847_76034C.1
ggctcgaggattcttcttacgtagcatccagcattcccttcatcgttttccaatctcctatataaccatagacaaaaaaacaaccttacaaaacacaaacacattacaatcaacaatgtccaatactctgcagcaacatcaacagtgtcccgaatcgaagcgtctcgatccgggttccaacgctcgccggcctggacaccggagatcggtatccgccggagctccgttaatctactccggcggagccaccttactcccaagcgggaacatttgtccgtccgggaagatcctcaaaccgggcttgccctcgcgcgggtcgaaccggactgatgtgttgggctccggcaccgtgaactacggccggggcagcatagtgcgaggcgtctcgggcaatattccggtgcccgtgggcgcactgccgcctacggtgaagcgcgcgctcagcggctccgatcccgaggagttgaagagggctgggaatgagttgtatagaggcgggaactntgcggaggcgctggcattgtacgatcgcgccgtc

SEQ ID NO: 116306 - DNA, 672 bp, Glycine max
  Clone ID: PAT_MRT3847_76035C.1
tttcctaccttctgcaaccatcaatgtcggcaatcgcggctccccaacaagatgcaggtcctccagcccgccgccaagatgctcgtcgagctctccaagtcccaggactccgccgccggcgacggcaccaccaccgtcgcctccatagatggcgccctcctcgagcagggcctcctcctcctttcccacggcatccaccccaccgtcgtctccgacgccctccacaaggctgccgtcaaggccgtcgacgttctcaccgccatggccgtccccgtcgaactctccgaccgcgactccctcgtgaagtccgccagcacttccctcaacagcaaggtcgtcagccaatactccacgctcctcgctcccctcgccgtcgacgccgttctctccgtcgtggatgcccccaagcccgacatggtcgatctccgcgatgtcaagatcgtgaagaaactcggcggcaccgtcgacgacaccgagctcgtgaaaggtctcgtctttgacaagaaggtcagccacgccgccgggggacccacccgcatggagaacgccaagatcgccgtcattcatttccagatttcgccgcccaaaaccgacatcgaacagagcattgtggtgagtgattactctcagatggataggattctaaaagaagagcgtaggtatattctcagc

SEQ ID NO: 116307 - DNA, 364 bp, Glycine max
  Clone ID: PAT_MRT3847_76036C.1
cccaggcgtgcagaagacgacaaaaaggccacagaatgggatagacccctcaaaacccggggtaagggaaaacatgcagagggcacagagaacaaccaagccctccacaaactctacggtcgagcggagcaatgggcgacgcagacagcccggcattcaatcggaccacaacgaccaaagggagacggacatccacaagaagcggagacggcgacgatcaccggggcaccaaaaacagcgacgtccagaaggaacgcaacgccatcaagcacagaaccgaaggaattgacataactaaccttggcaagacaagcgacaagccacagctcgccgctaggattattgctgccagagagaacccaca

SEQ ID NO: 116308 - DNA, 218 bp, Glycine max
  unsure (1)..(218): unsure at all n locations
  Clone ID: PAT_MRT3847_76037C.1
cggacgcgtgggggagttttaattttgctcatattgctctatgttggaggatcattactggtagcccgattctatgagggcattggttaaggtttgggtgagggaatgacaattatgcctagtttggttggccgccgatcttaaaatgcctttcaaataccaacgcgttatattgtggggngaaaaaaaaaaaatatgaatttttttttttttttncc

SEQ ID NO: 116309 - DNA, 549 bp, Glycine max
  Clone ID: PAT_MRT3847_76038C.1
cgcttctctctccgcaccccatcgctaggctctgtagggttcgagttccgattcccgaggcaagatgagcacgcagaagaagcgagcgttacagatagaggcgtttaggcaccgcatcgtggtggatcccaagtacgccgagaagacgtggaaagttctggaacacgctattcatgagatatataatcacaacgctagtggccttagctttgaagagctttacaggttgattcattcgttcgtttaactatcgattaacgcttcttcgatttcaatacttcaaaccttgttgtgaattgtgcgatgcgggtttggattttttcaatagtgtggttttgttgggttttttttttttttttttgtgattctgcggcattttttagaattaatttgtgttatcgaggatttatagtggaatgtttagattgcgtgtggttaaaattgtggattaattgctttactgaacgttttgtctgtttgtgaaagtttttgatcagttccgtctgtgaaaatttgaatggcgaattatagggtttgaatttgaacatt

SEQ ID NO: 116310 - DNA, 342 bp, Glycine max
  unsure (1)..(342): unsure at all n locations
  Clone ID: PAT_MRT3847_76039C.1
gaatgtgagctattctacatcctattaccaatctcatcctacccatagtactaacaggttttggaacttcttatagaactaataatcaacaattctgtaatactgatcaattaggtgagcctagcaactcgcccatgttggcctttgttcacgctctataggaaagagtacttctattgattgccataccaatattcggaaggataaagtaagtaatgatgattattgtgaaaaaatctaacagntggggttctaatgtatttatgatttatgttatgtatgtaaacataatattaaatcaatgttgacagggattacttattttagcttctaaagggaatt

SEQ ID NO: 116311 - DNA, 219 bp, Glycine max
  Clone ID: PAT_MRT3847_7603C.1
aatcgactcaatttaaaatacgtatagatagctagccttcgggcactcctatcaaatcgaaagacagatccaaatgtgctgacccaattagacatcaaaatccaaaaaacggttggcctcatgagggccaacagaatttttcatggcagaggtagacacaacatgccacggatcatgctgtgacaaagtgacattattattatgcctcgaaaatgaagc

SEQ ID NO: 116312 - DNA, 984 bp, Glycine max
  Clone ID: PAT_MRT3847_76040C.1
tttattttctgctgtttttcctgattgtcgagtttgtctcagctttgggatgaggatgataatggggagactggggaggatgagatgggggtcgaagatgatggggaatttttgctgtaatgacaggaagaagactatggtgctgggtatcttgttcagccagttggacagtctgatgctctcaatgctggaggagctgatgtggatggtggaaatgatgacgatggtgaagaggaggatgaagttgatgacgacgacgatgatcaggtgttgcctcctcctgactcttcccacaagaggaagagggatgatgaagaggacgtggacgacgatgacgatgtggtagcattcacgaagtcacccaagaagcatcattgacttctattatatatatcaatgttcttgttctgtttcaggcttccatgtgttggaagcagggaaacctcagttttagatagaagaacgattgattagtttttaggaatttagctctctcatgaacagaggacatattaggggaaaaaaaaaagaattgtatgttgggtggaaatgtgtttagttcaaaaagtcgttagtgttttttccctcttgcctttcacatagagccgttactctattaaatattcaaatggcagttatcagaggtttaccgctcggtcatgtgctcgatgctggtgttgttggcttgtaaaggaactggctggtgcttggagggaaagggtgggaaccttttcaatttttttttgtttttcaaaatcctctagtttattgagagtacttttttggtgggagaaaaaggaaaaagcttgtaaaaacacctgtagatagttctttctttcttatgatgaaaatgatttcaatcgatcgatttcaatcgatcaactttggtgcctattgtaatgtgacgtggctagttcataaattattgcctcttgttacgtggaattgttcaagaaagaaaaaaaaaaaaaaaaaaagaaaaag

SEQ ID NO: 116313 - DNA, 131 bp, Glycine max
  unsure (1)..(131): unsure at all n locations
  Clone ID: PAT_MRT3847_76041C.1
anaaaanagancaaaggngangcatactcancnnngcggtggaagatggtggnnacggcgntcncggaagtgcgaaccctctggattggcgatttncaatactggntggacgagtcccgatctctcctcag

SEQ ID NO: 116314 - DNA, 246 bp, Glycine max
  Clone ID: PAT_MRT3847_76042C.1
tccttaacttcggatttcggttcagccaaaatccaagttggcccggggggggattggggggccaaatcccgtgggtttggggaattttaaatttgggaaaggaggggaccggattggtgccactgatcgggccggtgaaagggggggccaaaatatttgtgaccttgagaatttgggatcttccaagtgtggggcaaaacaaatgccaaccatttctggttctaaagaatctaattttctgggatt

SEQ ID NO: 116315 - DNA, 233 bp, Glycine max
  Clone ID: PAT_MRT3847_76043C.1
gctctaccgatcagctccactctaccagaaaaaattgcttgagaggaacagtatccatctatgttattagaaatagacgcattcttggtagatgctgttgccctgtgacttctcatttgcaacccttcggtaatgaaacctaaggatcaatttcctgtgggccgacaggagtattaatataagtgatagaacctgaatgatgaacactatacacaaattggactgacaaccta

SEQ ID NO: 116316 - DNA, 2142 bp, Glycine max
  Clone ID: PAT_MRT3847_76044C.1
cagccatgttcttatccaaaagcgcgctttttcgcttttcaaagtctctcccttatgccccttcagtctcccttaaaccctccatggtcaccttctcctctactcccaattcaggcttttgcagtggagaaatgcagcagaaggaggaagaagagacggaagaaccaattggacgtatgattctgccgaggcaagacgcgaggcgcacaaaacttccacttgagagaaaagtagtgtattaagactacaaattttcaatttttcaatggcgtcgaggcaacaaaaagaggatcgagctgaggcagctgcgaaagttgctgcgaaagaactcgaacaactcaaccgagaaaaagaccgtgatttcagtgttggtgttgcagaccaacaccaacaacacaaaagtgttctacttgagtgaaaagtagtgtgttaagaactaaacaatttttcaatggcgtccaagaaacaagaggagcgagctgaggcagctgcgaaagttgctgccaaagaactcgaacaagtcaacagagaaagaagagaccgtgatttcggtgttgttgctgaacaacaacaacaacatcatcaggaagatcaacaaaaacgtggtgtaatcgggtccatgtttaaggcggtgcaagacacctacgagaacgccaaggaagctgtcgttggcaagaaagaagctactaataacgcgtacagtaatacagaggttattcacgatgttaacattcagcccgatgacgtgtcggcaacgggggaagtaagggacatatcagccacaaagactcatgatatctacgattctgccacggacaacaacaacaacaaaaccggttccaaggtcggagagtacgcagattacgcttctcagaaggccaaggaaacaaaagatgcaatgatggaaaaagctggagagtacacagattatgcaaggcagaaagcggagaaggcgaagaagacgaccatggagaagggtggagaatacaaggattactttcgcggagaaagctaaggagagaaaagatgctactgtcaaaagaatgcgagaagtatgtctcctatacggcggaggaaacccaaaagaaggggaaagatgctactgtgactaaaatggggagggtatacgggacagcggaggcggccaagaaaaaggccgaagaggtaaaggtgtgaacaagaggaaagagtataaggattaagatgaagagtaggcgaaagaggggaaagatacgacgttggggaagcttggggagctgaaggacacggcttcggatgcggcgaagagggccgtgggttacttgagcggcaagaaagaggaaactaaagagatggcttcggagaccgccgaggcgacggcgaataaggcaggggagatgaaggaggcaacaaagaaaaagacggcggagaccgcggaggcggcgaagaataaggcgggggagatcaaggacagagccgcggagacggcggaggccgcgaaaaacaagaccgcggagaccgcggaagtgacgaagaataaggctttggagatgaaggatgcagcgaaggacaggaccgctgagacaacggatgcggcgaagcagaaaactgcacaggcaaaggagaacaccaaggaaaatgtgagtggtgcaggtgaaactgcaaggaggaaaatggaagagccaaagcttcaaggtaaagaagggtatgggggccgtggagacaaggtggtggtgaaagtggaagagagtcgaccaggggcaattgcggaaacgctgaaagccgccgaccagattgcgggacagaccttcaacgatgtaggacgcttcgatgaagagggtgtcgtcaatgtggagcgccgcaagaaataattaaaacgtgatctatgatacaacaatattagtatatatagacgcatgcagtttatatagtatatattgtcatgttgtatgtttttacattttggtttgcttgtttacattctcttcaaaaaaaaaaaaaatgtgtagtacgtgtaaggttttgaagattggttctaggctccgtgggaaccatttcaacaataaacattttgcgcgttcttgtacacgtagtgatgagaagagatgccttatgggcagtatcatctaaaacttattttcatccatcatagaatttggatct

SEQ ID NO: 116317 - DNA, 1461 bp, Glycine max
  Clone ID: PAT_MRT3847_76045C.1
agatatggcagccatgttcttaaccagaagcgcgctttttcgcttttcaaagtctctcccttatgccccttcactctcccttaaaccctccatggtcaccttctcctctactcccaattcaggctggagaaatgcagcagaaggaggaagaagagacggaagaaccaattggacgtatgattctgccgaggcaagacgcgaggcagatgaaatgtctgagagtgccaaagaaacgatgaatgaaggctatgacagggccaaggatcaagcgcgggaagccaaagacagaacaaaggatttcgcacacgacgcaaaggagaagacgaaggacgctgcggggtcgatgagggacagggcggagagtgcggcggagaagacgaaagagtatgcttacgacacaaaagagagtgccaaggacgcggcgggaacggtggcggacaagagtagggagggggctgagaggacgaaggagaagacggaggaggtggcggcgtcggcgggggaggcgctgaagaacgtgggggagaaggcgaagcagggcgtgcaagcggcgtgggagacggcgaaggacactacgcagaagatcaagggagacggtggttggcaaggatgatgatgatgatgatgatcatggtgatggtcatggtggtcttaaggatgatgatgttgtggagatgaggaggagagttggtaagagattaccatgagaagggttattagagaacacagaatcaatggcttcatttagtacttccatttcttactattatgccgtatctatgtatttatgtttctagtgatgtttttttctttttttttttcaacatgcggataacttggggatatcaaggttgttagttaatatgggcataatctttttgtccagccatgatatcctcttggaataaaagtttatatattaatcataaaaaaaaaaaaaaaaaaaaaaaaaaataaaaaaaaagactgaagagactgcaaaaaaagcgaagcagaaaaaaacacaggcaaaggacaacgccaaggaaaatgtgagtggtgcagatgaaggagcaaggaggaaaatggaggacctaaggcttcgaggtaaagggtatggaagtcatgaatctgcaggggggcgtggagataaggtggtggtgaaagtggaagagagtcgaccaggggcaattgcggaaacactgaaagcagcggatcagattgcgggacagaccttcaacgatgtgggacgcttcgatgaagaagagggtgtcgtcaatgtggagcgccgcaagaaataaaataaaacgtcgtctatgatacaaatatagacgcagtttatattatagtatattatcatgatgtatgttgtttactttttggtttgcttctttacaaaaaatgtgtatgtgtatggttttgaagattggttctagactcgtgggaaccatttcagcaataaaaattttgcgcgttcttgta

SEQ ID NO: 116318 - DNA, 171 bp, Glycine max
  Clone ID: PAT_MRT3847_76046C.1
tcctcaattcccttctcgacccactcgtcgaccgcatcctacccccacacctccgctcactcatctcattacacaatttcatcaagcctatcatcgctcacttagaaactttaccttccatcgtagctacttccatctgcacaccaaactctcatctcaactaatcattct

SEQ ID NO: 116319 - DNA, 447 bp, Glycine max
  Clone ID: PAT_MRT3847_76047C.1
ggtggattgatccccgtccaatgttctatctggctgctgaaggggataactattacgttccttgcatggaaatgggggaccacaaagcccagggcggagcatctcacctttcggacgtgaaactaggtcatgggcccaaaatgtagccagtgcttaagaaagattgggctcctgtgcctttctgcatatacttcatgctacagacagagtcaaacattcttatacataaagctgatgcagccctggaaaaagacaagatgcatgcagtgtgggcaaatgaactctcaactcgcatggagcaagtggatgattgccactattgctgaaaacgttactgatcaacgaaataacgatatgcctgataatgtattagagaatacactgattaaacttctgtcggagagacatcccactgacatagacgatcctggtagatgaatctaggga

SEQ ID NO: 116320 - DNA, 546 bp, Glycine max
  Clone ID: PAT_MRT3847_76048C.1
caagttccctttttaatcttcttttctttattttatttttggctcgctcaacatcatagagcaatttccttcgggtttgaacaaaagaatagtacttagtaccaagaaaaagggtgtttgggaattgggttcaagaaaggcccaaaatttatgtgttttattctctggccatgttggttgccggcggcaagagactcctctatgtttctgtggtggtgatgcttgtggtgttgcatatgtgccacacgtgtcaagttggggccattcgtgtgttcccaggaaatgcagtggcgaacgtggaattcagccatggcaatatggataataataagagcatggaggaagatctgttcaagaagtacttcagtggaaggactcatcttggtccaagcaacacaacccaaaagggttttgatgatagcaaaagaagagtaccaagttgcccagatcctctccacaattaacaagtagaattgccatccaatttttcatctttaatttttttattaccttttttttgtttcttaagtattaaatttattttgg

SEQ ID NO: 116321 - DNA, 334 bp, Glycine max
  Clone ID: PAT_MRT3847_76049C.1
ataaaaagttaacgggcttttttggtctatcgttacaaatcttcagagatatttttgctccatggcgctccatcttagaatcacgtttgtaccgaaacggaggggcacctgtttcccctaacaatcccacacaatcgctaatcattacccgaagaaaaagggggcgctcgttttttggttccgaaattaactaaagcgatggttcgacgccgtatggagtgtccaaaatgagcaccgcacggccagggctatagagacgctgcacatgcgaggcaacctctgtttgtttggcgaagcggccttttatcctgggccgggtatccgcatatgcttt

SEQ ID NO: 116322 - DNA, 437 bp, Glycine max
  Clone ID: PAT_MRT3847_7604C.1
caagtaccaaatttccatttttttacctccatgggggacccactgaagccaggtttcttttcttttctttctaacaaaaatcgcttctgcgcacacaaggggtcaggggcattttttctttctttctatttttcttaattaataaataaaataatatatattttccacgggttgtgggggcggggtgaatttctcagggggggttccattgcgtcttttttttttatatatatttttatggggagtcttagtgctgatatattggagcggcttattattattatttcttttacttattgtggttatattgtttttgcggatttatgttaccttttaagtcttacattacctgtttgggcttgagagagattcaatcctacaaatccccattctcactattattactattttactcctttgtcttttctttttttaaa

SEQ ID NO: 116323 - DNA, 248 bp, Glycine max
  Clone ID: PAT_MRT3847_76050C.1
aagcaattgatagtgaacgtctaatttcgaggttgaggactgaaacaataggattgtaaaaaactaggggaataaattcgtgaattaaattataagaggaccaaaatcaaattctgagacaaataggatcaaatttgtaattttgcctaaaattaaagaaaagtaccattttgatcaccgaaaaatagggttgacattagtttggtggtctcttaaaaaagtatgaccggcattaatttattccttga

SEQ ID NO: 116324 - DNA, 458 bp, Glycine max
  Clone ID: PAT_MRT3847_76051C.1
cttttcttacttaagacattgtggctatctgtgacatctcgggttgtttttgtacttgtttttggacttgatactgatctattatttaattttgtagaatgccttcattttggcttatgctcttttggatatctttgattaacttctcatacaaatgctgctccattaattaagtattgttttactcacattggtttcaaacatcgacttgattaattaccctctcctcatatagaaaagtatttactgtaattgtgtgttgtatcacacatgtatattcttatttttaatgaataatagtacaacgtaggaaaacataataaagactgagataattccctaattatcagctgagataattccctaattatagttatcaaatcatatcttaacttctcattgataagaactttgggaaaaccacaccacaaaagctagacataacttgagaattgact

SEQ ID NO: 116325 - DNA, 166 bp, Glycine max
  Clone ID: PAT_MRT3847_76052C.1
gtgttaaatactgatcacaggagtgcttaatagaacacagcgcagaaagtcctataggtcctccttgctagaaagcttatattaagcagctcggtcaaaatccaaatcttaagccccaaatactcaaaccacacatggttcacagaaacgtgtgcatacaaggtca

SEQ ID NO: 116326 - DNA, 398 bp, Glycine max
  Clone ID: PAT_MRT3847_76053C.1
agtgaggacacggtcaaatgggaagaaagaagtattgatagagtcgatgataatgaaggatatccacatcagcagttgagtcactcaacatacaatggagtcagaccttttctggtttatactacgaggaatggtagaaaggtctttggtggctaacgttgttagcaaggggtgacgtgtcatataaagaaagcaatccagcacatttgcttcgatgattgaatgaggggaaagagactgatatgggtatggggagattttggctgctagctaagattggatagaaggttgtatcagccttctacaatggctaagcctgtgtcacatcagaggaatatatttccatatctgtaaccttcaaccattaccatataataaagctctctttatgcccgcat

SEQ ID NO: 116327 - DNA, 637 bp, Glycine max
  Clone ID: PAT_MRT3847_76054C.1
atcggagtagttctaagaaaaaaaaaagatgttacataaagcagacaaatgatgcttgctagaaaaaatttggtttaccagaaggatgaggttgcaagctcttacaaactaacagatggatgtgaaattttttggaacgtgctggtgcctaaactggaatataggaacccatgtgactctagcttcttcctaaggcagataacctcgcttaagctggaaaggtgaaaaaagagacactttgtatagtccgtacatctcaccgtaatgcttcggatgtttgtgatgatgatacatcatggtaattttgtgtgcttcttctcccgatgatacctctatatcttcaatctgttatatatttcatagttttttcgtcaattattttctgagatgcttcccttttgtggagctcctattttggaggtatcaaatgtaaatcttagtacaacagtacatgggaggggtgaatcttgtataacattgtaatttgttgttttttttaattttattttaactattaaaattatgatattttcgatactccaaattgcaagtttttctgtataacctcattggtcattttgaacttgaatgatcacttcacattattctgatagaaatgtagtactttcttttcatc

SEQ ID NO: 116328 - DNA, 642 bp, Glycine max
  Clone ID: PAT_MRT3847_76055C.1
aaacagtttcgatcatcaacattttcaaacgtctgcattgcaacacacacacgcacacagaacactagaatcattattcgcttcagggttggaggcacgaatttgcaccggtagctctatcacttggatcacgcggaaccctttggctgactcttttttcgcttcttttcttgtttttctaatatgaaaaatctaatgggctttgttggcagttgagttaatgatcatgcctgcatacagaagcagttaatggcattttctaagtagttgcttcatggtgctgtatgcagtatttacgttaatccatttagactagattgatatgagagcaagtcattgaatggaccatgaatttgcgcgctattctagtaacttactgagttaccaagaatgatgcctgcatacagaagcatggactcgtacccatgtcagagaaaccaaatacctttccctcattattatcatccaggcattgaagctattccccctcaaatgaagcttgatccatccaaaccacccttttcttatgaccaacattggccctatgccggcaattttgggcaccctacttccgcacatttctgctgtggccacagcaacttcccttggcattatagctacatgccttcatatgctcatgcc

SEQ ID NO: 116329 - DNA, 200 bp, Glycine max
  Clone ID: PAT_MRT3847_76056C.1
aggctgcagcaaacccttacgcattgcgtggagcgggagggcggtggcggttgcattcgggagagaggtttcgaccggtgagactgtgtcccggacgcgcgtccgcgaggcaggtacttcgaagtttcggtcccatttcgttgccgcctctgttgaattcgatgaggtctccgcccctcttgcaccactcttgtacagag

SEQ ID NO: 116330 - DNA, 352 bp, Glycine max
  Clone ID: PAT_MRT3847_76057C.1
gagcgttataggagaagtacagctgaacattacaagcaggaacgcgaggaggatgggtgcatggtggatgaaatgaacctgcaggcagggatggtgaacaggataaggttgaggagaaaaacactgttcgcatatttgtgcatagcggacccgaggcccaaggtgtcgggggtggcgatggtggacctggagagtgtggaagtgaagaggcacaaatactgacagagaaggttcggcggagagccattcttcttgcccacacctggagggaatgggactgaggatgaacggtacgtgatgctttctgtgcatgacaagatgacatagctttactagttgcagattctgaatg

SEQ ID NO: 116331 - DNA, 400 bp, Glycine max
  Clone ID: PAT_MRT3847_76058C.1
aattcggctcgagggacaaacacttaaatattttggcaaagcagcatatcgagactcggtttgtgaaactcaacgctgagaagagtccttttctcgctgagaagctcaagatcattgttcttccaacccttgccctcatcaaaaacgccaaagtcgatgattatgtggtatgtatatgatagcaaccacttgctcatatttgtttgtttgccatcaatgttagataaggtttcggctatttatttctttaggcttgtttggataaacttctcaataagccgatataagagaagaaaataagaacgtgaaatgaattaaaattttctcacaagttaaaattaacttgtgcgtaagttaaattctgccttgggagaatctaaatgagagaacttctgtagat

SEQ ID NO: 116332 - DNA, 701 bp, Glycine max
  unsure (1)..(701): unsure at all n locations
  Clone ID: PAT_MRT3847_76059C.1
cttgtctgctagaataattctgtcatagccttgatagtgcattctgttatttccttttggtctttgtcatttagtacctacgtatgctatatatatctagcctctgtatgtactaaggggatatataaagaaaattatcagactcttttcttcaccttgcttctttggaggttccttagtcgtccttgaattctaaggattgtttctgatatccctaacatcttggtgctttcattgagcacatgactgaatcaacgcactccaagtccaatatggaccacatcgaagacgccattgccaaactcacatgaacatgacgagtggtttggcaagatgcagcaagagcgtgcagatttcttgagggacgttgagatgcagaagaggaatatgaatacccttatcgagaagaggcacgaagaaatagaaagttgtttgaaggaaagagaaaaatcttttgaagaagaaaagaacaatgaactagaatatattaatgctcttaaggaaaaagcagcaaaagagtcccaacaggtttcctttgagatgagaagacttgaaactgagcgagcagnagataagttggnaccgtgaacagagaaagaangaatgggctgagctaaataagtgcattgaggaactcaaggtcanagggataagctnncaaatcagagagactgttgcatgctgatagaattgaaatcatg

SEQ ID NO: 116333 - DNA, 401 bp, Glycine max
  Clone ID: PAT_MRT3847_7605C.1
cggctcccgctcgagccgtttttttttcttgaatgctaaatttctagtcttttgcaattgatgcccctttttgttattgcagtccttgttgtttgcttcttcttctttttctttgccttttccatttctttttcttaactttaattggagtgttgacctgtaattttcttggtctactgaacagtttctcaagtttgctcttctgggttctcttattagcttctgaaagtttccatttctccttttataagtcttgagtttcagtcgaattttcatttggggtttaatttggtatcttttgtgagttttttttacatgacttgtcaattctgtggtacattaattgattttctttatgaaaatttggtttccgggtttaccattattattaataatatggt

SEQ ID NO: 116334 - DNA, 555 bp, Glycine max
  unsure (1)..(555): unsure at all n locations
  Clone ID: PAT_MRT3847_76060C.1
gttaacagtgagcagatgccttgcatgcccaatttactgcattgcctgacgaggaggatctcnggagggagatggcacgagcagccgccgtccagatacccctgcgggctgccactgagagtggaaatggatctcttgctgactggttcaccagtgaatccgtcctcaggtcaatcctcatgcaggccctgtgaagcctgagctccttgcattcttaatgctgccttctttctgtgagatatctcctcacagaatgagcaggctgagctctcttgacagcggagataggggaagctattcgcacgtgcgctatatctgagctcttatacaataagcattgctaatactttctcaagtcacatatttcttttgtcctcatagatcagacgatattgtttgcttgctaaccatgtgcgactgtttagcgaaccgtacttggctcccctgtgctagatagaacgcgttacgctgatactgtcgagatggggacggctgcccatatgcgccaactgccaccggngattcaacagctgacgctggatgggacaccagcaa

SEQ ID NO: 116335 - DNA, 359 bp, Glycine max
  Clone ID: PAT_MRT3847_76061C.1
tacggctgcgagaagacgacagaaggggatacttcggatttttggtttttgtgattttgataggacgaccctttggtagttgtgatctatactatagagagacccttgggatctcgtcatcatgggtgtctatagtcttggagacagaacccaggaaccattccgtcccagagctagtgctccatctggaagatctggtgctcaacttcaatctcacttggatgccccgtggcgtcgtgggaacttgaggcaggctgttcaactgactgcgggtgaagcatattaatgactggctagctgtcagcaccgtggacttctctaatcacgtgactgtcctgggctgaactcttacagaattc

SEQ ID NO: 116336 - DNA, 291 bp, Glycine max
  Clone ID: PAT_MRT3847_76062C.1
ggccataataaagtgatggttataagacaatagcaatacaggttgtttacaaacagatagaatattagaacaaattatcgaccttcagaattcccaattaggctaacaaaccgttaaaagggaactaactgcttctttccatacatacatacataagagacagcgtacctttaacacaattccgtgttactaaaatcactatgctcggctactgtagctgaagcttacgaggcaggagaacttctgctatattacaaaaactctgcggagggaatatcggttatgggtcca

SEQ ID NO: 116337 - DNA, 437 bp, Glycine max
  Clone ID: PAT_MRT3847_76063C.1
gatttataaccttattctttttttttttttttttttgtcttttttttacaccaaccacgcccgcgggggttccagctggcaatatagtacgggtatcagcaggtcgtcccaatcatggttatagtgaggggctttgagacatggtgaaccaatgacaattccactctccttgcgagacgggatattagctcgcaatgccaggcgtacccaatgagggagctaaaaaacaaaaagcgtgcggtgcttactgagggatttaccgcacataattctgttgggccacctgcccgctgaatgggggaaaaccggcgagcggcgcgcagaaaataatgcgccaacgcgggggcaggggcggtaggcgtatcgggcaccagctgggttttttttataaccagggccacagacagcagctgatagcgctccaccctgggcccccc

SEQ ID NO: 116338 - DNA, 269 bp, Glycine max
  Clone ID: PAT_MRT3847_76064C.1
cttctccgagaccagacccatgccactcctcctgctccttattctcctctttcacgcggcggcagcaatgggatagtggcagctcctccacagaacgcatcggcactgtcgccatgcacatgcagcttctccagaacgaccgcgtcctactcttcgatcgcaccgacttcggactctccaacctgaagctcgccgacggaagatgctgcaacaaccaaacgagttggtcgtcgaacgcgactgcaccgcgcactcgatcgaatacgacg

SEQ ID NO: 116339 - DNA, 763 bp, Glycine max
  Clone ID: PAT_MRT3847_76065C.1
attatgctagttcgaatcaaatttctttttgactacaaactatataaaggatctttttattttattttaatttcaatcataatacacacacattttaagtagaccttcattttttaggtagttcttttgttcatttttgtttagatacttacttggattccacaaatgcttgttctttttaacctgatgacccttggttgcctccatgagaagcatcttgaggagcttcttgaatattttcgctttgggctgtggtgggttgcccttggggttgcttcttcaattggtctaggatctggtttgcacacatttgtcctatatttgggtccccacatagcactgtttacattaggagcagtgcaatgtggccgagttgatttgaaaagtgctccatatgatacgacacaattaaaaagaggtgcttcttggcttgataaaaactgttctgagtttgggccaccattattccagcagtatatgattcgcaggttccgcttagcagcattttgcctcaagttcagctggaggctattctatggggtattggaacagctataggggagcttcctccttactttatctccagggcaggtacattttatcactgccgttcccttactctaacaaagtcactgttaagttgatataaatagtctgatttatactattgagagaattgcttaccatgggatatcattctatgtagtatttactatttgcccctagcttgtggttttacctgctccatgaataagatggtgtg

SEQ ID NO: 116340 - DNA, 438 bp, Glycine max
  Clone ID: PAT_MRT3847_76066C.1
attatgctaattcgaatcaaatttctttttgactacaaactatataaaggatctttttattttattttaatttcaatcataatacacacacattttaagtagaccttcattttttaggtagttcttttgttcatttttgtttagatacttacttggattccacaaatgcttgttctttttaacagcatcttgaggagcttcttgaatattttcgctttggactgtggtgggttgcccttggggttgcttcttcaattggtctaggatctggtttgcacacatttgtcctatatttgggtccccacatagcactgtttacaataggagcagtgcaatgtggccgagttgatttgaaaagtgctccttatgatacgatacaattaaaaagaggtccttcttggcttgataaagactgctctgagtttgggccaccattat

SEQ ID NO: 116341 - DNA, 183 bp, Glycine max
  Clone ID: PAT_MRT3847_76067C.1
cgcaaaccagatcgtttttttgtttagggaaaaaaaatagaggaactgtacaagctttttggtgccctatgttaaatgcaaacaactatatgttttacagttttaggagcacctaccgctatagggggaacccgcaaatacaacaatttgatgtaacacattaacgatgagaagaatttgtaa

SEQ ID NO: 116342 - DNA, 590 bp, Glycine max
  Clone ID: PAT_MRT3847_76068C.1
ggaaactacagcagcagccatcttaccaagggaactacgatcctggttttcagaaggaacctatgttccaagagggatacaagagaaagaggttaccgttggatagtagtgaggactgcacagatttcaacagcaacattaccaatctactaaggaggaacagtgacatgctaaaagcccatcttggggctcagaacataaattaccaattggccagggaccagcagaaacaacaaactgatattatagttgcagcccttggcaagctcacagatgccctcacaaaaattgctgacaagctgtaaatgaattcgcgtcacaagacacatgaaagatcttaggggcttcaaacctacctataaggatctgcatattactgttaattatggcattagatttcattatcatcatttcccccccttttaattagtacttctcagtttttttacctcatttttttggggaaaactagtctttgttttcatgcagttgatgtttattctttcaactctagatgcagcttgcaaatctgttcttttttcccttattcctaagatttagaaagggaccagtatttcaacacctccggt

SEQ ID NO: 116343 - DNA, 520 bp, Glycine max
  Clone ID: PAT_MRT3847_76069C.1
agtccccggttcgagcccacgccctccgcgtatcgagaacaccttgcctggattttagcagaataacgttcatcgcactctgatctttaaggccgctgatacgaaaaggccggatgaggaagacaagactggtggccctactgagacctatgaccattatgctgcctctctctcggctaacgattgccgatatcgctggctttgactgtgatccttttacttgtgagaacagtcagaccagcgggatattcctcattgcatggcaccacttcaccgtaggagatgcgtgccaagatgcgatacgtcactactgaagacggggtcacacgtgacctacatggcgtccatcatgaaattcagggtactgacgccacagacaagtatcttgtactgttgaaagaccttacaaattgaaccgcatacacacttaaatccattaggatatcagaccctactcggaactaccctgcaagaactaccccttaatacttaaacatgtgcccagcccctgctgacacag

SEQ ID NO: 116344 - DNA, 341 bp, Glycine max
  Clone ID: PAT_MRT3847_7606C.1
gatactaaatgaccccataaaggcaatatcttataattcaaaattttttctaaattaaaaaggtgagtcatacctttcatgaagcagcatacgccaatagacaaagggaaagtgaagttatcaaaattcaacttctcctttttaaaagtctgattgcggtgcttaaaaaatttgttttttcaacaccaaacccaaaccctacttagatttcattctttctttcttcacacattcacataatcatctctctctcactttctgtgaggaactgacaatttgtcaccaactttaactttactacttacttgtccaattaactatttcattttcatatgccaaaa

SEQ ID NO: 116345 - DNA, 132 bp, Glycine max
  Clone ID: PAT_MRT3847_76070C.1
gggaaatggaaaaactctggcaagtttaccccatgtaccattccccgccctacgtaccccccatgacagtatctcattctgccgaaggttccaaaggaaaccgttcaaaaaggggccgcccctatctttttt

SEQ ID NO: 116346 - DNA, 168 bp, Glycine max
  unsure (1)..(168): unsure at all n locations
  Clone ID: PAT_MRT3847_76071C.1
gcancatngggtctgactatagttctcacttacttgaactatagggggatgacnattgtgggatggggtgntgtttgtntnggggtntnctcactcctncnatttgtggtnatggnanttctggcgntnccagnnctnaagccnncaagatggacagtgacgacccga

SEQ ID NO: 116347 - DNA, 402 bp, Glycine max
  Clone ID: PAT_MRT3847_76072C.1
aggggcaacattaatgttatataaaattaaagtgtatatatacatccataatttacttttcccaatttcatggagaaaagtgaacaaagctggaaattcaagactttcttgccaaagaaaataaattggcaccagtataacacacagacacaatcaaagaaaataaattccttgccaaagaaaaagaatgggtcaacacagcaattgccatatgttacacagaaacatggaaaattaactaagaatctacacttactaaatcagaacagtatttcatttcatgtatctagctacgatcgaagtggtggtggtgtgaaacgcatacatgatgatgatgatgatgtggccatcatattcacatatatacacacacaatttcaatggtaaagtgttcaattctcg

SEQ ID NO: 116348 - DNA, 623 bp, Glycine max
  unsure (1)..(623): unsure at all n locations
  Clone ID: PAT_MRT3847_76073C.1
ggagctccaccggtcggagttcctcaaaagggaggagaggattctttcaacactgaaatgtcctcaaattgtggcctaccgaggctgtgacaacacgttcgagaacggcgtgcagtggttcaacatgttcatggagtacgcgcctcacgggaccctggcggagcgcggtggcgggatggaagaagcggtggtggggtcctgcacgcgccaaattctgcagggcctgaactaccttcactccaatgggatagtgcattgcgacgtgaaggggcagaacgtgttggtgacggagcaaggggtgaaaattgcggactttggttgcgctcggagggtggaggagtcatcgtcggtgatcgccggcacgccgagattcatggcaccagaggtggcgcgtggggagcaacagggttccctgctgacgtgtgggcacttgggtgcactgtgctggagatgaatcaccgggacgccgccgtggcaaggcggcggaacccgcggcggtggttataggaattggattctccggcgagtcgccggagatacctggttatgtgtcggagcagggagggactnttgggaaagtgtttgaagaggagcccgggaaaggtggtcggtggaggagcttc

SEQ ID NO: 116349 - DNA, 2122 bp, Glycine max
  Clone ID: PAT_MRT3847_76074C.1
gggtaatgaaattctccaaacacaccataaacgtgtatattttacaaatgagttgatatcatcacagtagtaaaaatatacgggaatagacacttctttgcatccctccatatttcacttccaaaacttgggtgactagtttacaataatacaataatacaataaatgggtgactagaaaattaggggtattggcaaaactttttgtgggtgtactagaggagatccaaatgcaaccatgaaacccacattataaaacggcatgtctactgctagtgcctcacaaactgccgcttatcatcagcatttttctttccataaggattgttgtcattgaatccatgtctacttccatcaactttacgcattttattcctttgcttgctactgtttatgttcagactcacatttggtgggtttgaaaaactgaacgaagacgcaacagcctgcatcttctatttaattcataccttcaagattatctaaatacatgctataaagcttctctcaagttttatgttgatatttgagaacccaaggtgcataattatttttctctagtctaaacggatacatttttcaaagaatacaatatgccatagttttcagttcttgaagccacatagccatgtaccaaattttagcaaaatgagataaaccacaacttgttctgaaaacatcaagtgttgcatgcaatttatcataatcacaacttgaataatgacagtgaagaagctccgatgctctttgcgtattgatgtgccaagtagtcttttaaagaagtttctctgtacactggtggattgtgttcagataacagttccttgatgggaccaaagactcttgagagtccctctggtgactgatcaccaattctaaaaaaggatgcaattgatgttcttgggacttgatggtttgctagaactctatgttgaacactaatgaatttttcattagtcattagatgcagaagatctccaatgttcactacaagagctccatgtgctgcaggaacatcaatccattgattttcatgaagaatttgaaggccgacccatttggtcttgcaaaaagtattgtcatgaagttaccgtctatgtgcctgttagtgcccatagttaattctggctcagggcatgctgggtaatagtgacacagatgaagaagcccttcatcacaacccatttctttaaggtgaaagcgatcaacggccaagagcctctgacagtaactcaaacaaagtagaagcaagtgccattacttttgttgagtactcaggcacaatatctctacaaactgcaggcaattcttcatcattgggtgaattaggcgcccaaaaaaatgcaagtgtatccctccaatcagcagatggatcttgataaagactaaagttggaaagataaataactttcctgctcatatcacgggtgtagtactctttcctcaccttggcatcttgttcatgaaacctgccagttcctttgatcatctcatccaaaacttgagttggaattccatggtttgtaacctgaaagaagccccacttttcacatgcatatctaacttttcccacaacagcatctctcaaaatagggtcatcattgatgccagtgaggtctatggaggggatagtgaagtttgaatttgattctgtggttaatccatcactgagattagagtgttcacaatagaacatccgtggaacctttgtcacaccattttctaccagtccttggaacccagtttttgattcatcgaataccttgatttcacattttcctgtcatacctagaaacagttcctgcctccaatctcatttgtgcttgtgcccaccatattttgatgctatcaatgcaacaaaatcttaatgaaggcaactataaagggttcaaaagggattatactaagacgaaaagaaatgtaggaggtggaattcaattttgaggctttttatgcaccaatatcaatgcaattaaatgtagtttgaaatgttcaaggcaaaagcattaaagatttcgtttattgtttagataagaactaatgttttcactggatttttgttagactgttaatagaccgtttctttctatcctaataaaaagcccccagttggctgtgaactc

SEQ ID NO: 116350 - DNA, 630 bp, Glycine max
  Clone ID: PAT_MRT3847_76075C.1
cccggtttgcgaatcaccgccattctcaagtttagaactccccaatccaaggcaacgctgcataactttggccaccaacacccccgtctctcatacattctacgaagtgaacgtcaatggcaagttgtgttggcacttcacctctatatttaccagttggtattggaaattttcctcatgctcatgttaagcttactagaccaaacattgttgggatgaaacccttaccatataacatcagaaaaggagaacttaagattgctacattgcaaaatccatcatcccatgtcagacatgctgctgctttgaattttaaatgtgctgctgcaactgcaagtgcaacccaaactgtaacacgcaattctcggtcaatgactactgacaaagtgaagtctcctaaacttgacaacaatggacctggtttgccaccttacgatggcgatggtcatggtggcaacggagggggtggaggtaacttttcaggtggactcattcttttgggcattcttggtgtgctagatgttctcaaggacattgagaaacaatggcaacgcaagcacaacagatgatcttgaacaggttatctatggtgggagtgaaattactttacaaatcctgatttagcaacga

SEQ ID NO: 116351 - DNA, 387 bp, Glycine max
  Clone ID: PAT_MRT3847_76076C.1
aactcccaatcaagcaacgctgcataactttggccaccaacacccccgtctctcatacattctacgaagtgaacgtcaatggcaagttgtgttggcacttcacctctatatttaccagttggtattggaaattttcctcatgctcatgttaagcttactagaccaaacattgttgggatgaaacccttaccatataacatcagaaaaggagaacttaagattgctacattgcaaaatccatcatcccatgtcagacatgctgctgctttgccaggaattggattggaagatgtgaaaattctgcggaaagagaattttaaatgtgctgctgcaactgcaagtgcaacccaaactgtaacacgcaattctcggtcaatgactactgac

SEQ ID NO: 116352 - DNA, 368 bp, Glycine max
  Clone ID: PAT_MRT3847_76077C.1
ctttcgccgttttgcttactgccacactctcaacggtgtggttttgcttcacactcatggtgttaaaggaaggattaatctggcggacacagtcggtattgctgagaatacaggtatagaatggtactgtgctatgaatagctctttgagggggcgtgccagttgtgatatttacactatcggctctcaagactgtgaattatggagccctgcttgcgcagcggcgacgactatgtcatttaatccaaacccgtgtgctgatgcatggagcttggaatttatgaagcgtaccggttctcattgtgctttcatttgcgctcactggatggactgcctccccaatgcatgatgtccaggttgcaattgat

SEQ ID NO: 116353 - DNA, 526 bp, Glycine max
  unsure (1)..(526): unsure at all n locations
  Clone ID: PAT_MRT3847_76078C.1
tttcggctgcgagaagacgacagaaggggatataatgggaagacgcatcgtttgtcttacggcattccttacctcacccaccgcaacacaatacccataaaccaaagccccaacccgactctcttctcatttatcctccctaaagcttcaacctttgggacgcccctcccactttgttttcttctctttcttcattttccttttcggtggggattaggataaccctcctctatttttcaactctaattttgatcatcatcaccttcacccacttcactcttacaaggaagaacaaccctttctctctctctctctgttctgtgttgattctgtgcttcagctttccacaaagtaaagggaaagatggcaatgattccgtaccacctttgccgtttaccttaccaggattccctcaaagcacttgaagctgatatacagcacgccaatgctttggcagtttcaatttaggagccaagttttgaactcttctaaattttaaattggnttacaatcacttggctcctct

SEQ ID NO: 116354 - DNA, 155 bp, Glycine max
  Clone ID: PAT_MRT3847_76079C.1
cacacgcgagcgttcactcgatcgatctaattttttgctctatacggcttcctaggggtcttagaatctctcctttgggaagctcacttttccgattactcatatttcaccttcaaaaaggtaaacttattctaaccaaacaatttactcatcaa

SEQ ID NO: 116355 - DNA, 656 bp, Glycine max
  Clone ID: PAT_MRT3847_7607C.1
gcaagaaactcccaaaaagtggaaagtttaagcaagaaactccaaaaagtggaaagtccaagcaagaaaccctgaagactgccctttcgaaagtaaaccctctcaaaagtggtggaaagactgatgttaatggtaagaacaaggtgaaatctggttcatcaaagagaaaatattctgagaatgagtactcagatgtttgagcaggagaggtagaagatgccaaggacaagacttcatgttcatcaaagtcacaaggaagtgggtatttattctcgctgtttatttcttgactgggtgcctgtcttgtgcttacagcatttaattttttcttcctttggccagagtgatcaaatgaatttaggccgtgtatcaaggagctgtgtcgtttgtggtaatcatcttcttgttgctagcattattttctccagttattagttaggctagtttagttgtagtatgggttagtatctctagttacttttccatcttttctagtagactagatgaatgctattttaaggtaacacctgaaaatattttgctagcattcttaatttaacgaatgctttggcactccctgatgctgacaggttgactaatgactacttactagttactatccacccaataaacgtttttagattgcttagtgctta

SEQ ID NO: 116356 - DNA, 270 bp, Glycine max
  Clone ID: PAT_MRT3847_76080C.1
ggcacttgcagattttcatttccttcactttcccgaaaaatggctaacacttttgactttcttcacgacgttctcacatcaagatagctcgtacgaagcacatcgatcacatttacatcgatgggaatgggtcacgtaagcagtccggcgacatcgacgcacggaagtccgcacaggtgaactgctgactcaagtagcccgatcgattcaggccgggaaacgtagcccatagggataataaaaaatcctagcagagcaacgagcttctca

SEQ ID NO: 116357 - DNA, 194 bp, Glycine max
  Clone ID: PAT_MRT3847_76081C.1
tttgattgcagatgtagtgtagtcctaacgcaaccttattttctcattcgtcgtcgacaacgtaaatctccattatagtctgttcgtgcttcctctggtattcttctttttgtagtgctgttctgttctcgttctctctctactaagatcaccgccatgatcttcgaatcacgatccctcctcttcacgctcct

SEQ ID NO: 116358 - DNA, 365 bp, Glycine max
  Clone ID: PAT_MRT3847_76082C.1
gccactctttctaaggttgcacataacgtggctcaagacagggttgatggatgggatgagggggatgcctaggaggattcctctgtagaagcatctctaaatgcagcacttaatggggactatgtgtaaagctatactgtaggcacatctgttgccacatctgatgggcttcctcacgtgcttggacacaaaggcggagagagaggcagatggagatatggtgctgagaatacattgaatacgacaaccattgctgaaaccactgacgacaaggctatcaacaagcttgagaaaagtcttgctacatgggttgctacattatgtgccaatgaatgcaccattgctgagaaacttactcgtgacaa

SEQ ID NO: 116359 - DNA, 402 bp, Glycine max
  Clone ID: PAT_MRT3847_76083C.1
cccacgcgtccgaaacaatcactatagctagaaacacttataccgaggtggggaaaatagggatacaagaatgcttgaggactaagcagcatggaggacgagggccatgaagaacataccatgaccctccaacagggccctagacccagccagaagagcttacacaggggcctcttcaatataagggtaatagcagacactataacaaagattctgttagtttatgtaaccgggattaccattagagattacaaaaggaagactgatgccacactgagaagcacctggtgtgagagagcaagcatttttggcatcgcatggtccttaggaggatgatcgtcacgctcatgtactgcacagggaacttatgaagaggacacataaccacggcggctacattca

SEQ ID NO: 116360 - DNA, 277 bp, Glycine max
  Clone ID: PAT_MRT3847_76084C.1
tccgagggatcatgagaatggacagtcaagcttagactctcctaaagaagctgaagctgaaatagaaaagtcaaagaatgcagcccaaacaaaaaagcaggaaacacagaaagattcggcaagagatttttttttttaggatcccaacgcatcaatgaagaaggcgtctcgattttttccagcaacattgtgctctgttactgcagatgagactgagcacacaccagcaacagatttccatggactaggggaggctgcacagaaacaactacccaag

SEQ ID NO: 116361 - DNA, 816 bp, Glycine max
  unsure (1)..(816): unsure at all n locations
  Clone ID: PAT_MRT3847_76085C.1
cttgatgcctgcattgggaagtaacataacatgaaataaacatgaaatttagaaaagtcaactgtgattttagtaaaataagtagagcaaacagaaattgatcaacacctattgtgattccatatatctacttgagcaccagctgtggcaaaatgctcgccatcccactggtgatcagcacccctaaaaattaaagaaagcaaaacaaagttcagtaagcataaaaaacaaacaaaataacaagcttcaatatcttcctctgggataatttactccaaaacttaccaaaatgcattcttccaaacataaacacttgctggctgcacaaaagcaaaaatggtttataaaattgtgagttagtagaatacccactggagttaaaaaagaaaaagtaaaagaataccagcacaatatttcacctcaacagtgctcttagttgagtcatctgactccataagagtagtaaaggaacactccagagtctgatactgagcacaaattccaggttacatcagaaaaattagttattgaagctaaaaatgagagctagatataatagggggggaattgaaaaggttgattcttacgtgcaatcagttccacatgacacaagaatgtgtccatctgttgatgctgtcaagcctcgtacagcaccacggtgaccaggaaactgacaaactatccgtcttttttttccaaatataacaagcaacaatattagataaacaagttgatgcataagcaaataaactatnttgtttacattttagggaatatcatagataacaagtatatctcaaaagaagtataatttct

SEQ ID NO: 116362 - DNA, 409 bp, Glycine max
  unsure (1)..(409): unsure at all n locations
  Clone ID: PAT_MRT3847_76086C.1
gntnnnnnnnnnnnnnnnnnnnnnnnnnntnntttttttttttttttttttttttttttttttttttttttgccaaaaaactttttgtttaaggaaaatgttgaaaaccttccttcaggtgggaccccccccctttacaaatttgggggggaacacaataggggggggcttacctgccctgggtttcaaagggcccaggggccttttttcttaccctttaataagccgggcctaaaaaaaagggtaaaaaaagtttttcaaatcccatggggataagggaaaatggggttttttggaccatagtccccaattcccctttcttaaagaacttttttttttttttttttttgaagggcaaattttttgcccttggtttttggaaaatctttggttaaaagcttctgggccc

SEQ ID NO: 116363 - DNA, 471 bp, Glycine max
  Clone ID: PAT_MRT3847_76087C.1
gagcggccgcccgccaccaaacaaaatgtcgtttaaggagaggacacaacacggcaaaaaaagggagagagggggggaaaaaaaagggggagcgaacaaaccagaaccagaaaggagcaaaacaaaaaaacggcagaaggacaaccaccctgacaagggacacaaacagcagacagagagccaagcgcagaaagcgacgaggcgcaaaaaccaagcaccacggacacaaagagcgacccggaaaccgccgaccgaaaccaaaaggcgacccagaggcccggagagggagagagaaaaaagcccggcggaaacagggacaaagccgacccccgagagaaaagggcaaacgagaacaagggcacacagcaaacgaaccggaagcaaaaaagcgcaaaggcccggggagccaaaagagggagccaacccacaagaacggcggggcacacaaggcccaagagccaggggggaaac

SEQ ID NO: 116364 - DNA, 460 bp, Glycine max
  unsure (1)..(460): unsure at all n locations
  Clone ID: PAT_MRT3847_76088C.1
gtgtaaaaagngagtttaatatttataaactgaattagatttcatcagataattatttaaaagaaaacaaacttatgatatttaatataatacacacctgagcgtgctccgactattaaaaaagaggaaaaggatattggggcttgcaaagctgtatacggttgcaaaccatgttaaggtgaatgcaaaggaacttcgtgccccgcaccccttactaccacaaacttaaggccagcatatttttgagtccattcttccacctctccattattataccatgctcgcccaggacttacagtaggaaggtcgagagcttttatgctttatctagtatatgttaccgggttttaccacgtttggatttccactgaacacccatattcctaatcccatctgaataaagttctgataaaaattgagcactgttcttggagaatcccttccagcttggaaattacct

SEQ ID NO: 116365 - DNA, 758 bp, Glycine max
  Clone ID: PAT_MRT3847_76089C.1
ccggctcgagggcaaacttgatccctttagagatgcagagattttgagaaccaaccttccttcgctgagggagtcctcgattcgcgttcttatcgcttgcaccattttcttgaagcaagctgctgctgcaggcctttgtcttgctcaaataggccaaatgatgactagggaattttgtgatggtgaagagtcaccaagtgaattagaaaatatttgcttgaaggtcaagactactagcgtccctcggggttccgacgataacgtgaataaccgcaaagatgaaactgaagaatgtgatgaagttggtggcattatttccttggccgacctcaaccaaggtgaatgggaagcgtttttggagggttttagtgagcttttgcatggattttttgagggtaagaggtgcaaaagcaaaagttggaacttaaatggaagttactgaacttcaggaagataggtaaccaaagcaagagatgaatcattctcgcttgtaactgtacattaacgccaagatatatattcttagtgtagtttgtatatatatatatgagaaggatggaatagcgattggttaattaggtggtaatgccatccattccattctgcaactttgtttttctttttccttggaaccttttacccttctttgtcaaaatagagttgtatcctattttagtattttttttttttgaattttggggattcaaattgtaatgggatgcattgtttatagtaattcttcctaatattatgttgct

SEQ ID NO: 116366 - DNA, 114 bp, Glycine max
  Clone ID: PAT_MRT3847_7608C.1
ggctcgagccaaaacagaattctctggcttatgcaccaaaccgtatgcatgtaagccagaataatgaccgtgattacagatagacacgatgccaatgcaggtctggccctcaca

SEQ ID NO: 116367 - DNA, 596 bp, Glycine max
  Clone ID: PAT_MRT3847_76090C.1
acttttaaggcacactgccccctacctaaggctcggatccttaaaaccggccgccctctatttttttttttaggtttgggccccgaaggggccaacccagggggaaggaccttattccctggttccccacggaatttatcacatggacttagggctcattacttttttaggtgaacgttgccaacttaaactatttgtttctttaaaaaagatcaccgccaccgctttgggtcgcttaaaaaaattgttacctcacatataatctccccctcttctataacggaaaaagaatgcgctacacttcactggaagaaaggtcacccttcgaacaagaacattttctctacaaatgcacgtaagattccaagtatccaagttgggctcaacaacatccttggactattgtgtaccatcaatgcaccagacacgctttcagcctctgatagctgcagaccaagataatgagtgctctagcaaagcttttggtgttttcataaagaaaatatatgcgggcagacaaatcaattgccacctgaaaagcaggtactgtttcagcagaattcatacacggcagccacccatgaagccaaagagaa

SEQ ID NO: 116368 - DNA, 298 bp, Glycine max
  Clone ID: PAT_MRT3847_76091C.1
ttgatataaaactttatttatggggataatcatccataagatccgataatcgaactatgctcatatgcattaataaaaaggatcagtaaggatcttcaactgtcatcaggtcatacatgagtatggcatatgaccggtcacagtcatcatttcatgatactatcctttattgacgatgaacaaccatccatctagattgtacaagtaatcggaatcaggcttcagttggtattcaccgctatgcttccgcttcaactatatcatcatcgttaatcatgacaacacaaatgaaatcttc

SEQ ID NO: 116369 - DNA, 531 bp, Glycine max
  Clone ID: PAT_MRT3847_76092C.1
gaaaaaaaatgtaagaactaaccctaatttttcatccctaaccctaaatcctgaatctaaacagaaggtgatataagtaccggttgccgaggaggcggtggaggcggaggatgagatcttcctcgtcgggggcgatgtggccccgcttaacggaggggcggaggtagttcatccagcgaaggcggcagctcttgccgcagcggagaagtccggcgcgcttggggagcgttctccaccgtccttctccttctttcttgatgtaattcgctaatacctcgtcttcttctggcgtccatggacctcgcttcaacccaaccttgttacaacatggagagttgttgctaccaatgttgttgttactattgttcttcaccttggtcttggttgttgttgttgctgctgttgttgttgttgatgatggattcctcattttcttcttcttctgaaattagggcaattaatggaagtggaacgaagaatgaagagtatatagtgagtgagttttgggtttggaaaggaaatgataatgga

SEQ ID NO: 116370 - DNA, 314 bp, Glycine max
  unsure (1)..(314): unsure at all n locations
  Clone ID: PAT_MRT3847_76093C.1
nattagcgcacgcntacgtaagctcggaattnggctcgagangnacannnnnnanctncnnacnnacngnacnnannaanngctatnaccgttngncacancctngtgcaagatgnncntgnaccgggtcngacatcactanngcgntgcanctagaangnncnctacttcnnnnnnancatcatntcngcagtgaganaatnantccnnctccgcttcctgcnatcgngnnnnngtcntgtgggatgaccgaagatgngntnnnnggtanaatcnatggcntgagttgagaggntagnnnctgaangntcatc

SEQ ID NO: 116371 - DNA, 1246 bp, Glycine max
  Clone ID: PAT_MRT3847_76094C.1
ggtgcgtccgccttcttgcaccttctttacttagctgggatgaagccatggagcggattcagctgattgccttcttgaactcaaggagatggctctgggaagaggcagtgcagtggttctactactttgcttcttgctgcttcactctcagatggctcgtgctgccacctacacagttggagattctgggggttggacctttaacactgttgcctggcccaaaggaaagctctttcgggctggtgacacacttgctttcaattatagccctgggactcacaatgtggtggccgtgaacaaggctggatatgatagctgcaagactccaagaggagccaaagtgtataagtcagggacggatcagatcagacttgccaagggacagaactacttcatctgcaattatgttggtcactgcgagtctgggatgaaaattgccatcaacgctgcctgagtttaataatatggttaacttcccatacatattgtattgtaatgcaaattgcaccctttagtgggaagttagctcctttaaataatgttaagaaaaaaagtagctatgtgtgctcttctataaatgtcacttatctataaagaataaatgtcggcagtcggtgatctaaaacaaaaaattcaatacagtatataacacatggaagaagtttcattttttataattcttttatatagctaacttttgaaagcatgtgatacattttggtgtatggggtgcatcagctttcaattatagccctgggactcacaatgtggtggccgtgaacaaggctggatatgatagctgcaagactccaagaggagccaaagtgtataagtcagggacggatcagatcagacttgccaagggacagaactacttcatctgcaattatgttggtcactgcgagtctgggatgaaaattgccatcaacgctgcctgagtttaataatatggttaacttcccatacatattgtattgtaatgcaaattgcaccctttagtgggaagttagctcctttaaataatgttaagaaaaaaagtagctatgtgtgctcttctataaatgtcacttatctataaagaataaatgtcggcagtcgataaaaaaaaactctctccctctctactcctgtgtgtaggtcttacatcagaacttataagtttagtataatacaaacttgcttaggtcactttcattttcacacactaaaaaacaacttaaatataattattgaatcatttggtaat

SEQ ID NO: 116372 - DNA, 525 bp, Glycine max
  Clone ID: PAT_MRT3847_76095C.1
ccacgcgtccgcccacgcgtccgcccacgcgtccggtctgtttcttttgatcttgctgctagttgttttttggaaatactcctgtcggtctggcgtgtggtggtacaagttgatgtgacattttggtgctctcttgtaagatgttaacccctgtaataacattgttaagatttcaatgcaagctgggtcataagcctttcgtctaaaaatagtgaatcgatgaaatccactgtcatatatactttctcaatgtatgtagtacatgttgaccaagagagatttttacgaaggtctactatggatttatctatgtattcgattcaagaagctcagaaaataaaagtgggtttctctttttttcatggcaatctagtatggtgtctgctccacaacaacaaaattgggtttatacctctctgaattatttcagtctagaattttaaaatttgtcgatgggcatgcttcaaagttctaatggaattaatttcatgctcccagtctagaacataatacaaagttcatgat

SEQ ID NO: 116373 - DNA, 834 bp, Glycine max
  Clone ID: PAT_MRT3847_76096C.1
tctctcgtccgtggtgccgtcgctcgtgtgagcttcgacgagttccacaagagctctgctgaggtcatccgctcggcagtgtttggcgtcggcgctgacggcgtcgtccgcaaggacttccctatcgctgccaataaccttgtcgttactggcatcgatatccagtcggtcgagcccgtcgaccagcgcactcgggactctctccaaaagtcggtgcagcttgctattgagatcaccaccaagtctcaggaggccaccgcccgccacgaggctgagcgtctcgagcaggaggctcgcggtcgtctcgagcgccagaagatcatcgatcagtcggaagccgagaagcagcgcaagaccctcttggagcttcaggctgagagcgcagctgttgagtctaccggtcaggccaccgctgaggctaaggccaagacgaatgctgctgagatcgaggctaacgctgctgtgactcaggctaagctcgttgctgaggctaccaagatcaagaccgagtctgaactcgcgaataagatcgccgttcagcagtccgaggttaagcatctttcggagctcaacaccctcgagatcaccaaggccaagcagctcgctgctatcgaggcaaagaagttcaaggacacggtcaatgctatcggtgccgacaccatcgcggccatcgctcaggctggtcccgagatgcaggctcgtctcctgcagggccttggccttcagggcttcatgatcaccgatggcaactctcctatcaatctcttcaacgctgcctctggtctcatcggcaattgaagagacttgtattagctgctccttacatgatcaata

SEQ ID NO: 116374 - DNA, 1419 bp, Glycine max
  Clone ID: PAT_MRT3847_76097C.1
aaaggaaagttttcagttgccaagctatcaacgttcagaattatgcattaagtattttgtgttgttcaatgcatcttcagctagcttgcttcaagtttatggctatctcatatgttaaatgacaaagttttagttgcttgaaaaaagattactttactcttatttgttctaattttaaattaaaggttgttgccatggtcttttgttttggtattgcaaaatttcacaaagcacaagaaaccctcaccgccggcgcaaccatctgaaaccggcgtttgcaactggaagcaccggtgctgttaatttttaggttcagctcatcactagcataatttgtgaattataaggtttagaattgtggcatcatgggaagcgaggatgcgaaagatccgttcaaaggggtggattggaaggccgttggtggcgagatgcagcaaaagccgagttcttgaccagcattgagtttatgattaccatagggattagaggaaattccttattggaagcgaagatgcgaaagatccattcaaaggggtggattggaaagccgttggtggcgagatgcagcaaaatccgagtgctaaacctgcattgaagaaacgattaccgaagaaagttagggaaattcctgaattctatttccttccacgatggccgctgcccaaggccattttattctgcagcgcatgcattggtggtggtgtagctgctggaatgcttattgagacctggattgaaaagaaagttaaagaagatggaggggttatatgggagtttgacaaataaactcttgatgttggcacaattatgtcacatatattgctgccttctttcatttcccccttcccacaaattggtctctggagcaaccctctcttctcgggaagtttcagggattagggtgatttataagtttcttgtccttggttagactcttgattgagtagttatcgtcagttgacaaggagataacttccttgtttaaattttggatttttttttttacctgaaacatgaaaaggcaactagatggccatagtttttcagtttatgcctgttcccttattctatgatcctaattctctttttggattatgataattaagagtagtacttcatttccccatttacttcattaatcggatatgcttatgttcccccttacaaaaaccagatacttatcctcgatgtccttggataggattgtggtcctgtggagcaacaaaattgatatacttttcctctgttagctcctcgtaacatgcccgctcttttgaggaacccccccgaattgtatattaattattgaacttgttttttttaacaagcttagttatattttaagaatactatttcagaactatttaatatgtggaattatttcgtttttccaaaaaaaaaaaaaaaaaaaaaaaaaaa

SEQ ID NO: 116375 - DNA, 478 bp, Glycine max
  unsure (1)..(478): unsure at all n locations
  Clone ID: PAT_MRT3847_76098C.1
ngggngttcttttttttttttttttttttttttttttttttattttttttttttttttggaaacatcaacctttataaactttcttttgaattggggaagacaaaaaatacaatccaccttgccccttttggggtcaaatttaaatgggggggcaggggcccaacaaagatgggaaaaaaaaggggggaatttgcttttgaataacatacatttggcccctaacgggggaacccccactccaaaaaaagcccttgcgaaaaatcctaaacaattttccaagcctcgggaacccctaaaaatccttttttgagaagccaaattcccaaaagttacccccggccaccaattgaagggtcaatttccctctcataccattggtctatttgggggggccagcccccttttttttgagcaggcttccaaacttgccaaggaaagggtttttttttttcttaaataggtcttgtttggaggggg

SEQ ID NO: 116376 - DNA, 194 bp, Glycine max
  Clone ID: PAT_MRT3847_76099C.1
agctcttgactatttgctcagcctgagacactgtctaacacggggatgtacattgctcatcatccaacaaacttcaggatcttgtccatccatcagagcacttatgcaatttgaccgaggaagctactcgcttcgacaccttccagaccagaacagtctttatcttgatgcggtgataacctatctgacccacc

SEQ ID NO: 116377 - DNA, 546 bp, Glycine max
  Clone ID: PAT_MRT3847_7609C.1
ggctcgagggtcattggaatagacgactttttcatggtgctgctggattgctagggttggggagagggccattgtcatttgctactcaactgcaatctctctatggacattccttttcctattgccttgcggataggaacagcgattctagtgttagtagcaagtggacatttggtgaggacaaggagctactcagccaccccaatctgaatttcacttcttttgttggtggcaaagagaaccctgctgatacattttactatgtcctgataaagtgcatcatggatggtggtgaggtgctgaagattccagaagagacttggcacttgtcatcacatggcggagggggaacaatcattgattctggcaccactctgacttactttgctgaacctgcttatgagattatcaaggaagcattcatgaggaaaatcaaacgtttttcacttggtgaaacctttacccctataaagccatgctacaatgtgtctggagttgagaatatggagatacctgaatctgcaatcttgtctgctgatggagcta

SEQ ID NO: 116378 - DNA, 277 bp, Glycine max
  Clone ID: PAT_MRT3847_760C.1
aaaccaaacgttcgtgccttattttttcttcattcaaggagaaaggattcattgtacctttaaggatcttgctgggcctccctacctgctaatttggcttaacaaagaaacctgaggaaaaaaagggaaaaaaatttctcaattcctaagatgaaaaaaaaaagcccattaaaagtgacttaattaaaaaaaaaaactggaaccaatgcttgaagccttcaattgaaaaaggggcctttttcattagttaaaggggaaattattaccatttagggaa

SEQ ID NO: 116379 - DNA, 1753 bp, Glycine max
  Clone ID: PAT_MRT3847_76100C.1
ctatacagagcaaggtacgaaagtttcgcgggcttcgcactttccccccccccaaggttccgccctcggatagagaagaatagaagagtttgatcaaattgaagttcaaatcctttctgctgagctgttgttccagcaagctatacagagtaagttacgaaagtttcgtgttctcggcacatacaactacgtgccccaagattctgaagttggatagagaagaatagaagagtttgatcaccaaattgaagttcaaatcctttctgctgagctgttgttccagcaagtttgtgatatatatcatcaattagcatgtcaaccaagtttggaagattggtgcctttggttttttccaaaaggggattttccacctccaccagtattcaaaagggtggtggtggttctgaggaaggtttaaaatcattgaacctctgttctgcaattaatcaggctcttcacattgccttggactctgatccacgttcttatgtttttggagaggatgtcagctttggtggggtcttccgttgcaccactggattagcagaccaatttggtaaaaagagggttttcaatactccactctgtgagcagggtattgttggttttggcattggtctagctgccatgggaaatcgagccatagcagaaatccagtttgcagattacattttccctgcttttgaccagattgtcaatgaagctgctaaattcagataccggagtggtaaccaatttaattgtggaggtttaacagttagagccccttatggagctgtgggtcatggtgggcattaccactctcagtctcctgaggctttcttctgtcatgttcctggtatcaaagtggtcatccctcgaagtccacgggaagcaaaagggttattgctatcttgcatacgagatccaaatcctgtagtattttttgaaccgaagtggctttatcgtttggctgttgaagaagtaccagaggatgactacatgctgcctttatctgaggccgaggtaattcggcaaggaagtgatgtaacacttgttggatggggagctcaattagctataatggaacaagcttgtcttgatgctgaaaaagagggaatttcttgtgaattgattgatctgaagacactaattccttgggataaggaaacagtagagtcctcagttaacaagacaggaagattgcttgttagtcatgaagctcctataactggaggttttggtgctgaaatttcagcttctattgttgagcgttgcttctcaaggttagaggcccctgtagcaagaatttgtggtctggacactccttttcctttggtttttgaacctttctacatgccaaccaaaaataagatattggatgcaattaaatcaactgtgaagtactagtgagcttaatcaccattttttggtcatctataaggtcctgatgccattgagtgatgcattagtatattgcaccatggagttggaaggttatacaaaaatgaaatataaatgatcagcaaaaaaagaacaatgggcatgcacatgtaacactattaattttctcttacgaggccctgtgtactgagaaacatcaaatatttgaagggagtgatccccattagtaaatctcctacaataaatggacgttttccctttaaatgtgaagttgataactcaaatcagtcaaatgtctacgtcctgccaattgtagcttgcacgatatatatatatatatataaatttcataattttagataaaaatttc

SEQ ID NO: 116380 - DNA, 873 bp, Glycine max
  unsure (1)..(873): unsure at all n locations
  Clone ID: PAT_MRT3847_76101C.1
gctataatggaacaagcttgtcttgatgctgaaaaagaagggaatttcttgtgaattgattgatctgaagacactaatccttgggataaggaaccagtagagtcctcagttancaagacaggaagattgcttgttagtcatgaagctcctataactggaggttttggtgctgaaatttcagcttctattgttgagcgttgcttctcaaggttagaggcccctgtagcaagaatttgtggtctggacactccttttcctttggtttttgaacctttctacatgccaaccaaaaataaggtaacttatttgtttgcctgaatttttcttcgtttttatttatttatttatatgtgtcatgtataagagctgtctgcactgatacgaacttcttactcattcaatgcagatattggatgcaattaaatcaactgtgaagtactagtgagcttaatcaccattttttggtcatctataaggtcctgatgccattgagtgatgcattagtatattgcaccatggagttggaaagctaatcaaaaatgaaatataaatgatcagcaaaaaaagaacaatgggcatgcacatgtaacacttttaattttctcttacgagggccctgtgtactgggaaacatcaaatatttgaagggagtgacccccattagtaaatctcctataataaatggactttccctttaaatgagaagttgataacccaaatgtagttttttgcgtcctaccaattgtagcttgcaagttattgaccaatttgatgggttttttttattcatgagggatccaaggggatgggaaaatatttaaaaaatatattgttaaaaataggttaaaaaaaaaaaaaaaaaaaaaaaaaccc

SEQ ID NO: 116381 - DNA, 573 bp, Glycine max
  unsure (1)..(573): unsure at all n locations
  Clone ID: PAT_MRT3847_76102C.1
gtccggaattcccggngtcccaaatcccagaccgcacaacacaacactacactttggtcgtgtttcatctttttctccgagaaagagccaccccacgtttcactttcactttttattttctgctttgggaaatgatgccattgtcgtccctcgcaaagcaaaaccccatcatcagactctagtccattctcgctttcctcttcccccccttttgagcacgtaagaatcctccgattctgaaccgaggcacgtgacgtgtgctcgagcgtgtgtgtgtttttggccatggagaaggaagaggacaagtacgcgaaggaattggaagtggccgttagggtggtccacgtggcgtgtgctctctgcgggagggtgcaggagaggctccttgccaccaccaatgatcacgttgtggccaaggatgatgattctcccgttactgtcgcagactttagtgttcaagcaactattagttggttactatcagaaattttgggggttcaaaatgtgtcaatcgttgccgaagaagacatagaaaccatctncaaggatgaatcagcaagcttactggaagct

SEQ ID NO: 116382 - DNA, 847 bp, Glycine max
  Clone ID: PAT_MRT3847_76103C.1
gatacttttttagtttagaaatcatatcttacacaattttccttcagggttcagattttacccccaatcaatgtttctccctctaactttttaattgaatttaatgtttatattgttttatcttctcgtacaagcactatacagagcaagctacgaaagtttcgtgttcttggcactcacaacaactacccccaagattcagaagttgaagagaagagtttgattatcaaattgaagttcaaatccgttttgggtggctattatttcagcaagtttgtgtcatcatcatcatcattcatcaataaacatgtcaaccaagtttggaagattggcgcctttggttttttccaagaggggattttccacctccaccagcgttcaaaagggtggtggtggttctgaggaaggtttgaaatcattgaacctctgttctgcaattaatcaggctcttcacattgccttggactctgatccacggtgggcccctcttatttatttatttatttatttattgaggagatatctggtgagagcatgataggtgataacagcaaaatcttgatcatatatattcataaaatgatgatcacgattgctttaattttacccatccatttcaatttatatagctaaaattccctactttccggtctcatggggggtcatctttccccttatttgtttcaggtatttatttaggtagtttttttcctaatcctatatgggtaaaaactcccccgaggaaattttattcccgggccttgttttattagttttggggggcaccagttgcattgttttttctgttagtttggaaggcgattggagttccacctgtggaatccct

SEQ ID NO: 116383 - DNA, 236 bp, Glycine max
  Clone ID: PAT_MRT3847_76104C.1
attatattctttttttggttggtctaacatgatcatacattaacaaaaaataggtaatttttagcatcaagaactatcaacctaacatgatgcaactgctggtatagctcccaatgcgggaaaagccacaacaattatcacatttaaccaaaaaacagggctacgcttagatggcttaaatgttaaaatggagaaaaccattggcaagaagaagtcaagtgggataaagccaaaaa

SEQ ID NO: 116384 - DNA, 479 bp, Glycine max
  Clone ID: PAT_MRT3847_76105C.1
actactcgtccgcgataactaggaggtctactgaacattctttctgtcaaaaaaccaatgggtttcaagaactcggccgttcttactctctgcgataccccagggctttgctaggtcgcaccgatttccatagctgctaacaaccgagcagtggatccgccacaaaccattagcaactgcaccgtaaaccctgccttctgcaaaacagggctcgctaattaaaatggcagcgtcggagactacggacgaatatctgtccgaaagttctaggcccagtcccgcggattcttgaactcagtccattcacttgtacaagacagaacctgtctgtctttaccaacaaatagaggccctgaagataggaaatttcttgctgaactaaacctagaaaacttaacaaacgcgcttgacactgctggaaatagcaagcgaagttttttcccccccttaggccaaaaacaggaaacctccttagtgct

SEQ ID NO: 116385 - DNA, 294 bp, Glycine max
  Clone ID: PAT_MRT3847_76106C.1
aaaaacaaaaggccccgaaaaaaaaaaattttcatttttttcatctgggccaacttataaaatggggcagtctggtttagctcaaacccgaacaaaacgggggcttttaaataaacttactggggccatagtcaaaaaattttccaagccttagcagggaagcttgtttgtccccaaattttcccttttgaaaaaaaaaaggggaaaataaaaggggcggggggctaaaaattcaccacgggtgggaagaaatgaggccagttcttgcccaatataaaaaactattgggatttt

SEQ ID NO: 116386 - DNA, 255 bp, Glycine max
  Clone ID: PAT_MRT3847_76107C.1
atgagatgcggtttcctttgttggtgttgctgggaactgttttcctggcatcagtttgtgtctcattaaaggtgagagaggatgagaataaccctttctccttgagaagcttctaaaagcttccaaactctctttgagaaccaaaacggtcgcattcgtcttccccaagattcaacaaacgctcccccaacttgagaaaccttcgaaactaccggattgtccagtttcaatcaaaacccaacacaatccttctcc

SEQ ID NO: 116387 - DNA, 515 bp, Glycine max
  Clone ID: PAT_MRT3847_76108C.1
atgtggtcttttggtgccccttttacactctttcacacttggttgtcaattatcacatttccctgtaagctttcttctgttgtttgatcaccctcacactgatccaacttcttttgagaaagtctcatctcaattacaattagtatcacactatcactatattcttctaaaccaagagcaatgcatcacaaaatggtttcacattcacttatgctagtttagtagtttgattgtgagattcagcatttcagctgtttgatttgttcttctcaactacttttgttgaggttgttacttgtgaacagtgcttcaaactttcacaattgcctaaactaatagcaatgatcacaaaatggtttccagttcatcaatgctagttctttttatatccgtaagaatggaacacagtattaggggttacaatactcacacattttgctcgactaattgagctagaccccttggtattaatgctagtcttgctgtgagattcagctgtttgatttgttcttctc

SEQ ID NO: 116388 - DNA, 467 bp, Glycine max
  Clone ID: PAT_MRT3847_76109C.1
tcgcgatctagaactgagaacaaaggttaaaccacaattctatgcattccgatggattacactcctactcacgcaagagttcaaatttgagtctatcttgagaatatgggatacacttctgagtaacccttttggtgttcaggatatgcttcttcggatctgttgcgcaatgctactttgcgtgaaaagcaaactgctaagtggtgattttgtgaccaatataaaacttttacaacactaccctgatgatattaacgtagaatacctgctccaggttgccaaggatattagtcctgacacatctaattattgtttatcactttgatttattacactgaattatttttttttgtataatttcatcaaattatcatgttttgaatctgaagtactgagtgaccgatacctagcacaagaaacgtccattgcaaattaaggatagttcatgagctgaaatagagctattt

SEQ ID NO: 116389 - DNA, 122 bp, Glycine max
  Clone ID: PAT_MRT3847_7610C.1
cacttctatagggcttctatagtgccacctaaaggcaattcacttggccgccgttttacatcgtcaaagactgggagaacccaggcgaaacccaacttaatagacttgcatttcatccccct

SEQ ID NO: 116390 - DNA, 1183 bp, Glycine max
  Clone ID: PAT_MRT3847_76110C.1
atttggaagtgcatgaggctcgagacatctacgttaatttgccaagagtaaagattccaaagtggtttgagtgccagagtcggggagagtcaattgttttctggttccgtaacaaattcccagccataattgtttgcattgatgcagatttttgctttgatttgcttggtctcaacgtgttcattaatgatgaaaatgaagctaaacaagtaggttgggatgttaccgagtgctgcataggtccttctacagctgtttttcgtcttcaaatggaagattatttagatgaagaactattaaagaatgaatggaaccgtgcagagattgaatttgaatattggcggaacgaatgcgattttcatgtattgaaagagcaaagagcctggggagagattcagttcactgtcccatgagggcataaatggagtttgcaaagaaaaagatgggactaacaagattgaaattatatgtatgacgtgttccttatctggagaagaagtagaatgggatggagatgccttcaaggatatgaaaaatctgaaaacacttattatcaagagtgattgtttttccaaaggtcccaaacatcttccaaatactttaagagtattggaatggtggagatgtccttcacaggatttgccacataattttaacccaaagcaacttgctatatgcaagttaccccagagtagctttacgtcactcgggttggccccattatttgaaaagagtgtcgtgaatttgacaagtttaattttggacgagtgtgatagtttaacagagataccagatgtatcctgtctctcaaaattggaaaaattgtcatttaaagattgtaggaatttatttacaattcaccattcagttggtttattggaaaagcttaaaatcttgaatgctgaatcttgcccagagcttaagagttttccacctttgaagttgacctctcttgaaaggcttgaactttcgtattgtttcaatctcgagagtattcccgaaatattaggaaagatggaaaatatgacacaactttcctggactgattacaacaaaactcaccttcttactaagactgagacacacgtctggactgatgcagatgcatcgaagaatgccgctttttaactacccttattgtggatggttgcgctcgtcttcaagaaattagagggattcctcc

SEQ ID NO: 116391 - DNA, 326 bp, Glycine max
  Clone ID: PAT_MRT3847_76111C.1
cactgagcatgcgtctagctatgtcgatcgaactgtccaaggtcctgtcactttgtgtgtgcgtgtgttttgcggctgaccggggcgtgggtatgcatgtgtggtgtgggtggggtggtgtagggtttggtgtgggtcagtgcaataagaagaaggaattagccaattcgtctgcacggaattggaggtggtgctctcgcgtgcggtgtggggctcggacccggtgcaatgggtgggtctataaccctggcgcagcaactcgggtcaaagaaccatcatgatcaagtttgggcagggcgctcgtgatgatgttgacgattttgtat

SEQ ID NO: 116392 - DNA, 173 bp, Glycine max
  Clone ID: PAT_MRT3847_76112C.1
aggtactctacactttcttctaggtagagctcgtgaaacaaccactcttcaactactctcactcacattgcgcttctcacttcactttttttcttcttctcacttagatccaaggcgtttagtttaaaacgcggcgtttagtagttttaagtccagttccttaactcgctgct

SEQ ID NO: 116393 - DNA, 476 bp, Glycine max
  Clone ID: PAT_MRT3847_76113C.1
atcgtctagctatctcgatcgaactgtccaaggtcctgtcacaataatctactgggttaaagataaaaggaaaagacaaagctgcagcatgcaatagcaaaacggcggcaactgccagccaccatgataaagtaacacactgaaaaggtaaaacgatgagaaagctttggcaaggaaactgaatacgtatgcaagagcaaacatactaacgtagccagcaagtgccaaagggaaaccggtacggctactacatttagtaagggcaaaagcacaggagcgtgtgaaacaagcagtgtaacgtggtgaaggtgaacaaacacacaatgccacgttgtagcgtcttgaatagtgcaatgagcgcaacagtgcaaccaacacaacatagtagtgcaatgaaacagaggacttggccacactctgcacgtgcaaggccaccatgcgtaacacaatgacaatggttgccaacaaaaatggtg

SEQ ID NO: 116394 - DNA, 112 bp, Glycine max
  unsure (1)..(112): unsure at all n locations
  Clone ID: PAT_MRT3847_76114C.1
ggtttganaaacaggnttttgccgtanagtcaaggttttggagtgtctatgaccgnaattgtgaccacatcggtcacantgtctgcaatttcctnaatatcaagggacacgt

SEQ ID NO: 116395 - DNA, 1001 bp, Glycine max
  Clone ID: PAT_MRT3847_76115C.1
cacaaggacccttgtttcagtttgccatggaagcaagattgcttccccatattctccgagtcaagccctttgtaccacacaagcaacaaacccgagcctcttaccccagaggaagaaaaagaccttcaacttgccatccagagattccatgagctttgccataagtgtgtgcaagtcaacattcctttgttggttgatgcagaacacacttctgttcaacctgctattgactacttcacatactcctctgccatcttgcacaacaaaggtgacaaccccattgtgtttgggaccatgcagacctacctcaaggatgccaaggagagactcttgctggctgcagaggctgcagacaacatgggaatcccaatgggcttcaaacttgtcaggggtgcttatatgtcaagtgaaacaaaattggctgagtctttgggctattcttccccaattcacgacaccatcgaggacacacacaagtgcttcaatgactgctcctctttcatgcttgagaaggttgctaatggccctggtggagttgttcttgcaactcataatgttgagtcagggaaactggctgctgcaaaagcacatgaactagggattggaaaggtgaaccacaagcttgaatttgcacagcttcatggaatgtcagaggcactttcctttggtttgagcaatgcaggatttcaggtgagcaagtatatgccatttggaccagtggagactgttatgccatatctcttaagaagggctgaagagaatagaggaatgttggctgcttcgggctttgacaggcaactgatgaggaaggagttgggaaggagactaaaagctgctttcttttaattttttatacttttatgggacgagttaatgagatgtaataatgtcttttaggcaacacagattaggatattttttgtacaaaattagagaatcctgtaatctctttgaatggtgcattcaaatcaatgaaatgtgtccgttgttttaactcttaa

SEQ ID NO: 116396 - DNA, 651 bp, Glycine max
  Clone ID: PAT_MRT3847_76116C.1
ggacataatgatgatgtttgatcaaaggacatagctttagtagcagtggcagtagagacatgtacagaggatcgtctgcttgctgtctcttctttcccctccttttcgtgtgtgagagagttcagtgttattctctgttctaacttcactttttggcaccatttatcatgcttcactccttcttcttcttcttcttcatcctccaacggtcatgaaagattgctcttttctactgttatatatactcttggacacttttgctcaagtttggagacgatgattgtgtgtatgtgttgaagctcttccttcggtttcaattcacttctgcaacatctactacatattgcagggttcttgaggatgggacaagaattggagtttgatctgaatgacaagtcttgcgtgggtctcagtcctgatactgttcttccacctcatcaatattgtttgaatgtgaagaaaagatgtaaaaatgggaaacccactgggaaagatgagtttttgcaactcaaagagaactttgccgatatcaattttggtcgctttcgcagtacttcaccaaagagccttccctgtaaatcttattggactggtaggtaacatttaaatgacgcatggttccaagtttccgagttcagagctagttataaa

SEQ ID NO: 116397 - DNA, 240 bp, Glycine max
  Clone ID: PAT_MRT3847_76117C.1
ttcagtgagagatcgttgttcacttgatcttatcataatcgacagcgtcaattgatgaacatgctgatcagacacatcgccgtcggaaagtctgaagaagtgactcatcccgacacgttgaaggaggctttggctgagttcatctcaaccttcatcttcgtgttcgccggattaggctcctgcatcgcctacaacaagctcatcgacaacggcgctgactatcctgccggcctcatctcc

SEQ ID NO: 116398 - DNA, 384 bp, Glycine max
  Clone ID: PAT_MRT3847_76118C.1
tttttattaaaaacaaactgtaaaagcaacaaactaaaacagagcaacaaatagcaaagacctcttcattccctcccctaaactatctgcattatgcagttagtctacttcagtgagatcaagcattcccatcttctttctaagcttctggaaggcctcaagttttaaggctttagtcatcaaatctgcaacctgctcctgagttccacagtgtgccaactcgatttctccatcttttacaagatctcttaaaaaatgaaaacccactctaatatgcttgctcttgccatacataactggattttactaaagtttaattgttgagctattatcacacataatgacagtgctaccttcttgagcatgatttaagtttctcaaaac

SEQ ID NO: 116399 - DNA, 133 bp, Glycine max
  unsure (1)..(133): unsure at all n locations
  Clone ID: PAT_MRT3847_76119C.1
gtaaatttaattagtaatactatagtaccatcatatctcttcactgtgaataanatcaaattgagtcttgataaagatttatatatgcatcaagacacaagaccaagttaattttgtaaataatcacatgact

SEQ ID NO: 116400 - DNA, 900 bp, Glycine max
  Clone ID: PAT_MRT3847_7611C.1
ctacggctgcgagaagacgacagaaggggatgagtcatgagatacacttttcagttcatgaaacacaacagtaatcctcaaattctctctctattcaaagagaaaaaatcatcgtccacttgcaaccaacacaatttggtatcaaaatgggcctgtcaagtctcccagcaccatctgaaggagtgttatgtgtgcttcttgtaaacactgccttgtctatatccatattcaaaggcattgttaggacaattctacaaattgtcggtatccgcgtttcgtcgttgtctccttcaccagacatctcccgaaacccacctgagccattagaattcaacctcagcccctcggagggtttcattgaagagttcagaagcaggacaccaacacttaggtttggcagcatgtgtggcagtaaacaacctcaacatgaatgttgttgtgtgtgtctcacaaagtttgaaccagaatctgagataaactgtttatcatgtggccatatttttcacaaagtgtgcatggagaagtggttggactattggaacattacatgcccactttgcaggacttccttgatgcctgaagatgatgcatcttgcttttggtaaaaaaacatgtacatataaaagaaaagagatatattcatgtacagtatatattgtatgtacatagttgtggcagtgttgatgttcccttggtcttggctctaacttttttaaccctttacttttttatgattgttaaagtgtgtggagggtcttgttttcctttgtttctctgtatctggtgttgccacatatgagtcgagggatctacttttttgggataattgtgtttgtccataatatcctcttgatatgtaaacagacatcatatacagacccttttgcttttgccacatgt

SEQ ID NO: 116401 - DNA, 1027 bp, Glycine max
  Clone ID: PAT_MRT3847_76120C.1
ggaaacgtatcctcaaaacgtatcctctcgttagtcgttaccttctcctacaaaacaaaacaacctaaaagcttgtccagcgaagactcaaactctttcccatggatactctatcatcctctgtttcaaccctcaatgttcccccactcccatcatcaaccttcacaaatcgcgatttctatcgattcaaagcatcccccacccgttcccaacaacaacaacaacatcatgttttctccacttccacacccaattttctccccaaaaccaaaactttctcccacaaatcttccccttctcttccattctccccctcacccctcaaacccaaaccgtcttctccaactttccatccaaatcccgctactgggtatgcggcagcgctggtggacgtcgcccacaacagcaattcccttcactttgttcacagcgatgttcagaggctcttgaaattgctgcagggtgccaagtttcagtcacccgcggttgagcagggaaactttcacaggcacgtggtggcgttgctgaagatgctgctgaagaagaacaaggtggggattgtgaaggaggtgctgcaagagttcgagaggatttacgatcggctttgtgggactcaaatggttttggtttcgtccaagactaagatgagggaagatcaactgtttgggattgcaaagagcgtgcatcaattgagtggggctgtgagagtcaaggtaaggaatttggttcaagagagtatgccctcttttgctatgtgaaatcaaagtcaccattttcatttgatttcatcaatcaatcatagtttgtgcttcttttgatttcatgtacgcacgcatcaatttaatggggactttatatttagttgcgaaatttcactagaatttattttgcccatttacatgccaaacgcaagagcactgctattggaaaaatattgttcatactctgcattatgcaaaatgcaacactaatactttgcaattctatgcaaattacactgcgctatgtaaaggaagaatttttttat

SEQ ID NO: 116402 - DNA, 259 bp, Glycine max
  Clone ID: PAT_MRT3847_76121C.1
gcagatcttcgttaagacactcaccggcaagaccataaccctagaggttgaaagctccgacaccatcgataacgtcaagggccagatccaggacaaggagggtatccccccggaccagcaacgttttatcttcgcccgaaagcagctcgaggacgggcgcacccttgtcgactacaacattcagaaggatcaaccctttaactcgttcctcgtcttccggggggcatgcagatctttgtttagacccttcaccggcaga

SEQ ID NO: 116403 - DNA, 470 bp, Glycine max
  Clone ID: PAT_MRT3847_76122C.1
gaagaggaagaaccgggaatcttttctattataacatatttatccatcgggactagcaacagattctagctaaaatgttataatgacactatttctaaactcagaggaacatataattcttaatgcgcgaaaccaaaacattttggaagagctgctcattccattctatatcgtttaaagagacaataatttaggggattccattacctggactcacttctgagaagagccttatttaatactatacagacattgatatgcctataaaccattgaagaacctgagaaccacttttctcaataattgttctatagcttacctgggttctagacacagaaaaatatcggatctgaaattttacacgtctaagagctaatctctcaagagatgctaacttatttactataccgggaagatgaatctctccccttaacaagactgatttcctccaggaaatgaccggatttaac

SEQ ID NO: 116404 - DNA, 180 bp, Glycine max
  Clone ID: PAT_MRT3847_76123C.1
aaatgttacatgttgaaatttacgtggtggaagaggggccgctgatcggattaaatccccaccccacaatctctcctaaaatatcagcgtgaggcttctcacagggctcaggaccggttagaaaactgcatctgttaatagcgtttatcctcatgcaacaacacaacaacctaatctttt

SEQ ID NO: 116405 - DNA, 424 bp, Glycine max
  Clone ID: PAT_MRT3847_76124C.1
ccaacgcgtccgaaagggtttaaggtgttcctgaagtccaacgaaaaaacgtggttaaggtcggggaagtcgaggccagtttttgagccataagtttggatggtaaatttaagggccaggcttggttgggaatttggataccaggtccttaattttaaaaatcaatccagttataattgtaatggctttactagtaaatgggggggaacttatattaggtaacaaagttttttgcttaaaaaaggaagtgaagaaattgttacaccttggtttccagcactggcataaatactggaattgagcggaattaatacggccttcaattttaaaaatgaaggggggatggccattttttacagttagcattaatggttaggattgggggttatttgcctttttggcattaatggaatttatgggttgg

SEQ ID NO: 116406 - DNA, 356 bp, Glycine max
  Clone ID: PAT_MRT3847_76125C.1
gggaaaccagagccccaacccgatgggggaaacccaaaacccgggccccccacctcctaaggatcaaaaatatgaaaagggaaaatgggaaaacccaaaagaaaaaccccccccacttattaacggaaaattttgaccagattaaaaaggggcgaaaataaggcaaactttctgggcaaaccccagccccaaaggaaaaaccccctccaaaaaaggaagcccctttcggaagttaacccttgggacccaagcaaggaattccaatggcttaggaaaaagggagtcccctggcggggatccccaggagggggccccactacccttatccccccatggggagaaaaaaaccccctcac

SEQ ID NO: 116407 - DNA, 104 bp, Glycine max
  Clone ID: PAT_MRT3847_76126C.1
ggctcgagctctagccgccttatggctcggatccccttgctcttagctctctctctatcagcccacgtggtcagcatctataagtgggttgactacatccgacc

SEQ ID NO: 116408 - DNA, 698 bp, Glycine max
  Clone ID: PAT_MRT3847_76127C.1
cccacgcgtccggacgcgtgggcacgcgcagcatcatggccgacaataattctactactgatcattatgatatgggcatggaagatgctgaactggttatggctgaggccaaagaggcttgaaaggcttctgagagaacaaggccttcaaggcaactcatacacgctttttgttggggacttgaaggagtttggcaagatgcgaaatgaagccttatccaaacccatgaatctcttctctcatgacatagcgccgcgcgtgttatcctttatccaacacactgtcaacaagcatggcaaaaattcttttatctggtttgggccaataccaagggtgaccctcacagatcctgagcaaatcaaagatgtactcaacaagatttatgactttggaaagcctgatatgaatccgcatgttaggttactagctcctggtcttgtaagccatgagggagaaaagtggagcaagcacagaaagataatcaaccccgcattcaatttagaaaagttgaagaatatgttaccactattcatcaaatgttgtgatgatctgattagcaaatgggagggaatgttgtcttcagatggaacgagtgaaacagacatatggcctttctttcagaatttggctagtgatggtatttctcgaacagcatttggaagtagttatgaagaaggaagaagaatatttcaactttt

SEQ ID NO: 116409 - DNA, 421 bp, Glycine max
  Clone ID: PAT_MRT3847_76128C.1
ggaaacacatgaagagacaacaaaaaaacatgtcatcttcactcatcttaccattaaccattttgacagtactgtcttttctctccttggccattggccaccgtgctcaaccctgcagtgaagaattcctcaagctagcccaacaaaagaacctctcagactgcaagacactgcgcactctgggggcagagtttgcttggtcctaccacaatgtcacgaataaatccatagaactagaaattatgttccgtgccacactccccaccccacaagggtggatggcgtggggtgtgaacccgggaaaaaggcctgagatgattggaaccaaagccatcatagccattaaacatggcgacggaacgtggaaaatagacacatacaacgtcactaaggagaccagaaacggttgcagccttcttcc

SEQ ID NO: 116410 - DNA, 339 bp, Glycine max
  Clone ID: PAT_MRT3847_76129C.1
gaaagggctttatggtaaaaactgctacaaagattgacacagaatgtgttttacaatgcttattttgccatctatatagaatctaatggtgcttgaaggaattcatcctaagctatgctctaagacctgtattcatggattcatcacaggaaacctcctcgactaatgtacatagtgatgtgagctgaacattgcatgccatgaatgtttgcactgacctaccatgtcgaagcactgccctatatatctattatttcaccaaggccaagtcactaaccgtctcacgagcaaacatgaccctattcacattttatttgaagaatggctgtggcttgacac

SEQ ID NO: 116411 - DNA, 230 bp, Glycine max
  unsure (1)..(230): unsure at all n locations
  Clone ID: PAT_MRT3847_7612C.1
acaaaggccattaaaaaagggtttnnntatcaatcccagacttaaagattgcttgattttaccaaaaactcaagagttttttcttcatgaacctgtgccccccacccccaagagaatcataggcgagccctaatgatctaaggggtcagcaccacttctgaccctaattgttgggcctctcttggagaaaccatacatatatttctagactcttgaaaaatcatgagggg

SEQ ID NO: 116412 - DNA, 311 bp, Glycine max
  Clone ID: PAT_MRT3847_76130C.1
actattaacatttgattaataatttccatccactggctcatattcggatgaacagcgtcacctatctgttccgaatgcactttaacagcgcaccaaatttattgcacgttacccatacaataatattactctttcgaattaacttccccattatcagggtacacaagggttgaaatttgaaaatcttactgggtgcagctctttcctccaaaaatggtgcactctatccagatatcaccaccctatccaagatcatatctcctgattttcaaaatattacaagagaatcagatgccctagatcattcactg

SEQ ID NO: 116413 - DNA, 855 bp, Glycine max
  Clone ID: PAT_MRT3847_76131C.1
ccttctcgtccgatttgagggcattgataataataaactacagcacctcatatgcccgccttcaaaatgtttcagtttttaggaatttgaccaacttgagaagtctctggcttgaaaaggtttccatccctcagttatcaggcagtgtcttgcaaaacttgggcaaattatttgtagtcctctgcaaaattaacaacagtttggatgggaaacaattccctaacctctctgagctcactcttgatcactgtgatgatctgatccaactgccctcaagcatttgtggaatgaagtcactccaaaacttgagtctcaccaactgccacaatttgactcaattgcctgttgaattaggcaaactaagatctctagagatcctacgattatatgcttgtcctgatctgaaaacacttcctaatagcattagtcacatgataaggttgaagtatatggacatttctcaatgtgttaacttgacttgcttccctgaagagattggtagtctagtaagcttggagaagattgacatgagggaatgctccatgattagaaatgtgccaaagtctgcattgtcgttgcaatctctgaggcttgtgatttgtgacgaggaggtatctgggatttggaaagaggttgagaaggccaagcctaataattttcatattcaagtttcagagcagtactttgatttggactggctcaaagagtgacataatatatcatatatgtgtatatatatgtttttgtgatgtttttactttccaattcaatgtgaatacttgtagataacttctatttgaagtggaaattacttttctccaaaatcaaattcttgtgtcaagagtattgattgat

SEQ ID NO: 116414 - DNA, 1122 bp, Glycine max
  Clone ID: PAT_MRT3847_76132C.1
gtttaggtagttgagtagacagagaggagtgttcagggcagtttacaaagccaaattttgttccttagttgtttccttgttctctgtaactgatggctgattattcagcaggaactgaatcccaggaggtggtcgtaaatgtaaccaagaacacctccgaaacaatccaacgctcagactcccttgtctctgttcctttcttgcagaagttggtagctgaggcggtgggaacatatttcctgatatttgcagggtgtgcttcattggtggtgaacgagaactactacaacatgataacatttcctgggatagcaattgtttggggtctggttctgacggtgttggtttacactgtcggtcacatctctggtggccatttcaatcctgctgtcaccattgcttttgcctccaccagaagattccccttgatccaggtaccagcttatgtagtagctcaactcctaggaagcatacttgcaagtggaactctgagactattatttatggggaatcatgaccagttttcaggaacagtcccaaatgggactaacctgcaggcttttgtgtttgaattcataatgacctttttcctcatgttcgtcatatgcggggttgccaccgataacagagcggttggtgagttggctgggattgcaattgggtcgacattactgctgaatgtgattattggagggccagtgacaggagcatcaatgaacccagctagaagcctaggacctgcttttgtacacggtgaatacgaaggaatatggatatatttgttggcacctgttgtgggggccatagctggagcatgggtatacaacatcgttaggtacacagacaagccattgagtgagatcaccaagagtgcttctttcctcaaaggccgtgctgcctccaaataatttatatgagcaaatggagacactcaataatttcttccttgtaatagtaattaaaaaaaaataaatatgaatgaaagaaatcactcaaagaaactacgctatgctgtttcatttccttgttttatgaaaggtcatgcacttgaatatcatctccctctttttcctctctatttggattaaaaataaatgatttttgacattgttggtggatctt

SEQ ID NO: 116415 - DNA, 284 bp, Glycine max
  Clone ID: PAT_MRT3847_76133C.1
ctcgagcgggacatcatagcctccattgttcggtttcgcgtttcatattcttcgccccttgttctgcagtgcgtgaagaatatcttcatttctttcatgcactcagacttttaatccagacgcacgttttctgtgcacgagatctggcacgaattccctgtgaatcttgcaaagatggaatcttgtgcgcaattcgggttctgggtggtcttcatcttgttcttggcatttcaaattcctcccaattacgggttctaccttccaggtagttacccccacaacta

SEQ ID NO: 116416 - DNA, 2173 bp, Glycine max
  unsure (1)..(2173): unsure at all n locations
  Clone ID: PAT_MRT3847_76134C.1
acctcagctctactcaacgggctagacacactgccggtgcgggcaactcgaactaccctaaacgacgccgcattcaaatttccgccaccgacgcattaaccccttccaagccccgacggttcccgagtggtgatggcggaaacgcacgaagacacaccgaaagaaaccgttcacaaagaagaagaagaagaggaccaaagcttcgaagagctcggcgtggacgctcgtctccttcgcgccctaatcaagaaaagaatcgagaaacctactccaattcagcgcgtcgcgattccactcattctggaaggtaaggacgtggttgcacgtgccaaaacaggttcgggaaagacactcgcgtaccttctcccgttgcttcagaaactgtttactgctaactctgatcggaagaaactcgcgccaaatgcttttgttcttgttcctactcgcgaactaagtcaacaggtatatgcggaagtgaagtctctggttgaattatgcagagttcagctgaaagttgtgcagttgaatagtaacatgcttgctaatgacttgcgggcagcattggctggacctcctgatattttgatctccactcctgcttgtgttgcgaagtgtttgtcctgtggcgtacttcaggcggcatccattaatgcatcgcttgaaactcttgttcttgatgaggcagatcttctattatcatatgggtatgaaaatgatattaaagctttaacacctcacgtacccagaagttgccagtgtcttcttatgtctgcaacatcaagtgctgatgtggacaaactaaagaagttgattctgcacaacccctttattttgactttgcctgaagtgggaaatcataaggatgaggtcattcctaaaaatgttcagcaattctggatctcatgtcctgccagtgataagttactttacatccttgctgtgttgaaattggggttggtccaaaagaaagttctgatattcacaaataccatagacatgagtttcaggttgaaacttttcttggaaaagtttggaatcagatctgctgttttaaatcccgagttgcctcagaattctcgtctccatattcttgaggaattcaatgcgggcctgtttgattatctaattgcaacagatcttagccagtcaaaggaaaaggatgaagtgcctaaggaaagtattgttggatcacggaagtctagaaaacatgctaaaataaaattagattctgaatttggagttgtaaggggaattgactttaaaaatgtatacacggttataaactttgaaatgcctcagagtgttgcaggatatgtacatcgaattggacgtacaggaagagcatacaattctggtgcttctgtctctctggtttccacggatgaaatggatactttagaagaaataagatcttttgttggggatgatgaaaacaaaggcacaaattccattgctgagtttcccctcctcaccaagaatgcagttgaatctttacggtacagggctgaggatgttgcaaagagtgtgactagaattgctgtccgagagtcacgagcccaggatctgaggaatgaaattttgaactctgaaaagttgaaaacccacttcgaaactaatccaaaagacctagatctactgaagcatgacaaaattttgagcaagaatgccccacctcctcacctacgggatgtgcctgagtacctattagacaaaccaacgaaagaggcaagggaaatggtcaagcttgcaagggatgcaatgggaaataataatcgccgcaagggatccaagagaaaattaagaaaagaaggagaccctctgaaggctatctatgctacggcgtcatcaaaaagaccgcacaaagctaggaagactggtggaagcgatagcctaaatagcagtgataggcataaacacaaaaagaataagggtatttgattgatttgcccgtttcctacaaagccttataacaggctcaattttgttgtaatttaggtccaaatatcgtaaaacgaaaaacagtacagtattggaattgttgtttcctttataccgcgtagggcctgaagttattgctcattactaagttaaattatgctaattgaaactagaatttcgctttcaaaaatgtctcttgtctcgcatggcatgtggcatgcggaagannntattg

SEQ ID NO: 116417 - DNA, 604 bp, Glycine max
  Clone ID: PAT_MRT3847_76135C.1
tcctctagagcggccgcttttttttttttttttttttttttttttttgcttttaaaagctccctccagaaactacaaataatgaattgactatttctccaaaataagttattccaaaaaagcataagccacagaaagatccaggaacaaacacatgtttgggaagggttaattctggaaaataatcactttttttttggagaagctacaaataataaaatgactatttctcccaaataagttaatccataaaagcataagccaaagaaagatccaggaccaaacaagcagggactgaataaaaatagatatttcaaatgaaaatttttaaaatattatacgtttattaaagttgtctccaacttttataaaattaattctagattttgtttctgaagtttaatactaaaggcatgtttgggtaaacaacttaataagcacatgagagcttacaacatgagagtttattaacattttttattgtgaagattacaaaactaagctaaaaagatcttattttgatatacttctttgtgtagctggtaacaaaaagcctaaaagagcttatagaaaagatcacgagttacttttataggaccaatttt

SEQ ID NO: 116418 - DNA, 399 bp, Glycine max
  Clone ID: PAT_MRT3847_76136C.1
tagctgcgcggccgccctttctgttttttttttttttttttttttttttttttttttttttttttttttttttttttttttttttttttaaatgaacgatttccagtggggttttaaactaaacaattttgcaagttttgccaagaagggcaaccctaaaggcggtaattagagtctcccaaaagtctattaggacaaagttcactgaattggctggtaaaattaactagcattacttccttccccacaaggaacactcaatacttcgcccactttttggcccattttaggccccatacaaaaacatggccagatcacctagcacttaatacatggggctggcaggaatttaagcccgaaaattgctgcgattcccaactttttttccaattgggaaac

SEQ ID NO: 116419 - DNA, 310 bp, Glycine max
  Clone ID: PAT_MRT3847_76137C.1
ctccaacaatgcccatttccatatcgagcttaacatcataatggatggatagaacaccgatcccaataggtgccagaagatgaaggacagaatattccatgtctgcaaagaccccaccaggggattaaagaggctgtaccagatgcgggtccaggggtcactatggctcccggccattagctgctatcactggatgaccaagaccgcgttttaatgactgtgaaggatgccgtgtatcgctttcgcgtggactcatgcgagccactcatatgatgattctcggacaggtccatgctgtcattggctactg

SEQ ID NO: 116420 - DNA, 241 bp, Glycine max
  Clone ID: PAT_MRT3847_76138C.1
cgaccgacgcgttcgtccacgctttcttccactcgttcgtccactctttctattttaacatgctcatcttccaaacagatgcttccaaataacaagcagagccacaccaaatgtatccaccttctaccccactctttaccggagaggcaagatctaccagtcaccgactcattcctcgtctcaatttaaagtactaacaccaatctaaactgattgtttgctcctgccattaaaatgaaca

SEQ ID NO: 116421 - DNA, 411 bp, Glycine max
  Clone ID: PAT_MRT3847_76139C.1
aaaaaggacaaacgggcccatgggagagaaccccctcccaagggttaaaaaagcccaaaaagacacaaatcccaaccccaaccaaaaagaaaattttgtggtccggggggaccaaaaacccttttttaaaaggggcccaaatgaaattttgaaaaaaaagacccagggcaaggggggttgaccccaaaaccaattctttaaaaggaaaaaaacattcgggggcaaagacccccaaaatccaaaaaaaaattttttcaaaaaaccaccccccctatggagggttttgaagggaaaatttgggggggaaggaacaatatctttgggggaaaaacccaaagggggggggggagactgggggctctccttccccctcgggggattcacccgaccacggaaaagggcggggggacc

SEQ ID NO: 116422 - DNA, 193 bp, Glycine max
  Clone ID: PAT_MRT3847_7613C.1
gcacctgacaaacgtttctttgtattcctaacacctaatgacacatacttactattctaaaaaacacatcattctatactaaagatctgataccaatatactgtaacacgttacccccacatctattaccacttcaagtccctaactctttaacattggccttcttcgacgcatttcccacccaaatatgttt

SEQ ID NO: 116423 - DNA, 949 bp, Glycine max
  Clone ID: PAT_MRT3847_76140C.1
ccagcattcctggtaaaaggatgtctccaaaacctatgatgctgtaaccaccccatggatcaaaaatacgagggaacttcagtaacatgggaattccatcttctccacttcgatcacctcgggctacctatggtgagtaaaaagtaagaaaaattaaaattagtaaatacatagggtgatagtgattgtcatgaattagaatagagcataatactaaccacaatcatgacgctttccttgaaaaacttctttgagacaaacacccaaaagatgtcgtaaatgaaggcacagccgagaagtactgtaccaacctaattcaggaaacaatcaaatcaaataacacaagtatcttagggcctagtcgagatagttgctagttttaatttttaaaaactaaaaccaatttttagttttagttttttgcgatgactgagggtgaaccctggtgcagcggtaaagttgtgccttggtgacttgttggtcatgggttcgaatctggaaacagcctctttgcatatgcaagggtaaggctgcgcacaacatccctcccccataccttagcataacgaagagcctctgggcaatggggtacgaagttttatgtaagtccttttgacaaacaacaaaacaaagataacctaagaaaataagtgcttcacggcatataaatatgaatgttactattgcctgtttcttgaactcaacatactgtctttgtcgttgtaccccaattatatcactttcccaaaatgataattttgacagtcttttgccattagtattgctctctaatggatattgtacttattctattgcagagtgcctctgtggagcaggggaagtctcgcatgtaagaaaaaaatagctcattacgtgtttactggattgaattttcctttccccgttatatctcctttcagatggtaggaaatattggtgactgacttga

SEQ ID NO: 116424 - DNA, 186 bp, Glycine max
  Clone ID: PAT_MRT3847_76141C.1
ggctcgagctaaaatgcttgcttctctgatctagggtccatctataatttcttatctgcttccgggtacggaaccattactgacaccagagtccagctcccataccccgatgtactcatatgacacataccacactacggtcccggtctcatctatttaggaacaactaccttcgacttttcaaga

SEQ ID NO: 116425 - DNA, 164 bp, Glycine max
  unsure (1)..(164): unsure at all n locations
  Clone ID: PAT_MRT3847_76142C.1
gggtttcactgttnagtgtaantntcaagtcnatgtctccgggtcccggtattgacgcagcnaccgacccntgtcgccnnccancnaattccctccgttcaacgacgcaatncctcaagaaggaaagntgcaccccnaggaataattacgntcccattgtgtng

SEQ ID NO: 116426 - DNA, 387 bp, Glycine max
  unsure (1)..(387): unsure at all n locations
  Clone ID: PAT_MRT3847_76143C.1
nnnnnnnnnnnnnnnnnnttttttnnttttttaaaannaaaatttaacattttccataaatatattttgagtacagagatgacagcttgggggaataactccggagaaaaaaatgccgggctaaatggaaaaacgccacattgggaagcgcaaaaggctccccctgtgatgaaagagacttttatttacacttacccacaatattgaagacatttttgtgagggtcaaacaaacgttgctaaacacaacccaaaagggggggaattgtttttaaacttgccatagggacctccatttgtcccattatgttctttccgctggagccctcgtaaggaagtttaggacaacccaattatgggggttactacagaatgttccaagagcctt

SEQ ID NO: 116427 - DNA, 298 bp, Glycine max
  unsure (1)..(298): unsure at all n locations
  Clone ID: PAT_MRT3847_76144C.1
gcgggcaacaatattgctataaattatttactttccttccgaaaagttacaactcaaatacaattaacaaaatggaagaggggaagaggtgatccaatttccctgaacaattttcattgggaagtttcctatacttgtgtatcccaaaaaaatcggataaataatttgcctatgaagctcttatatggcatagccctggtaccggttcaattcccaggagattaaagcagtgtcttatgacagtccccctcggttgacatatnaagagtctactagtttcttcatgcgaccccacaac

SEQ ID NO: 116428 - DNA, 162 bp, Glycine max
  Clone ID: PAT_MRT3847_76145C.1
gtaaggagagcacagcaatgaccaatatatattgcagagtggttctagtaatgcagtgctgctagaagatgggaactagtgaatggcaggatcgatcgaagatctagcgtcggctctgaatgccccttagcaagagaggcaggagatgtgcctgaaactggg

SEQ ID NO: 116429 - DNA, 184 bp, Glycine max
  Clone ID: PAT_MRT3847_76146C.1
aacgtataacatttacttggaaatccagtacatgatgatggtgtccaggtgacataaatagaaaataaagacaagatgtggatggcacaacacttaggaccgctagatagacagcctacttaactactattcccatcgaaggataaactacaaagcatgcaaaatttgcattttatgatgacta

SEQ ID NO: 116430 - DNA, 300 bp, Glycine max
  Clone ID: PAT_MRT3847_76147C.1
accaacgcgcgccataaaatcaaaacactttttttccaagattatggcccgccccgagttattgtacagagacaggtataacaatggcttagcataagagggacatctcttgaatgtagatgcaaagaacggtatcactccaccttaaaggcgaggcgcaagatataaagaccatctttagacacaagctgacgaatgtgaaacattcccaagctgcagacaaactccccacgaaccaatatttcaagcacaagagactcctatgttccctgcccacaacaggctcatctaccatttaca

SEQ ID NO: 116431 - DNA, 788 bp, Glycine max
  unsure (1)..(788): unsure at all n locations
  Clone ID: PAT_MRT3847_76148C.1
ccacgcgtccggtctgtctcctggtgctgagattaaagatggaaacaaacgccccagaattatatgtgatttttttgctaaaggatggtgtatcagaggtagttcttgtagctttcttcatataaaagatactggggccaatattgaccaggaggctgaagcagacttagttactactcatcagaagaagacagttgaaagtggaagaaggtgttagggaaaatgttgagagatccaggatgaatcagcaagaagcaactcctagttggcatccatctcaagaaaaacagaagtttccgctgagggacaacttggttccagagaatagatttccatttagtgcatcagacaattattttagctcaaatctttctttgacttcaactcgtgcagatggaatggctactcttaggaaccaacatatgtacaaaggatatacttccacacttttgagccattcaccaaatttgagcctggtttctcaatttccagcttcaagtatgccactctcccagcagattctagcccaatcaggacgttcactgtcttttaacattgggtaatgtggattctaaaaaatttttgaacactgacaaagaatatctcacatctaagtccactttctctggttctggttctggttcagggcgggaagatttttctcttgntaatttgtctagggttccatcatatcctgctggatataaatcaaaaatctgttcttatgattgngaaccttctgtgccctttcgaccatcttttttattacttctattaatggatcatct

SEQ ID NO: 116432 - DNA, 493 bp, Glycine max
  Clone ID: PAT_MRT3847_76149C.1
aaaaaaaaaacccggatcatcgagcttttaaagggaccaaacatttagagcttcaaaaaaaagcagttttatattgcctcccctaccaacgggttatacataaaaacggaaacaacccaaaatcagttttataaaacagtaataaaaactaaatttagccggaacaaaaccatcccctaaaaaaaaacaatcatcacccggcaacaggaaggggcagcttgttacccatttttttggcaaaagcccccgcaaaaccccacccccaagttcaaattcacatatcagggggggaaaacccccccccccccttttccttttaaaacccacccccaaaagcaggggcatcctggaactggtgaaaccccaacacaaaatcgttcatggtgctctcaacctttggaaactccatttgggccatgccttccccggtataccaaggcaaaaaagccttcctccataacataggagggaatggcccactcactccacggaa

SEQ ID NO: 116433 - DNA, 149 bp, Glycine max
  Clone ID: PAT_MRT3847_7614C.1
gacccacgcgttcgttcatttgttcgattacgactaagttcggtggtcacaatactagaagggtggggaacaaccgaacagactgcatgggcggacacgtggaaggacacgtggggcggcccatgaatttgagaccggcttatgaacgg

SEQ ID NO: 116434 - DNA, 1053 bp, Glycine max
  Clone ID: PAT_MRT3847_76150C.1
gtgaagaacagatattgtaacttttgcaacatttacaactgagccttgatcgaagcaaagtctctaactgtgaaacccaccttatcaaatctacctctttcattgctctctctaaatttcaaatagtccaagcacacaaatggtttgtacttccttttattcccttctccaacaacttcatctggtgccaaaatcaccttgtcatcctcaaagcaccaaaagaatgatagagaaaaccggttctcatgatgtttcaaaacaactctatgttctgaggatcttagtttgtcattgctccaagcttgcaacatatcacctatgttcaccactagggttccctcagatgggtttatatctatccactctccctcatttgatctcacttgaagccctcctatctcatcttgatataagatagtaatacaactcatatcagtgtgcatcccaagcccctcaacttgatcttctataacttctggagctgagtaattgtttaccctcaagtaaccgtggcacttcttgaactcagaatcatagaacttcttctcaatgccatcccctatgctcatcaatacaagctttagaattttcttagacaaatcttccatcttactgcaatattcttgtattatcacactgaatttggagtactttttgtcaaagaggatctcagcagaattatcagcagaaacataaaagttgggtccattgactcggaggctctcaaagaatggagaggcaatgaaaagaggggtgtaagaatttaaagatgacaaaggaccaagtctaagtttagtattagaagggaggttgaagaggtgtttggatagtgtctggatctggctgcaaagatctttggagattccatggttgattatgtggaaaagaccccaatctttgcttgcattatagagagaggatagagaacatggctgcaatggctgagaaaggtccaaaatgggaatgccagcatgagatttggtgttagacataatgcctaggatatgaagaagagatgtataacatattgccacctaaatcttggctcgagcc

SEQ ID NO: 116435 - DNA, 464 bp, Glycine max
  Clone ID: PAT_MRT3847_76151C.1
acacgcaatattctttctccaaaactcaatcaagaataggtatcttctcacaacctacatacgctgtaacaaaactcattcaaatgaacctgcaatctcattttccttatttgtttcggctagtgctcatctctcactcagttatatactgaacctatgcatgttctctcaaccattcaagcactttagctccttctagtattgcttgaaccttcaggaaagtcaaaaagatcagataaattgtctagacattgtatagaatcaacatgctatgctttagaaatgcttatcagttcatggaccattttgaagatggttcaagatatttgtggttttgcatatgcatatctgaaacactgaagcagccaaaacaataaacaacaggcaacaaacttagaagcttggcccatacctgtcccctcacccgttccctaatatattcttggctttgacctcggaattca

SEQ ID NO: 116436 - DNA, 289 bp, Glycine max
  Clone ID: PAT_MRT3847_76152C.1
aaagcgtgatatatatgatcagcatggcgaagatgctcttaacgaaggaatgggtggtggcggcggccatgatccatttgatatcttttaatttttctttggcggtgggagtccctttggatcaggtgcaagcagtcaatgtaggaagcagaggctcgtagaagacgctgctcaccctctgcaggactttgtggaggacctttatcttgcaacttccaagaatctctacctctccataattgttgtatgctccaagtgcagtgtcaacggttctaattctggtgcttca

SEQ ID NO: 116437 - DNA, 838 bp, Glycine max
  Clone ID: PAT_MRT3847_76153C.1
gagagtacattccagcttacatccattagtatcacaagggaccgaacccatacaaacttacaacagaggattatttattaataaattcaaaccaaaactcctaaacatgcttaaggtcagagtaaaattctcctcaaacccaaacaatgccaaaaagtgtggatgaaaatactacctagtagaacccaaatttgaacaacaaaacataacacaaaaagaagtaacaaaccaagacttctatttgagccagtttggatacaaagttagaagggttttggagagcttctcttctgaaaaaaactttatacttataaagagaagctctcgaaaggacgcacttatgactcctatccaaaccggctttttaagaccctttttcggtgaagtgtagccaaacttatataggaacaaaaaagaggcatcctcctctaagcatgcctggcctgaaaatccttcatgaaagcgaccaatttctgaaccccagccaaaggcatagcattgtaaatagaagctctcatacctcccacagacctatgccctttaagctgaaccatgttctccttcgcagcctccttgataaactcgccctccagctccggcttctccaacgtaaacggcacattcatcaacgacctcaccgacttctccaccggacacttataaaaaccattgcttccatcaattgtgttatacaaaacctcagctttcttcacattcttcttctcaacctcacccaacccaccctgctccaacaagtcctcaaaaaccaacccacacatgtaaatcccgtagcacggtggggtgttgtagagagaattgttctcggcgtgaatcttgt

SEQ ID NO: 116438 - DNA, 1639 bp, Glycine max
  unsure (1)..(1639): unsure at all n locations
  Clone ID: PAT_MRT3847_76154C.1
acccggccacgcgtctgcacacgccgaaagagaagaagtgaaagaaagcatcagccgcggcggtgttaggtaggcggagccatggcggcgcctgaatcccctctctgttacgtcggtgtcgccaggcaatccgctgcttttcgcctgatgaagcaaatggggtgggaagaaggagaaggtcttggaaaagagaagcaggggatcaaaggacacgttcgagttaaaaacaaacaggacactattggtattggccttgagaagccaaacaactgggccttcgacaccactcagtttgataatattcttaagagattgaaagttcaagcaccgcaatcccatgacatagaggaaaaagtggaaaccaaggctagtgttcctgttgataatgaggaggattctgtccccaaaactacaagaccacaaggaagatacgcgagaagagagagggggaagcttgtctcgcaatattccttgaaggatctggaaggaattcttgttaaaaagggtgacgtatctgggagtactgataattctgatggtgaactggacatgttaaagacatctgaaattcaaaaatttgaagatgaaggaagcaaatatcctgctatacctccagattggtggggctacaagtatggttttgtctctggtggatttcttggagcagaatcaaagaagaaaaagtccatgatttctggtaaggcagagaggactgcatttttcgaagaggatcaagaaaacctttataatctagtccaggagaaatccacaacggggaagcaaggactaggcatcaaggacagacccaagaaagtagctggctgctattttcagggtaaaaagaaatcctttgatgatagtgatgaagattctgctgataacgattccctggaacaagcagcaaatgatgacttaattaaagtagaaaagattgttgaaggcaaagtgaagctgaaaaagttgtgcaaacagattttacaacaggtgcctggagaatcattgaaactgaaacagctcaaagttcttattgatgaacattcatcttcaattttgtctgatttttcttcaagaagagagtctgttgcttacttgaagcaaaagctgacaggtagtaggaagttttatatcgaagggaaaagagtgcgattggcatcaaagagaagctgaaattttgatacttctttttcttggcctcttctaattcattatattttaggagagaaagggggcagtttggaatttagtctaaggtaaatttgcattggttagctttatcaacgtatgttgtagtattaaatagcattttatgaaatttaataattttttcttttaagtttaaattttaaaagtgcatgtgtatcctggattgaatattaaaattatctgtttactcgtatagaaaataatgaatggacatggaaattcaacagggtttttttttttttagccctttaaaatttcttttctatcaagaaaagcttcaagtatattcattttgtagatcagacatcatacattaaaatgtttttgtcttttttgnnnnncnnnnnnnnnnnnnnnnnnnnnnnnnnnnnnnnnnnnnnnnnnnnnnnnnnnnnnnnnnnnnnnnnnnnnnnnnnnnnnnnnnnnnnnnnnnnnn

SEQ ID NO: 116439 - DNA, 1037 bp, Glycine max
  unsure (1)..(1037): unsure at all n locations
  Clone ID: PAT_MRT3847_76155C.1
caagcgtccgggtgctaggtgggcggaacctggcggcgccttgaaacccctctctgttacgtaggtgtcgccaggccaatccgcttgcttttcgcctcaagaagcaaaaggggtgggaaagaggtgaaggtctgggaaaagagaagcaggggactaaggacaccgttcgaagtaaaaagccaacatgacactattggtattggcctggagaagccaaacaaccttgggcccttcgacaccactcaatttgataatatccccacgcgtccgaaagttcaagctccgcaatcccatgacacaggtataaatatataatcatatcatttataatcatatacgtctttgattttccactgtgaatgtgacagacatagaggaaaaagtggaaaccaagcctagtgttcctgttggtaatgagcattctgtctccaaaactacaagaccacaaggaagatacacgagaagagagagggggaagcttgtctcgcaatattccttgaaggatcttgaaggaattcttgttaaaaagggtgacatatctgggagtactgaaaattctaatggtgaactggacatgttaaatacatctgaaattcaaaattttgaagatgaaggaagccaatatcctgctatacctccagactggtggggctacaagtatggttttgtctctggtggatttcttggagcagaattgaagaagaaaaagtccatgatttctggtaaggcagagaggactgcgttcttcgaagaggatcaagaaaacctttataatctagtccaggagaaatccacaactgggaagcagggactaggcatcaaggacagacccaagaaagtagctggctgctattttcagggtaaaaagacatcctttgatgatagtgatgaagattctgctgataacgattccctggaacaaccagcanatgatgacttaattaaagtagaaaagattgttgaaggtaaagtgaagctgaaaaagttgtgcanacacattttacaacaggtgcctggagaatcattgaaactgaaac

SEQ ID NO: 116440 - DNA, 236 bp, Glycine max
  Clone ID: PAT_MRT3847_76156C.1
cgtcttccctacttttttttttggctttttttctgggatttttttttttcactctttcagtgttttttcctcaaaaacccgacgcaaacgggctggatcctcccacatcctttctcgccggccttcatttgaggcgcctccgcaggattccagcgttcgaattttccaaacaaaagggacccccggggcgtctcgcagggcccccccttcgctccaactggttctccccccccccc

SEQ ID NO: 116441 - DNA, 349 bp, Glycine max
  Clone ID: PAT_MRT3847_76157C.1
atcaacggatgccccgctccctctctcagtatttgttgtgcgcggaatctatcatgccgtgcgtcgaatgcttttagcaatttcatgtaaagcaaacaaggctattgggcttatggtgcgactctcagccgcagaatatgaggcattaaacgtcttttgccacacctatgcgcatgacatgccacgtaacgccgctagcatgcaaagcttattcatgacacgatccctctgctactgcttcacaacatcgcattcgttcgatacaatgacgccaccacgaaaaacaccttgcgtgagcgcgaagtctacgacgactccctcggataccccgaaatagatgaggttgcac

SEQ ID NO: 116442 - DNA, 398 bp, Glycine max
  Clone ID: PAT_MRT3847_76158C.1
ctcctgcactgtctggtccaatagcatatctgcttagtggcaacgatattctgtgtggcgattatgctaccattgatggtttgattaccaagcaagatatgaccaacatgtcatgtgtgatacgaagactttgtggtcgtgatgagacacagatgcgggaaacgacaccttgctgatggctagttgttcaacgaaggctgtttgtaccaaagatgtatgcagtgctgaatgtgcaatcactgctgtattccccctcacagttattggcactatcattacttatgaccatgctcattagacttagctatgataaatcactgcgccaggctagaccttcctgcatgtgtttacaatctttcaaagattatggcactctgtgcgtggctggtgatcataac

SEQ ID NO: 116443 - DNA, 424 bp, Glycine max
  Clone ID: PAT_MRT3847_76159C.1
gcttacagaaaccggctcttgtggtcaaggaaaccagcggcggatctcatgggactggtgttgggaagataccttctggattaacagacgcaggctaggagatatccctagccgctatggtcgaagtccgtgacgagaccggaatcgatcacgagtgaggggacattatagcattgagacgcacacacactccatactatcggacaatgataataattgtgatgacgcatcccgggctctctgcatatcgacacactccactctagaactggtcactgatggccatgaggcataggcctcaccatgagattgctgattaaccttatcatgagactcatgaggccttcgaatacatgatagggaggtgctccgcaatggatgaactcaagcatatgggattgacgaccacaactgatttgtgaaa

SEQ ID NO: 116444 - DNA, 326 bp, Glycine max
  Clone ID: PAT_MRT3847_7615C.1
ctgcccaaaaaatttttttttgggcattggcttccatacccaaattaaaattttaaaaaaaacatttcaaaatattacaaaaggcccatgttaacttttcaaaatttaaaggttgtccccatttgggtttgaagaaacaaatattaaaccttttactttcccccataaagataatttcaaattggcccaagaaaaaattttattttttttttcttaacaggaaaaaaatcattttggacaggcgatttttccacacatttcatgtaaaatctatggggccaccgcgtttagtcttttgcaaaacccccttctttataattctgaaa

SEQ ID NO: 116445 - DNA, 475 bp, Glycine max
  Clone ID: PAT_MRT3847_76160C.1
cttaaccgcaacaatccccaactcgctctctccattttctacgccatgcgcgccacttttcatcaagttggcgagagtggtcctttggctgagagatggaagtggtcgaggccaaatgcaaatgtttatacattgttgattcaaggtttagcggcggtgttaagggtttctgacgctctcagggttattagatatatttgtgaaatcggcgtttctcctggtgaggaggttccgtttgggaagatagtcaaatgccctagctgtcggatagctgttggtgttgcacaaccacaacaaggtattcagatagtgtcttgtgcaaagtgtcgctaccaatacgaacttgtttcaggagacatagtcaatattgaatcagaagaaatcaggatcttctcctgccgaacgcagcatggacattaccgcatgggaatgggggttaagatacttgaaactgatgaagcaaacattcttgttt

SEQ ID NO: 116446 - DNA, 276 bp, Glycine max
  Clone ID: PAT_MRT3847_76161C.1
ctccctcctgcccatcaaaggcaaaacacttctggggggtctggtgaacaaagcaattgaacaaacctaatgatgtcactgctggcagtggaggtggcctcacggaagaaggagagcaggcattttcagggcccacagaggatagtcgagtgtgataagcttctcgaaaggctgtgccagaagaagaagaaaggctgatctttcagaaagctccattgtcaaaaaaattaattgacatcatggcccactggtggcttgaaggggttgagcaactga

SEQ ID NO: 116447 - DNA, 454 bp, Glycine max
  Clone ID: PAT_MRT3847_76162C.1
ttatgactttgagagacatgaggactactttgtgaacttggccattcaacttcttactacttaccagaaagagctagggccttgtattaaccatatcggaacatttgtcgtgaacctcaagaatttaagtcagaggtaatacctttttaagggcatatgtttttggaaatttctttaagaatacaatattttcacaatgtcaacacacagatgcacacaaatataaaaatgagcagttgatcaaatggtcagtatattcatttgtacacaaaatatcagacttgaattttaaaaatgtacatttgcatgtgcccatttatatatggttattcgtttatccattttctccaattttctggagggtacaggttagagatgacacccagtgcagatactgaggagtcagaaagtattagtccaaggagaaattttgaggaggaatatttgaactatg

SEQ ID NO: 116448 - DNA, 1499 bp, Glycine max
  Clone ID: PAT_MRT3847_76163C.1
ggcggctgcgcgttggcggctgccgtacggctgcgagaagacgacagaagggggaagaccaaagatgaactggggaattgactagtgcggcgcgctcctattatcaccgtagacggcggaggtggcggtggtggtgtagacacggcgtgacggcgatctcttgagataaatgttggttgaaagaggaagaagaagaagagttgtattgtagaatgagccaaccaacggtgatacttgccactgcgagctatgatcacactattcgtttttgggaggccaagagtggccgttgctaccgcaccatccaatatcctgattcgcaagtaaaccggctggagataaccccggataaacgcttcctggctgcagctggcaatccacacatacgactgtttgatgttaactcaaatagtcctcaaccagtaatgagctatgattcacataccaataatgtaatggctgttgggtttcaatgtgatggtaattggatgtattctggctcagaggatggcacagttaaaatctgggatttgagggcacccggttgtcaaagggaatatgaaagtcgtgcagctgtaaacactgttgttctacacccaaatcagactgaactaatatctggtgaccaaaatggcaacattcgtgtgtgggatttgacagcaaattcatgcagttgcgaattgatggttccagaggtggatacagctgtacgctctttaacagtaatgtgggatgggagcttggtagttgcagcaaataatcacgggacatgttatgtgtggcgcttgttgcgagggactcagacaatgacaaactttgagcctcttcacaagctgcaagcacacaagggatacatcctcaaatgtcttttatcacccgagttctgtgaaccccacaggtacttggcaactgcatcttctgatcatactgtcaaaatatggaatgttgatggttttaccctagaaaaaactcttataggtcaccaacgctgggtgtgggactgtgtcttctccgtggatggcgcctaccttattacagcttcctctgatacaactgcgaggctctggtctatgtcaactggtgaagatattaaagtttaccaagggcatcataaagctacaatttgctgtgccctacacgatggggctgaacccgcaacttcctgagataatggtcataaagttatttttctccatcagctacatcttgttttgtaaataataatctgcctcttgatctttgaagtttactatagttctttgactttatgcacgtttagtcaataagaatcctcttcgtggatgatatacgctgtccggagtaatctaaatttgtaacatgagaatatttctaatattatttgtcagtaatttctcaattagagtgctcttgtcaaatagcgtggatcaaaacacaaataaatatttcatgatatcactatgcatcatttttctttcagaaaaagcttttggggctgccaaaaaaaaagaaaaaatata

SEQ ID NO: 116449 - DNA, 321 bp, Glycine max
  Clone ID: PAT_MRT3847_76164C.1
ctttgcaaaaaccctaaaccctttctcattctctctcaccaactctgcactcagcaatctgaacacaatcctcagaccaagaatcatctaataaagtcatacgacaactacatttatatttcacctataacaaccttctcacccaaccttttataaccacaaatatcactcaaatcgattatacctttatttcttaccctcctatttgcccttttaatttaatacaaaattaccctaaaccttttcatccaaaacctcaacaattttacccacatactctcaattctacatctcaaacttttaaaaattcaaccacactca

SEQ ID NO: 116450 - DNA, 3252 bp, Glycine max
  Clone ID: PAT_MRT3847_76165C.1
caagctcctaatgaggaagaggtttcccttctcctggagatgtttggactttgtcttactggaggaaaagaagttgataatgccatagtgagcagcctgcaagatttagcaacagctttttcaagctatgaagatgaagtgctggtgaagcgagaggaattacttcagtttgctcaaggtgccatcactgggttgaaaatcaattctgatgcgtgctgcaagaatagatgctgaagcctttagtcttaaaaaaaagctcactgagataacaacttcacaggggcctgtaagcaatgttgattataaagcggctgaggaaacaatagcaatgctagaggcttttaaaattgcccttgctcaaattaagaatctgttctagaactggaagccttattgctgaaaaaaaaaaaattcaagcaatggagagtctcccacctgatttcctcaaagtctctctctcccacattcagtccttaatttccggaatattggtacacaccttctaacaacagaatagagtcagaaggagagagagagagacggtggtcggtgttctttctgattctccttgatcttctttttctcttcgttattgttcccaacacattccaaaccctaaatttattgcctggctcttccatccccaatatccgaactcaaacgcggagtggcagcagagaacaaaaacatgtcatcttggctgagatctgcggtcaacaaagccgtcgaggtcggcaacaaaaacaacctcactcgcaccgtcaagaactacgccgacaccgtcgttcaacacgccggccaagccgtggccgagggcgccaaaatcctacaggatcgcattagtgctcggaattacagaagtgttgcgcagaccattaaaaggttggaagaagctgctgtctcgtataggggacctgagagagtgcagttgcttagaagatgggtggttgtgcttcaagagattcagaagttgtccgaggcttcattggctgaaggcaaagagaggactctcgagctgcaccttcgcgtttgaagaagccaagcattacccaccgaacggatctctgtttctggatcaggtttctaatcttagtcatcttccaatgcgttctcgctacgctttgccaaaactaatgctccttcttcttcacatgtcatttccaattttgcacgtgtggacagatattggttttctactcaactccccctaacagcttcacttaagccagatcgtggactggacgttggcactgacttaggaaggcagcgcagaaagttagcgaaggatattgtaggttattcagctgaagtaattggtaatcgggaatttgatgagcttgaaacaaaattgagcaactagttaggttgaatcttatttgttagtaaataaaaattgctggaagatttttatcagtaagtgaaagtatcatataaattagtaagccatataaatctactgttgattaagctataatttgcagctgattcatttgcatttgtagaggatatgaaaattgcccttactcagattagaatctgttccagacttgtagccttattgcagaagaaaaaaaatttaagcaatggaaattctcacgaaattcatgctcaaaaggttgataagctgaaggtattaacggagtctcttgccaactctgctacaaaagctgaaaagcgtattttagataacagactacaaaaagaggaagcattaaaggttcgagtgactaaagatggtgaggctagtgaaaaggagaaggaactggtttctgagatatctgaaattcaatagaagaaataagagatcgaagcagacatgaaaatgatcacctctactttagcggatactaaagcacgactatggaatgtgagggaagagagagaccagtttgaggaagcaaacaatcagatagttgaacacctgaaaataaaggaagatgaactttcaaaatcaatcagctcatgtagggttgaagcagatgttatcaaaacctggattaattttctggaagatacttgggttcttcagtggtcaaatgcagaaattaatgacaagcaggtcaatgatgaattggagagacatgaggactactttgtgaacttggccattcaacttcttactacttaccagaaagagttagagccttgcattaaccatatcaaaacatttgtcgtgaacctcaagaatttaagtcagagatacaggttagagatgacacccagtgcagatactgatgagtcagaagtattaagtccaaggagaaatcttgaggaggaatatttgacctatgaagccaagattattactaccttcagtgtagtggataacatgaaacaacagttttatgctcaacacgggaaaatttccaggaaagatgaggagagagttatagagctgtttgatgccattgaaaagttgcgaactcaatttgagtctattgagagaccaattcttgaaatagagatccctgcaaaagctgaaacgccacctttggagaaaaagtctgatgctactccttcagtttctgttccagctcaaggtgctgcagctcaaggtatcgagctttcaaagccagaaacagatgagcaaccaaaatcaccttcagttaagacagaccagatattggatcatgaagcggaattagctaagctggaatctgagtttgggaaggttagtaaggattattcagcagaggaaattggtgattgggaatttgatgagcttgaaagagaattaagcaagtagttaggttgaatcttatttctgagtaattaatgcttgctgttgtatttttatgattaagtgcaagtatcatataaatttgtaagccatatagatcggctgttgatgaagctataatttggatcagattcctttgaatttgtgaacattaccaagcatgatttctttattcttctgtaaattaacgggtttgcaacttgcagcccagtcaacaaaagatttgaaatgatcagtatggttagaattttgaacttcggatgaaaacatacctttttaagggcatatgtttttggaaatttctttaagaatacaatatcttcacaatgtcaacacacagatgcacacaaatataaaaatgagcagttgatcaaatggtcagtatattcatttgtacacaaaatatcagacttgaattttaaaaatgtacattcgcatgtgcccatttatatatggctattcgtttatccatcttctacaattttttggagggtacaggtcagagatgacac

SEQ ID NO: 116451 - DNA, 1238 bp, Glycine max
  unsure (1)..(1238): unsure at all n locations
  Clone ID: PAT_MRT3847_76166C.1
gaagggtccggctgcgaaaagacgacagaagggtacggctgcaagaagacgacaaaagggtacggctgcgaaaacacgacagaagggtacggctgcgagaagacgacaaaagggtacggctgcgagaagacgacagaagggtacggctgcgagaagacgacagaagggtacggctgcgagaagacgacagaaggggaagaaagcaagaaacaactcttaagtatggatatagatgagattcttgaaagagcagagaaggttgaagagaaggaaactgacggggaacaaggaaatgagttattaggtgcttttaaggttgccaatttttgcaatgatgaagatgatggaagtttctggagccgttggataaagcctgatgctgtattccaagcagaggaagctcttgttcctcgatctgctagaaatattaaaagttatgcagaagttgatccatctgaaaaaagtaataaaagaaaaaagaaggaacgtctaccacttgaccgagtttcgaaacgtcggaaagcagagtattccgctcctgcagtaccaatgattgagggagcatctgtccaagtgagaaattggtcatatgggaatttatctaaaagagacgcacttcgtttttctcgttcagttatgaaatatggcaatgagagccaagttgacttaattgttgccgaggttggtggtgctgttggggctgctccacctggagtacagattgaacttttcaatgctcttattgatggctgtacagaagcagtagaacttggaaatcttgatgcaaaggggcctttgctggatttttttggtgtaccagtgaaggcaaatgatctacttacccgtgtccaacaacttcaacttttggcaaagcgcattggtcgatatgaagatcctattgcacaatttcgtgtgctgtcatatctcaaaccatcgaactggtccaaaggttgtggatggaatcaaattgatgatgctagattacttcttggaatacattaccatgggtttggtaattgggaaaagattagattggatgaaagacttggccttatgaaaaaaattgctcctgtagaacttcaacaccatgaaactttcttgccacgagctccaaatttgaaagaccgtgctaatgcccttttggagcaagaacttgctctccttggtgtgaaaaatgccaacagcagagttggacggaagccttccaaganagagagagaaaatatgattaatttatc

SEQ ID NO: 116452 - DNA, 380 bp, Glycine max
  Clone ID: PAT_MRT3847_76167C.1
aaaaaaaaaaaaatatgctgaccatttggaattggaagttgaacacaaatacagagcatcaataatataaccctatggacacagacaatatctgactgaaaggtggtacataatagggataaatgagaattataatataatgggaaagagacacttatgtgaaggttaaggggaagtgtatgacctggtgtttaaattatttgactatcatttacgtaattatggagatgattcctggtcgaagacattctctttatctgcttaagaactgatgacctttgtcttacgcccaaaggatcaatggggattagccggagaaagcctaaatgactttaatcagaatgggttgttctagctcttgaaagaagatccaaaataaa

SEQ ID NO: 116453 - DNA, 327 bp, Glycine max
  Clone ID: PAT_MRT3847_76168C.1
caactccccaagcaaggctgcatgcattttttttttggggacatatcaatgtcatcctgggggtaagagggaaacaaaaaaaattgttaacaataaatagatttcaaattttatcattacatcgataacataattgagcaatgatgaaaaaaatttcaaataaaatagcaaacaagttccttccatcaaaaggcaaccttttttttaaaataaaagcagcaaatgtcatttttacaaattgggaaacattgggaaaacaagagccaataaaaaccaggttcaacgctttttgtagtactaaacccttaaaacattgcatcgccttcc

SEQ ID NO: 116454 - DNA, 2110 bp, Glycine max
  unsure (1)..(2110): unsure at all n locations
  Clone ID: PAT_MRT3847_76169C.1
cggccgctcaaggcggccggnnccggatgatcataaggaattatacgtatgatctctaagaactgctctcacagcatctgcattatgagtacccctgccttccctcggctagctgcaacacaactctgaaatttttgtgagtatttggatgatgaattctcgtgtcgttcgaagcgtttcagaatgttttatcaaaccgttgggccaagctaaagagtcaaacctaatatgtcatttaacaccatgggatattgctatgatgtctttgcactacatccagaaaggtctactcttcaagaagcctgcaacacttgttgatccacaagatttcatggagaatctgttagagaagctgaaacactctctttctctcaccctcttccatttctatcctttggcaggccaacttgtcacccaaaaaacccaagaccctccctcttatactatttttgtcgattgcaacaacactagtggagccagattcatctatgcaactttggatatcactatatctgacatactctccccagttgatgtcccacccattgttcactcattctttgaccatcacaaagcagtcaaccatgatggccacaccatgccactgttgtccatccaagtcactgaactattggatggtgttttcataggctgttccatgaaccataccataggtgatggcacttcttattggaatttctttaacacatggtctgagatcttttttcaaactcaagctcaagggcttgaatatgatgctactgttcccatttcacgccaccctattcataataggtggtttccagatggttgtggtccattaatcaatcttcccttcaaacatgaggacgagtttattgacagatttgaatcaccaaagctgagagtgagaatcttccacttttcagcagagtctattgcaaagctgaaagcaagggctaactctgagtccaaatccaaaaccagcgaaatctcttcgttccaatccttatcagcgcatgtttggagatccgtaacacgagcacggaagctgccaaatgatgagataacaagttgcaaattggccataagcaatcgatcaagattggaaccgcctcttccacacgagtactttggaaacgcagttgatgtggtgagcactgcagggttcacggcaggggaattgcttgagaaggatctaggatgggcagcatggaaggtgcacgtggctgttgcgaaccaaaacgacaaagcggtgagacaaaagctcaaagagtggttgaagcttcctgtggtgtaccaacttggtgtgcactttgatccttgtactgtgaccatgtcgagttccccgaggttcaacatgtatgggaatgaatttgggatggggaaagcggttgcagttctgagtggatatgccaacaaaaatgatgggaacgtgacagcataccaaggatatgaaggagagggaagcatagatttggaaatttgcctttcgcctgatgcagtgagcgcgctggaatcagatgaggagtttatggaagctgcttctgtggccaatttcctacactagatagtgaaagctttttgagaggctatgagattcattaattcacaaagcgctctctgccaccgtttcactcactctgctctcttcgactcttctaaagtggattatgggaaaatcacatttactggttagatgagagatctgacaatagaattagttagcacgctgtacattttaagctttgtgtgtaagagagactggcccagcgtgtgtaggaacatcatatggttaagatctcttagtcttatgttgaaattatgcatcaatcgaggagaaagattttaaatgttgagtactgccagaaagaattgggagaaatgtagaggaaggatcacttggagccatttgggagaaatattcagcagatcttcaattcggttcgggcaagcagatttttcttccgtgactaatgaacggcacttggctcccgagtaataaagttaaagcatccgtactttggttcgtaaaaagtgaaaatttctaatttgaatgtttgattttaaaacataagttaaattagattattcatcttctcatctgaattaaaaaaaaaaataaaaagtt

SEQ ID NO: 116455 - DNA, 205 bp, Glycine max
  Clone ID: PAT_MRT3847_7616C.1
catcattgtattgtacagcacagccccaacttcttccttgtgttctgttctgttctgttcgagtctttcgctttctcttctctgtttccacgcgattctttcaattttcaatagggatttagtcacatgcttttgttacattctagattccttccttccttacttaaaaattcttatattatgcatcatttctcaccaaccacct

SEQ ID NO: 116456 - DNA, 112 bp, Glycine max
  Clone ID: PAT_MRT3847_76170C.1
aatgagctgagtgtaacacttgattaccataagctaagtgttgttcatgtgctacactcagctcatgaacaacacttagcttatggtaatcaagttctacaattcggagaac

SEQ ID NO: 116457 - DNA, 420 bp, Glycine max
  unsure (1)..(420): unsure at all n locations
  Clone ID: PAT_MRT3847_76171C.1
aaatcccgggaccaccttttaacaatttggtggtttccaggagggtccggttccttttcttatttaaaaaggcctttttttgaaggattaattgccgcatcttgccaaatggccttttaaggagaaggaggaggaagaaaggtttcctcatttggtaaatattggcaaaaaaatggtgaaaaaatgcagaggcattccatttccagtgagaacgttagggagtttgctattttcaaaatttgaggcaaatgagtgggaatatgtgagaaacaatgaagtttggaatttccaccgganaagatgacattttaccagcacttaagttaagctacaatctcttgcctatntgagacagtgttttgctttgttgtccctcccctgtccaaaagattacttatttgtttaatgtatcccggtcac

SEQ ID NO: 116458 - DNA, 347 bp, Glycine max
  Clone ID: PAT_MRT3847_76172C.1
ctcgatccaaggcattcagctcataccatggattctgctcatgtgaagtatcgtagctatgatcatgcagcacgcgtgagacacagaagccaaaggactgcgagatatgaatatcacagtgctctcaagtcattatgcagcttcacatcaggaattgctgcactgggaacttgagggagatagaattgttctcattcctgacttgtctatagctgttgaggaccgacatgtgaacaagttgcctgatgtgttagcgccataatgtcaatagtggaaagtgacattgcccgtgagctttgagcaagtcactgagatatgagattcactggttcatgtggcagcagata

SEQ ID NO: 116459 - DNA, 277 bp, Glycine max
  Clone ID: PAT_MRT3847_76173C.1
ctcacgcctacgtcaacgcgagcagtatatgcaagtgtatcgtgaggagaatactacagtggttgtggtctcaggtgcaggccatggcgcaggcgtacgaacgtgccatgtcgcgaagctacccaaggtatcgtgagcgaatgaaaactgtctatggcgcacgttctacgctggctaaatgcgcacgcatcatgctagccgtgaaagcacacaacatacagtgcgttgaaaccactcatgactagagcaatgaaccaacatatgaatccaactatgg

SEQ ID NO: 116460 - DNA, 195 bp, Glycine max
  Clone ID: PAT_MRT3847_76174C.1
ccagataccgattgttcaattcaataatttagagaaaatgtggatgctggtgctgaatatgcagttaatgagctcctactagatccatataactggacttcgtcagtacttgcgcaactaaatggtatgatcatgcaccttctcacacctcatcaccaacaaccactttgatgtttatttgccggcgaacattaa

SEQ ID NO: 116461 - DNA, 300 bp, Glycine max
  unsure (1)..(300): unsure at all n locations
  Clone ID: PAT_MRT3847_76175C.1
gtcncangcncgcntgngtnanctctgaatgcggctcgaggaggnanatgggagaaggctnccnattggangcnnattgttccctganangnatttgtgcataactaacgacntancngngagttgnatanagatntcacaattangtgttctgatacctctantgnnntgcnggccaacatcnggttncatactntatgcgttgcatantgatcctgctgcnngtttatcaattganaangataagggcactanagtcgtganacnggcagtaaggngtgcttcttcagcntnagcaaa

SEQ ID NO: 116462 - DNA, 330 bp, Glycine max
  Clone ID: PAT_MRT3847_76176C.1
ccggcctgtcctttttttttttttttaaaaactgaataattgtctgaaacagcatcttgacaaagggccggttacttgactgaatcccgctttcctctatagcacagaatctataagcacctaccattaatgatggaagttttctggagtcacgttctttgatcatacacataagattctgatcgatcctcgataacacaatgtcagccataaggcttgatcagtattgaaaaagctattttctaatggggcagagaaaatatatagattcgacttggttaacttcaagcgtctgaatatggcaattcgcattgtcaactgattataact

SEQ ID NO: 116463 - DNA, 537 bp, Glycine max
  Clone ID: PAT_MRT3847_76177C.1
ggggaacaaaaatccaggcaattaaaaaccagggaataacacgaggggaaaacccaaagctttaattacccaaaaaaaagggggggacaaaaaaggatccaaaaaaaaaacccaaatggcaaaaaacaaaaacccaaggacggggaaaacaaaaaacaaaaaaaaagaggaaccccaacaaaaaaaaaaacccttaaaaaaaaaaacaatggacccccgggggcaacacgcagaggggagaaccctggaaaaaaaaagaaccgttgctaacccggggggaaaccacggcctggggggaaaaggggaaaagggcaaggggcccgggggaagggaaggccaaaaaatttgttcagggcaccatggggcaggcccaggggggccaacgaaagagggggccccatccccaggctttaaaactgaaacccaggggggaaacaaacaaatctggacaaaaaaaacaatttcgggggaggggggcccaagccccccagggaagcccatcgggaagccccggggaaggttcctgccgccggacgg

SEQ ID NO: 116464 - DNA, 243 bp, Glycine max
  Clone ID: PAT_MRT3847_76178C.1
ttcggctcgagattttttgctaccaagtaatcaccggcttaactacgtctttttcgtccccgagacgccaacctgatagcttatatttaagggatccgagtctagtttcactctaaccaactctaacccattcatacgatgctgtaatgagatgtgacttgagcggctgcggattgaattgtaattttagagtgtctgggctttcaggtagtaaagaagttgctcaaagtcaggtatctgttg

SEQ ID NO: 116465 - DNA, 1798 bp, Glycine max
  Clone ID: PAT_MRT3847_76179C.1
aaaaatctctatcttctcctcatccaaatggccgactccacccctctcctctcccaacccaacccatcatcatcatcgtctcccgacacacaagaagcaccgccatcgaaccaacaccatccctctctggggtccacagtagaactctgcataggcgagttcaactggtcccagttcctccagtcgattctggtctccctcgcatggatattcgacgcccagcagaccttcatctccgtcttcaccgacgccctgcccgagtggcactgcaccgagcggggcgccaatgcatgcaagactgccaccacagtctgcagcctcccaaagggctcgtgggcctgggacgtgcccacgcaggcctccatcgtgtcggagtggggcctggaatgcgccaactccgcgatcacgggcctccccgcttcgatgttcttcttggggtgtttgattggcgggttcgtactggcctcgctagcggactcgtcgctcgggcgcaagaacatgctcttcttctcctgcctcgtcatggccatcacttcctttctcgtcactttttcgcccaacgtctggatctattccgccctcaagtttctctgtggctttgctcgtgctaccattgggacctccgcgctcgtgctggcctcggagctcgttgggaaacggtggcgcggccagattagcgtcattggcttcttttgttttactatagggttcttgtccctgccagccatggcttacataaacaggagttcttcatggaggaacctttatctgtggacatccatttcaaccatgttctactgcatactggtgaagttgttcgttacggagtcccctagatggcttctagtgcgaggtaaaacagaagaagcggtggaaacactaaagtgcatcacatcaatcacccaaagcaacctcaatttggccataaataacatgtcccacaaggaagaaacatggaacgtggacatattctcagccctcaaaatcttgctacaaaaaaaatggtcttcgagaaggctgtcattaattatggcaatgggaataggcattggattggtgtattacggaatgccactgggcctccaaaatctatccttcaacctctacttgagtgtcacattcaacgccttatcggagttaccatcagcattgattgtgctcttcttcgtagacaagttcaataggaggagtgcaactctcctattgacaatcctaagtggtgttttcagtgtgatgtcaatcatggaaatgaagacatcatcgtggaccaacaacatccaaatagtgtttgagttagtatcgttcttcagcgcttgttcttcgttcaacgtgtacctaatttacaccacggagctgttcccgacctgcgtgaggaactcggcgctgtcgatggcgaggctggcagtggtgctcggtggcacgttcagcccgttgctggtgagtgctgcaagagggaacaagtttatgtgttatggggtttttgggttggtgatagggtttagcggggtcttcggaatattcttgcctgagacaaaaggaagggcactgtgtgatacaatggatgaagaagaaaacaaagagaaaaacatgacttgtgacatgttcctggcttgaattcagcggattttgaaaaggaaaaaaaaaaacatcgggtatgtttgtttgatggatttgccccaattggcaagtgtgaacagagagttgttatataaggtcaaataattagagctttaataattaatgcatgggaatattgatgttacatgtgttgtataaagtgaggttccttttgttgatt

SEQ ID NO: 116466 - DNA, 265 bp, Glycine max
  Clone ID: PAT_MRT3847_7617C.1
cactataatcaatttgcaccctcttcatcgatctcgtttattctcatcatacttctgctaaggcgtctggatactctggtctcagggattccacaaccacaagcatctactcctcttccgacaacatacactgcccatacgactactactacaactacgattctatgttctacccgtagtcatatcgatacggattttcacataacatagatggtcggttcagtaacgtctcctactattgcttacaagcaactcgaacattctc

SEQ ID NO: 116467 - DNA, 661 bp, Glycine max
  Clone ID: PAT_MRT3847_76180C.1
atttaattaagcaacttacttccttcccaaacctccttgaactgatgagaaggctcattgctcagcttgtctttaaatctcgaagtgcaattgtccaagaaattgcttgaagatttcataaagaaaatctacatagaaaaactagaaatggccaaaagaacaagtgcaatgaatttagcattcattttaatattattgtgtgccccaattagcatgtttatatgtatgggagaatgggagccaacttggagcacaagagctgcagaagaagctgaggctgtggcagccataccatgttcaggacatggaagagcctacttagatggtcttattcttaaagggcatgaacatgtacatgtttgtgagtgcaattcatgcaatggtggatctgattgcttcaagtttttatcagattgtattgccaacgcttcaagtggggacccatattttttggagccattttggatgcgacatgcagcaagtagcgcaattttagtatcagggtggcacagaatgagctattcttatagtgatggatcatacatttcagaagtattggttaagtacatccaaaaagttcatagcatcgttggaaatgccatcactaaaggaaggtacttcatatttggaagtggctcaacgcaactattcaatgctgctg

SEQ ID NO: 116468 - DNA, 900 bp, Glycine max
  unsure (1)..(900): unsure at all n locations
  Clone ID: PAT_MRT3847_76181C.1
cggtccggnaatatcccgcggtcgacccacgccgtccgcatatatttactcctgctcaaaacctttttccttgagattgtgatttctgaacaagctagtactagaagatggagagtcacagtagtgatgctgaggcggagaatgtaaggactcattcatcagtttcacggtggagtcctacaaaggagcaaatagacatgttagagaacctttacaagcagggaataaggactcccagcactgagcaaatacaacagattacctctaggctcagggcttatggtcacatcgagggaaagaatgtcttctactggtttcaaaatcacaaagctcgtcaaagacagaagctgatgaagcaacaaaccattgcatattccaatcgctttcttcgtgcctcccaccccatttgccaaaatgttgcctgcgctccatattgtttgcaacggagtggattcagcttttatcctcaacaatcgaaggtgcttgcaagtggaggtataagttcaactgggcctttaggcatgcaaagaatgtttgatggcatgcagagtagtgaacacccggattgtaaccgtgaagtcttaactctctttcctcttcatccaaccggcattttgaaagaaaaaacaactcatcaagtgccttcccttgcttcaacttctgttgttgctgttgatgaagatggtcatcttggaaatcagcccttctttaattttttcactactgaaccaaggtcgagagagtgattaggtgttaattgtcattgaccaaaaaaacaactaacatggcactactttgagtagcacgttgttaatcttcgaaattagttttgccttggatatttagtttaacgtagtaaccccaggcatcttcaatgatataacgatttatgtattcccc

SEQ ID NO: 116469 - DNA, 419 bp, Glycine max
  Clone ID: PAT_MRT3847_76182C.1
ctttttgtaagaagcaaggaaataacacggctacaaattgagctgaccgcctatcaaccgaagatacaaaccatgctaccctttccttaaaatctactacccttcatccaattatctaccccatctctatcccttgaccatcttctctaaacctttattaaacataactctctctctagcgaaacataaatattaccatagcttaggacttatttgattctagttaacacacaccacaaggataatctgacacgccatcaagcttttcttgtcgttatgagggtgaatttgcgactccctttccaaagcccaaccaaagtggtggctacgaagggtggttctactttcaacaaggtctctataacggacttgagcgttcctggctcaaccactttcggaggatctctccgttctttagg

SEQ ID NO: 116470 - DNA, 506 bp, Glycine max
  Clone ID: PAT_MRT3847_76183C.1
cattcggcctcgcgcttgttttttcccccattatagtttcacaactacttgcacaatcatggtcaaaaatacacttatttttatgtcttctatggatgctactgcaaaacccaccactactgcttgctctcccaataaactccctaacgctctagtctaaggacccaaggagagggtactggacagggacagacactggctcaaacacaaagcctgagccgaaaacggccacgttgcgggccttttcgtcctctgccaagactccaaatctccagcaggacgaaatggccagagatctcaaatacccactaaccaacactaactagtgctaccatttggactctttcttatgagcatgaagataacactgtggatcagatatcccaccgacaagccagcccctggattccgggaatgttcagctgatgcaatgactcagcgttcgcttatggggctactgccagtgggaaaacgtacaccttgccgggtcaccaatgatcaaccaa

SEQ ID NO: 116471 - DNA, 1927 bp, Glycine max
  Clone ID: PAT_MRT3847_76184C.1
gcctcattttcatctgaccaatgtgtggaaggtgtagttgctgttgctggtgaggccttgaggatttttaccattgaaagattaggagagacatttaatgaaactgtaattccattaaggtacacaccaaggaaatttgtgctgcaaggattctcccccaaacggaaacttctggtgatgattgagagtgatcaaggagcattaactgcagaagagcgtgaagctgcaaggaaagagtgttttgagtctgctcaagctggggaaaatggcactgaaagtgcagaccaaatggagaatggtggtgaggatgaagataaagatgatccactttcagatgagcattatggttatccaaaagctgaatcagataaatgggcttcctgcatcagagttcttgatccaaggacaggaaatactacttgtcttttggagcttcaggaaaatgaagctgctttcagcatttgcaccataaatttccatgataaggaatacggaactcttttagctgttggcactgcgaagggactgcaatttttgcccaaaaggaccataactgctggattcattcatatttataggttcgtagaggatggaagatctcttgaacttctacacaaaactcaagttgaaggtgttcctcttgctctatgtcaatttcaaggaagattacttgcagggataggacctgtgctcaggctgtatgatttggggaaaaaacgattgttaagaaaatgtgagaataagctattccccaacacaattgtctccattcatgcatatcgcgatcggatttatgttggtgatgtccaagagtccttccattattgcaagtataggcgtgatgaaaaccaactttacatatttgctgatgattgtgttccaaggtggcttactgcatcataccacatagattttgacaccatggcaggtgcagacaagtttggaaatatctattttgtgcggttgccacaggatgtttcagatgagatagaagaagatcctactggtgggaggatcaagtgggagcagggaaagctgaatggagctcccaataaggtggaagaaattgtacagtttcacattggtgatgttgtcacatgcttgcaaaaggcttctcttataccaggtggtggagagtgcattgtatttggaacagttatgggaagtgttggggcattacatgcctttacttcacgagatgatgttgatttcttttctcatttggagatgcatatgaggcaggatcacccacctttgtgtggaagagaccacatggcatatagatctgcctattttcctgttaaggatgttattgatggggatctatgtgagcaatacccaacattgccaatggatttgcagagaaaaattgctgatgaattggacagaacccctggagagatactgaaaaaacttgaggaagtgcgaaataagattatttaagaaatggtagcctgagaggtcatagtggaaatgtgttttttctggtaggccatttgcccgcagttaggtcactactaacaaagtgaagccaacttgcgtatctctcattcatacgggaacggtgatttcttgtcctatttaattcaagcggggagaaggaccatacggtcggtgactttgtactctagtgaagtgagacccataagccccagttggcaatttatgttgtaattactatttagttgcaattagctgtaatcaccctttttcttgtactcaatgagatgtttgatttaacttgatttgaaatttatagtctagaatatcaccgttttaccatttcaacgaaaagtaggttctagttctactgagttataatagagcagtttttcaaaatttaacacatgtattgtacctatcaaaatacatccgcattatgcatgaaagcgttgtttgaggacaaatatttattttattgttatgc

SEQ ID NO: 116472 - DNA, 612 bp, Glycine max
  Clone ID: PAT_MRT3847_76185C.1
aaaattgccgatgaattggacagaacccctggagagatactgaagaaacttgaggaagtgcgaaataagattatttaagaaatggtagcctgagaggtcatagtggaaatgtgcttttctggtaggtcatttgcccacagttaggtcactactaacaaagtgaagcaagcttgtgtatctcattcatacgggaacggtgatttcttgtcctattgaaacggggtgaaggaccggacggtgactttgtactctattgaagtgaaacccataagcctcagttggtaatttatgttgtaattactaatagtagcaattaactgttatcacgcgttgtagatgtgataacatgctccatctctcttctacgactctcccactcagcatcctgtcttgtactcaatgaaatgtttgatttaacttgatttgaaatttatagtctagaatatcaccgtttaactaccattttaacgaaacctaggttaggttctagttctactgagttatcgtagagcagtttttcaaaatttaacacatgtagtataccctatcaaaatacatcaacattatgcatgaaagagttgtttgaggctaaatatttattttattgttgtc

SEQ ID NO: 116473 - DNA, 285 bp, Glycine max
  Clone ID: PAT_MRT3847_76186C.1
gaaacggcggatcgcatgactcgcattcactgtgaagtgacatgcatctatactgcatgtgtctggcaaaaagaagactgtgactagctggaactcattctaacagtacccatcgcatttcatgcacgaacacatggtactgcctgagacaaataaggcatcatcatgcgtggactgtcaatgtaccgatggatgaaccagtactcggtttccacccacaacaagaccgtgttcttatagttatgaccaacggcacagaagcatctgggaatacatggatgatga

SEQ ID NO: 116474 - DNA, 354 bp, Glycine max
  Clone ID: PAT_MRT3847_76187C.1
atcaattcaattttaagccgtgccttcttcaaaaaaaaaaaaaaaaaaaaaaaaaaaaaaaaaaaaaaaaaaaaaaaaaaaaaaaaaaaaaaaaaaaaaaaaaaaaaaaaaaaaaaaaggtgcggaagttataggtgttctaaattgacaaacacatctattaaaatggccgtttttttataatgtcgcgaaagggaaaaccatggggctacccttataaactcctgtttgggaaaaacctttttgctcaagcaggttaatcaccttggaggttctcccctttttgccattttgactagagcgaagaactgctttggtgaatgggaccttccaataaagttgaaaaataaagat

SEQ ID NO: 116475 - DNA, 178 bp, Glycine max
  unsure (1)..(178): unsure at all n locations
  Clone ID: PAT_MRT3847_76188C.1
ttctggatgtgtagtcggcgaggatgcggccgttcttcatctgctttccggcgaatatgacgcgctgctgttcctgagggatgacttcctttcacatgatactagccttcacgttgtcgattgtgtcatgagacttcacctnatcgatgaatgtcttacccggtaggatttcatgaaa

SEQ ID NO: 116476 - DNA, 101 bp, Glycine max
  Clone ID: PAT_MRT3847_76189C.1
cgtttagttgtctctgtgtcactctgtgtttcattatcagcgcaggacaagaaaagataagtggaaaaccctaagctctggaatagcgttggattggagcg

SEQ ID NO: 116477 - DNA, 423 bp, Glycine max
  Clone ID: PAT_MRT3847_7618C.1
cctagattaaacaaaatgttcccacgacgccggaaaggaaattgggccaagggaagctgtgttaaaaagttattgccatgaacttaatcactggctctataaagggattaaccaccccaaatactaaaggcccaattaacatgagaccaactttaaaaaaattggggatttactatacccactaaaacttaacaggcctccaaaaaaatgtgcctggtggagtttataaaatataagcccttgaggcctgtttttccttacccttttggatcttaaagaccttttcaacataatttgggtttaaaccaaaaaagggtggggtaatcctctcccgtgcggcgacttccaaataaaacctcaccatttgcacggtagacagtccaacggtttcggggtaaccttgaccttttttcctctgcaggc

SEQ ID NO: 116478 - DNA, 398 bp, Glycine max
  Clone ID: PAT_MRT3847_76190C.1
gcgtcaagcggaagtaagatgacacaagacgacagaacggggtacacagttgaatttgttgatcgacataactagaatcagtgtgaagggcctttgtgtccttggtttcatcaattttaggggttgggaacatgcaaatgtcaaacatatgacatgttccctctccgatgtgagcactggctatggtagcccgtactccggaggtgaaatgcgcaagttggaggcttgctgtggaagcacacaagatctttgactttgcgaccattcctgacgtgtgcgttacagcagcatacgtatacatccatggcgaacaatatcgctcagactccataacagttaaccaacatgcttacgtttaagccagagacctcgaagtccatcacaatgacacatttgtg

SEQ ID NO: 116479 - DNA, 1055 bp, Glycine max
  Clone ID: PAT_MRT3847_76191C.1
tccgccactcgtacgcacgctttctggggctggagagaggagaccggtgagaactgagaaaagaacacaccacatatagagaaggtttgtgagaagtaaagaagacgcagacagtgctttgattttgattgaataaaaggaacaaaccaacaaagttatattggaaacgtgcccaacgctacttcttcgccacatgcaacagtgacgccacgccacccgcgagatccattcgtttggaatccatctatcttcaaaatgttaagaatttgagaaatgggttttgaaatccaagcaatttgagacgcgggttttgaaattcacgcgatttgggacgtgagtttttgaaattcgaggccatttggttgatgggtttgggaggaatctgaggaaaattttcaatgtcggagagcgatcagcgtcgtcttctcggggcgtccgaggatgacgtggaggctggagggtcggaattggcgttggcggtcgtcaatggcagcagtggcaacaacaacaacaacaacaaaggtttcagggatttgctaaggttgtcgggtcaccgacacagtttcaagcacattgacaaagaaggagatagagatagagatagggataggggatagagatagaagagatcagaatcggcatctccacgatgtggatcttgattcttctgttgatgtgcttggggacagtgcacctcctgaatgggcgttgcttctcattggttgcctcattggactcaccactggcctctttgtggcactttttaataaaggggtgcatataatacatgaatgggtatgggctggcactccagttgagggtgctgcctggcttcgtattcagagattggctgatacatggcatcgaatccttttaatacctgtcactggaggagtcattgtcggcatgatgtgtggtttactggaaatactggaccaaataaagcaatccacttcctctcaaacacaacgttttgattttcgtgcaggaatctttccaacaataaaggctatccaagctgcagttactttaggtacgggctgttcaatgggccc

SEQ ID NO: 116480 - DNA, 491 bp, Glycine max
  Clone ID: PAT_MRT3847_76192C.1
ctcctcaggaaggttgccatacttttcgtgggggattttggaattacttcagcatggagtacttatgctaagcttggatgcacacaaggatggtggtttgctcctctgttccttcctccttccagcaacatagcacatcttgcaaaagtaaaagtcatgaaaacacatggttgttgggaagacctgcatattccttccaggtatatcattttatatactcatatatgaccttttcttttgttatattggaagtataaacagttgagtaggcaagaggaaaaagagtgcagtggtggattgaacctctgatgtcaacagcatgcaagtcttaaaacttgggccaatgtccattgagctacaggctcattagcatatatctacaaaagtgaatgtctaaaaaaattcaggttagggggtaaactcctggattttcaaactaccaaagatccaaagccacacttaactatgcttgatagctttccaattttatt

SEQ ID NO: 116481 - DNA, 374 bp, Glycine max
  Clone ID: PAT_MRT3847_76193C.1
cttggagagggtataaaaaataatcttattgaaattttggggggggggtgtgggaatataaaaaataccaagtaattttaataacaaaaatgaaacaaaatttaaatttttgataaacaaattaaaaaaaaatataccattttggggggaagaggccggtgggtgtgacaagaaaaaaaccgggtgtgggaagaggctaagttgtggggggggggcataccctttattacctatgcccttagatccgagaccccccccatacattttatcccatttgtaaaccccttttcttgaaataccccttttttatttataaaaaaatatatcccccttattaaaatatttgtaataatatatccccttttttggttaaa

SEQ ID NO: 116482 - DNA, 910 bp, Glycine max
  Clone ID: PAT_MRT3847_76194C.1
ccacgcgtccgcgctttctgtgtctgtgagaagaacgcaccacagacagagaaggtttgtgagaagtaaagaagacgcaaacagtgctttgattttgattggataaaaggaacaaataaacaaagttatattggaaacgtcgtccgggctacttcttcgccacatgcaacagtgacgccacgtcaccgcaagatccattcgtttggaatcatcgttccacccaccttggttccatccatcttcaaaaagcaaagaatttgtctcggggcttccgaggatgacgtggaagtaatgggttttgaaattcaagtaatttgagtcgtgggttttgaaattcacgcgatttgggacgtgagtttttgaaattcgaggccatttggttgatgggtttgggaggaatctgaggaaaattttcaatgtcggagagcgatcagcgtcgtcttctcggggcttccgaggatgacgtggagtctggagggtcggaattggctttggcggtcgtcaatggcagcagtggcaacaacaacaacaacaacaaaggttttagggatttgttaaggttgtcgggtcaccgacacagtttgaagcgcattgagaaagaagaagatagagatagagacagggataggggtatagatagagatagaagagatcaaaatcggcatctccacgatgtggatcttgattcttctgttgatgtgcttggggacagtgcacctcctgaatgggcgttgcttcttattggttgcctcattggactcaccactgggctatttgtggcacttttcataaaggggtgcatgtaatacatgaatgggtatgggctggtactccagttgaaggtgctgcctggcttcgtattcagagattggctgatacatggcatcgaatccttttaatacctgtcact

SEQ ID NO: 116483 - DNA, 348 bp, Glycine max
  Clone ID: PAT_MRT3847_76195C.1
tattcggctcgagctcgaaccgtctcacttaaacgtatcttgatccttatagtctcggatatggactagcgacagccggtagctgaggagaagaactgtggagtctcaatcggacgaacctgcctctctatctgcgtctcgatctgtgaacgtgaccttgcataggaagatgccgagtacatgtccaactcctccatcgagaggtccagcatggcgccaaaagattcctgagcccgggatgaccccagcactggtgaggctcaaagatccttacatggccgttgggatcccatctatgctctactggaaggtactcccggcaggaaatgcatatccaagttctatagc

SEQ ID NO: 116484 - DNA, 626 bp, Glycine max
  Clone ID: PAT_MRT3847_76196C.1
gttatagtgatgcattattaaccaaaggggttccaccaaaagcaaaggcaatagaataagagtctccacttcaagttgcaccaaaaaaacaaggtcaaacccaaaaagaaaggtagggagcagtgaatttccattccatcaaaggatgggaacccaacacaagaacgaggaatttaaaagtgaacactacagaaaaaaaaaatgtcctaattgctctacaccctcttatatataaagatggtgattttaatctctaggccacaaaaatgaaccagatttgagaacatcccttgtattgaagaacaccctcttaggatacccttttgttaaagccaagacttttctcagatttgagaagaagaagaaggtgggggaggagatagtaatagggaaaacataagagagagaaaaataaagcacaaacgtgaggccgttgttgaaacacacaagttgtgttcctgttgtgaatatcttaaatttctcaactagtgttcgttagtcgtcctataattgaaccatgaagtagtagtgaagaactaatcagccacaaatccaaacgacccctttagcctaaagctccctccttttctccaatggcaacatgggttttatcagaatgtggctta

SEQ ID NO: 116485 - DNA, 1847 bp, Glycine max
  Clone ID: PAT_MRT3847_76197C.1
ggctcgagtctctctcctctgtcttataactttacctttctatcctcatggagtagtaaagaagtaactaatcaaccacaaacctaaacaaccccttttgcctaaagctccttccttttctccaatggcaacctgggttttatcagaatgtggcttaaggcctcttccaccagtgtttccacggtcaacaagacccatttcgtgccaaaaaccttcaaagtctagatttttaagcacaaacaagggtgtgccagatctgaatctccaagcaagagggttaacatgctgtagttttagggatagaaagtgggaattgggagtgagtgctccactgaaagttgccaccaatgagggagaggaagaagagagaaccaatggggctaataatggggttggtgaggaagtttcagaatttgaccctagtgcaccaccacccttcaaattggcagatattagagctgccattcctaaacactgttgggtgaaggacccttggaagtccatgagttatgttgttagagatgtcattgtggtttttgggttggctgctgctgcagcttatctcaacaattgggttgtttggcctctctattgggctgctcagggaaccatgttctgggccctctttgttcttggtcatgattgtggtcatggaagcttttcaaacaatcccaagttgaacagtgttgctggccacttgctgcattcatcaattctagtaccttatcatggatggagaatcagtcatagaacacatcatcaaaaccatggccatgtcgaaaatgatgaatcttggcacccattgccagagaaaattttcaagagcttggataatgtaacacgcattttaagatttactctacctttcccattgcttgcatatcctatctacctgtggagcaggagtcccgggaagactggttctcactttaatccagacagtgacttgtttgttcccagtgagagaaaagatgttattacttcaacaatttgttggacagctatggctgctttgcttgttggtctgggatttgtgatgggtccagttcaattgcttaagctttatggcattccctatgcgatttttgttatgtggttggatttggtgacttatttgcatcaccatggccatgaagacaaattaccttggtatcgtggagaggaatggagctaccttaggggtggccttacaactattgatcgtgactacggatggatcaataacatccaccacgacattggaacccatgtcattcatcacctctttcctcaaataccacactatcacttaatagaagcaactgaagcagctaagccagttcttggtcaatactaccgtgaaccaaagaagtctagtcctcttccaatttacctcattggagaattgttaagaagcatgaagaaagaccattttgtcagtgacagtggcgatattgtatactatcaaacagaccctacacttagtagctcttccacatcacagtaaatcatccattttttcctcttgaagacaacagagaggcctcagaattatgctgcatatgacacaatttctgaactttgaagattgtgtactctcattgagtctactagttgaattgctcatgagcgaatgaatgcatgacaaatttgatattgtaaccgagtgcattttaaagcatgatcagggtgtatatgtaatgtgctctcattgaaaaacaaggaatctgtaaattgttcattcttgatgaagggtgtgctgtcttcatcgatttaattacaattttttgctcaaactcaaacaccaatgttgaatgatagtaattgaatagaattgtatcaactgatgtcattttcttcaaaaaaaa

SEQ ID NO: 116486 - DNA, 2318 bp, Glycine max
  Clone ID: PAT_MRT3847_76198C.1
ggagtctccacttcaagttgcaccaaaaaaacaaggtcaaacccaaaaggaaaggtagggagcagtgaatttccattccatcaagggatgggaacccaacacaagaacgaggaatttaaaagtgaacactacagaaaaaaaaaatgtcctaattgctctacaccctcttatatataaagatggtgattttaatctctaggccacaaaaatgaaccagatttgagaacatcccttgtattgaagaacaccctctttggatacccttttgttaaagccaagacttttctcagatttgagaagaagaagaaggtgggggaggagatagtaatagggaaaacataagagagagaaaaataaagcacaaacgtgaggccgttgttgaaacacacaagttgtgttcctgttgtgaatatcttaaatttctcaacttgtgtttgtttgtcgtcctataattgtaggttcagttgcatccttatattttggttcacatattctctgtctctctgtctctcctctgtcctataactttacctttctatcctcaggaaccatgaagtagtagtgaagaactaatcagccacaaatccaaacgacccctttggcctaaagctccctccttttctccaatggcaacatgggttttatcagaatgtggcttaagggtctcttccaccagtgtttcccaggccaacaagacccattttcgtgccaaaagccttcaaagtttagatttttaagcataaacaagggggtggcagatctgaatctccaaccaagagggttcacatgttataactctagggagagaaagtgggaatcgggagtgagtgctccactgaaggttgccaccactgagggagaggaagaagagggaatcaatggggctaatggggttgttgaggaagtaccagaatttgaccctagtgcaccaccacccttcaaattggcagatattagagcttccattcctaaacactgttgggtgaaggacccttggaagtccatgagttatgttgttagagatgtcattgtggtttttgggttggctgttgctgcagcttatctcaacaattgggttgtttggcctctctattgggctgctcagggaaccatgttctgggccctctttgttcttggacatgattgtggtcatggaagcttttcaaacaatcctaagctgaacagtgttgctggccacttgctgcattcttcaattctagtaccatatcatggatggagaattagtcatagaacacatcatcaaaaccatggccatgttgaaaacgatgaatcttggcacccgttgccggagaaaattttcaagagcttggataatgtaacacgtattttaagatttacattaccttttccattgcttgcatatcctatctacctgtggagcaggagtcccgggaagactggttctcactttaatcctgacagtgacttgtttgttcccagtgagagaaaagatgttattacctcaacagtttgttggacagctatggctgctttgcttgttggtttgggatttgtgatgggtcctgttcaattgcttaagctttatggcattccctatgtgatttttgttatgtggttggatttggtgacttatttgcatcaccatggccatgaagacaagttaccttggtatcgtggagaggaatggagctaccttaggggtggccttacaactattgatcgtgactatggatggatcaacaacattcaccatgacattggaacccatgtcattcatcacctctttcctcaaataccacactatcacttaatagaagcaactgaggcagctaagccggttcttggcctatactaccgggagccaaagaagtctagtcctcttccaatttaccttattggagaattgttaagaagcatgaagaaagaccattttgtcagtaacactggtgatattgtgtactatcaaacagaccctacacttagtagctcttccacatcacagtaaatcatccattttttcctcttgaatacaagagaggcctcagaattatgctgcatatgacaatatctgaaccttgaagattgtgtactctcattgagtcctactagttgaattgctcaagtaggaatgaatgcatgacaaatttgattgtaattgcatgcattttaaagcatgatcagggtatatatgtaatgtgttctcgttgaagaacaaggaatctgtaaattgctcattcttgatgaaggatttagttacaatttttttctcaaactcaaacaccaatattgaatacaattgtagcaagtagcaaaaaaaaaaaaaaaaaaaaaaggaa

SEQ ID NO: 116487 - DNA, 313 bp, Glycine max
  Clone ID: PAT_MRT3847_76199C.1
cgcgaccaccaccatatacaacacctacaacgcctacaccgacaccttcactacgggactgagctgtcgtaacagtgatgttacagcgcgaaagggtttggccgttcatcactgctatggccgctttcatggactgctccgaggcaaacgtcacaaatccaaaacccttggatctgcaatctcacgactgttgatgtatcttgctttcacagatatcgccgtactgagagaaggctctttgaacagcttgatgctcaatgaccctaccgagcccatcgaccatgcgacggtactcaacatctgaagaaggcat

SEQ ID NO: 116488 - DNA, 224 bp, Glycine max
  unsure (1)..(224): unsure at all n locations
  Clone ID: PAT_MRT3847_7619C.1
gttncananncgcgtacgtnagcncngaatncggctcgngcggctcgagcggcgatcacnngntgccganccttaaaaccgganacanangcaatngttacttggtttcnngaatttcnnaatntnntcctattnctttgtatacgnttnattnagggaacgganaatcactctntgtggggccanagacttcgtgaatnattttcnnttccacacnacatacg

SEQ ID NO: 116489 - DNA, 3495 bp, Glycine max
  unsure (1)..(3495): unsure at all n locations
  Clone ID: PAT_MRT3847_761C.1
gcaatcaaaaccgcacaaaacaaaaacaaaacaaaacagtgtctttgattacgagagagagagaacaaaacaatcaacacaatggcttctgagcaaatgcctcgcagagagaacaacagcaatagggtgatagagagagaggttcacgttgagacacacagaaaagagtccctccctgataagggaagggttgtgatagagagtgagaagaaggagaaagagagagagttggcttctgatagagccaggtctggaaatatagttaaggaggacaaagaggttgaagaaggaagaagaggaaaagaaagtggtggtggtggtggtgttcagcatgagaggaagtttgaaacgaaagttgaagagaagaagggttttggggaaaaggctgaactcgagggaataacaagagtggtggtgggaagagagtgcagcaaagaggagaaacaaggaagaacaagagagaaagtagaggcagagaaagcaagatcaatggagaaaactagagatgaagctaaaggaagagaacaagctgaaaccaaaggtcaaaccaagaagggtggtggtgaggaacagggaagaagaagagaagaaataggagaagaaaataaacaatccagcctcgaagagatttctaaatgcagagctgaagctgaagagaaagttaaggagagaaaggagagatcaaaacaagcagcaagtaatgaagctgccaaagagagaaacaagcaggcaaataaggaggcaacaaaggcaaaagatgtcacaagagagaagggtcaacaaggcaatcttaaaacaggaaatgagacacaagacattggccaaaagggttatggtggagcaaaggataccattggtagagtggacaacattactacaccacttgctaaaaaggctcaagttgctggtagcaccactgttcagtatgctggagagaaatcagcacaagccaaagatgctacggtaggatcaatggagaaaactacaaaggatgctaaaggaagagaaaaagcaggaaccaaaggtcaaacaaagaagggtggtggtgaggaacaaggaaaaagaagagaagaaacaggagaagaaaaacaatccagcctggaggagatttctaagcacagagctgaagctcaacaaaaagcaatgagttcaattgaaggtgctaaggagagatacgagagagcaaaacaagaagcaagtaaagcttccaaagagagaaacattcaagcaaataagagggctgaagaagaaagaagaaaagcagaaagtggtaggggtgttcatgtggataagtttgaagagaagaaggattcagtgctgaaagcagaactcgagagaagaacaagagaggtagagggaagagagtggaacaaagaggagaaacaaagaagttgtccaagagggaaagtagaggcagagaaagcaagaccaatggaagaaacaaaactggaagctaaaggaagagaaaaagctgaaaccaaagagggtggtggtgaggaaaaaggaatgagaagagaagaaataggagaagaaaataaacaatccagcctggaagagatttttaagtacagagctgaagctcaacagaaagttaaggagagaaacgagagagcaaaacaagcagcagaagctgccaaagagagaaacaagcaggcaaataaagggaatgaagaaggcagaagagaaagagaaagtggtgggggtgttcatcatgaggctaagtttgaaactaaaggtgaaaaaaagaaggatttagtgggaagagagcggaacaaagaggagaaacaaagaagcagtccaagaggaaaagtagaggcagagaaagcaagaccaatggaagaaacaaaggtggaagctaaaggaagagaaaaagatgtaaccaaagagggtggtgttgaggaacaaggaagaggaagaaaagaaaatgaacaatctagcttgaaagacatttccaagtacagagctgaagctcaacaaaattcattcaatgctactgaagctgctaaggaaagatacgagagggcaaaccaagcgacaagtgaagctgccaaagagagaaacaagcaggcaaataaggaggcaacaaaggcaaaagatgtcacaagagaaatggatcaacaaggcaatcttaaaacagaaaatgagacacaggacaatgaccagaagggttatggtggagcaaagtacaccattggtagtgtggaccacattactacaccatttattgtagaggccaatcttaaatcagaaaatcagatacaagacaatggccaaaagggttatggtggagcaaaggacacaattggtagtgtagaccacattactacaccacttgctgaaaaggccaaagctgctggtagcaccactgctcagtatgttggggagaaagcagcacaagccaaagatgctactgtgcaaactggcaagagtgctgcaaaagttgcctcagatttgagggacaaggctttggccacagggtggagtgctgcacattattctactgagataactgtggagggaaccaaggctgcaacaaatgttgttaagggagttgctgagtatgcaggacagaaggcttctgagcttgcagctatgtcagtggatactgcgaaaggtttagctgctgctgcagctggggagaatgccaaggagtacactgcaaggaagaaggtggaagctgagatggatttggaggccaaaagggaagctcaaaatcaggaatcgaaggagtggccatcagcaaaatccaccactgagagcattcaaagaggacaaggacaacaagaacagcatgagcaaggagaaaaatgggaacatggtgcacaaaggactaataagccacatgaaagcaacattgtggaaacctttgaggaaaacctaggtgggattggggaaaaaagggaacaaaaaccacttggaagcatcattggagagagctttcaaggagttcaagaaaaagggagtgaagtgatggcaagcattggtgaaaaactgggaagtgctgcacatacattagtgaagaagccattggataaggccactgagggagggagagaggtgttgggagctgtaggtgaaactgtggttgagattggtgaaaacatggtgaaaaaaccagcacagaaagtgcagcagcatcaaggtgaaggtggaggaggggtgctgaatgccattggtgaaaccatagcagagatagcagagacaactaaggtgattgttgctggagagggagaaaaggagataatagtaaaaacacatgaatttgaatatggagacttgaaacttgattagtgaattgctgcattgcatggatgttcatgacaagttggtttatggaaggaaatctatcatgaagtacatagctgcaaaaagttccacgttttatggagttgtaaaaaaataagaataagaatgtcttgttgtaatactatatatagtaataataatgtgtagntgcccgnngnnncgtataataaagttgttttatttatggaa

SEQ ID NO: 116490 - DNA, 117 bp, Glycine max
  Clone ID: PAT_MRT3847_76200C.1
aactaaaactcttattgttgagacgtagaagacgctctaaacataacatcttcttctagagccataatgcgataatgatgcttgatagattattccactccaatatagaacctttat

SEQ ID NO: 116491 - DNA, 355 bp, Glycine max
  Clone ID: PAT_MRT3847_76201C.1
ggctcgagattgctctaagcagtgaacgaaggccgatacttgatcttagggaccattgtgtggtacgacaaaacgagcaggggttgggagcacatgcacaatgcatcttccaaccctaatgacaatccaaatcgccaacccaaacaactccaatgccggatgcgagcaacgcgatggcgcggaagacacggtgcccaccgacggatacggctcctcttatgcctatttatttgcgcgctccggggggcctcaccaccgtggagcccactcggagatgagactatggctgcccgacgatatgatggacctacattcgtcggacccagttcgcggccgatcatcgacggttagcgtg

SEQ ID NO: 116492 - DNA, 359 bp, Glycine max
  Clone ID: PAT_MRT3847_76202C.1
cgagctcaagcaccgtatcgtcatggcgccgttgacgcgcaaccgggcgaccgtgcccacgttggccccgaacgacatgatcgcagagtactacgagcagcgcgcgtccgacggtggtctgctcatcactgaggtgagtattgtgctcctcgccgagctggcacgcgcaggctgtggacgacggcgtccgacaggagacacatctgacacgcaggcgacgtatccctccggtgaatcgggtggataccccaacaccccgggactgtacaccgacgagcacgtgcgggagtggaagaaggtgacggaccgcgtgcacgccaagggcgggttcatctatactcagctgtgggctctcggac

SEQ ID NO: 116493 - DNA, 745 bp, Glycine max
  Clone ID: PAT_MRT3847_76203C.1
ctgcgaaaatcttctaacaatcataacatttgtcctgcttatggtgaaaattgcagttctggctttgagtatcatctcatcaaccattgcttagataagtttgaatttatgcgttggaatgttcacattgcttgactacaactaaagtgctcctgaaggaacctcaggattcttgcccgaagatgctactcatactactgcgtttgctcatgttgagtcttgaaaatttctcagttctaccgtgctttgtggttgttctgtttttctttgttctaacttcagtttggattcttgttcagaacgaatcattcttgtgttgatggaaataattttttttaatggtttgtagagaatttcctcttcttctataaaaaaaaaaaaaaaaaaaaaaaaaaaaaaaaaaaaaaaaaaaaaaaaaaaaaaaaaaaaaaaaaaaaaaaaaaaaaaaaaaaaaaaaaaaaaaaaaaattttggaagggcccccaaaaaatttttttttttccccgccgtcgttcaaaattcgaaaaccaaattgcctaagcaaatccccgaaatcagggttttccttttaaccccccgaagaaaggatgcaaggcccgtaaaaaacaaaaggagaagggatgccgtaaagtttaaggttcaaggccccaagtatttgaacccccttttgtgtctttgttcctgaaaaacccgaaaaattgaaccaatctcttccccccggtttgagggttcaaaacctgaaaag

SEQ ID NO: 116494 - DNA, 468 bp, Glycine max
  Clone ID: PAT_MRT3847_76204C.1
aacagcaaaattcatatgctcatcccaaaactcccgttcagtacattaaagtaacaagaaactttgtgggaattttaaaagagcattttgcgggggaaaggaaaaataaatttctggcagcttttatttaaaaggaaattttagggactccaacatgacaatactaataaaaaaattgaacatccgtatttaacaaaacgaacttcaattgaaacaacaaaaacatcctacacaaacagatttttttttaaataaaaacatctcatgtttttcactttggctccataaaaattataaattcttcacttttgccccataaaaccaatgaatgaggggtgaaaactcactttttaaggcattcgtcataaaatccatatacttgagtaatctctgatgcacttaaatctccgaaagcttttttctttgacaggtctcaattagtttagttaagacattccccagcggggg

SEQ ID NO: 116495 - DNA, 262 bp, Glycine max
  Clone ID: PAT_MRT3847_76205C.1
acccactcgtcctaaacacccttgttgaccacaccttaattaaaaacatatataagcatattagcggattaatacataaaataagggaaaataaaacattttgaattcatatttacacacttgattaaaagctttcttcccttgtgacagatgtctttatgtactaataccttccctgatcttaaaaacaactccctaactattcacacttaatactcttaaaccacacctttttaatttttccgactcttttctcaaataa

SEQ ID NO: 116496 - DNA, 174 bp, Glycine max
  Clone ID: PAT_MRT3847_76206C.1
gtggctaagctgcagatgaagtggtgggcattcgcaactaaaaaagattttcagtggcctggaggggggaaagaatctctgtcttataccagcacgacgataatttgacgaacatttatccaaaatttgtttaacgatattcaaaagcctgcctatacaccagctgggttttta

SEQ ID NO: 116497 - DNA, 335 bp, Glycine max
  Clone ID: PAT_MRT3847_76207C.1
cagttattttggcggacgcgtgtgcgcacactggcagaaggttcttcccgtactgttctggcaggatcacctccgttgctcatacccccgcttgtgccaaagagcaagctctgacggaggggaactttgccttagaccttaaacatccctgtacattggatatagtgacctctactaaaccacaatacgcttgaggccaatccttaaaatgttagatattaggtgctggtccacattctgcaggatacatgtctcaataggacgatcacatcaatcgcaaaatgattggtcaccggtcgacacaaggcatagatcctcaatgcaatgcgcgttcg

SEQ ID NO: 116498 - DNA, 341 bp, Glycine max
  Clone ID: PAT_MRT3847_76208C.1
ctaaacaaacacagaccctgtgtaacatagtactataaaataaattttattctttttaccactcccaacaacaactaacttctcacattacattattccataacacaaaaatgatacaaaattacaaacatcaatagtcttgtaagacgcatattactcttcatgctaaaactgaaacccctactcctccaagagatgacaaatcaccatcctctaatacaataggccaaaagtcccatctcaatgcctccttttccttagaacataactgtcctatgcatatatatatacaaaaataatttttttctaatcacccccaaaaacattgaaagattctttac

SEQ ID NO: 116499 - DNA, 341 bp, Glycine max
  unsure (1)..(341): unsure at all n locations
  Clone ID: PAT_MRT3847_76209C.1
gaaaacctaaattattcgatacaccgagctctacttatttaatctccaccacctttctcttttctccacatgggggagctccaaaattcatacgggtggtataaccaangacttctcttattgacaacatacattcttttatcctgccatcacttagtctacacaaagccattctcataactctatttactatcatgcattgatgactctttttatactctctgcataccgataaacatgatctcttattattataccaccttcagctctagtcctataaacacaaatacgaccatttatcattatatccctattactcatgacataattactacgttaac

SEQ ID NO: 116500 - DNA, 810 bp, Glycine max
  Clone ID: PAT_MRT3847_7620C.1
cggctcgagcaagacctcaacaacgagaaaactcaagaaacattcaactttcacttataatgtttacaggttcacactcggggttaattaccattgtaactcactctggctcataagtgtgcttcattacgatccgtataacttcgagtccttgtgggtcagggagcattcaagtagcgaggtcctaattattaacccgttttacttttctggaatacaaggcagtttaaccatgcagaccccaaagacaagaaatactagtagtagctcctctgaagtgccccagaaggtgtcccctcgtggtggacgccaactcaggcctgctacattagacagtactgcatcttcattaaataaaacatcaaaggataatagaagtcccaaactcaccgaccgcagatcacccagaagccccgcaccagagaggaagcgtccaagcagaatatctgaattggaatctcagatttctcaactcaaagaggatttgaaggtggtgaggaaccagctcggtgtgtctgaatcatgcaagaagcaagctcagcaagatgctgaagagtccaagaagcaagtagcttccctatccttgaaacttgaagattctcaacagcaacttgtgaagttctcagctactgaacaagctcgtgttgttgagctccagaaaaccatagaagagcatgataaggcgtggcaatccgagctcagggctgcccaacagaagctctcagacaacacccttgcgcttacctctgccatcgacgaaattcagcagctcaaggttcagcttgaattggcagctaactgtgagaatgc

SEQ ID NO: 116501 - DNA, 312 bp, Glycine max
  Clone ID: PAT_MRT3847_76210C.1
ggggtgacaatgagatttcataccaagcaaggcgtgcacacacaataagaatctactcaaattgttgcttgaaaccaggctcagacacactcaattcattcgctatgttgtatcaggtgtgcgccacaccccccttccattatagtacctatgctgtattccacgcttttccggtgccaaaaatacgttccgtacgaaaacctctgttatccacgcctgcgccggcctccatttcagtccagccagactgcaaaacataccaagacacagagagcgaggacgttcatccctacttgcccactccctgaagaa

SEQ ID NO: 116502 - DNA, 369 bp, Glycine max
  Clone ID: PAT_MRT3847_76211C.1
gacattcatagatcagaatattagacttacatacgggtgaacatgatagcggcagaacatgattggagctcaatgctatacatacaagctgacgcaccaccctgttatatctgaaagactactttgtatacacttacaaaacttaagcttacataccaaaatgatgcacacaataaattcgcacgtttatttgccaatgagaggtacgttggaaggaaagaaagccacacacctcacaccatacatctctcattacatggagatgctgcacgggaatgccctctgatagtaaggctcttacccactggtaggaagaagctcagagaatggcatatagcgccggaccattacggtctactaaggcttgaa

SEQ ID NO: 116503 - DNA, 327 bp, Glycine max
  unsure (1)..(327): unsure at all n locations
  Clone ID: PAT_MRT3847_76212C.1
aatantgtaccagacaaaccgcgaaagaaccggggcacataaaagccagatggcgggcacacccccaacncaacggnccaagaagcaccaaccaccaccgcagcaacaagagaagaaccacagggcaaacgccaacacccccagagaaagcaacagaagcaaaagccgggacgaaagggaaagccagccacgacaaccacaggcaagccacccacacnacagggaaaggcaaaaacccacgcacacggcaaggaaacgcacgcgaagaggccaggacagncaccaacaaaaaacccacacgggcaggaacaagaggcacgccccaaa

SEQ ID NO: 116504 - DNA, 391 bp, Glycine max
  Clone ID: PAT_MRT3847_76213C.1
gatataaacacatccaacattgatcccatttttattcaataccggggcagatggcattaaattgacaccaaacttattaattactatacgccaactttcactaccgacctaatttactatgcttcctaaacactatataacatcacttttttttacatgaaacatattcaagcgttaccaccgtttttttttaaacccaaagtacaggttttgtataatctattctgaggaaccgttcctatgtgcccagaggattgttgtgagaataattacggacgcatcccatcacatttgcaaagtcccgcctgcacaccgaactaataggaactattctattatttcggatcacaatctgatacgatgggatttaagagtcttaccagtcactggc

SEQ ID NO: 116505 - DNA, 503 bp, Glycine max
  Clone ID: PAT_MRT3847_76214C.1
agttgtaaggggttttaaacacttttcactatatccacaatggtcttctaaatggggagttacatatgtacaaaaaacaaatctagcgtataactattaacaaggaaaaagcaagaaagatggttctatatgtatacttctgattacaaaattgatgttacttagtttattatgacaccatgctagttgatccctagatatttttgacatgttcaacactctccaaaccagtttcatgtccacttgaggaaaaaagttaagcaaatgatctcttccatcttcctcatgcttttggaacttctttattatgctacttctcttcaaaagctcattaagtctcttttccttctttcgaagttctgcttgaatctccctaagaaattctgaatctgcagggtcttggagcctttacttgagtttctttaggacctttatgagcccagctagatgcatctttatcagcttttatgaaacgcgaaattttcttaattgattcttctaaa

SEQ ID NO: 116506 - DNA, 800 bp, Glycine max
  Clone ID: PAT_MRT3847_76215C.1
ggcattgctaggggccttgtataccttcatgaggattcacgattgaggattattcaccgtgatctcaaagcaagcaacattctcttggatgcagagatgcatcctaagatatcagattttggtatggcaagattatttgaagtggatcaaactcagggaaatacaagtagaattgttggaacctttggatatatggcaccagagtatgcaatgcatggacaattctcagtgaaatctgatgtttttagttttggtgtgctgattctcgagattgtaagtggccagaaaaatagttgggtatgtaaaggggagaatgcaggggatctactaacctttacatggcaaaactggaggggagggacagcctcaaacattgttgatcccacaattactgatggttcgagaaatgaaataatgagatgtatccacattgcgttgctttgtgttcaggaaaatgtggctgatagaccaaccatggcttctgttgtacttatgcttaacagctactctgttacgcttccattgccctcactgcctgctttcttcattgatagtagaagttttccagccattcaatcagaagagtataatccaatggcagcaggagcatcagatgaatcaaatgctcgatctgtccaagaatcaataaacgaggcttccattactgagccatttcctcgctagagtttactgaaaaaagtgtcaccttcagacttatagtcaccaatttttgatttcttatttctctttttaactgtacccaatacccataataaacttgatttaagattctctttttt

SEQ ID NO: 116507 - DNA, 1035 bp, Glycine max
  Clone ID: PAT_MRT3847_76216C.1
cctacgcgtccgatcacagtttgcactcacaccaggcggctttcatcctcgtagttcaactggcacaccctttaaagataggcctgaggctgcaaattaaagcatttacacaatcacacgatgctgaattttcttaatttttctcttctattgacgctgttgtttcttctgtggaagcctgcgataagcaaaaacgggtgcacggataagtgtggacgcgttcgcattcaatttccattctacctcagaaataatagcaaattgaatcacaccaccaccgcctattcttctgggttcgatctgctatgtacggatgcagatgagactgtgctggagctgccttctgttccaataaaactgtttgtcaaaagcatagattacaagttgcagcaaatccaaatctacgaccctcaaaattgccttcccagggaactcataaaactcggcaattcctctgttgctccatttaaattccaatcatttggtgggaataatgtttccttcttgcgctgcaactcaatgtcatcatcatgcccaattttgcaacttggatatgatgaaggtgactttattgatcctgaaataatatcttgcaccaaggtgagtgatgttttctccgtccagtggcaagtgaataattacttggggaacgcggtggttatggaatggtccaagcctgactgcagtacctgtgaagcacaagggcataaatgtaaatacaagaatggtactcaaggtgaaactgaatgtttcatttgcccaacaaacaggatttcaacatcaagtgttgttcttattgctgcagggggaatagttggaatgattcttttgctggtggtggtcaaggcgttgttgcatttgtatgaccattatatgacgaaaggagaagaccgggctcgaatggagaaattcttggaggattatagggcaatgaagcctactagattcacttatgctgatattaagagaatcacaaatgggtttagggaaagtttaggggaaggagctcatggagcagtcttcaaaggaatgctc

SEQ ID NO: 116508 - DNA, 384 bp, Glycine max
  Clone ID: PAT_MRT3847_76217C.1
ggggttaggcttgtataaacccccatccctttttttaattttggaatcgaaatatccaatctaaataatccaaaaattcactcttaatcttgacagtgatatattgcggcatatgtaaaccctagatgggaaaataggcagacttcttcctgacaaaaaaggtgtggcaaaaaaatatgctaagtataaacggcaaactgatcaaatacgagcgctgaggatatagaaaaaaaaagaattgtaaataaggtccagagccggcttccatagagaatatacatgatatcgtctataacgatcgaaaaaaataaaaaacttccgaaagattttatacgattgaaattttagaaatgactgggataaactcaagaattcaattattga

SEQ ID NO: 116509 - DNA, 428 bp, Glycine max
  Clone ID: PAT_MRT3847_76218C.1
gaggcttcagtgataccattgtagttaggatgaaggtcttgaggttgaaaactttactggaagcggggctattgctggggcctattcaagggcatacaaagaaaccttatacactgaccaatgtaaatggtataactgttggaatcggcgcttagctgtcatggcttgggatgagacgcattccaaggcttgatcaaaccataatacatactggctgttcacaattaaacagactgcttggtacgggaggtatacagatatcacatgcaagttggaggacctaatatgatggcaactcacggagtcctacatcttacagtttacgatgagcttagaagtatttcttctatcttagagtggcttagctacatttcttcttatgtaggtggtgcacttcccattgtaaaatcgctagatcctccaaaaga

SEQ ID NO: 116510 - DNA, 2433 bp, Glycine max
  Clone ID: PAT_MRT3847_76219C.1
ggctcgaggctatcccttatggacaaaggatgggtttcctctcaatctcttcttcctcccacacccgacaatactatgtttcctctcctcggattccccgtcaaactcagccgccccaccatggaactccaccatgataaccgcaaacttgtcgctgaagtcgacttcttctctcatactccgccacccaacatcgtcaagaaggaacttgatcaaacacctcttcacattaatactggtttacaactccttactgctaacaccaggagtgaccaatctaccgtggatgacgggctttcatcggatgcagaagataagcgagccaaaaccaccgagcttgcacagttgcaagtggagcttcaacgcatgaacgctgagaacaagaagctgaaagagatgctcagccatgtcaccggtaactacaccgccttgcagatgcatcttgtgacactaatgcaacagaaccagcagcgaacagaaagcacggaaaatggggttgctcagggaaaggtagaggataaaaacgttggtgttggtggagggaaggtaccaagacagttccttgatataggtcccagtggcacagcagaagtagatgatcaagtttcggattcttcttctgatgaaagaacacgatcgagcacacctcaggacaataacactgaagctggaacaagagatggagcgagaaataacaatggtaataaagcgagttgggtagggaagagagtccagactcagaatcacaaggttggggtcccaataagcttcagaaagtgaacccttccaatcctatggatcaatccactgcagaagccacaatgagaaaagctcgtgtctcagttcgtgcccgctcgaagcaccgcggcacataattaataataattagtatctattcaagtatcaacaatataagcaatatattgctgtggctaaagctcgatattaatttcgtggtattgttaatataggttcaacgttgtgctgatgatagaaccattttggttacaacatatgaaggcacgcataaccatccactgccacctgctgctatggccatggcatcaaccactacagctgctgctagcatgttgctttctggatcaatgtccagtgcagatggaataatgaacccaaatttgctagctagagcaattcttccttgctctacaagcatggcaacactctcagcttcagcaccattccccactgtgactttggaccatcacacacaacccataacccaattgcaatttcaaaaggcctggtgcccccattcccaagtacccttccttcaagcacagcctaagaactttgggtcaggagccgccccaattgcacaagcacaagcactttataatcaatcaaaattctctggtcttcatgttgtctcaggatgtaggatcttctcaattagcaccacaagctcctagaccacccttacaaccaagccaacagccctcacttgctgacacagtcagcgccgccgcctccgccatcaccgccgatccaaacttcaccgccgtgctcgccgccgccatcctcctccatcataggcagtgctcataattcaaacaacaacaacagcaacaacaacacaagccggactaccattagcagcttttcaggaaactgaacattttctttttgggttcaattttttggttaatattgttattattccttaaactttttatttttgtacatgggtactataagggaaaatgaaaccataaatgttcatattctttttagtccatgtcttgggagggatatatatgatatattagatcagaaaaaaatgcttttttgtatcaactttctctttgaataattaataatgttttatatttgatgcagaaaatacaccaaggagtaagtcaacaaatgaagacacacataaccatccactgccacctgctgctatggccatggcatcaaccactgcagctgctgctaccatgttgctgtctggatcaatgtccagtgcagatggagtaatgaaccccaatttgctagccagagcaattcttccttgctctacaagcatggcaacactttcagcttcagcaccattccccactgtgactttggacctcacacacaacccaaacccattgcaatttcaaaggcctggtgccccattccaagtacccttcctccaagcacagcctcagaattttgggtccggagccaccccaattgcacaagcactttataatcaatcaaaattctctggtcttcagttgtctcaggatgtaggatcttctcaattagcaccacaagctcccagaccacccttgcagccaagccaacatccctcactggctgacacggtcagcgccgccgcctctgccatcacttccgatccaaacttcaccgccgtgctcgctgccgccatctcctccatcattgggggagctcacaattcaa

SEQ ID NO: 116511 - DNA, 229 bp, Glycine max
  Clone ID: PAT_MRT3847_7621C.1
tatgtttatataaaccgttatagaagatgataaagaaaaaggtaatttcaatcagcagttactactctcaacagtattagctaattgaaattacctttttctttttcttcatctattgtatgtttatataaaccgttatagaaggtgttcatctacgaaggagttagattttttttttcttttgttgttcatttataaaattctcaccgtaagtgtatatgtacgtgta

SEQ ID NO: 116512 - DNA, 626 bp, Glycine max
  unsure (1)..(626): unsure at all n locations
  Clone ID: PAT_MRT3847_76220C.1
caaggttggggtcccaatatagcttcagaaagtgaacccttccaatcctatggatcaatccactgcagaagcccaatgagaaaagctcgtgtctcagttcgtgcccgatcagaagctcccatgattagtgatgggtgccaatggagaaaatatggacaaaaaatggctaaggggaatccatgccctcgagcatactacagatgcactatggcagttggttgcccagttcgcaaacaagttcaacgttgtgctgatgatagaacaattttggtgacaacatatgaaggcacacataaccatccactgccacctgctgctatggccatggcatcaaccactgcagctgctgctaccatgttgctgtctggatcaatgtccagtgcagatggagtaatgaaccccaatttgctagccagagcaattcttccttgctctacaagcatggcaacactttcagcttcagcaccattccccactgtgactttggacctcacacacaacccanacccattgcaatttcaaaggcctggtgccccattccaagtacccttcctccaagcacagcctcagaattttgggtccggagccaccccatttgcacagcactttataatcaatcaaaattc

SEQ ID NO: 116513 - DNA, 2033 bp, Glycine max
  Clone ID: PAT_MRT3847_76221C.1
caataggatccattcacccatttttctctctcagatttcatttttcttcttcttcttctctctcttctttgtgcttattgtattttatggacaaaggatggggactcacccttgatacctcttcctctcaatctcttccattattcccttccaacgataataagatgtttcctctcctcggattccccgtcaacctcagccgcgcctccaaggaagacgatgaaaaccgcaaagttgtcggtgaagttgacttcttctctgacagaaacaaacctacacctccaccctctcacgaccacaacgttaaacccaacatcgtcaagaaggaaatcgatgaaacacctcttcacattaatactggtttacaactccttactgctaacaccgggagtgaccaatctaccgtggatgacggggtttcatctgatgcagaaaataagcgagccaaaaccactgagcttgcacagttgcagtggagcttcaacgcatgaactctgagaacaagaagctgaaagagatgctcagccatgtgaccggtaactacaccgccttgcagatgcatcttgtcacattaatgcaacagaaccagcagcgaacagaaagcacggaaaatgaggtggctcgagggaaaagtagaggatagaaagcatggtgttgtaggaatggtgcctcctagacaattcctggatttagttccgagtggtacgaccgaaatagatgatcaagtatcgaattcttctttgggtgaaaggactcgatcaaccacacctcccagctgcaataaaaatgatgataaggataagaaagagactactgatcgtccacactctggcaaattattgaaccatacgacggatccatccactagtccggaagccgctatgagaaaagctcgtgtctcagttcgtgcccgatcagaagcacccatgatcagtgatgggtgccaatggcgaaaatatggacaaaaaatggctaaggggaatccatgccctcgagcatactacagatgcactatggcagttggttgcccagttcgcaaacaagttcaacgttgtgctgatgatagaacaattttggtgacaacatatgaaggcacacataaccatccactgccaccagctgcagtggttgatgccatggccatagcagcaggtggcagtggatggttatggcatcaaccactgcagctgctgctaccatgttgctgtctggatcaatgtccagtgcagatggagtaatgaaccccaatttgctagccagagcaattcttccttgctctacaagcatggcaacactttcagcttcagcaccattccccactgtgactttggacctcacacacaacccaaaaccattgcaatttcaaagggcctggtgccccattccaagtacccttcctccaagcacagcctcagaattttgggtccggagccaccccaattgcacaagcactttataatcaatcaaaattctctggtcttcagttgtctcaggaatgtaggatcttctcaattagcaccacaagctcccagaccacccttgcagccaagccaacatccctcactggctgacacggtcagcgcccgccgcctctgccatcacttccgatccaaacttcaccgccgtgctcgctgccgccatctcctccatcattgggggagctcacaattcaaacaacaacaacaataacaacagcaacaacaacacgagcaggactactattagcagcttttcaggaaactgaacattttctttttggttccattaactttgtatttttgtacttgggtactataagggaaaatgaaaccataaatgttcatattctttttagtccatgtattgggagggatatatcatatattagatcagaaaaaaaatgtttcatttttttgtatcatcaatttctctttgaataatgttgtatatttgattcaaaaattctcttgggagtaaatagacaagggcaaatgaagaaagaatcgtctatctttattttttcttcctttgtctcgtgtttatctttaattttt

SEQ ID NO: 116514 - DNA, 1289 bp, Glycine max
  Clone ID: PAT_MRT3847_76222C.1
gcaccaggcgagagcatagcagcataatccactccttttcttttctttcaaaccaaagtccgcaaaacgtcgaaaatcccatgtttcctcctcgctgccattacacaacatgtcttcttctcttcctcctcgtactctccgacttctccatttccgaatcacaatccccctgggctgccaagaaaaaacgcatgagagacaaagttcgcaatatcttttaccacgcatatgacaactatatgactcatgcatttccgcatgatgagcttaagcctatctctaaaactttcaccaactctctaagtgagttgggaaatttgaagcttgaacacttgcctcaagactacaacggctctgcccttacgcttattgaatcactgtctagccttgttattatgggaaattatactgaattcgagagggcagtgctctggctttcagaaaatctgacatttgatgttgatgcgcgcataaatctttttgagtgcaacataagagttcttggaggacttgtctctgctcatttacttgcatctgattcttcaaagaagttttttcaaggagcttacaaaaatcagttgctagctcttgctgaagatttagggaaacgctttctaccagctttcgatacacctactggattgccgtatgcatggattaacttaaagtatggagtaatggagaatgagactacagaaacaagcacttcagggtgtggtgagaggttctctgattcttgaaatgggtgctttatcaaaaatgactggtgaccccatatatgaatcagtagctttacgtgctcttcgcaagctatggagtatgcagagctcattaaaattatttggaaccacgctggacgtggcaactgggcaatggattgaatattcttcaggaattggagctggtgttgattccttctatgaatatctacttaaagcccatatcctttttgggaaggaggacttttggaaaatgtttcattctgcttatgttgccgtgcagaaatacttcagacatggtccttggtaccacgaagctgatatgaggacaggaagagcaacttattggcagcttacaagccttcaagcattttggcctggcctacaggttcttattggggatgttattgctgccaattcatctcaccgggagtttttccatgtgtggaagaactatggagtgctaccagagaggtatttgctggattatcagatgcttcaccctactgaaaatattacccattacgtcctgaattggctgagtcaacattctacttatatcaagctact

SEQ ID NO: 116515 - DNA, 534 bp, Glycine max
  Clone ID: PAT_MRT3847_76223C.1
aaattaaaggccgggccggaaaaaccacgaaggggtacaaccacagggggggaacccaaaaaggcacaagaactcatcctctaaaatctagggaaaggaaataactaaaaaaaggcgggcctaaataaaggaaactattggccccccccccaaaaaaaccgggggaaacccatctaatccggaaccttttatggcccctaggacccggcctatcaaattcaaaggcccaaaatcggaacccaaggggggccccgggggaacccccacccaggcttcacaaaggatttccttttacgccctttcttcgcccacgggagtaacaattcctccttgggtgcccaagggcaaaaacggggccaagaggggcctgattccaaaacccctaagggaccctatgctaggttgggccccccggggaacccccccgccgcccccaccactaagcccctttaaaaaaccccaaaagaggcgccgaagggggggcggcccccgcgggcgggggaggtgtacttaaggcaaggggggggggggccc

SEQ ID NO: 116516 - DNA, 227 bp, Glycine max
  Clone ID: PAT_MRT3847_76224C.1
gctctgaagccggctcgagaaagtaatataatctatagaaagcagaaatggcatccaagaaataagaatcatcacacgacgacccacagatccacgagccaatggccacagagatagggagacgaacagacgagcttggactttccaaaatgtcgctgtcgtatcgcgtttagaacaggtgcatacatgctcgagaaagccacccgagagactatcccgcgagagga

SEQ ID NO: 116517 - DNA, 281 bp, Glycine max
  Clone ID: PAT_MRT3847_76225C.1
ggtaaccccttttttaaattattttccggttttttccggcctcgaattcgggcattttccacggccttaaggggcgccccaacaccaactgtttttttttttgccttggcccaaagcttggcgaatttcgccgctgattccgcaacttaccttaagcagcgggatgccgcggggatcgacaggccactaatgggtccacttggtttaagggttgaccagttaatggggttggctggttggggggtcgccacttccatttttggggtttccaaaccgggggg

SEQ ID NO: 116518 - DNA, 296 bp, Glycine max
  Clone ID: PAT_MRT3847_76226C.1
ggctcgagctgacatcctattcacagcgtgtttgggtgggcacttacaagcgcttgaccgaaaaccttctaaacagaagctgcaaatattcatgggtatcttctacctgcatgcgacgggattctgagtgaaagaatacatgtgtgtgtcagtgagaatgtgagatgaaatgaagcaggaaacaagaatggaagaatataagaattatccattttttgtttagcttataagcgttccagaaagttaagtgtgcagtacttatggaataaagtgacaagaattctatcttcggcttc

SEQ ID NO: 116519 - DNA, 186 bp, Glycine max
  unsure (1)..(186): unsure at all n locations
  Clone ID: PAT_MRT3847_76227C.1
ggacctgtccggaatttctgttttgacttatgcgcccgccgccttgaacgcggacgcgngggccggagcagaggggaagttttttcaaggcnaccccacgaaaccacaccaaacaaanacanaaaagcaaggnnaccacaaggnaaccaaagccaggaaancagggcagcnccgaggaaaagcgac

SEQ ID NO: 116520 - DNA, 1075 bp, Glycine max
  Clone ID: PAT_MRT3847_76228C.1
ggatgtcaccacgctcaccacacgagtccgtacggccgcgagaagcccaaacaaagggctctgcaattgccaataccaggaaaagagagagagagcaattgcatcaacaacaaattgaaaggatgtcgatcttcgagtacaacggaagcgccgtggtggctatggtcggcaagaactgcttcgccattgccagcgaccgaaggctcggcgttcagctccaaaccatagccacggatttccaacgcatttccaagattcacgacaagctcttcatcgctctctctggcctcgccaccgatgctcaaacattgtatcagcgtcttgttttccggcacaaactgtatcagcttcgtgaagagagggatatgaaaccagagacctttgccagcttagtctctgctctgctttatgagaaaaggtttggtccatacttttgtcagcctgtaattgctggattaggggatgaagacaaaccattcatttgcacaatggattgtcttggggcaaaggagcttgcaaaagattttgttgtttctgggactgcatctgagtctctgtatggtgcttgtgaggcgatgtttaagcctgacatggaaccagaggaattgtttgagaccatctcccaagcactgctatcatctgtagatcgtgattgtttgagtggctggggaggacatgtctatgttgtcacgccaaccgaagtgaaggaaaggattttgaagggaaggatggattaacttgtaagccacctgagttttctgtttagtttggagttgaatggcatgacatttacaatcctttgttaaagggtacctttgttattgtggctctttagataaatgtatcctgaaaattatttatagacggttcacttgttctatattttagattatcagtgaaaggaggagattcttgagttgggcatgttgtgagtgatctattggaatgtttttcagtgcagactggcatgcaaagcacgataatgatactagaattgcctcaaagaaaaaaaaaaataaaaaaaaaaaaaaaaaaaaaaaaaaaaaaaaaaaaaaaaaaaaaaaaaaaaaaaaaa

SEQ ID NO: 116521 - DNA, 433 bp, Glycine max
  Clone ID: PAT_MRT3847_76229C.1
aaaaggggttaactaggcttttaatttttttggccttttttttgaagaatcgggggagtcaacccctccctaaagacaaaaaaattgaaaatttttaaattgggatcaaaaaacagggtgggtatctttttcatcccgatgggggatagggggggtaaaccccattgtttgaacatgttcatcaactgggggcgtgttttgatcatccccctggcgaaaaaaaacttggaaagttctacccctgttgagagaacccctcttaactgacaaaggaaaattgggggccatggaaaaaccatttagctctggccctaagttatttatgaggggccttaaaagtttcccggcaacattttcatttgaaatatttttttgtttcatgagacattgtttgctacaagcattatcccctttttcttgctcatcccttggg

SEQ ID NO: 116522 - DNA, 391 bp, Glycine max
  Clone ID: PAT_MRT3847_7622C.1
ccacgaaagcctcaagggtcaaggtggtgttgttgacaagttgcgtgcttcttttgaaaacaagtatgcaaaaatgatgaaccttacacaaagagttgttggtgaccctaaactccttactgatgggaagtggcctgagggttagcataccccctgcccctattattaatgcatgggaaatttgtgtagtttaaatacccctaatggcacatgaggaaattctgtcttctagcgcaagtgaattcagaactgctatgaccagtaaaaatggcgagccttatgctaccgaactggatgtgggagctatagaaatcatcattgatcgttccgcaagtcctgactgctacatactggagcaatgcttttgttcgattcttaacataccaatcct

SEQ ID NO: 116523 - DNA, 869 bp, Glycine max
  Clone ID: PAT_MRT3847_76230C.1
gcatcaacaacaaattgaaaggatgtcgatcttcgagtaccacggatttccaacgcatttccaagattcacgacaagctcttcatcgctctctctggcctcgccaccgatgctcaaacattgtatcagcgtcttgttttccggcacaaactgtatcagcttcgtgaagagagggatatgaaaccagagacctttgccagcttagtctctgctctgctttatgagaaaaggtttggtccatacttttgtcagcctgtaattgctggattaggggatgaagacaaaccattcatctgcacaatggattgtcttggggcaaaggagcttgcaaaagattttgttggttctgggactgcatctgagtctctgtatggtgcttgtgaggcgatgtttaagcctgacatggaaccagaggaattgtttgagaccatctcccaagcactgctatcatctgtagatcgtgattgtttgagtggctggggaggacatgtctatgttgtcacgcctaatgaagtcaaggaaaggattttgaagggaaggatgggttgaagtataagccacctgggagttctgtttagcttggacctgaatgtcatggcgttgacccgcctttgttttaaagggttccttgttattgtggctctttagataaaatggaccctgaaatttataaatggccggtctcacatgttctatatttagattagcagtcaaaagaagatacctcagttgggcatgttgtgcatttgagtggcctattggaatgttttccagtgcagtctggcatgcaaaggtcgagaatgattccataattgccccaaaaaaaaaaaaaaaaaaaaaaaaaaaaaagcggccgctctagaggatcca

SEQ ID NO: 116524 - DNA, 990 bp, Glycine max
  Clone ID: PAT_MRT3847_76231C.1
aaactcccatatagtattaactaactttaccatcgcgcaagggtttacatcggaaaagttggtagcgaaagaacaaaggctctgcaattgcaaattcagaggatgtcgatcttcgagtacaacggaagcgccgtggtggctatggtcggcaagaactgcttcgccattgccagcgaccgaaggctcggcgttcagctccaaactatagccacggattttcaacgcatttccaagattcacgacaagctcttcatcgctctctctggcctcgccaccgatgctcaaacattgtatcagcgtcttgttttccggcacaaactgtaccagctgcgtgaagagagggatatgaaaccagagacctttgccagtttagtctctgctctgctctatgagaaaaggtttggtccatatttttgccagcctgtaattgctggattaggggatgaagacaaaccattcatttgcacaatggatgccattggagcaaaggaacttgcaaaagattttgtagtggctggcactgcatccgagtctctttatggtgcttgtgagtcaatgtttaagcctgacatggaaccagaagaattgttcgagacaatctcccaagcactgctatcatctgtagatcgtgattgtttaagtggctggggtggacatgtttatgttgtcaccccaaccgaagtaaaggaaaggatactgaaaggaagaatggactaacttttaagcgtgtttgttttgacgtactcctactttccgaggagcctgaacgtgaaaggggaaatttgttggattgacgttcatcaccatttcaaatggaaaaacaaatatgctatgatccaaccaaatcactcttttcttgtcattttgttatcctagtttggatttaattgaaaatcatttaccatcaatttgtgcagacggctatacctttattaactgttagaaagttttactctgtttcagtgttaagcagctacttccgtatttcaa

SEQ ID NO: 116525 - DNA, 245 bp, Glycine max
  unsure (1)..(245): unsure at all n locations
  Clone ID: PAT_MRT3847_76232C.1
ctcgaccgctccttccttgatacaactcataactcttttcttgtcttcacaggnttagcttaggtcggcccatatgcgcttgcctcaatggaaaagcatgacatataaaatctaagcgagacccacgggaagtcacaaaacctgcttatagagatgagttacccaaaatccaagggccagggaaggtaggaccgaaacctgtcgggttgcgagattccgaacctaccatttggggaaaagatggt

SEQ ID NO: 116526 - DNA, 222 bp, Glycine max
  unsure (1)..(222): unsure at all n locations
  Clone ID: PAT_MRT3847_76233C.1
tttaccagaaactcaagtngaataatggtaaaaatgggaaggtatcgnaggggcggggcctacccttttcaagcaatcccaaggtaaaacacaacacacaccaggcaagggagcaaggggttcaaaaataataataatactttggcaacaaacatcatcaatttttaaataatgagagatcgaagaaaacaatgggtatcaatttaattttaggcccccgca

SEQ ID NO: 116527 - DNA, 251 bp, Glycine max
  Clone ID: PAT_MRT3847_76234C.1
cccacgcgtccgttttaatgtttagtggatcagagggtagggtaaatagtaataagctagaattaaactaactttaaagcaggagactatgtaattgcatccgctgttgaataataagatggtgaacactttatacttcgtggagctcaccggtgttagcgttggcggggaaatcgtgaccgttccggcggagacttttgacgttgatcaatcgggcgccggtggtgtcattgtggattctggaaccgcga

SEQ ID NO: 116528 - DNA, 508 bp, Glycine max
  Clone ID: PAT_MRT3847_76235C.1
cttcaaagggaaccacgatgtcgaggaggtgagaattgcaaactgagaactatgttggaccaaatcaccaaaaactacaaccagttacaattgttcattgctttgcagaagcagaagcagtgtcagaagatggagacaaatttaaatgggatgatgtttggtcaacatttattggacccacgaggaccattcaccaaattagacgctcaagttgcaccatttgcagatgataaatctggtcaacggggtcatcctgaaactgatcctgtagaagatgttcttgaacaatcaacctcacagagttggggctcatccaagagtcccaagtttgaagagtccaactctagtgagcttcctttaaaaaaaaccagggtttccgtgcgtgcaagatcagaagctcctctgattagcgatggatgtcaatggaggaaatatggacaaaaaatagccaagggtaatcctggtccccgtgcctattatcgttgcactatggccgtaggatgcccgg

SEQ ID NO: 116529 - DNA, 355 bp, Glycine max
  unsure (1)..(355): unsure at all n locations
  Clone ID: PAT_MRT3847_76236C.1
cccggggggacccagcctccgcagaaacttctggaataagaagaggggggggggggggtgaaactgcgaatattcaacctaaaaggggaagcggtagggggactgagaaccaaaagcggtgtccaagagccaaagcggtgagtgtttcccagaagaaaaagagtagcagagatgttcatgaggcgagaggtgctnatnaagggggggggtgtngaantaantccattaaatgcgattttacgactggggggaggttgagcaggaggcgtttaacatgaaagaaagcgaggagggtatttcatttacatttacatctcccttgaggaggagcatgcctgagtcatcatcctctact

SEQ ID NO: 116530 - DNA, 323 bp, Glycine max
  Clone ID: PAT_MRT3847_76237C.1
tatgacgtcatagcacgcccacgtaagcggagtcctctaagcgggcgttttttttttttttttttttttttttttcgagagctaacacttgatgcgagagaaaagagcgggcccgtgagaaataatggacacatggaaaacgaatgctgagatgcgtatcgaaaataaaaccagggggcgccatgaagtaacacaactattccttgttgatgaaaaaaacaacagcacacacacgactaagaaggatgagcacagccatcacagggcgcggcggccaagtctcaggaaataaagcactgccagaccacacagcccacccaccc

SEQ ID NO: 116531 - DNA, 518 bp, Glycine max
  Clone ID: PAT_MRT3847_76238C.1
gatctatattttggcttgactcgccccgttttttctttttcgtgccgggttgccgaacttccttaccctatggagagtgataccacaggcggaccatggcgtggccagagctctgtcctgaatggaattgggatcacacaccaccttcacacaatattcgcaccccaaacgtgaagagactagactgccctgcgatttaagtgacccatcttacttgaagtgcgcagcgcgctctgccccctatccagagagcgtgaccagtcaacccatttgcgtgattgaaccagccaccgcgcgaggaggggcgtcatgcggaccgcccgcgggggtggatcttctgcagtgcgccgcgcgagcaatcatatgcttgcccttcgcggcccgggcctgacagagttctagagggcaggccacgatgaccttccccacaaggcgaccacgctgcttggtgccgcttggcgaccggacattacatgagggggatatggtagtatccaaccatagtaacgagagatcca

SEQ ID NO: 116532 - DNA, 208 bp, Glycine max
  unsure (1)..(208): unsure at all n locations
  Clone ID: PAT_MRT3847_76239C.1
attcgactcgagattcaatcttctcatctcaaaacttacattttcacacaaagtttcttattcaaacaccaagagcgcttctttataggaggccggtcaaacattcagaatcanntcctctcaccattcacctttccatatatacctatcgctttcaaaaatttttgaccccttcattccacttttgaatatcattctattccattac

SEQ ID NO: 116533 - DNA, 156 bp, Glycine max
  Clone ID: PAT_MRT3847_7623C.1
acgcgacacagcagactaggaatgcgggctctagttttttatctttttgcgagaagagactataatacggggagatattttgtcgaactaatgcatacttggtaaccttggtgactatacattacaatctatacgcatgatgatacaattggcatt

SEQ ID NO: 116534 - DNA, 262 bp, Glycine max
  Clone ID: PAT_MRT3847_76240C.1
aattaatatgaattgttgtttatgaggccccaaaaaaccaccacacaccctaataataacttcaaaatgcaaaaacgttggagggggggggctaataaaaaaaaccccaaaaaacttttgtatccgtaaaaaaaagcctgcttaaaataacatggctgccaacgaacctatggtaccgaaaaaaaaatgggccaacaccccggcgaaagaaaaaaaaattcgagtgccttaaggatttccttcaaaatcaccgaaagttgca

SEQ ID NO: 116535 - DNA, 678 bp, Glycine max
  Clone ID: PAT_MRT3847_76241C.1
gcacccaaatcacattttttatttttgctcctttatactaaaatccaagtctaaaatgaaagataagggagtatggatgaaaggaaaatcctaaaaccaatgaacacgttcacaagtcacccaatgttcacacccatccacctacctatcacaacaaatcccaacaacatacattaaacccaataatctacacaaggttccattccatgtaagctcatccaacacccttctgaagagatcatagatctagagcatagtcacaagaaactgtagttgttgtagatgatggtgaagaagaagaagcaaatgaaagcatcttcttctgcttattattattatccacatgatgatacaccatgcttcttccaccagccccatttgtgtctccacactcaacactatccaaaactgcactcatgttgttgacatcactctcagtctcatgatcaccaggttgtgtgctgaacagaaaatcaatgtcttcctcaaaccctgcaccatcaaacatgcctgccaagtcatcatcacctttgcttaaagccaagtttggatcttgaaactgagacaagccagtgtacatgaagctccatggcagatcctgttcaagcacatgctccataattgtgaccagggatgatgattcttcatcccttggagtgacatggggggggtattgaa

SEQ ID NO: 116536 - DNA, 429 bp, Glycine max
  Clone ID: PAT_MRT3847_76242C.1
cccacgcgtccggaattttagaaaatggatttgttagaaatcattgcccagaaaagaaaacagattgaggatattgcaatcgaacatgggagtggtgcgaaaatgatcagacattctgatctgtttaagaaagagaaggacgcttatttggagcgacaaaaacagctgggaaaggaacagcacctttctgtcaagggtttaaacaccgaggaacttttggacgcaaagttttcattgaccggctcggattcgatgccgcgtcccgaagttgtgcgtcgattgagggcccgagggcagcccattcggctttttggtgaatccgatgcgatggctttaaagcgattgaggcgtttggaaattgaaaagacggaacataatgaggggtgggaggacgactttcatgcggcactcagtcagggtggagaatga

SEQ ID NO: 116537 - DNA, 320 bp, Glycine max
  Clone ID: PAT_MRT3847_76243C.1
gcctgcaggtgccgaatcaaattccggggcggggacgacgacgctcatattgggggcgccgcccttttttttttttttttaatgacggggggccaaatcaatgtggcacagatgcagacgctacctaccccatacaagaaacctgaaccaggggcctacagagcccttttatttcaaatcagaaattcacattaaactttctttttccaagaaaatatgcagaaaaaaacggcggaactttcaacctgcggttgacgggatactttaacatgaacacaaacccacaggtcactcttcactaaatgggggggggccccccc

SEQ ID NO: 116538 - DNA, 264 bp, Glycine max
  Clone ID: PAT_MRT3847_76244C.1
tacggctgcgagaagacgacagaagggggatgatggacaaaaatcggcgacgatccaaaggcagttcttgggtttacggtcctaagggactacactcaattctggttgcgccttatactaagatgctcgttgtggagtatcattcacctgaacggattctttttctttcttatggctgaatccattctttaaaccctaattgcgtctgcggtgtatgatttttgtcacatcacaaatttgacgaatgtggttttttctgcattt

SEQ ID NO: 116539 - DNA, 382 bp, Glycine max
  Clone ID: PAT_MRT3847_76245C.1
gctagatcccaccgcgtttcgtttttgttcatagcattgggaaatctggctgacgacaccattcatcttgaggcttttaacaacaagctggtgcagtttggagagatacaggaaaaagttgtatcgactttttgacatgaggtatttctaacagctggatcaactcatgtgcgctctgcacacaactctgtgggctgatgggtgtccatatttgtatgctatggtgcatgatatttcattggatacaataccatgtgatatagtcaatggtgttaagttggttaccataaacaatatgtgagcatatgggctcaatgctgagatctcaggttatcgtttttagtgcaccatttggtagaggatttcacaggtaactgtttgt

SEQ ID NO: 116540 - DNA, 484 bp, Glycine max
  Clone ID: PAT_MRT3847_76246C.1
gggccgcccccaaaaaatttattcaaatttagggcccccaccccggggttaccggccccccccatttatgggggaaccccaaaaaacccccggccggaaaaaatttcccccaaccacccccgagggggcccacaacaaatgcctttttccaaaagggcccccccccaaatcgggggggggaaaaatttccccagcggaaaattggtttacccgggaacggggacgggtttataaaaaggaaggcccccgggaagccttttgccttccaaaaaccccaaacgggccccccccccaaaaaaaaggggggtaaaaacacaaacaacccccacttttcccacagggggaaaaaaaaccccccccccaaaaagggggggccccccctttcccaagaaaccaccccgcttttttgaaaaaccccctggccccacaacaaacttggaaaacccaaacccccccatgggccccttccaaaaagggggggggg

SEQ ID NO: 116541 - DNA, 361 bp, Glycine max
  Clone ID: PAT_MRT3847_76247C.1
cacaattttaattttattaaaattacttcattctcttggctcattgtcctacctatcctttcaacatccacatcttcgtcaaaaccctcaccgaaaataccatcaccctttatgaggaaacctctgacaccatctacaacgtctaggtcaacatccaacacaaagaatgaatttccccacatcagcaacttctcatcttcactcaaaagcatctcaaggacagccgtaccctttcctactacaacatccacaacgaatcaacccttcaccttgctcttcttctacgtcgtggcatgcacatcttcgttaatactctcactttcaaaaccataaccctatatgtctaaaactctgacaccat

SEQ ID NO: 116542 - DNA, 368 bp, Glycine max
  Clone ID: PAT_MRT3847_76248C.1
aattcggctcgagggggcaggaaaatctagccttattgctgctatagccaactactttaagttgatgtggatgagccggagcttagctctattgtttataacccggaacccatgcgaatcatagagggataacaagccataccgcgtagaccataagtcatcggagacattggccgcgaccaaaaggtgcatgcccgaccaacaacgaaaccttgttcagattcagaatgagaccttgaccgccagcgtggtaaaggttatccgtacaggggtactctgagaggtctgggtaacaacatggatggttcagagtcaaactgcggagaggagccaattatcatattcagtactaaccgcagagagagaat

SEQ ID NO: 116543 - DNA, 368 bp, Glycine max
  Clone ID: PAT_MRT3847_76249C.1
tttttcttcgtttaagctaacacatcagtaaaactccttaacctatatatattacatccgaatccacaagctgatggctcagcctcaatatggataattttggagaaaatacccttcttctctaaataataatttactaataattgctttaaagtaaacaactctcctgcactgcaagctggaccaacaagcaagaaaagattgactttcgtaaattcatctctacaaattagtgatccgcgactctgtgatgctttgctgcaataaaatagtcattcagaaaatgctgtcttcactacacggatgacctgatattctggttcctgagtgattcataagctggttgaatgccatcatatctcctcaca

SEQ ID NO: 116544 - DNA, 355 bp, Glycine max
  unsure (1)..(355): unsure at all n locations
  Clone ID: PAT_MRT3847_7624C.1
aatctantgaaattttttactttttttagcccccaaaccaggaaaagaagagaaaaaggatttgattacgaaagaggcccgagggccagccagcgaaaagaagggacgttctaaacaaaacccccagggggggaacgacaccaaggaacgaaaaatacaacccaggcggccacaggcaaccctcatgcgaagaacattcaggagtaggggcggcaacaaagcaactacccttcagaaaggaagcggagacgaaccaacggaggaacacaagaagtggcactgaacccaacaacagagggcgcctctaaactgggggaagctaacagaaccaaaggctggggcaggctccaaggcc

SEQ ID NO: 116545 - DNA, 423 bp, Glycine max
  unsure (1)..(423): unsure at all n locations
  Clone ID: PAT_MRT3847_76250C.1
gtngnnnntanattattttaaacatttnaaatagcaaagaaacatggaaaacgcaaaaagggaaaagagattttcaaagaaataaaatatagaggtttttccaaaagcaaaagaaaaaataccataaatttaaaagtcgattacagttttttaaaaatgaaactagaatgccctatgatggaaaaaaaaaatttgaaaaaaaccaaaaagggatttttatttatgaactcaataatggtggaatcaatcaacactacaatttttaaagcaatgttggaacataattggtcttagaaacacttcccaaaaacctattagaaaaattaagatatttgctactaaaaaaatgcttgaaatatggataaaaaaaaaatatgagacttttttatatgtgttgaatttaccttggttaagaaaaaaata

SEQ ID NO: 116546 - DNA, 343 bp, Glycine max
  Clone ID: PAT_MRT3847_76251C.1
gtaatttgaatttgctgggatgaaaagcaaaaaggcataaattcattattgggggctgcgtggcgtacgtgtgatgatgatcaggttcctacaacaaggcgggaatcttggaatctaagatggggtcccacgcgcaccgtacgggacgcattgagtaagcgtggacctgaacacagattgcagaaacccaagagtagtgcatggtgtccacaaatgaagaccagtgagtgaagcgagagttggtggtgtgtgtgtgactaacacacttcctgacctctgcctcttctcccttttatcttcattctcactcacccactccattctatatctattgttcacacac

SEQ ID NO: 116547 - DNA, 356 bp, Glycine max
  Clone ID: PAT_MRT3847_76252C.1
aataccctaccgacccacctactccaccctcctttttaaaatccaatatccttatatccttcgtactacttaggtaattttctaaaaatatttaacccataaaataccattcttcaacatcattgaccttccataaatttaattcgatcaaaacatagtcatgtatcctgcaataccactactgaatgcccaaaacccccacttacaaattaaaaaacctcattttccaaaaaaccctttttgccatatagacgtttaaaaagtttaacgatgactacgataatcttaccaacttcatcaaaacttactttatcatactctttaatatagacaattatccctattcttactgaact

SEQ ID NO: 116548 - DNA, 289 bp, Glycine max
  Clone ID: PAT_MRT3847_76253C.1
attatgttgagtttttttctttttttcggttgctgaatccgttttcattgttccaaaacaagaaaaaacaccatattgcccacagccgaaatgcggaagcggccaagggatcaaaataggacacgagcacgaaaccgagaaccggaagaaaggctcccgggggagaagcgaagacccggaacgattgacggcacacccaggaagctagcacggcggcaccatcaaaataaccgaggggggggaaaccaggggtcggaccccttgggggccgccccaaaactctgggggg

SEQ ID NO: 116549 - DNA, 540 bp, Glycine max
  Clone ID: PAT_MRT3847_76254C.1
tggtatggcactttttactgtataacttccactagtaaaaatccaagactgtttgagtgaaccacaggggatctaaaatctacctattgttacgaaattgactctgcatctagacactgatttcttgattatgacaaacggcgctgcctaaacttattgtactggcctccttcaaacggccagaggacctaaagatgcgaagatctcactgtctgtttaagaacagcattaccagggtataataactcccccacctatgcacgggctgaaatgtgtcgactcttgattgtgcgtcaggggcatcaagaggttccattgaaatattgcgtgcgtatagcatgccataacatgggtctaattgcccaataaccatggatgacctgtattcttcataccttgagggcctgattgccgcactggaaggcatttgtgtccatagtctacctcactctctggcttcagcacttatggtatttgctctacaaaatggtcctatactctaaggctctactaccttgagccgatattggactgatgcct

SEQ ID NO: 116550 - DNA, 466 bp, Glycine max
  Clone ID: PAT_MRT3847_76255C.1
gatccacgcgttcgattaataaataagagacgcgtgggggcgccgggtaataggagacaggttcactgacgcgtgcaagcgtattccatatagtgtgtataatgacacctaggtgtaattaaggggatggctgtttactgcgtgaaaacgggaaaaactctgaatttaccaaactaaatgacctggaagcatataccgttttgcctggggggcctaatgaggaagatgactgaccttatttgccttgcgatcactggcccattttgaatggggaaaggtacccgccctgttgcgttaaataatccgccaacgctgggggagaggcgctcagcgtaacgggctcactggcgggttttcttttgcccagtgatatgggtaacattccgtttgtttttcaccacctgggcctgatatacccgcaaagctctaaacacgctgctttgtttaaggatgcgaaaaaccggtt

SEQ ID NO: 116551 - DNA, 164 bp, Glycine max
  Clone ID: PAT_MRT3847_76256C.1
gatacaaaagtttttcatgttttctaataaatcatatacagcggaaacgcacgggcttacctacctacggtaccggcgggaatggcaatggtacactcctagagtgtggctacatttacgatacctgcccctcatagatatttggggggggggggggtccttcc

SEQ ID NO: 116552 - DNA, 3832 bp, Glycine max
  Clone ID: PAT_MRT3847_76257C.1
ccacgcgtccgggactctttcacgacctattttatcgcaccatttacttgatatttcctgatgatgactgtagaaagcgctttgcctgtcactaaatatacagcagctcaagactttctgagagaacatggcaagcccactatgttctcagagcgagcgaaaggtttgagagatgcactgagatctaaaaaagaaaaggcgggtgctgaaaaaactactcaacaaaatgccaatgggtccatcaaggctaatggcactacttcactaagcagcattcacaataaagacaaaccctggagtaaagagaagattgatctattgaggaaaggaatgccgaagtatcccaaaggaacctcactgagatggaagggtatttcataatacattggtactggaagatctggagaagaaattatgaaagcaactaaaactgtactccttcataaacctgattcgtcaaaagcttttgacacattacttgagaaaaggaaacctggtgcacactccgagagcgggtccatgacgtgattcctcctgttgtcttctcttctcatgagacgagtgagtacaagggtagaagtgggtggagtgatgatagttgacaccattgggcgctgttatcgaagttgttcgttcaagattgtacatgtcttataagcgtaaatgcatatggttcttttgtggattactccctccttttttcatggcttgccacaaggacctatagcgacaaaattgagctgtttcatctttctatattctgaaggacaccattatggatgtacgtacagaattccctctgatgacttaattaaaagatagatttcttgtggagcctatttttgtcacgtcaaacagtaatcccaccgagatgagaggattttaaacaacaggttagtacttcaagttctcttaacgaaaacttcttggcgtttagaacggtaacgattcagatgacgatttcaacgaagttgataataacgtttacatggaaaaaggaaacgtgatgcaaaaatgaattgagtctccattgacaaccagagaagaagtatgagtgccagctcctgccgcctctacaaataatgcagaagactctcagaactaaggtacagacaatcagcactgccctgctaatggagtctcttccagtccagaatagcatgtgtgagctgctgtgcaggaacgagcactagttcaagctttacaagcctttccaaaggaaacaagccagagatgggagcgcgttgcagctgctgttcctgggacgtgaggctgaaaagcatatctccttgcattggacatcagaccccattagtgacatggtatcagattcaattgttgctctgattttaaatttctaccgtgatgtccccgcaatcttgatcgcgacagctcaggttataattgggaaagaggattgcaagatggacaaaaaaggcttgcacgcccgacttggtacgcatctgcgctcttgtggatactgctgaaaacggaaatctcagaattttgcgtagatgggaatgtagcagtgctcaaaaaagaaagtggggagggtgagagtgaaaacgaaggtctcaaaggaagaataagagcagctttccaccgcattggagattctgtaaaaccaattcctctatatacaccgtaactttctcctctccttacattgtgttgggaaggtgagaggccattgctccgtcatccgagcgtgcccgtccccgcccgctttcggcaccttttctggcccatcattcatccgaaattgctcatgaacttggaaacatgcttgccgggtgctcctagtgataagcagctgctgaagcaactcctaatgttgttagaacgactatttacaaagcatctactacaattgaacgccaaatccgtttctaattaaacacgtatcggctttaagtagcattgaagttttcaaagatgtaggaccatctgtggtgatggcaagccctggtgggcttcagagtggcttgtcacgacaattgtttgataagtggtgctctgataagaaaaattcttgtgttttaccaggatatgtagttgaagggacattggcaaaaaccatcatcaatgagcccaaggaagttactctcatgaatggactcactgcacctcttaacatgcaggtgcactacatttccttttctgctcatgctgactctgctcaaacaagtgcgttcttagaagagctcaatcctcctaacataattcttgttcatggagaagctaatgagatgggcaggctcaagcagaagctcataagtcaatttgctgatcgcaacactaaaattcttactccaaaaaactgtcaatctgttgaaatgtatttcaattcgcagaaaatggcaaaaaccatagggaagctggctgaaaaaacaccagaagttggtgaaactgtcagtggtttgcttgtaaaaaaaggcttcacatatcagattatggcagctgatgatctccatgtcttttcacaactatcaacagcaaacattactcagaggattaccatcccttattcaggtgcctttaatgtcatacagcatagactcaaacagatatatgaaagtgtagctcagtcagtggatgaagaatctggagttcccacattgcaagtccatgagtgtgttactgtgaaacatgaatctgaaaagcatgtctccttgcattgggcctctgatcccatgagtgacatggtatctgattcaattgttgctctggttttaaatatcaaccgcgatgtcccaaaaatagtgaatgaatctgatgccattaagattgaggaagagaatgagaaaaaggcagagaaggttatgcaagccctcctcgtttcactctttggagatgtgaaggtaggtgaaaacggaaaattgataattaacattgatgggaatgtagcagagctaaacaaagaaagtggggaagttgagagtgaaaatgaaggtctcaaggaaagagtaagaacagcattccggcgcattcaaagttctgtgaagccaattcctgtttctgcgccatagtttttcatttccttacattttctttggaaaaggtgaaatgccaccgataaggaacaccagctcacatgtccccgctaacatgagacaattatcacaacatgttaccttcccttccctttaacatgatgagctttgtcacagcattctctgtttccttttgtttattcttcaaatatttggtcatttaatctaaacttattttcttcaaatgttatgttgttgcgtctttacattctctgcctgccggtttctgcctgatggtgcgtatctacaacactatagccgtgtagttttctgtttgttttgctccttagagactggaggctgttaccttcatttggcggttgctccgatgtccttgttattaaagcattatgattttcttttaattcaggcatgattatcttttgcttggaaatacagctttggaccttttggtttggtattcttgttctttcatcccatcggatcaggtcctgccagattatgtcacaattgcaggcccctccttcatcctaacaggcccaggaactaggaagcatggatgcaggatgctcctagtgataatgcagctgctgaagcaactccctaatgttgttagaaagaaaatttacaaaggatctactacaatttcccccaaaaattgatcctaaatgtaagcattttgaatttaaaagagtgaagagctaatatgtatatttgccttccctgtgcccaaacatataggggagaccgggagggggtataaataaaatgaagcatcttttccgggtaaaaaaaaaaaaaaaaaaaaaaacccacac

SEQ ID NO: 116553 - DNA, 624 bp, Glycine max
  unsure (1)..(624): unsure at all n locations
  Clone ID: PAT_MRT3847_76258C.1
caactaaagggggcactttggggttggattttggtctttaaaaaattttccttccttccacttggaaggaatattttttccaaccttgggtaacctaaccaacctccaaaattggaagtaaaaaaccttgtccttcttaccttggtaaaagaacctctattaattttggcatttttcattcatttaaatgaatcanggcacttcatcagaacagctggcatggaaccattcctaatgaacttaccaattgtactgagctaagagcactgtaagtgaattggttcactactaatgaactacttagcaatttcctaattagttcactgcttttatgtcatgctgaaggctgactcgtctcatctgattgtgtatttaaaggtacttgaggggtaattacttccaaggaggcataccatcaaatattggaaacctttcatatttaaatatactgtaattcctaatcccttgttttttgtcacttttcctttctgatgttttgaacatgtttctagcttttgtttctcaactgcattttaattattctttgggaaattaatacagggatttatcaagcaactcattgaaaggtgctataccttcctctattggccgtctccccttctg

SEQ ID NO: 116554 - DNA, 849 bp, Glycine max
  Clone ID: PAT_MRT3847_76259C.1
ccacgcgtccgctcaaacggatatatgagagtgtagagcagtcagtggatgaagaatctggagttccagaattgcaagttcatgagtgtgttactgtgaagcatgaagctgaaaagcatatctccttgcattggacatcagaccccattagtgacatggtatcagattcaattgttgctctgattttaaatatcaaccgtgatgtccccaaaataatggctgaatctgatgtgattaaaattgaggaagagaataagaagaaggctgagaaagttatgcacgccctccttgtttcactctttggagatgtgaaggcaggtgaaaacgggaaattgataattaacattgatgggaatgtagcagtgctcaacaaagaaagtggggaagttgagagtgaaaacgaaggtctcaaggaaagagtaagagcagctttccagcgcattcaaagttctgtaaagccaattcctctatctgcaccgtaactttctcctctccttacattgtgttgggaaggtgaaaagccattgctccctcatcccatcgtatcaggtcctgccagattatgtcacaattgcaggcccctccttcatcctaactggcccaggaactaggaagcatggatgcaggatgctcctagtgataatgcagctgctgaagcaactcctaatgttgttagaaagacaatttacaaaggatctactacaatttcacacaaaaactgatcctaaatgtaagcattttgtatttaaaagagtgaagaactaatatgtatatttgccttcactgtgcacaaacatataggggagaccgggagggggtataaataaaatgaagcatcatcttacgggt

SEQ ID NO: 116555 - DNA, 1196 bp, Glycine max
  Clone ID: PAT_MRT3847_7625C.1
gtgttcagttaagagtttccgcgtgagagtggccatgggaagagctccttgttgtgacaaagcaaacgttaagagagggccatggtctccagaagaagatgctacactcaaaaattatgtagagactcatggcactggtggaaattggattgcattgcccaaaaaagctggccttagacggtgtggcaagagttgccggctacggtggctcaattatctgaggccagacatcaaacatggaggctttactgaagaagaggacaacatcatttgtaccctctatgctgagatgggaagcagatggtctgccatagcctctaaacttcctggcagaaccgacaatgatgtgaaaaactactggaacacgaaactgaagaagaagatcatggcagggaaagttaccctcaaaacattgactgacaatgacacgcttccttcaatttcaaccccatcactaaccaacaaccaaaatgtcaagactagtcaaaattcacctttcccttcttcacaaaatcaaaattctccacccttagatgctaataatacattcagcattagtgaaaaaagcattattagttttgaccaaactcatcatgggttgtatagtccacaagtcatggatgttgtgtcacaaattggtgcaaattcaaggattcccaactacaacaacaataataatcctgtggtgtcattgtctcaagaaggttcaagcagcatttcggattcctcttcaattgcaatgaacaacaagaatgtgtcacagccagaacaacatgctaatgatgattatgaatctatggaaatgttgatggattttggctttggatttccctatgattttgccaatggtcctaactgccattatgagagagttggtgaattggctccaagttcgtatccagagtgggttgattttagctatgctgacattaagccacattgaccgaatcaaaatgttatatagttagctagttatacaatattgtataaccatgggattttctgtaagaaaaaacaatgccaaaacgtatgtgaagggaagacttagctgagatttaatttttctagtttgttgatctaatatagtattaattagtagtacttgtgtgttgtgttcatagataggaactgcatagtttaattaggtcaaattttgaattaagcaaataaaaacgattaaagattattgataaaaa

SEQ ID NO: 116556 - DNA, 806 bp, Glycine max
  Clone ID: PAT_MRT3847_76260C.1
ccgtgaccccttcccctattgagaactccacgagatcctttcttttcctcagccaaagcacaaaaccaaaacagaaaccttttgatataatttctgttattcacttccttttagacaccacactaatccagattagacattgtacaaatgggttctctgttgttcttgcttttggttattgttcttccattgtgttattgtgttgatgctgcttgctctaatggaaactgcaaggtaaatgatgagtgctcgtctaatggtgattgtggagccggtctctattgcttctcatgcccacttggatatttaggctctaggtgtgtgagatcttccatcacagatcaattcaagctcacaaataactctctaccattcaacaaatatgcatttttgacaacgcacaatgcgtttgccattgatggagagccatcacacacaggagtgcctcgagctaccatcactaaccaagcagacagtgtaacagagcagctcaaaaatggagttagggcactaatgctagatacatatgattttcgtggagacgtgtggttatgtcattcatttcaaggccagtgctatgacttcacagcttttgaacccgctatagatacactgaaggaaattgaagcttttctatcagccaacccagcagaaattgtcacactcatattggaagattatgttaaaacaccaaaaggattgacgaaagtcttcgccaaagctggtttgatgaagttttggtttcctgtgactcgaatgccaaaaagaggaggagattggcctctagtgagtgatatgattgctaa

SEQ ID NO: 116557 - DNA, 669 bp, Glycine max
  Clone ID: PAT_MRT3847_76261C.1
aggagttggggaatctaggcctaatctattagaataggtctaggctgatttggcaggtcgaagcctaaagactttcaaggtcaaaaccattccgctcgaaaaccagccttcaaagaaagtcaaagactggcggaccgcatacgcgcttactttttgtttgtttgataggctgatccctaggctgaaacggatatgcttctatcacactcttctttcgagagaatagccccaatgacgatgaattagggttgtagagcgggtcaatccttggagctttctccatgcccgacagagaaaacttggtgcgaatcggggtacatacgctcctgctcgtctaactaatgtactaatgtaattccacgcaaatatggctgcccggagaatccgtagctgctaagagggtcgagccataacggattgatgtggcgtagcggcgactggaatcgatctgaatgaagcttcaagcgtagttctggggcttctcctataccccgcctatatggaggaagattaggtggggaaggtcatagtgaagtcagcaagctggaaagtagccgcccctctttgattgtgcacagcccctgccacgagacacctaatcgaagaagcgccttcctctcatctttttgataattcaacatccagttcatagagaactgcctactccca

SEQ ID NO: 116558 - DNA, 476 bp, Glycine max
  Clone ID: PAT_MRT3847_76262C.1
agcccaacatagccgaagtttttcaaaatctataatacttcaccccctttttattcataggataccttggtggggggcacggtttttttcgactggattatacaaataccgggttttcatttaagcactatactggggggcccttggtttagggtcaaaatcggacttgggatttgcccgggatgccaaggcctcatacctggtaatattggggcccgggtcaaaaaaatcggttttgggaacgcttggtttgagttctaaaacattatattggggaacacttgggctcgattcaaaaacattattctcgggaacgctgggcccgggttcaaaggcctcaaacctggtaaaattggggcccgggtcaaaaatattattctcgggaacggttggcccgggttcaaaaatattatattggggaacacttgggcccgggtaaaaacattggtcttgggaacccctggcctggggtcaaa

SEQ ID NO: 116559 - DNA, 549 bp, Glycine max
  Clone ID: PAT_MRT3847_76263C.1
cccgcgtccgaaaaaaaggaaaattttcgcagctgccgttcgcgttttgttcttccctactctaaaaccgaaacgaaacttctctctgtctaaaaagcgcagtttcaactctctctctcatcgcttcgccggaatctcgccacctccgacgccggaaagaaagaattgaagaaagatcccctttcccagtcatggcttcaagatcatatgctaatctctttgacttaactagtggagactttcttgattttccttgccccccaagagcccttccgaggggtatgaccgtgcctgggattatttcacacctggatggtgatggctgtaacgacggggattcagatggtagctcttctggaggtagggagcggaaaatcattggggcgaacatggtgccagcgcaggctaaacgagatatagaaactgctaaatgggtcttcaggtgggatgaggattcaattttattactgttaaaagacggtttttctgctgatacacaggtaatctatgggggttctctcaagggtgaaggagatgctttgagagcag

SEQ ID NO: 116560 - DNA, 733 bp, Glycine max
  Clone ID: PAT_MRT3847_76264C.1
aaaaggatgcttgccaggttttattgatttagttagatcagctgacatcgaagctgcaaggctaggacttcagttcatagagcttgttctgagggggatgccaaatggtaagggtccaaagcttgtagaacaagaagatgggattgaagccatggaaagatttcagtttcatgaaaatgaagatctgagaactatggcaaatactctagttgacaagtattttggagaggactatgggcttgatgaatagtaggggtcagaatagcgagatccactcttgtttttgtccttataatgcatgctttgcatcagccgcatgtcaaatatggagccttcagtttcatgaaaatgaagatctgagaactatggcaaatactctagttgacattgctgattgctgatcattcattattgaaggccaataggatctgtattggtgttgaggtgtttgataaaattatctagggcttgtgcttgtacactttccgtggccctttttgtgtgagtacatacacgatagactgaaatgtaaatttttgtttgtaattctgttccagttctctttgcgttataatttagtacctgcaaaagatgccagttaccactaagtgctatttcccccctgaatttgagtcctggatttttaatacggctcaattgaaccttccactaaccttgactgtacaatgcagtccaaatatttgagtgtggcacagtaattgcacaagaattt

SEQ ID NO: 116561 - DNA, 978 bp, Glycine max
  Clone ID: PAT_MRT3847_76265C.1
ttttttttttttcttttttttttttttttttttaaataaagagaaatatctatttaagttaaaactggtgaataagtctttgtaaaataaactaacgtccataatttactatacaatgtagctgctagatgtatcaggttggtcgagcaactgtgccccgcaaaaaatacataatccctgaacaagctaatctacaaattagagatacaacgtcaaaatgcagttgcaaatgaatgtgatgtgtaatctaggtataaagcagggtggtgggttggtttgggttgagtttgtgtcagaattcaagcttcttgcacaaccccaaatcaatgttcctaggtttagccgctggttttataggtgcaccaggacaagtatcagcaattccagagaagtggagcaccgaaggaggtgtttcacaatcatctgacatttgagcaagaacaccctcagcttgcttagaaacaataacttgcaaaagattctcatacacagattcaaccatttcctcatctgaaagagtatcagtaactgcttgagcaacaacatcaaaggagggatggaaatcaagtcggcgggcaacggtggtcctgtactcatcaagatacttgttgctgttgggtgccagcgccatgttatcaggaccaggtgcaaaggggtcaaaaacaccatccttaggagttcgggggctgccattgtcattattattatcaacagagatacggtcagaatcgcaatcaatgcaggcacgtttgagttgtttcctgaccactgagagtgtgagaggggattgggattgcaaatccccattctcaatgacagcctcaggagttataggaaccacacaatcggtgggagtatctttcattgagtctttgcacagatccacagaagccaaaagctgagatgagtgagttggaaacaagtaaaagaaaggaatagatagatactgactgctcctaggatgtcttgtgagtgccc

SEQ ID NO: 116562 - DNA, 835 bp, Glycine max
  Clone ID: PAT_MRT3847_76266C.1
gatcttcataaatcctaacaagtacacaagacccagcatcagtatgtgttggtcaacacacacacagtttgagttagagttggatggacatggaatggtgcctataagaatcagagaaagagaaaggatccacaacattaggttgaagaggaaaaagttggaggacattccggaggaaaccgagcttcctattgatactaatccagcagagcttgaagaagcgagccttcacttggaaacagatttggaaatactgagccgagccatggatatgggactttgggcactctgcctcggtttcggctatatcctttccagagctcactttcgcccactttcttgacaaaaattcgttcaattattatgtacctcgcaaatagcaaatgtttttgcgaaacagtcgtaggccttaattggtggtaccatttgtgatcatcacgaggctaggtttttgtatatacccttcaaacttactgtgaagcaaaaaccacaagttttatttttaaagtattcattgattcgtgtgtgttttacatgttctagttcatggttactataaaacttgtcttgcccaggacaggaagatacattgaatgattatctctgattgatgcccggacaagggcaactctttttgtatatgagctaaatttaagtcctgtttctttagtatttttattgttaatttgagttttatcttagtacccgagactagttctctcgccctttgaggtttgtgttagttgaatagatgaatcttcaatttctcaaaaatcatatgtaaattttggcctcaattgataatgcacaaaatatagacattggcaaggaaaaa

SEQ ID NO: 116563 - DNA, 221 bp, Glycine max
  Clone ID: PAT_MRT3847_76267C.1
agtagtttgaggaaattcacgtagtaaatgaacaatacaagtttgcaccagtgcagcattctttacgcggtgcatcagtggagccttagagatgacacgactgcggaagaagcattggctgaacagcagaggatatttgcagaggcacttgaaagaatgattggacgagcgattcggacaacagaactagaggttgaagccagtttatcagagataagttt

SEQ ID NO: 116564 - DNA, 492 bp, Glycine max
  unsure (1)..(492): unsure at all n locations
  Clone ID: PAT_MRT3847_76268C.1
tttntttttttttttttttaaaatatcactctcttttctcttaaggaccatccctaaaagaggggaggcaattttcaagtttgcagatcatactcgacaagtgggtcttgcctaaattcctttgttgaatcaaacaaacgaacaagcaaaaaaaaacacgacttccagatcatgcagaggattccgcattttcagaagatctggcagtagccttgggaacagaaaaatctgtcatatgagtttgaccagcaatttacaaaatcttgggaagttcccaccagaatattaaaaactgtaaactgtttgggattgaaaataatgtaactcaaatgccattaagtttgattggcccactcaaaactcctcattacaaaaccgttattatgaccagatacctgtattgggaagatcaattgccaagaatgcgggtccgattttgtccactcacctgcgtggaagtgctctgtactgaggcctgttgttaaaaacact

SEQ ID NO: 116565 - DNA, 676 bp, Glycine max
  Clone ID: PAT_MRT3847_76269C.1
gattactgacctggcctctgtggactacacccaaagagtcaaaacaccaacccaccaattaatccttccttcaagcattatctcacaatgtcttcaaacctcaccattgaacaaaggctcgaacagctgcaaaaggcaaaggaaagagcacaaccccaaccacccaaaggggccaaaatccaacgggtagcacatcatctccgagaccgaaagcatttcaccaagcattacgagccgaaactgatgtcattgggtcccatccatcacggtgctgaaaaactgcagctgggagagcagtgtaagcaaaggtgggcagcaacgtacatcgaaagcactggaaaaaccccacaaactctacacaaaagggttgtggacgattttgaaaaccagaagaagttgtttgacgatgaccttttattagcatcgacccaacagtatcagaagcaaggcttcacaaccatggaagaaaagattcagtggatgctgttcgtggacgcgtgtgccctgctgcaaattctggaacatgcaaatcttcacgcaccggagaaaatgaaaatcaaggtcgatcaactggttctggtgatgggggacgtgctcttgttagagaaccagcttcctttctctttgctgaaactgttgtggaaaaacgacgagagcgagttgatgaaaacaatga

SEQ ID NO: 116566 - DNA, 438 bp, Glycine max
  unsure (1)..(438): unsure at all n locations
  Clone ID: PAT_MRT3847_7626C.1
aaaataacatcttcacaaggttttttatgtggtccatatattgaactggccacaatgatatctgaacatttcaactacttcacgaaagtaaattatggtatgtagcttaatgaatttaagtagagcagttcagttaccgacttcaatccacccagaaagatcaaacctttgagatttgcaaacttgtgcttgttgcaaacaatccaacttttttcatcagtctctgtgtccattttcgttcaaaagtctaaaaattttccccacaattcatccttgaacgtgcctttgctacccgagtcagggcatgccaaagacgaggagaaagtcacagactcttatccttctaccgaaaacactgcatccttctttcacacctgcttcaatggactcaatgcaatatcaggtgttggaatactctcttgtncgtacactctcgca

SEQ ID NO: 116567 - DNA, 382 bp, Glycine max
  Clone ID: PAT_MRT3847_76270C.1
aaaaagggcccctccctctgggaccttcattttttataaaagaaaaccgggtttacaattaccagggacccccttatatgattttggttttcccccccagggaaaaccggaaaataacccacccgaacatggctacgggtttttcttaaccccggatgttgaaaaggaagatccccccttctgacgggatttttttggtttggtggcacctgccttggaacctctaataaagaaaaggaaagtttccacaaacatgggccccaccacccccaaaattcctccaacagccttcatgggaggactgggattgaacaatgctttaaatgctgcatatcccaaaagattgcccgtaaacatggtaaccccccccccacccctccgg

SEQ ID NO: 116568 - DNA, 275 bp, Glycine max
  Clone ID: PAT_MRT3847_76271C.1
aggggcaaagttcataaataaaacatttttcatcatttccggtggatatctattgatttaggtaaacaaaatgcacaagttctgaattctgattgaagattgataggaaacttagtgtgtaaaatgtctttataaagggcacctcaagtaaaaatgaaatggttctaataatgtctggccaaaattctcatgggtaaaaattaacagcaaatagaaaaggttttcaaaattgttggcctatcaaataaacagaatcgctttcttttccttttctg

SEQ ID NO: 116569 - DNA, 321 bp, Glycine max
  Clone ID: PAT_MRT3847_76272C.1
ttcttaaccactccacccacacacactttcttcagcctttctttaaattggggattgtcatctactgagtgtagtagtattgtgatctccggtgtacaaattgagatattgaaagtgaagtgtaggccattcacatcttattcttttcttgggatttatgatggcactcgttgcaaacaaagtctatagcagtcctagtgtgacttaaagaacagctctttgcagatcacacgacaaacactagtgcttctcgtcaacaaagatcaatcgaatacatgggtcaagacataggctgtgacatggacatttagaactatagat

SEQ ID NO: 116570 - DNA, 337 bp, Glycine max
  unsure (1)..(337): unsure at all n locations
  Clone ID: PAT_MRT3847_76273C.1
agaaagtgttcaaactgnagccaaaagaagaggtggcgctgttgttctaaacaaaggttgtggcgggtcgtggtgaacttaggcagggggtggcgagccggcattgccaagaactgagattgtgaggcagctttgggcatacataatgaaaaacaacctctaagatcctggtaacaaaagaaagataatgtgggttgatgcactgggttttggttcttgagacagactgtgccgacttgtttatgatgatatgagttgttggctaaacacattatccgacttggacctacaaagggtttataggctaaacgagttgagcgggatgctgatattaaaa

SEQ ID NO: 116571 - DNA, 460 bp, Glycine max
  Clone ID: PAT_MRT3847_76274C.1
ctccatattccctacctaatccctgtcttctccctcccaccataagtgacattaatctgacttgttttcatttttatttttatagctttatcacccaaatttgctcccctagaccttatactttagtcctacctattctaaaaaatgtgtgctaggtcttttaagtctcttttaatctatatggttcctcctccatccatttcatttctttacaacttatcgttgacaaatctgggctagtcgaatttcccatgtctgtctttttcttttcttttccttcttttttttttttttagatggggtctcactctgtcacccagactggagtgcagtggctcaatctcggctcactgcaacctccacctcctgggttcaagtgattatcctgcctcagcctccagagtaggtgggactacaagcgcgcgccaccacacctggctaattttctgtatttttagta

SEQ ID NO: 116572 - DNA, 145 bp, Glycine max
  Clone ID: PAT_MRT3847_76275C.1
cccacgcgttcgagcacgcgtccgtggccttgttcaaacaccctccctctctcaaggcgcggactaaattagggagcccaactctctctattatgacattctcggctattcatcgcctgcactcaatcaattttcatctatcttt

SEQ ID NO: 116573 - DNA, 178 bp, Glycine max
  Clone ID: PAT_MRT3847_76276C.1
aatcgcgatcacagcttggcttaccttaaaagctgtttacgaaagcaagcgttacggtatttcaagaatttctcaatttcttccgacgtctttgtgtacgattgcttaacggatagaagatcactctctgttctggacacagacggcgggaatcattttctcttccacacaatatacg

SEQ ID NO: 116574 - DNA, 480 bp, Glycine max
  Clone ID: PAT_MRT3847_76277C.1
aaagttttcaagtgtgaagcaacagtggccgtaatttgtatgctctgtctccggggaaaggaaagtgagatactctctctatcaccaaaccaaaagcacaaaaaaaaagtttgtgaagttttgattttgcagtaaaagggtgtggtgctgttgtggagatccgagatttgtttcgtctcttatgccccatgaggagtttcttccctgctgaatcctgtaaagaggctcacccaaatgctttgaatcctcagtcttggcttcatattgaaagagggaaacttcccaagttgtcatcacacccctcatctgcctcaattgaatctctgatcaaggtcccacagccagctatactgcctttctttaagcctgttgattatgtggaagttttaactcgaatccatgaagaactcgagtcttgtcctccgcaagagagatcaaactttgttttgttacaataccaagtcttcaggggccttgggg

SEQ ID NO: 116575 - DNA, 813 bp, Glycine max
  Clone ID: PAT_MRT3847_76278C.1
tacggccttccgttgagcttttctttcctcgaactccaaaatcttctctacggctgcgagaagacgacaggaagggctataagatctgcaggtactattgaagtttcaagtccatccattccttcccaagaaacctcgtagcattctctcccttgaactcttcggctcttaatgatttctgacacaggacacttcacagggatctgtgatcggatataatataaataagattcttgtatatatccaggttcaaaaataaggagcctgtagataaaatttatgttcactaataatagtaatggcattatagaaactcgatgaatggaagatttccctgtttattgatgatacactgaatgcagtagaagctactgtaaatcaatgatcatcgaagaattgaaccaatgttatacattaccaaaatagaaaatgtgtagcatacttacattacttaataatcaaatggacagctttgatagataataaacatgtgaaagagaacataagttatcaaaatgccacgcgattctaagcatgaacataatttagcttttttctaatatactaatttagctgatattatattttcagatagcggatataattggttcatgacatggtatcaaaacatgcatgattaatagcatgtttgaatctaactccatgatccacattgtccaagaaatttgagtcaaaattttaaaaatgacacaaaagcaagtatttttttgcttcaatttgacgtgcattcacaacaatgaacaccaaaccaaacgggcactaagtggtctagaagttgatcattgttacccc

SEQ ID NO: 116576 - DNA, 546 bp, Glycine max
  Clone ID: PAT_MRT3847_76279C.1
attagaggtgccattatttacatcagcttccactctcttcattgcttcttccattctctctttaccatgcaaaagcaagaggaattacatgcggtgtgcaaggattacatgcaaatcatcaagggcaagcgcaccaagcgacaaaggcttccatccccacttaggttaaccatgtcaacaacatgttccagtttaggaagaagcagcaccgacaactccgtaggttttgatattccaacaacctcaaatgaatcaaggaacgaagaggaggacatggcaaattgtttgattctcttagctcaagggatcacaacaatactccaaaaccctcacgcaccaacaagggagggttatacctttatagtgcaagacttgtaaccgatgcttcccttcatttcaagcccttggtggccacagagccagccacaagaaatattattccacgagtgcagaagaaaagcaaggagttgcaactacttttgtgaattatgaagtcgataataataataataatcataatcatgatgattattgtgaccccacaag

SEQ ID NO: 116577 - DNA, 498 bp, Glycine max
  unsure (1)..(498): unsure at all n locations
  Clone ID: PAT_MRT3847_7627C.1
cgccagcggnaccggnccggaancccggggcgcccggcagccggncagagaagaagcnagaaaaacngacactnagaacacagaagcaaagaggnaggcgagagaagagagacaaaggcgcagagagcncaaccagcgnnggccaccacggacggnnnncagaagggagaanacccttctccngcaagggggggngaaacacccacagcnncnnccncaccaacaaaaccacagcngagggggacaccaaccgcgccaggcnnacaccccggaananaggnnagccaaggccnnaggaaacgcaccagcnaccnacgcaagcnccgagcccacagaggngcacaagganncacaccgggggcgccgcagcaggnnnccacaggggnggccaagcgaggaccagaagaaggaaagggggaaggaagagccgnggacagggccagaaacgggccccaaccanggccgccccgagagcggagaagccaaaggggagaaacc

SEQ ID NO: 116578 - DNA, 360 bp, Glycine max
  Clone ID: PAT_MRT3847_76280C.1
tttcttcaggggtagattttaaaatcttactggggatatattgaaaatccagagggggtagagtagacccctgatgccatcccatccacatctacatggcacaagacataaactgatgtccctggacacatatatccgaatgctctatacttcaaaagcatgggaaaaggtcacacttgtgtgaacggtcaacatatagaaggatactggacttttagttaacccaaaaagtgtatgtgaacaagtctgcacaaattgcggagcatataatcccgacaagtgttcaacaaattgtggaacaaccatcccttaccttgtaccatgtaccacaatcatggttgaaagcaaccaacattttac

SEQ ID NO: 116579 - DNA, 402 bp, Glycine max
  Clone ID: PAT_MRT3847_76281C.1
ttttattttttgaccttcaagggcaatcctattgacctggaatttctcccttctgacagagtgacacttttccccctaccctttaagtataacaccaaacacgcacggacacgcgcataatacaacataccctttacacattcttacttctacttcttgaaacttttctctctctgaagcaagtgcagagcaattaataactcaaggtctggggcactccgtgaccgagatgaacgcaaaggtattgccttttgagggatgggtttgtgctctttggaccccagaaacgctaacgaagacatgaagctcaaactctcggccggggcaaaatccgagaaaggtgagaatcctccaacacccatcaaggggcaacaacaaacacaaaccccaaaaagggtgggc

SEQ ID NO: 116580 - DNA, 228 bp, Glycine max
  unsure (1)..(228): unsure at all n locations
  Clone ID: PAT_MRT3847_76282C.1
tcaagcttttcgtcaacctccacaacccggagggtcacaccagtcagttgcttgtgagaaacaactgcgttttgttcatttcgccgaaccttcccattggagaagatcagtcggtcaatcccgcctccggatctgtgatcgaggcggcaatgcacgccgaggctacgcaagctgcacctncgacctacgctgtgcaccacctcgatcagatgtacagagacatcgacc

SEQ ID NO: 116581 - DNA, 568 bp, Glycine max
  Clone ID: PAT_MRT3847_76283C.1
ttccgttccaaggaaggtttcccgtcatcactgtatgacgtcctccattctttggggggggggggggggaaaagggcaagagtcggaggtaaatactagaagggccggtgttacaacgatagcaacgaaaaaagcaatgttaattggggacgataaaaaattggagagtagagctgaaagcaaaaaacagcaggtagtgtgaatgtgacataaaagaaagtacgaaaacgccgagataaattttgttgcgttggatggtggtattgttgtcgaggtgcttgccccacgttgccgttttatttgcgccaattattagtggaccaattgttatgacaattgttgcatacgcgtgtgttaagtggccagataatgggcgggctagtagtacgtgggcatggcagggtagtaataggagttgtgcatagtcttggttgtacagttcaaatgctagttgtaagggtgggccttatggtatgcccaagtggcgtgtgcgaggtattgaaatgtggtgaagctgagagagccgccgcgtactatgggggtgaagcgtaagcacacttgggtgtgt

SEQ ID NO: 116582 - DNA, 311 bp, Glycine max
  Clone ID: PAT_MRT3847_76284C.1
ggctcgagatcgactgatagatttaaaacctggcgagaaaggctaggactgtccaacagggcaacgcctggattctggtactgcccatggtttggagtatttacatgagcattgccatgccaagaatatacatcgagatctacaggctgcacatatcctactagatgatgaatctgaagctgatctacgagattttggtctagccaagctggatgatgcacggatgactcatgtcaccactcaagataggggcacactgggtcacattgccccagagtatttgcgcactggaaaatattcagaaccgactg

SEQ ID NO: 116583 - DNA, 532 bp, Glycine max
  Clone ID: PAT_MRT3847_76285C.1
gaggtcaatcgtttgtgtatgaacataatttataataaaacactgtggcatcatttgatctatatagccaacgctacctaatgggtaaaagcatggttgttttttaatttttgtatggcatggcagctgaaaatgtctattatttgattaaatattgattgaaaaactaaattgctacaagttaggatgatttaggaagtttaagtatttaactgctatctttctttgagaagatattcttatatacttagcatattactctcagcagttcttatcatatatattataaattttagtccaattgcatgtaatcgtgttcagtgccatctgtttgtttttggattatttgattggtaagtatagtattttcaaggtatgtaggaatttctctgtatttggaagggtgtacctggaactttcattaagttgaaagggtgtctttgcgtttaaatggaagaggaatggaattatcttttgtgatggtaattaataggaacataaattgcgttggcatacggccagtgaaataaaa

SEQ ID NO: 116584 - DNA, 317 bp, Glycine max
  Clone ID: PAT_MRT3847_76286C.1
tgactacatgaccagagggtccgacgttttctgttgcagctacgttgtccaggaccatgaccatggccaaggacacgatcctgatactgtagacggacatcacgatatcattggtcctagacatggagatcatgatgtacaacaacaccgagacggccacgtcaaggaccgactaggatctgtggaccatgtacccgcactggctatcacagcacaggacggagtacaacgcgccccgagagaaggagaacaggttccagatctgcaaggacaacctggtaaggaccggcaaccacaactactactaggaccaaact

SEQ ID NO: 116585 - DNA, 557 bp, Glycine max
  Clone ID: PAT_MRT3847_76287C.1
ctctgtcctttagcatattaccatatcaatgttacatgttaagctcataatctccaattaaaataggttttaacctgagactcatcaaagatgggtaatcaagtctttagaaaattacattactcagaaaatagaaaggaaatcttaaatagaaaatgataaaccatcagataataggtgcaactaagctataatgggtctaagatgaaacaagatttgtgtgcaagcctactaatgaagcatagataccacccttgttaagcaaagtgtcatgttttccttgctcagcaatgactccattttgaacaactgctatcgaatctgcatcctttatggtggataacctgtgagccaccacaattgtggttcggtccaccatcacttggtctagtgcatcctgaaccactctttcagactcaacatcaagtgcacttgtggcttcatctagcagtaatatttttggattcttcactatggctcttgcaattgccacccgctgcttctgccctccagatagttgaatccctctctccctactatggtgtcataaccctgct

SEQ ID NO: 116586 - DNA, 147 bp, Glycine max
  Clone ID: PAT_MRT3847_76288C.1
tcgcccacgcgttcgaaaaatatctcctaatgaaaggcggctttcttatgctcaaaaaagggtttcacatgttcctgatatcttttatcgaaagggccttacttaccgagatatttttgcactatcttgaggaccttcacttgggag

SEQ ID NO: 116587 - DNA, 237 bp, Glycine max
  Clone ID: PAT_MRT3847_76289C.1
tttcgtttttggcatgttgcttggcaataacggggagatgcaacataaatccatttataaaatccgggtcctgcaaaagaagcccatgataaatgaaggatggcttggagattctcaactcgccatgaaactcttctatcgtatcacaactcaggagtcccacaggaaaacaaagctcccatactgaaagctttgatgacataagtctcaaccaaacggcgtagggccccttagaat

SEQ ID NO: 116588 - DNA, 264 bp, Glycine max
  unsure (1)..(264): unsure at all n locations
  Clone ID: PAT_MRT3847_7628C.1
gaccatcgccacaagcgatgtgtcctcttaggacagttatacaatttatattaaaatttcgcaaatccacacaacatacgacaaaaagtantgatgnaaaccactttaattaatttttcccgaatcccctagagagaaaaaaagaatcagacaatttctgagaagctaaagcttgtggaggactttctgattctgtcaacccaaggtgaaagcaagaagagagtgagagaagagctcgtcgtgaggtaaagatacaagctttgc

SEQ ID NO: 116589 - DNA, 955 bp, Glycine max
  unsure (1)..(955): unsure at all n locations
  Clone ID: PAT_MRT3847_76290C.1
ctcggnnaattcggctcgaaggaaaatgaaatgttgcaggtggcaatagtgcaattggctgcgttgcaggtttttgttatttttttgagtggtggtgctgattacataccgccttcaaggttggatgggttcgtctaccaaatgggtacttagatttggataactgttttgatagaagcgttttatgatccggtgtgcccatatacagcagggattcatggcctccactcaaacaagctcttcatcactattcttctcggttaccatgacaatgctttcgtcgcgacccgtgctttgcacattgtgaacacattgaacgcatctgcaacgttccccttgctggaatggttcttcaagcatcaggagaaattttacggggcccaaacacggaacttatctagggcttctattgtagatgagatagtgaagtctgcaacagaagcagctgggagctcttattataacgccataaagcatggcttcaatgacacaaaaactgattatcagaccagagtttctttcaagtacgctgcttcgagaggggtgtatggaacgccttctttctatgtcaatggattcttgttgcctgatactggagctaccgctgactacaagacttggaggaaggtcattgatccattggttggtgtgaagaagagtatccagaatgaagagtcccttcgtttcttcttgtaaaaattgtgggaatgtaaagcccagttgcattagcactttatcattgaaggaatccaaataaagagtgtctcgtagctgctagtgtcgagaatgcaataatggaatcaactgttataaaacattccttagtccttgcatatacatatgtggcatgggttggaaattcgtaaatatgatccacggggtgatgatgctaaaaaaaaaaaaaanananaaaaaaaaaaaaannanaattaaaaaaaaaaaaaaaaagggcggc

SEQ ID NO: 116590 - DNA, 1086 bp, Glycine max
  Clone ID: PAT_MRT3847_76291C.1
cccacgcgtccgacggctgcgagaagacgaaaaatgttggtcagttcattgacttgcccacagtgagaatgaagatgttgcgaacgacaatactgcaattcgctgcgttgcaggttttgtttattctgttgggtgttggtgccgattacataccgccttcgagatttgatggcttcgtctacgggaaggggaacttgaatttgttggatacggttttgatagaagcgttttatgacccagtgtgcccagatagcagggattcctggcctccactcaaacaagctcttcatcactacgcttctcgggtttcgctccttcttcacctcctccctctaccttaccatgacaatgcttttgttacgtctcgtgctctgcacattgtgaacaatttgaacgcatctgcaacgttccccttgctggagtggttcttcaggtatcaggagaatttctatggggctcaaacacggaacttatctagggcttctattatagaggaagtagtgaagtctgcaacacaagtagttgggagctcttattataaaaccataaagaatggcttcaatgacacaaaaactgatattcagaccagagtttctttcaagtatgctgcttcgagaggggtgtatggaacgccttctttctatgtcaatggattcttgttgcctgatactggagctaccgctgactacaagacttggaggaaggtcattgatccattggttggtgtgaagaagagtatccagaatgaagagtcccttcgtttcttcttgtaaaaattgtgggaatgtaaagcccagttgcattagcactttatcattgaaggaatccaaataaagagtgtctcgtagctgctagtgtcgagaatgcaataatggaatcaactgttataaaacattccttagtccttgcatatacatatgtggcatgggttggaaattcgtatatatgatccacggggtgatgatgctgtgatattccttggcctatgtttgaattttatgaaaggtggtagaatgaatattaaaaaaaaaaaaaaaaaaaaaaaattcctccctccccgaatctggtgccgaatttagatataaa

SEQ ID NO: 116591 - DNA, 837 bp, Glycine max
  Clone ID: PAT_MRT3847_76292C.1
accaatcctctaattgcccccaacgattcaccagcgtccgaaattttctctgtaaaacaatatataattcaatttttcacgtcaatctcatcgatctcgcgcttttatttaacctgtggcgtttttggaatctgggttcgaagaaaacttctattttgggttgtgggtattattgttgttgttgttggggttgggattagaaggggaaagaaaaatgagtaaccagaagaagaggaacttccagatagaggcgttcaagcaccgcgtgttgatggatcccaaatatgccgacaagacatgggagattctcaaacatgcgattcacgagatttacaaccacaacgctagcggtctcagtgtcgaagagctttacagaaatgcatacaacatggtgcttcacaaatttggtgagaagctctactcagggctggttgcaaccatgactggacatctcaaagatatagctcaatctgttgaagctgctcaaggaggttcttttctggaagagctgaacaggaaatggaatgatcataataaggcgttacaaatgatcagagacatactgatgtacatggataggacctacagtccaagcacccagaagactcctgttcatgaacttgggctgaacctgtggaaagaaaatgtcatctattccagccagatcaggactcgactattgaatacacttctggaattagtacatagtgaacgcactggggaagttattgatagaagcattatgagaaatataacaaaaatgcttatggatttaggcccttctgtttatggacaagaatttgagactcattttcttcaagtttcagctgagtttta

SEQ ID NO: 116592 - DNA, 190 bp, Glycine max
  unsure (1)..(190): unsure at all n locations
  Clone ID: PAT_MRT3847_76293C.1
cttgccgncgtcaaatagttttatctataatgtgggatgatgtcagaggaacaaattatcagacataaggcgttgtttatattccatttgtgctttatagtagggctgtacttgcaaggaacttgtctgcaaagagcaatacaatcaggtgcgatttttgaacatcataagatgcacatggaaaaactat

SEQ ID NO: 116593 - DNA, 414 bp, Glycine max
  Clone ID: PAT_MRT3847_76294C.1
tttcttgtaaacattttatggatataataaatgcattcatatgaaaagattatttttgcatatgcaataaggggggccaaaaaaaaaaaaacggggaacacccgggaccaaaaactgggcccccccaaaaaggaagaaaaaaactgggggggaaaggggggaacccaaaaaattcggggggacaaccccccaagggaaaaccccaagggggggagggaaaaaggccaaaccccgggaaaagagataggaagccgggctcaagaaaaggaaaggggagacggggcccaaagcggggaaaggcttaaaaaccggggccagggacaaggggaaaaattccatgacaaagttaaaaaaaagtcctgttccgggggggggggaaaaaaaaaaggggctaagggaaaaaaaaaggggggg

SEQ ID NO: 116594 - DNA, 345 bp, Glycine max
  Clone ID: PAT_MRT3847_76295C.1
acaagggaaacagaggaaaccatccccctgtaagattatttattttaatatgaagatacatataaaatgtaattaatatacctgataataagtctattgaatagtactggggtaaacattggcgaataacattcacttttttttttctcttcatacttatttcttggatcatcaaggggaaaaatcaaacggggcttaccatttatcgagatagatttctacgacccagttgctgttactagctagagctatagctagctaccattttggccactcctagggccaaaggaagtttctatagggtgagtagcgtggctttttttattcatgagagatgttttgggc

SEQ ID NO: 116595 - DNA, 255 bp, Glycine max
  Clone ID: PAT_MRT3847_76296C.1
agaaatgatttttgaggacgaaatgacatatcgtgcgggtgtttttttctatcttgaccaacacttatcattatgttgtaagatcattttacggaccaagtgatatcatggtgtgaatgttttaacatttttttttttgtttaagctagcttattatgcaaaggatttgttttcatattatttcaagcacaacaactttttcagttttattcgacagttaaatacctatggatttttaaaaattgttccatacaa

SEQ ID NO: 116596 - DNA, 573 bp, Glycine max
  Clone ID: PAT_MRT3847_76297C.1
cctcgttccaacactcaccttcctttgcaatggcaaaccaattctcagttatcagcccttcctattgtgctccttatgctctcaatctacaaattaatacagagaaaggtgtcacttacgacataaacggtaaccctgtcttttatgtaaaagatgctttattcactcttcacgatcgtcgtgtcttgtatgataatcaaggaaactccatcgtaactctatacaagaagaatatgacgttgcatgggcgatgccaagttttcaagggtaaaagcaacgattcctctgaattgctcttttcggtgaagagatcgtcaatgatccagtatagtgtgatgaaattagatgtcttcctcgctaacaacagaaatgaaaatgtttgtgattttagagtcaacttttgtagagataaaagctcatgcattgtttatgcttctgaatctcctacaattgttgccacgattaatggcggcctcaatgttttggtctatccctacgtggactatgcattcattgtggcactacttatgattgttaacgagatgaaagattattatgatgaactgatggatg

SEQ ID NO: 116597 - DNA, 661 bp, Glycine max
  unsure (1)..(661): unsure at all n locations
  Clone ID: PAT_MRT3847_76298C.1
agccagaaatgaggctgagatttctccttccaccttgtatgccattgcttgtgttatggaaaatgttcctttcattaatggaagccctcagaacacttttgtaccagggctgattgatcttgccatcgcgaggaacactttgattggtggagatgacttcaagagtggtcagaccaaaatgaaatctgtgttggttgatttccttgtgggggctggtatcaagccaacatctatagtcagttacaaccatctgggaaacaatgatggtatgaatctttcagctccacaaactttccgttccaaagaaatctccaagagcaacgtagttgatgatatggtcaacaacaatgccatcctctataagcctgatgaacatccacaccatattattattattaagtatataccttacctaaggaacagcgatacagccataaataagtacacttcataaatattcatagctaaaaagatcaccattatttatcacaacacatacgaaaattccctcttacctactcctattatcttaaacttactccttcttactcagctcatcactagaatcgantttaaatctcagtatgaataaaaatgtcactcattccacccaggtactaccatccttcactacctgaccaaatctgctctagttccaccg

SEQ ID NO: 116598 - DNA, 465 bp, Glycine max
  Clone ID: PAT_MRT3847_76299C.1
atcctctctgaggctatttgattttaatgttgcattgcaggttgccaatgggattctcagtaatacatagtgtatattttaatgcagactcgaacccttttaatgtgaagagaggattaacaaagaatacacaatcttgatcttgctgaaaagtcgctggtgaatgcaaaatctcactcccttgcagtggcttctcccacaaaatgtgttgtcatgttgtgtagtcagccaaacaagggaaacatcaatggaataactatatccagaaatggccatgacaaccaattgatgctacaaggttctacatgctgaatgcaacagcttctttatccagattattgtaaaatgaagtcagtttagttatagcaagtgcttcaccaaagagtgatgccctcgtagatcttgttatgcggacttcaacataatcaccaaccacaggatttcgcttcgtattaatgtcttccc

SEQ ID NO: 116599 - DNA, 253 bp, Glycine max
  unsure (1)..(253): unsure at all n locations
  Clone ID: PAT_MRT3847_7629C.1
cnggtacaagaaggtgaagtnggcnacgggnaataanaccgatgccggtnggntaaaaaatgnggaagtttacttgactgcnttgctgcagaagcctgtntccagatganggtngtttcacgcaaaaaantttgatatatgctataagaacnataagcaggtcggtttatcctgattattntcctcaaaaaggtgttatgggnccngaaataaancaatttncanncccactttnaggnnccanaaaancttt

SEQ ID NO: 116600 - DNA, 1291 bp, Glycine max
  Clone ID: PAT_MRT3847_762C.1
aattcggctcgagtgatgcttcaagtgcaaagaagtttgaagccaccgtcactcgccttcattcatcaactcagggattgaaggaattcataaatgatgttaatacccttgcatctgtgcaacatccaaacctctgtaaattgctaggatttcatgcacgtgatggttctgaaccaaggatgttggtttatgagaggctatgccatggaagcttggaccggcagttgtttgggagatctgatagcccttcaattgattggaactcacgaatgaaaattgccatatgtgctgcacaaggtcttactttcttgcatgaagaagggcctttccaggcaatgtataatgaattttcagcagccaacatacagattgaaaaagatttcaatgcaaagctttctggatatggttgtgctggacgtattcctgaggaagagatttcgagcagttcatgtgctgttggaaacctgtcagtggagacattggaaaaaggaattcttactccaaaaagcaatgtatggagttttggaattgttcttttggaactacttactggcagaaagaatcttgatagccatcaccccaaggaagagaggaacttagtcaagtggagccggcctttcctggccgatgattttcgactgtcactgatcatggatcctcaacttaaaggtcactttcctcccaaagcggcaagaacgatggctgacattgcacaaagatgcctccaaaaggagccatcagaaagacccaccatgagaaccattgttgaaaatctcaaaacggtgcaagatatgaagtactcttgttggttcccactgcaagagccagcaaaagaaatgtcaagatctccaagtcttaatggtatcatatgtcatgtaccacctaggttgagtttctctccctcagtagtagcaagaccatctgtttcatctccaagatggtctaccaggtctggtggtgtgcccacactgcatcttcctcttcgcgcttgttcctccactttctcatggaggagcttggtggaccggaaagcaggaagtcatcatcctcaaggtgtccgagagctagtgttgaaggatatggactgtctataatgttttgttcttatgtatttgtttgttgttattatcatttttggggtgattcaacacaagtgtatagtagataaatgtatggttcttccaccttgacatatatctccatgagacgatgttcttttgtagataatgcaaaggtttgttatactgggtccaattaattaactcattgatataaaaatttacacggtcac

SEQ ID NO: 116601 - DNA, 1474 bp, Glycine max
  Clone ID: PAT_MRT3847_76300C.1
tcggctgcgcggtctgtgtttttacttggctcggtggcattacttgctggagcaggataacccaaaccggaacagaagcaaaagcagaaacgaagatgggtggttccgttagcagaaacgaagatgggtggttccgcttttctactccttcctcgttctcccttcctctttctcacatccaaattccccaccagacccatcaatgaatcttttcccttccaacccttacctgcaaccaattcccttccaaactcactacttcgcggccttcccaattctcagctcctcctagttactcatgctctgtaaaaaagattaaaagcttcgggaagtcagcaaacaggatccattcgacatggagacaaccttgatgcaatgaatagcaggagtttgctgcagaagtttcagaggaaaatgccaacggtattccttttcaacaagcaatctatgatgagtgactttacaaccaaagatattgatgacagggaaagatcatccaaatgggtttcagcattcctctttggacaaactatatcagtgatttctcctgatgactatatcagtgatttctcctgatgtttcatatgcaagcagctcagcaagaataaatgagatatatgaggttggagagttgtttgatttaagcatccaactaatatacttggtattgctattaggtttgctagggactggaactttctttgtgattcgtcaagttcttgtccgcagagaacttgacctatctgccaaagagttgcaggagcaagtaagaagtggtgatgctggtgcaactgagctttttgaacttggtgcagtgatgctgcgcaggaaattttaccctgctgctaccaagttcttgcttcaagcaattgagaaatgggatggggataatccggatcttgcccaggtttacaacgctcttggtgtgagctatgtccgcgatgggaaagttgacaaaggaattgctcagtttgagacagctgtcaagcttcaaccaggctatgtcacagcttggaacaatctcggtgatgcctttgagagtaaaaaggactacaagtctgctctaaaggcatttgaagaagtcctactatttgatcctaacaacaaggttgcccggcctaggagagattctttgaagggacttgttgatgcaaccaaaggagttactgtcatcaagtcaacagagaagaagtgagtgtcattgtatcaactcactatgaatatggcattgttaaatacatagttttcaataacttggttgtgttggaaggaattttggctctattggtgtagttactgcttactagctgaggcatactagtgctgcgaaatgtagttgaaattgaaacttgaaagtgctcgattctccaatgggttaccaaagctttgctctggtgctgatggtgtattcacttgtgaaaattcctttattttttaaatggtcattttcgtgccttgttagagtgattccttt

SEQ ID NO: 116602 - DNA, 450 bp, Glycine max
  unsure (1)..(450): unsure at all n locations
  Clone ID: PAT_MRT3847_76301C.1
tacggctgcgagaagacgacagaagggtgtaggccttagatctcattggtgcaaaatccaaagcagtgttttgtgagaagcaaggatttcttgcttttgcttgaacgctggtttgaaggctctataacataaaaacaaatatgtatatcgttgggggttgtatgacgttttctttgaaccagatagcaagctggttgtagataaaataaatggttcaaatgatgttgtatttgaattagacagcttagttagtgagtgtggtcacttattgattgtcaatcaaatctttcatgtgagtttccttaggaaagcaaattaataatattgtgcatgttcttgctagggtgacactatattgtcctagtctccatgtttttcagcaaaatcctcactgtattgctcagttggtcattaataaaaatgatataaacttgtttttgttnaanaaaa

SEQ ID NO: 116603 - DNA, 305 bp, Glycine max
  Clone ID: PAT_MRT3847_76302C.1
caaccataaaccctcgtattttactctcaggacctgcagggtcggaaatatatcaggagatgttggcaaaagcacttgcaaaatactttggagctaaattgctcatatttgatagccattcacttttgggtggtttatcctccaaggaagcagagctgctcaaagatggatttaatgctgagaaattctgcgcctacgctaaaagtccttcatcctcagacatggccagatgcatggatccatcagctagtgaaccagatacaccaaactcctcaaatgcacccactccatatggctttgagtct

SEQ ID NO: 116604 - DNA, 521 bp, Glycine max
  Clone ID: PAT_MRT3847_76303C.1
agaaatgaaagatagatgaaaaacagttttatgattcattcatcaaagtattacaaagttggtttatttatacaaagacaaaaaataactaacttgaataaccaactaacttactcaaataacttctagtaactaactaactgtcataactaactaactactcaaataacttctagtaaccaactaactgccataatcaactaactactcaaataacttcttataactaactgcaactgtaatcatgatattatttgtaagtttttggaaaaggattggatgattctattgttgcatactcttaagagaatgtaacttttattatgatgttttagaaaaaatggggctagatcagaatgcttagtcatgttgcaacaagcactgatgactttgcatatgggccgggttttttattttcttcttttccccttggtacaaaagaatatctatattaataaaagagcatttaagccaattagacacacaaaaaatcatgattatccacaaatatggatattttt

SEQ ID NO: 116605 - DNA, 267 bp, Glycine max
  unsure (1)..(267): unsure at all n locations
  Clone ID: PAT_MRT3847_76304C.1
ttcccgggggcaccccgcgtgccacttgcgaattcaaaaagcgggtggtaaacgcgtgtattctccctgtccctgtccttcccgggattcgatttttcatctctgagaatgagagagggcgtctcgagccacattgggcaggggggggtccanggcggaaatgcgtgcggggagctctactggcttgagcaccgggtcggggggggggggggaatgccaanggacaaaacaggtggcgggggggatnatgcgttcaacactttcttc

SEQ ID NO: 116606 - DNA, 158 bp, Glycine max
  Clone ID: PAT_MRT3847_76305C.1
ctctgggactagctgagggtcaaatccattgtcaccaggaagagtgccattgatgtaagttggggaggctaacccagttaagcactctcccttcttggtgactatggatttgaaacacagctactatcagatgacggacggaatcttacgatgtaggt

SEQ ID NO: 116607 - DNA, 343 bp, Glycine max
  unsure (1)..(343): unsure at all n locations
  Clone ID: PAT_MRT3847_76306C.1
aggccaagcgaacgacaagnncccacaccgaaagaacacnggcaaaggagcccgaacaccggaggagaaangcgcaagnnggaggcnagccgaggaagcacacaacaacnaaggattttttttttttcttgaagagtgcgttgaagcaacaaaggaattatttcatggcgaacaatatagatcagactccaaaacagttaaccaataagcttacttttatgccaaaaacctctaattacatcccaaggaaacatttgtgttcaatataaatggcagcgaactcttcaatattccatactacaaaaaacatggatatggggaggagaaatttaactcctacctt

SEQ ID NO: 116608 - DNA, 524 bp, Glycine max
  Clone ID: PAT_MRT3847_76307C.1
cccacgcgtccggtttgcaatgtctatggatgaactgaagaaacgcgccaaagccattggtacatttgaggaactaagaaaaatcatagatatccgtggtgtgaatcggtacaacccaaacaatgcgccggttttggaacgggcggtggatttgatgatcaaagagacgaaatacgacaaggacattctgatgacactgttgaagctgtaccagttgaacccatttctttacaacgaaaagtacgtgtgccttgtgctattgaaaacgatgaccaattttccacgcaacgattttgctttggcaaaatatttggtggacgctgccaaagtgaacgctccggagttgcgacgcgtctgtcagattggctctcttcttgagtcttgcaatttcgcgctcttttggcgtctcgtcgacggacggtacaaaccccgcgacagtctcgacgaaccattcaaaaaacctgacgaaattcgccaattggtcgagttcgtcacaagtttcaaagaggcgacacggaattatg

SEQ ID NO: 116609 - DNA, 211 bp, Glycine max
  Clone ID: PAT_MRT3847_76308C.1
atcaaaaaactttgtagtgtaataataatataatagtaatacattacaaatatacgtatcagcatgcattcatagatacccattgaaccaaatagatagtgcctgcaactatatcaggtatcagctcagcagcctcatatacaacaatactagattttttctgtaattgaaccaagtaattaatcccccaagtaaatgttggtatcacaaa

SEQ ID NO: 116610 - DNA, 212 bp, Glycine max
  unsure (1)..(212): unsure at all n locations
  Clone ID: PAT_MRT3847_76309C.1
gcatatggaaaggaggcagcaacaatcgaacagcataatatctgcatctaaaacgcgctaatgccacaaaatcgcgtgataagacgtcacacggggtgcacacgaatagcgcttagcatggaaacaactctgtgccttgtctatatgtngatattcccattcacttgtgttttgtgaggcatatacaagagatgtgtttgtatgatttattg

SEQ ID NO: 116611 - DNA, 645 bp, Glycine max
  Clone ID: PAT_MRT3847_7630C.1
attcggctcgagaatctgttgccaaagttgaataatagcatctagctacaaaaatttccccaatggcttcgagtggagaaatccttcctcaccaaacccaagtggtggctgttctcataccgttcgctgcacaaggccatctcaatcagcttctgcacctctcacgcctaatcttatcacacaacatagcagtccattatgtatgcactgccacaaacattcgccaagccacacttcgagacaaaaactccatttccaacattcatttccatggcttcgaagttccaccctttgcttctcctcctcccaaccccaacaatgaagaaactgatttcccatctcatctaattccttcctttgaggcctcttcgcatcttcgcgagcctgtgaggaatcttcttcagtccctctcatctcaagccaaaagggtcattgtcatccatgatgccgcaatggcatcggtggcacaagatgccacaaacatgccaaatgttgagaattacacttttcacatcacgtgtgcctttaccaccttcgtgtatctttgggatgtaatgggaagacccccggttgaaggcttgcacgaacccacagaacttccttcggaaggatgcttcacaccccaattcatggatttcattattg

SEQ ID NO: 116612 - DNA, 1691 bp, Glycine max
  Clone ID: PAT_MRT3847_76310C.1
ccacttgtgaggtgtcttcttctggacttaatacatgacatgatccttataaaagtcaaggatacaggattttgtcagtatattgacgagcctgatcaatctgtatcaagtaagattgttcgacgcctgacaattgcaacccatgattttagtggaagtataggaagctcacccattcggtcaattcttattatcacaggagaaagatgaaaaattatctcaacacttggtaaacaaattccctacaaattacatgctattgaaggtacttgattttgaaggttctgatttacgttatgttcctgaaaatttggggaatttatgccacttgaagtatttaagcttccggtatacatggataacaagtctaccaaaatccattggcaagctccagaatttggagaccttggatataagagacacaagtgtgtctaagatgccagaggagattagtaagcttaaaaagctacgtcatcttctggcttattatacgggtttaattcaatggaaggatattggaggcatgacatccctacaagagatacctccagtgattatagatgatgatggagtggtcattggagaggtaggaaagctaaagcagttaaagggaactgttggtggtaaaatttaggggaaaacttgaaaagactttgtgttccgtaataaatgagatgccactcttggagaaactatagatttatacttctgattgcagtttaataattaatttgaacattacgataccaatatcttaacaaaagcatctcttcctatggggataggttccaaggtagccaaattggattattcagttccgttatcttgttcacatgtcgttggagggctcatagttgactaatgatgcattaaattcactaaaaaatatgccaaggttgttgttcctcgatttaagttacaatgcttatgaaggtgaaactttgaattttcaaagtggagggtttcagaaactaaagcgactgcaactcagatatttggatcaattgaagtgcatccttatcgacagaggagcactgtgttctgtggaagaaattgttttacaagacctctcccaactcaaaacagttccctcgggaattcaacacttggagaagcttaaagatctctatatcaactacatgccaactgaattggtgcagcgcattgctcctgatggaggagaagaccactggatcatccaagatgtgccccatgtacgtatttggagcaggggtgctgaagaaccttcgcatatattcggcagaagtcatcactaagatgcgtccaaatttgaaaatagaaggaaagcaatgagggaagattgtaagaggtgttccaaattcaatgttttcgacgttccaatcatgtggttttttgagtgttaattattgcgcttattttagcgttattaacaccaacacaatacgaagaagctaaaaatagtgttcctacaaaggcagacaatttttgacaaccggaaaactcaagattccctcaagttctttcttttgcggcccgtgaaatggtggatgcatgagtggatttgaggcatcaaattgattttttaagcttccttcttctctttctcttgtttcccttttttctaaaatgtgtactcaaatttttgttaacttgatgtaatttgaattcttatctataattcaagttcatttcttttaaaaaaaaaaaaa

SEQ ID NO: 116613 - DNA, 1108 bp, Glycine max
  Clone ID: PAT_MRT3847_76311C.1
tgtcaattgccaggagacgctttaggccaggtgttccgtgccactcttgatcttctggttgcatacaaggatcaagttgcagaagctgcaaaagaggaggaagctgaagatgatgatgatgatgatatggatgactttcaaactgatgatgaagatgaggatgacaatggttctgacaaggaaatgggaattgatgctgaggatggggatgaagctgacagtagtaaatttacaaagttggctgaacagacaaagacattcaggcccaatgatgaggatgatgacgactcagatgatgactttagtgatgatgaagagttgcactccccaattgacgaggtggatccttttgttttcttcgtggatacaatgaaagtgatgcaatcatcggatccattggggtttcagaacctccactcagacacttgagttctcttatcaagctcttgcaaatggtgttgcccagcatgctgagctgagaagaggagagacggaaaaggaaaaattagagaggtcatcagctaccatagattcttaagcttttgcatgtacattcttggttcttgcttttacggaggcattttgttggctcagtggtcctaattggtcttttgtgagctttgaagagtttgcagttttgaaattgaaatggtgagtttagtgtcctgaagttcctgttgacttcagaggatgtggattcaggagtttggtgcttcgggctatcctttgaatgagtgtggccattgcccaccctctcaagtttctatgttttgatttgagttgacggttttgctgtttccaatatatgggaaccaccgttgtctgttcttagcaatggtttgatgtatacgagttctgtcacatagacagggccgccaatggctgcattggtaatttttggtgaggaatagtttgataattctgtgtttttaagttagttttggtcgagagtataatccattgcgtattgaagggatcagttttgggttgtgcaaagcttttctagtgtggctcgctgcatgttgtaaaacagttatatccattctttatcaatatttataaatattttgtgtgcaaggtttaaaaaggttaatattctcttttttat

SEQ ID NO: 116614 - DNA, 341 bp, Glycine max
  unsure (1)..(341): unsure at all n locations
  Clone ID: PAT_MRT3847_76312C.1
gacccacgcgttttttatcagnagacaacttcanaaattgggtggtgagtgaaaatggcttccanctggagtaaaaaggaaatgaattcgtagaatgcatagcccccacaccaaaaaaataagcatgtcaaaaagaaaagtatatagcagaaaatagtgaagagagtattgtcaagccaactgtcttactactctaggagagaatgttgcgtattttatgagcaaagcttctgcaaactgtccaccttcagagctttcacaattacacctgcgaaaagtatgtgcatnaatcaattatatgaaactaacactgcatataaattagaaacaactagatgaat

SEQ ID NO: 116615 - DNA, 346 bp, Glycine max
  Clone ID: PAT_MRT3847_76313C.1
gctcggaattcggctcgagaaaaaaaaaaacattaaaaatttaaaaaaaaaaaactacaaaagaaccatatagaagaaaaaaaagggcatgccgccagaccagacgagcataacacacccggaacttacttccgaaccggtacctgatggcaccccagatttccctatggagactacttttacagatgggggtcatcatgggcatacctgtgacctgtgcgaaatagcactccgatcacagtggcacacgacctatgacccgggaactctacttgaaagcctgcggaggcttatgagtgagcactctcacattgaggactttgcattcactgccagttttataggc

SEQ ID NO: 116616 - DNA, 489 bp, Glycine max
  unsure (1)..(489): unsure at all n locations
  Clone ID: PAT_MRT3847_76314C.1
ccacgcgtccggagctacagaagacaaaagccaacaacagggcancagaagaagcctttgtaaatgacattgaggagtcgtccccaggcactgagtgggagcgggtggcccggctgtgtgactntaaccccaagtccagcaagcaggccaaagatgtctcccgcatgcgttctgtcctcatctccctcaagcacgcccctgtggtacactaaatagccgttctggggaaacactacatccgccctatctgagttctactcagtgtatctattcacggtaattggattaattatgtggagctcttttggaccaaaccttttgactttagagaagatcattgtttgtgattgcatgtgcccttcaactgtgttctccctggcattcaaagaagatgggaggtggcggcaaatgaagggagggaggccttccaacggcagcctcaacctatgcttttgtgcattattctgaaaataaatttctgttccaaga

SEQ ID NO: 116617 - DNA, 258 bp, Glycine max
  Clone ID: PAT_MRT3847_76315C.1
accaggtcataaccatttttgtataacacgcaaattggaaattgttgcaacccattctctaacattgataattacaacaaacttgttccatacccaaaccttcttcttcttcgcttgatgaggttcttcgtttcttgcttcggcggcgccggcgaccccaccggctccacgaagcccctcgttccgccgccttcgcagactctccgccgcaacaagtcccactggaggcccgccctgggatccatttccgaggacacc

SEQ ID NO: 116618 - DNA, 394 bp, Glycine max
  Clone ID: PAT_MRT3847_76316C.1
gttacgcgtccggttggttgcggggaggaaccatgaatttctctaccggacgttggactatgaagagacacgggttgggggaaccaaggctgagagtgcacgattggaaaggtgggaacagagggcaagagtagagcaggggttgatcggcatcggacgcagatgactcaaggaatgattcagagggtgcccacgacagtgatacccgagataacaggaatagcaaggacctgggcgatgagaacaacaagactggggggacccacggctcatatgtacactggccggtctcaaaactgagaactaaggaatcctgtgaggcaaaagcaatgactatgtcattgaatgcagaccagagggcggatgcatggagactgacatttctgaagcgtac

SEQ ID NO: 116619 - DNA, 762 bp, Glycine max
  unsure (1)..(762): unsure at all n locations
  Clone ID: PAT_MRT3847_76317C.1
accaaatagggatatatttggtcaaattttttcttgagtgctctatcaaacaatctagccttatcttgttcttacaacaaattagcttattttgtgtaattatcaagttattcattccatgaaagtaggcacactaccaatacttgtgtatacatttttccacagcaaatgccacatcttgagattacagagcaaaattagcataaacttgtatcaaaacttgaaattgtggtgtattcaaattatttttaatgttgctcctccccgcttttcgtttctgttgtgatcaaccttgacagagaatgtggatggaggacaagtgatttagcaccatgcttagatccatgcgctgtttgtttggaaaggaaatgtatggtcgctgtagaaggtatatatactcctcttaaattgacaaacaaacgtatgtattttgtttagcataaatgctgcacgtatggtatgcaattgtagagaatgattgagccttttttgagcaaaaggttagtgttatggttaaatttttgctgtggaacaatattattttgtaggaaacataacgtaattaccagacatgaaaggccatattctcaaaatgttctagttntagtttatagtcttttaatcttaactaacacgtttacatgtataaacaacaatcttcgatatggttttttggatttataaagtggtagctcctagaaagataataatggntcactttttacgggttgcaaattggtgtactcatgaattcatactaca

SEQ ID NO: 116620 - DNA, 428 bp, Glycine max
  Clone ID: PAT_MRT3847_76318C.1
gcccctccttttttttacctgtttggcggtctttacctttataggatcttctttcagacactcaaatctgaaatttttattcaattgttaacttttaattgttaccaaaaacgggacgaacacactcgtgggggcgccaaaaacagaaaaacaactgctttataacaatttattcctttccactaaaaaattatagggtggaaaaacacttgccagagaaaaaaaaaaggggaatcctttttccttatatccaacccaaaaaaaaaccttccctaaattttttttctcaaacccaaaaccaaaactccgttaaaaaaattcccccacaaaaaaaaaaactttattcccttttgcctcttggacaaaaaaaacaacctttttcttttatagggcgcacacaacgcaaaacctctcctatttcttttggg

SEQ ID NO: 116621 - DNA, 1036 bp, Glycine max
  Clone ID: PAT_MRT3847_76319C.1
gggaaaatgacttcgaggagggaaatcacttataccgtttcctcgagcatgaaccctttatccccagatgctttaattttcatggtaccacaaatgatagtgaaccaaagcctgcagattcaatattcgtgaggcttaccaagattatgtctgccattcttgagtcttatgcctctgatgataggcaacatgttgattatgaggccattagcagaagcgaagaatttcgtaggtatgtaaatttgactcaggatctgcagcgagtgaatctcttggaattatcagaaaacgagaagcttgcattcttcttaaatttatataatgctatggtcatccatgctgttattagcgtagggtgtccagaaggtgcaattgataggagatccttcttcagtgatttccagtatctggttggagggcacccttattctcttaatatgattaaaaatggtatcctcagatgcaatcggaggtcaccatattccttagtaaagccctttagcacaggagacaagcggttagaggttgctcttatcaagttgaatccgctattacactttggactttgtaatggtacaaagtctagcccaaacgttaggttcttcacaccacatagagttgtagatgaattaagaggtgctgcaagagagttctttgagaaccatggaattgaagtggacctggagaagagaacggtttatctaactcggattttcaagtggttcagtggggattttggacaagagaaagaaatattgttgtggataattaattacttggatccaaataaagccggtcttgtgacacatctcatgggagatagtggaccagttcacatctcttaccagaattatgattggtcaataaattcttgattagttttgattcagctactgattattacacttttaccagattgtggcatcttatcttattccatccaaaaggagagagaatttaagtgatttgataccgaaacagattattgtagatgtgatatcatttttgcacaccacatgtgcagaccatttaagtt

SEQ ID NO: 116622 - DNA, 318 bp, Glycine max
  Clone ID: PAT_MRT3847_7631C.1
cacgggcaccgacccagatgaagattatctgtggcaaaaaagatgagccacttcaactttctcaaaacaagcactctttcttgagcaaccgagagaaaacactgccccgatcttaaaaccaggaataacaaatgattaaggagccgggggacggaccaaaaccagatctgcttccatcaatcctaggccattaaacggtgaactttggtggaccggctaactcaccaaaggaatatctttgtttatttttttaaggcgtcaacaaaaaccactgatctgatgaaatttgttcggcggccccactgagattccttgaga

SEQ ID NO: 116623 - DNA, 218 bp, Glycine max
  Clone ID: PAT_MRT3847_76320C.1
ataaactctatcttggaattgtctcttatcattatgagagttgcgtatttcccacaaaaaaaaactatttaaaaatataaaaagcgcgccgctctatagtgatccaaacttacatacgcgttcattctacatgataattctttttttgtgccacctaaaattcaattcactgtcctttgttttacaactatcttgaatgagaaaacccttattgttac

SEQ ID NO: 116624 - DNA, 1003 bp, Glycine max
  Clone ID: PAT_MRT3847_76321C.1
tcgagcggctcgagattttttcattcatttgtgttatccttacgttaaatttctatctcctatggtaacaatactgcttaccatttatgtactactatgattggttatgaaaacagattaacctgttcctgacaaattgcaggttgctcttatcaagttgaatccgctattacactttggactttgcaatggtacaaagtccagcccaaacgttaggttcttcacaccacatagagttgtagatggtaattgagcagttcgaagagagttggagtattgattcagacttgaattaagttttgagctgtcttcacatgattccgctcggattttcaagtggttcagtggggattttggacaagagaaagaaatattgttgtggataattaattacttggatccaaataaagccggtcttgtgacacatctcatgggagatagtggaccagttcacatctcttaccagaattatgattggtcaataaattcttgattagttttgattcagctactgaatatacggtttgtttattacacttttaccagattgtggcatcttatcttattccatccaaaaggagagagaatttaagtgatttgataccgaaacagattattgtagatgtgatatcatttttgcacaccacatgtgcagaccatttaagttatatgtagaaactctagatcatacatagtttgaattgaggtttttcttttctttttttttcagaaaaaaaaaagatcgtgggcattgataaatacaaattcttaggtaggaactgattttatagagagttggctatatgatgacgctgtaaaagcgctttggagttgtagaatgaagtcctggacttgtttcttcgtctggtgtttaaattcataaagtctggagcttttcccctgtaaatatcactgaacttgtatggtgtcgtgaaggttgttgatgttaattatgtcataagaaagtttattaggagaacttgtttgtattaagttgcatatc

SEQ ID NO: 116625 - DNA, 290 bp, Glycine max
  unsure (1)..(290): unsure at all n locations
  Clone ID: PAT_MRT3847_76322C.1
agntgctgttggacagaaacaaaaatcatccattattaaaggggggatgggggggaaggtaaaaatttgacagctttaactatttttttcattttttttaaaaacttctttattcccagcttgattttattctttaaaccgttttaaatatgagtagattttattttcaattcattatttttgcacacaatttaaaacattatttgctacaggttcatactgattgcgtttcacatggttgtttttcatcttatgttcacttttttttcttatcatgaggtacttgtgtt

SEQ ID NO: 116626 - DNA, 222 bp, Glycine max
  Clone ID: PAT_MRT3847_76323C.1
atagttgttgcaatgcttctggttgatacttaccataccaaacctgaaaattcagttcatactatttttgttacgtctttcaaaggcgaacggctcatacgggtggttacatttccgagtaccattgtgcagattgaaccatacatgaatacgaggtttcaccctttgagtaccactaccaatcgtgagtttgttcaaaggaaagatctccaatggttaaag

SEQ ID NO: 116627 - DNA, 522 bp, Glycine max
  unsure (1)..(522): unsure at all n locations
  Clone ID: PAT_MRT3847_76324C.1
cttctctgttggagccggaaaatggacaagaagctgcccctcttgttcattttttcagcagccttggtgatggaagcagtgttgttggttagtgttgtggctgaaccagtggaagataaacaagctttgcttgatttccttgacaacatgagtcactctcctcatgtcaactgggatgagaacacttctgtttgccaaagctggagaggagtgatttgcaactctgacgagtcccgagtcatagaacttcgattgcctggagctgggttgagtggtccaatctctcccaacaccctcagtcgcctctcggcgcttgaggttgttagtcttagatcaaatggtataagtggccctttccctgatggtttctctgagctgaaaaacttgaccagcctctatctccaatccaacaagttttctgggtcgttgccattggatttttcagttnggaataaccttagtgttgtcaatttgtccacaattctttcatgggagcatcccctttcaatttcaatctgactc

SEQ ID NO: 116628 - DNA, 136 bp, Glycine max
  Clone ID: PAT_MRT3847_76325C.1
cttaaacatcctcgtcaatatcgcctacaattgtgtcaaattctttagaaacggtctagaagactttcaataaggtcgataaacttgcatgtgagctgcattggatgaagaggtcacagagaaagttgcagcgtaa

SEQ ID NO: 116629 - DNA, 338 bp, Glycine max
  Clone ID: PAT_MRT3847_76326C.1
atacaacggtacagctggggggggaccactgtttgggatcgtgcgcaacttgtgaatattctgatctctccatgagatagctcgactcggaggtagttttctgtgattgctgaatttagttaaggatgttgaatctgagattcttgtgctacaagatgctcgtagatcaacgacgatgttaagcacgtaagcattgttgggacattgaggttctcacaggcaagtcatcagagactgtcatctgatgggtaagtgcagcataggttttgagacttacccatggttgtgacaatttgcgtggtcgatgcaattacatattgtcgcatcatgatcttgtt

SEQ ID NO: 116630 - DNA, 178 bp, Glycine max
  unsure (1)..(178): unsure at all n locations
  Clone ID: PAT_MRT3847_76327C.1
gacgctttgccgcgcggtttcatttcaccgcagcaacttggtgactccattcccatcaccgcaaccacatactactacgtttctgtcttcgttccattctctacctcttgtgagtgcaatcaatccgtntacattgttatatattgcacacacctgagaccgatacttaggtttagag

SEQ ID NO: 116631 - DNA, 1148 bp, Glycine max
  Clone ID: PAT_MRT3847_76328C.1
gatttcccttcctttttaacttatagcctctgctccccttttgcggggtccttcaatctcacttggggaacctccgtgcattaacccaaaagagttcatggacccttaattaaaaaatattttgcctagaaccaaaacctgcccttactctataacatttaccaaccgggaattcttcctggacgttttgttttttgattctagacacttggaagaagaatgagttgttttccttgtttttcaaagactaagagaaccaacagcaagagggagcagcaaggcattataccacaggaaaactttgtaactagaacaccgccagatgtaaagaaacaaaaggcagatgatccaaaccaatttgacacctcaaagattcaagcacaaaatttcacattccgtgagctggcaattgcaacaaagaatttccgccaagaatgtttgttgggtgaagggggctttggcagagtttataagggaacaattcctgcaaccgggcaggttgtagcagtaaagcaactcgaccgaaatggggtccaaggcagcaaggaatttctggttgaggttttgatgttaagtctcttgaaccatgacaatctggtcaaactcgctggttattgtgctgatggagatcaacgtcttttggtctatgagtttttgccagggggctgtttagaaggccgtcttcttgagaggaaaccagatgaacctgtattagattggtacagcagaatgaaaatagcatcaaatgcggcgaaaggactatggtacttgcacgacaaggccaatccttcagtcatataccgggacttgaaatccgccaacatcttgctggataatgataacaatgcaaaactatctgattatggactggccaaacttgctggtaaagataagacgaacatcgtaccaacaagagttatgggaaactatggttacagtgctccagagtacgtaagaacgggtaacctcaccctgaaatcagatgtgtacagttttggagttgtcttgctagagctcataactggacggcgtgccattgacaccacaagaccgcacgatgagcaaaatctagtttcatgggcacaacccatattcagggacccaaaaagatatccagacatggcagatccaagtctggaaaataattt

SEQ ID NO: 116632 - DNA, 443 bp, Glycine max
  Clone ID: PAT_MRT3847_76329C.1
gatgggttattgatatagtattttttttcattacatttagagtaaaagttatgtctgttattgtatgattgatcatcttaatcgtaagttcttaaacctccttttaaagagaacaaaattggtctttttttcagttagactcccaaagtgaaagaaacatggtgcagaatattttgtgtctactcctgatgtaatatgagttgggcaaactgaatcttgaatttctggttttttcttgtataagctgtaattttctgtggtagtccttaccgcatttaatactttgtgcaattaaaaaatcacttggagttctaaattagtactctacagctcttcatctttgactggtacatattttttttttatatcataacagacatttgtaggaacaccattctggatggcacctgaggttattcagaatactgatggatataatgaga

SEQ ID NO: 116633 - DNA, 761 bp, Glycine max
  Clone ID: PAT_MRT3847_7632C.1
acttccacttaataccctactaattcccttaatctatctatgattctttgatttcaatttcaattattcgatttttttttcatcctttcaatgagattgccgaattaatttgttcaattgaattctgaatagggcacggatctccttaccctccaccccaaccgggttacccatcggcgccgcctcatgaagggtaccctccgccgccgccgcctccgggatatggtgggtaccctccaccgcatccgccgcagcgtccgccgtatgactcctaccagggctacttcgacaacgggcgtccaccgccacctccgccgccgcactaccattaccagcacgtggatcatcatcacctccacgatgagcccgggtgcttttcattcctgcgaggctgcatcgcagcactttgctgctgttgtgtgctagaggagtgttgcttctaataatcacaccacaaaagttgtttcttcagtttgctgcactttgttatggctctctagagaaatgtggctacaattctagataataagtgtgagaggtggcaagtattggtcattcttgtaactctggtcttttccctctaccctaaatcctggtctgtgcataggttctgtgatgtggtctatatgtgaattgctttgtacgaacactataatggaaaatgtaaaccgtttcttataaggtgtaacagacaatgatatggttaaatttgttacaaaaaactcgccaaaaaaaggcccctaagtactctagcgttcgca

SEQ ID NO: 116634 - DNA, 712 bp, Glycine max
  Clone ID: PAT_MRT3847_76331C.1
cttcttctcatcctccttctttttcttgtccttctctggaatgacatcatcaaggaagctgaggtcgtgctgggagaagaggtagtccataccttttctgacagctaccagggccaggatcataactgggaaaaataatcgcagccactgtggacttgaggatccagagcagagccaggcacaacacctgcagggaggtgaacaggtggactcggcgcagggggacgtggcgcaggtagatgaagtcaggttgatgcttcaggggcatgagaagcagcttaagacggtccatgaactgcacaccgttcagtgaggccacccccatatacaagaacacgccatacagaacaggcatggggataaacttcaagatgggagccataaagactgacaggccagtcagaataaacacaagggttccagtgactcgttgttctctcactcccagaaactttggttgttctccaggcgcagaagtctctgtctccatcttcagactgtcgatgtgagcgatggagatgacagtagcagccacataccagggaagagccatgaaggagcacaccaccatgaggatggcgacccaaaacaggtccaggtgatagccagctcccttcttgagcttatgttctttcctgttcacaatcacggccgtgatttgctggtccatgaaaatcaggatggtgactagcaaagccgggatagcagcagc

SEQ ID NO: 116635 - DNA, 900 bp, Glycine max
  Clone ID: PAT_MRT3847_76333C.1
gttctgaagatctacctgctaaatttctaaaattcattcattttccctgtctatattctctcctctccctcctcctgtgtctcagtttgctggctagatacgtagaattgctgctgcttcttcaatggctcaaattgcgcttattgctcctgcagcaactgttatacctattattactggtagggggaaacaacaaaaactatcatatgctgcaagaagaaacaaagtgagtttagcatcactggttcctagttggaggcttgaaagggttccaaggttagccttatcaaataataataattcaggcgatgatagaaagacaagtgtcgtggtgaaggtatctgaaggaggagctatctctctccctcatggttggtcagcacaaaaggaagaagaagaagatcaaatctcagaagggttaaaaaaaatgaagggttcgaacaaccggttcttcacggtggggttggtgggcggcgtggtactcctccaacattggcgtgcttctcctgaacaagtacttgctcagcaactacggcttcaagtacccaatcttcctgaccatgtgccacatgacggcgtgctcgttgttcagttacgtcgccatagcgtggatgaaaggtcgtgcctttgcagacccttcgatccagggtgcagttctttcagaatctctgctctcagcctcgttttctgcgtctccgttgtcttcgggaacatctctctccgctacctccccgtgtcgtttaaccaagccattggcgccaccacgcccttcttcactgccgtttttgcctaccttatgacgttcaagagggaggcttggctcacttacctcacgcttgttcctgttgttactggagtcatcattggcagtggggggggaaccgagttttcatctgtttg

SEQ ID NO: 116636 - DNA, 664 bp, Glycine max
  Clone ID: PAT_MRT3847_76334C.1
cgcaccatttccataactccttacaccacacctcctcctcgtttatccattcccccatctacaacagctaatgcgatccaattccaattagatctagggtttctctttccctcgccggagaacaacaccgattttccggcgctggcttcacggatctcgcatcactgtttgataatacattggcaaaatgtacaccaaatcggcgcagtcatcgtttcgggaccggacacacgaattccagagcattgcggagaggttgaagaagacaggatcagcgccaaatggacaaagcagcagctcatccagatcggaggaacagcgatcggcgattgcaaatcaatcagagttcaacagaagagcttccaagatcggcttcgggattcaccaaacgtctcagaagctcgccaagctcgccaagttggcgaaaaggacttcggtttttgatgaccctactatggaaattcaagagcttacgggggttattaagcaagacatcactgctctaaactctgcggttgtggatcttcagttactcagcaactctcggaacgagagtgggaacgcttctaccgacacgactagccattcgaccacggtggttgatgacctgaagacacggttgatgagcgccaccaaagagtttaaagatgttctcaccatgcga

SEQ ID NO: 116637 - DNA, 499 bp, Glycine max
  Clone ID: PAT_MRT3847_76335C.1
ggcgccgggccggaaccccgagagcgccgcccgtccggccacgcgtattttttattttacgaccgaagcatcgaacacaacacaagggaagggtcggaaatgaaggaaaaagcccgagcacacggggagatggccgataacacaaaccgcaggagacaaagcgaacgtcgaacatgccaggacacaatccaactaaagccaacacccgactccctagactagcacgcaaaaaaccgccgagacaaaaaacaaatgcggagaaccccggccggggaggaaaagccatagcacccgcaccaataaacatcaccctgccccgttcaagcccaccaacttcgactccgacggcggatcgaagaacgcagacggcaccactcgtccttgcgagggaacgcaccgagagaactccaaaactggcggacagaggcgcgaaaagaaacacagcaagctcggctcgcggaaacacgaggagatgaaggaccatgaccccgagctggag

SEQ ID NO: 116638 - DNA, 502 bp, Glycine max
  Clone ID: PAT_MRT3847_76336C.1
tgggtttaatgcacacaatcgaaagaggaacaaggtgcttcgctgctattgctttctgcaatgcaccttttttcatttccataactctttacagttacaccacgcctcctcctcctcctttagccattcccctatccacaacagctattccaattagatctagggtttcctcttcctcactattcaccatccctcgccggagaacaacaccgattttccggcgccggcttcacggatctcgcatcagcgtctgatacattggcaaaatgcacaccaaatcggcgcagtcatcgtttcgggatcggacgcacgaattccagagcattgcggagaggttgaagaaaacagggccagcgccgaatggacaaagcagcagttcatccagatcggaggaacagcgatccgcgattgcaaatcaatcggagttcaatagaagagcttccaagatcggcttcgggattcaccaaacctctcagaaactcgccaagctcgccaaggtggc

SEQ ID NO: 116639 - DNA, 333 bp, Glycine max
  Clone ID: PAT_MRT3847_76337C.1
ctggtctgttccctgactgatctccccatatgatcggccgtgcttaacgccccagggggcgccgatcgttcccatgccgaggttctcatatgacagagctaatctccctgggcatttaggtgcacgtgtcgtagcttgatccaattgagctagtctcactcctcgggatcttttgcgctctgaccaaatcttgatgaatgactgttatcactaacacacctgctgcaaatatgacgaggaagcttgcgcatgtcatcttatcaatgcaccatgcatgccatagtgcaacttgtgatcatggtgctatacatggtcacaccattcaggctccct

SEQ ID NO: 116640 - DNA, 166 bp, Glycine max
  unsure (1)..(166): unsure at all n locations
  Clone ID: PAT_MRT3847_76338C.1
tgtatgattgcttttctatttattgtggcatttttgngttgtaccctgaaattgaatttgctgctttattactaatacttattgcaaacacaacaacagggtacatcacaaaaatgccacatttaatatgtagtgcttaacttccaaactcaatttcttacttatt

SEQ ID NO: 116641 - DNA, 368 bp, Glycine max
  Clone ID: PAT_MRT3847_76339C.1
taggtcggcggtcgccctttttttttgtttttttttttttttttttttgtttttttagggggaacccacttttaaagtaggtatcaacttgtgaccctgattctgagaaactacaccgcaactcattttgacgccatactagtctaatatttatgaccataaggatggggcactttagtggagacgatacatcacgaagtgttattaccaatattaataatgctactaatattctagagggtaattttcgggtgcctgaccacacaaatgtacgttcagaccttgaaggatcatcaattcggggaggtgcttatgctgtaaggtgtggggactcgagatttgacgaggagctaggacgcattgttggg

SEQ ID NO: 116642 - DNA, 817 bp, Glycine max
  unsure (1)..(817): unsure at all n locations
  Clone ID: PAT_MRT3847_7633C.1
gtccggattcccgctcgacccacgcgtccgccccgcgtccgcccacgcgtccgcacacggtcaagcagggctacagcgagacagctacagccgatcgagatctcctgtcagaagagaacgaagcccagtttctgaagatagatcacagagtcgtgagccctccaagataaggaagcatagtgcatcacctgaccaaagcagcccacggaagagaggtgacacatctcctggcaatgataggttggccactcatcaagatgggtctgactacagtgatggtcctagagggaaaagtagaagccctgctagccctgcaagggaccgtgatgagggcagctatgatagccctaaagctaatggacatagccacagccccagccggagccctagggatgatgacaggagccccattgatgaagatgatgacaaccaccgtcgctcagggtcaccttgaaaaaagcacttcctgataaaatgagatcaggatgtgacccaatttgtatctgctttgtttataaaatgcactccaggttaattatgtgacaattgtttatgaaaacagttttatatatgctatttttcagattcttgcggtcaagcagcatgtgtggcttacctagaatatggagtgcatgaatttgtttcaaatgttggcataatttaaatcaatatgaattattgtgagaaatttaaatttgacatgttttgaatcctttcagctcgaaaaaaaaaaaaaaaaaagaagaaaaaaaaaagcgcgccgcttctagagggattccaaggcttagcgtagcgcggtgcaatgcgagcngtcata

SEQ ID NO: 116643 - DNA, 356 bp, Glycine max
  Clone ID: PAT_MRT3847_76340C.1
ctgccgtcctttttttttttttttttttttttttttttttttttttttaaaaacacaaccctgggggggggataaatcttctcaaaggggatagggaactgcccgggctcaagggtgtgtgtgttgccaacaaaaattttttactaggacactgaatgccaaactacctcctcggaatatttatcttacagtttaaggggggggttcaatacaactaccttccaagattgatatccggttttctccaggtttcggaccacttgttgggcccccttggtgactaaaggccccacaactggtgttgcagtgggccccctgccaaggggggtttccctttaattgaacccggccttttc

SEQ ID NO: 116644 - DNA, 1957 bp, Glycine max
  Clone ID: PAT_MRT3847_76341C.1
actttaatcactagtaatagtgattaatttcccagtaactaacactatcacacacagcatagtcttctggtgcaagaatcaattgagcaagcatgggaatgttgttggtggtggtctcacctttcttatcttactctgtccttttcctggttctattcctcactctgaagttccttttccaaagcagaaaattgagaaacctaccaccaggtcctcctcctcttcccataataggaaaccttaacctcctcgaacaacctatacaccgtttcttccaacgcatgtccaaacaatatggaaacatcgtttccctttggttcggttcacgtcttgccgttgtcatttcctcaccaacagcataccaagaatgcttcaccaaacacgacgttgccttggccaaccggctaccttctctctcgggaaaatacatattctacaacaacaccaccgtagggtcctgctcccacggcgagcactggcgcaacctccgccgcatcaccgccctggacgtcctctccacgcagcgcgtccactccttctccggaatccggagcgacgagacgaaaaggttgatacacaggctggccagggactccgggaaagattttgcgcgcgtggagatgacctccaagtttgctgacttgacgtacaacaacatcatgaggatgatttcggggaagcggttttacggagaggagagtgaacttaacaacgttgaggaagcgaaggagttcagagacactgtgaatgagatgctgcaactcatggggttggctaacaagggagatcacttacctttcctaaggtggttcgattttcagaacgtggagaagaggttgaagaatatcagtaagaggtatgataccatcttgaataagatccttgatgagaaccgtaacaacaaggaccgcgagaattccatgattggtcatctcctcaaactgcaagagacacagcctgactattataccgaccaaatcatcaaaggccttgctttggctatgctctttggcggaacagactcgtcaactggaactttagagtgggcattatctaatttagtgaatgacccagaggtgctgcagaaggcaagagatgagttggacgctcaagtaggaccagatcggctgttaaatgagtcagaccttccaaaacttccttatctcaggaagatagtccttgaaacacttaggttgtaccctccggctccaattctaataccacacgtggcttcagaagacatcaatatcgaaggattcaatgttccacgagacacaattgtgattattaatggttgggccatgcaaagagatcctaagatatggaaagatgcgacaagctttaaacctgagaggtttgatgaagaaggagaggagaagaagttggtagcatttggtatgggaagaagggcttgcccaggagaacccatggctatgcaaagtgttagctatactttgggattaatgattcaatgttttgactggaaacgagtaagtgagaagaagcttgatatgacagagaataattggatcaccttgtcaaggttaattccattggaggctatgtgtaaagcccgcccactcgccagcaaagttggaagttattaacaatattttatttggtatatttgggtgaggatctaatactcataatttcggtgtgtaagtctatgcatgttaaaattaataatatttgtcgtatgtccacaaggccaaatgtagtactgggtgtggacttgcatatacaatatcaatattgtataaatcccagtttccttgaataaatttctttactttctattgttatgccgcccagttttctcaaataaatttctttactttcaataagcacggagttttttagcatggccccccccgtgtagtgccccttggcccagtatagatgaaagcgccggactggccggagcctaataggagcttgccaggtgcagtgcatg

SEQ ID NO: 116645 - DNA, 300 bp, Glycine max
  Clone ID: PAT_MRT3847_76342C.1
gggaggtttgtttttttttttttttttttttggggagcgctggtcaccaagctgactgtaccgaaagattggaaagagtcgccaatatctattttgcagctattagcgactatgggttagcatgaaaatgaaggagaacacatatggctttgcttcttctgagaatggtaggaacatccccatgggcgctgtcgggccaaaatgaccaaccgctaaatcctgagagaaaagatccccatacccatgaagaccccaaattttggggggcggtatataagagagcacaccagcatcccgtga

SEQ ID NO: 116646 - DNA, 186 bp, Glycine max
  Clone ID: PAT_MRT3847_76343C.1
atttaattactatatactctacatattaacttttagaaatgtgtcccaatggatttacaaattgatacaacaaaaaatgaaacttttaaactaaaaaattaacaatactaatattggacctaactgtagagattcataataatgtcttgtgatcaaaacctaaccacgaaactagaaatgaaaact

SEQ ID NO: 116647 - DNA, 1185 bp, Glycine max
  Clone ID: PAT_MRT3847_76344C.1
ccaacgtgggctcccccgcgtccgcacaacaggagctccgagaggttcaagccatggggatctacctagctgaagggttcagcagttaaggaaaagagacgaagattttgagctcggaaccattgcgatggccatggcttccaaccatcttcgaaacctcaatcgcatctccatccaccattttcaggctctcctcaacgatactaccaggttcttctccgacgctgcttcttcattgcctcaaccgcaacctccctcatcatccttgaagcacaatgagctcgccaagttcgccgccatcgccgatacctggtgggattctgaaggcccctttaaaccattgcatgtgatgaatcctacgagacttgctttcatccgttctgcactttgtcgacatttcaagaaggacccttataatgctaaaccccttgaaggacttaaaattattgatgtaggatgtggaggtggaattctttctgagccactagctcgattgggagctactgtgatgggtgttgctgctgtattgaaaaatatcaagattgctcacacttcatgctggtttgcatcccgcaacttcatctatgaagctttgttgcacaacagctgagaagctagttgaagaaggaacaccattcgacgcagctacggccttggaggtgattgagcacgtagcagatcactccagagttctgcacggctccggctgcactaacagtcccagaaggagccactgtgatatccacgatcaatcgatccatgagagcctacgcaactgccattgttgctgcagaatacattctccgctggcttccgagaggcacacatcaatggtccagttttctgactccagaggaactcgtcctgatcctccaacgcgccggtatcaatgtggaggagatggctggatttgtgtataacccagtgacaggacggtggtctttatcagacgatatcagcgtaaatttcatcgcgttcggtaccaaatcaaacaacacggaataaaatacatagataagatacgtgttattgtcattactatgttgaatgctaataaaacaataagggttaagtgcggtggaatcagggagaggatgggcttgggacgcccttcatactttatctgcttacttactagtaattggagaaatactcaaaacacattcatttaaatacgctctaatt

SEQ ID NO: 116648 - DNA, 269 bp, Glycine max
  unsure (1)..(269): unsure at all n locations
  Clone ID: PAT_MRT3847_76345C.1
catatgaatgtggccctgctcaaacaangcanagaaaagatggtctctgggatcaaccatatcaaatccttcgcatggccaaaggacattgaaaaccaagacatactaaaacacccgctcactcatccaatatgaatggcttacaaaaggaaggatgacgtactcgccaaaaatactcacacatactaccatgatggtactgcataacaatgccctatcatttgtaagattgctggaaatgctatgacacctaacccacaaacaacacc

SEQ ID NO: 116649 - DNA, 735 bp, Glycine max
  unsure (1)..(735): unsure at all n locations
  Clone ID: PAT_MRT3847_76346C.1
cagcagagacagactcanctctttcacacaacgnagataattcggctcgagacttgttagagagagagagattggttgtggtctgctactatggctagtaacagagagagagaagaagcgctgacatttacaatcccttcgtcctcttcccattcttcccccatcaccgtctccgaccaactagacagttacctcgctgaccccagaagcgcctccggaagcttccagaacgacggccttctctccgccggagaagccgccgccgccgccgatcccgacttcggtttctcccgccccgatttccgccagagcccccttgctggcaccgtggagttctaccaacgccacgtcttcctttgctacaagaaccctcgcgtctggccaccgcgcatagaagccgccgagttcgaccgcttgccaaggttgctccatgccgccgttgttgcaaggaagagtcacatgaaaaaggagactcggttaacgatatgtgagggtcatgatgggactgagacatctaatggggatgtgttgatctttcctgacatggttagatacaggttttagtggaattgcaggagattaacgcattttgatgttgaaacgtttgttgaggaggttcttgtgaaggatggggaatggcttcccggaacgcctgaggcgttgagaggttcgtatgtttttgtgtgttcgcatggatcccgtgatcgcagatgtggggtttgtggacctgttttg

SEQ ID NO: 116650 - DNA, 545 bp, Glycine max
  Clone ID: PAT_MRT3847_76347C.1
aaatgtatgtagagtagcctgagggttgcaaagttaagggacaggaggagaaggtctattagttgaagaaggccttaaatggtcttaatcaagctccaacggcctggtacaacatgtttgatgagtatcttcaggggcttggatttgttaacactctccaagtgaagctatcttatatgtcaaagaagaatgtggtaatttacttgtagtttctgttcatcttgatgacatgtttgtgacagtaactaatgagatcttggtgggagaattcaaagctgaaatgctctaactatttgagatgacaaaccttggcttcgtgtcttacattttgggcatggaggtgatacgacaatttcagaagaaacggtccaagtgcaggaaaatgggctgagtgagtctctgaatcaagatgaaggtgggcctgtagctgccaatgagcccaattttgtaagatctcaacgagtgaagactaggcttgtttggtggaaggattataagaaatatcagttgatatccagcttttacatattgaataaataaatcat

SEQ ID NO: 116651 - DNA, 379 bp, Glycine max
  Clone ID: PAT_MRT3847_76348C.1
cccacgcgtacgcccacgccttcctaccggttcgaaaaaaccacagaagggcaagggggggggggaaaccctttttttttgtaagtgaataaaaaaattgcttcaaatccgaaactttacacttttgagggggggggaaaacaccacccaacccaaggttggttgcttattatttcttgcaaagggtattatgtcacccctttcattaaagatcatccccgaagggatgaggtttttttatcttcaacaaggaaaaattccacccattgttttgaaaattttggacacaacgatttttcttgaaatatgatggaaaaatactacattggtgagattgattcattaactgtaccaattaaacgtacctacatttcacctt

SEQ ID NO: 116652 - DNA, 632 bp, Glycine max
  unsure (1)..(632): unsure at all n locations
  Clone ID: PAT_MRT3847_76349C.1
ccacgcgtccgtgccattaaaagggtgttgtgtggttgatgaggaggatgagaaccacaattttgagtacagaaggtatctagttcatgaatatatgccaaatggtagccttgaagaccatctctttccaaccaaattagacaaccaaaatacaaagaagtcccttacttggcctcaaaggaaaagcataatcttggatgtggcaaatgctttggtttatttgcactttggagttcaacctgcagtttttcacagagatatcaaagccaccaatatactacttgatgctgatatgaggggaagagttggagattttgggctagccaaacggagcagtgaaagtatgtctcatctaaatactaaagtagctggaactcacggatatgtggcacctgaatatgcattttatggtcagctaactgagaagagtgatgtctatagctttggtgtggttattcttgagataatgtgtggaagaaaagcccttgagatgtctccatcaggaacaccagttntctagatcacagattgggtttggtcattgatgaaatctggaaacataggagaggctttggatgcttctatgttaggagatgaaaattgtgctagaaacataatggagaggtttttgc

SEQ ID NO: 116653 - DNA, 954 bp, Glycine max
  Clone ID: PAT_MRT3847_7634C.1
tttccttcaaaaaacaaaccacgttcgccacaatgcacttccccattctctttctctttctcctaccttcactcttcaagctttcacattcaaccacaatactagtagatggatcttccgagtggaagagccccacagtttccatcggtgactccatcattttcaagcacaagcaacactacaacctctacattttcaagaacgagaaagccttcaagctctgtaacatcactcaagccactcttctcagcaacccctacacatggcatccatctcggcctggttttttctactttaccttccacaatgggtcactcaaggcatgccaagattctcaaaagctagccatagaggtagcttcttcagcaatggctccagaacattctccagtggcaacaccagctccttcttctggtggagaggtgccatcttctccttcgtttccgtggccttttcgtcctggacaagaagcttcttcacctggtcctgcaccacaagcacaagcacaagcaggttcgccagtgacaattccgttagtgccggataaaggtggtggcatgcccttcattaacagcaaccctgcagttcctcttcctactggtgaagttgattctgctaccatacgccccttacccatcacttctggccatcaagaacaggtgatgattgggtcatttggacttcatattgcattacacaccatggctttactgctgctatgaggatgaagagaaaatgagagaaagttggagcgcaaattatgtagagaaaaaaaaagggatggggtaggaagggtaacccaatgaggtagccccatggactgtgaattgggtctaaagtagctttaagagtgatgattataccatgtattaaaatgctcttacattctactttggaatggttggcactttttgttccttggattaagaaagcaatcgattgcttcatttgcgg

SEQ ID NO: 116654 - DNA, 358 bp, Glycine max
  Clone ID: PAT_MRT3847_76350C.1
accaggcgtccaatcgtacccaaccataccctaacagtcacgaactcgtccgtgcatcttgggatgcatcggacaggggaggacttagcttgaataacatatctatactcacatctgttgtgctccaaccataaccaccaatctctacaaaactggcacatgtgaataggaaatataactaactaaatacatcctaccaaacttagacaatactaattcatcacttacactgagtataaccgcaatactacagaagcaaccatctgcagggttggaaatacgatcaagccgaccgctggcaactagtaaacttcttaaaggcactagacgattgggtaagaccacgacagtctatgaa

SEQ ID NO: 116655 - DNA, 603 bp, Glycine max
  unsure (1)..(603): unsure at all n locations
  Clone ID: PAT_MRT3847_76351C.1
agagtctcccaaggtagaagcctacaaagaaagaaagaaagaaaagaaaactacactgtaagataatgtcaatgaagagagaggtttctattttacagagagaaactctttagagatagaaagtcagtgacaagcaccagaagaagtgcctagcacccaaaaacgacaccagattctggataaaaatctaatcttcatcgctcttagatccattgagtttgttcttgcacatcatgattttccctgggtcaacaaccggttgagcacacagaagaaagagaagggtgtgaagagatgggtttgatcatgacccttttgatgagtcacatgcccacctagctcactagttttaatcgcgttctttttcgtgtatgttatgaaatttgttcatgtgggtcatgctaattcccttcgatcgacgagataattcaccttctggttccattcagaattgggttttctttttattgcgtgaaataagagtttttttttttgaggggctcagtggattttgatgagccatggtggagcatgtagcagcggtgcacactgctactaacgctttgcangcattaggggggggttttgatgtaaactttgata

SEQ ID NO: 116656 - DNA, 368 bp, Glycine max
  Clone ID: PAT_MRT3847_76352C.1
ctcatcaaacaaatcccagtgcctcagtctatactcaatccagtcgattctatcaacatcccatcccatccaaagaaagaaaaaaacacccttcttcgagaccagctctcagagaagcgcccattgatccatatccaacttgcctaaaaccttccttctcaccagccttcgcacggaacgacgcatttatggagagaaatccaaagcacccgggttaggcaccttaatattctgtgcgccctgaatcgcacccttaatcggagtcgtctttcccagatcaagaactttatctcccaagccgccgatgacggtcttcgcggctttgatggcacctccgaaacgtccttgtggcaatgcgtctcgggcgt

SEQ ID NO: 116657 - DNA, 123 bp, Glycine max
  Clone ID: PAT_MRT3847_76353C.1
cctcacacccccttctgtcaggcaaggggggtgtgcatagggatcattgattccctccaagtgaatatttaacatggcatcaaaaatcatgcagttgcttccttacgtttagtcatgaatgga

SEQ ID NO: 116658 - DNA, 179 bp, Glycine max
  Clone ID: PAT_MRT3847_76354C.1
cccgaatccccgagaccacccacgcgtccggctttaggcttttttttttttttgtaaacacagcctaatggtccccttacgggagaactggaaagacagtgcctgaacaacgctcaaatattttgctagcaatggaagaatcggtcctactcaaaaatgcatatgctgtacctaacctg

SEQ ID NO: 116659 - DNA, 284 bp, Glycine max
  Clone ID: PAT_MRT3847_76355C.1
gccaaaaaaaccaacaattgtaactttttactccaattttgggcattttttacaaagggaaaaaaatcccgagactggactttttttaattttatgaaatgattacttggcagaaaaaaaactttaattttctttacgggggcaaaaaaatatatccccaaagttttttacaccctgagatatgaaaaatcaggcgttgttaaaacctaagggtggccttcaaccattttttttcttgttggaccttgaacaacccaggggctttttgacattgacaagacttt

SEQ ID NO: 116660 - DNA, 390 bp, Glycine max
  unsure (1)..(390): unsure at all n locations
  Clone ID: PAT_MRT3847_76356C.1
atttgagcatttttggaacagtggtggtgctagagttggggaagaaggggctctcggttggtccgcatggttggagaaagaggaggaaactaggcaaaaagttatgaatgatgagctctcgcgtgaaaatgaaggtggtggttggactggttggtcagaaccatggtctaaagataatgagggtattgtcaatgttgaaaatgaaaccatcaatgatgtggttatggaggatattcaagatgaagaggaatacaaagaagttgagccagaagttgatactgaaaatttgctgaagatgctaggaatcgatatgaatgatggngatggtagcgaaattaatgacacttctacttggatcaaatggtcaaaagaagagtccttttatagatt

SEQ ID NO: 116661 - DNA, 585 bp, Glycine max
  unsure (1)..(585): unsure at all n locations
  Clone ID: PAT_MRT3847_76357C.1
nnnnnnnnnnnnnnnnnnnnnnngtgggagagataaatgggatttcacacattcccaagcactaaacgtgcacaaaattgaagattttgcattgaacgggatttcaatgcttattcaaacacacccttagtttgtcaaatttgtgcctgttgattccagtaattcaagcaggcatgtgatcgtgtctaccaagaggcaacaggaaaaacgtgaagaggcgtgttaagttgaaatggttttccttacagtcttcatatcacaaaaaataggtaatttcttcagcaaatccagtgcccttgtacaactctgaaccagagcaagttatgtcattctaactaagcgatgaacagaaataaataaaatcattacacatgagaaagcctgcttttaaatgttatatgaagggtatatcttttaatccagggcattacaacaaaatagcaatttttttagattgttcccgagtgagttaaacagagttgttgacaagggtccaacacctaagagcattttttaagaacagggaccacaaaatgagtattgtatagctaacaaggtactatatatgaggtcatgcaaagaaca

SEQ ID NO: 116662 - DNA, 726 bp, Glycine max
  unsure (1)..(726): unsure at all n locations
  Clone ID: PAT_MRT3847_76358C.1
gacccacgcgnccggttgatgngggangnnctttctagcaaagccctgggggaggagccacaagnggaacctgctctgaactctatacttagaatcattttgaggacttctagcatgcaagagtttattgcagctgattttgtttttaaaagcttttgtgagaaaaatgctgatggacaatcaatgctggcatctacggtgattccacattttttttttatgaannatgcacccctngaggaggatgncaagagggcttttggaagcatgctattacatggtcttactttgggtgaaaatgatggtgatcttgaggtttgtggcagggctgctagtgttctatctcatgtattgaaagacaatctccactgcaaggacagggttttaagaattcgaattgaggcacctgtcccatccctaggagctccagagccactaatgcatcgaatggtcaaatatttggcccttgcctcttccatgaaaagcaaagatggaaagtctagatcgtcagaaaactcatatattcaagaatatatcttaaaattactggttacctggctagctgattgcccggctgcagtgcattggttcctagatgctcgcccccaccttacttatcttcttgagctggtgtcaaatttgtcagaaacagtgtgcgtaagggatttggcagcagttgtcttgggtgaatgtgggatctataataaatcctctgatagtgcaaag

SEQ ID NO: 116663 - DNA, 397 bp, Glycine max
  Clone ID: PAT_MRT3847_76359C.1
gaagacatcgtgtgtcaatagtccaattcttgtacttattggcctcagctcaagacatgcaagtgatttcatctgagaattgagaatgagtaaatatttcctcaagattgagtgatattcagctaagaaagttaatgccatgttgccacctaaataataccatctcaacagtaaactttggtagcattaaccaagcatccttgccaaaccagctactatactgtatgcaccagattcaaagcataagactaaagtcagattatcaattcccaaaactgcaacccatcttcagagtctgctttctctattgtgtcttttgcatgaacaagaagctcattgctgaagagaaaaaaaaatgtcaagtatggggtattcaaggtctttcttggcttctttt

SEQ ID NO: 116664 - DNA, 130 bp, Glycine max
  Clone ID: PAT_MRT3847_7635C.1
tacaataccaggtgattttgtagacactgaactatcatgccccatagcatacacacatggtgcatcatactgcactggctacaataccaggtgactttgccatcggtgttcagccgcatcccataagcac

SEQ ID NO: 116665 - DNA, 231 bp, Glycine max
  Clone ID: PAT_MRT3847_76360C.1
tagtacatagcattccttttcaaaacccagcgtttcacattatgttctgttttatttctccaatgggacatgcacctttcacacctgtttcttcgactgacctgagtcaccgggatattttcaccaccgactaatccatcggcctctactacaccgtctacatacccgacgagtgccatttcggaatctttcagtttctaagctccgcctaccagaaaacctgctccgcct

SEQ ID NO: 116666 - DNA, 1003 bp, Glycine max
  Clone ID: PAT_MRT3847_76361C.1
ctctctatcgattctcgaaaaaaccctacccttttttagtcttcgaatttttcataatcgtaatgggttccgaaggatccagcgttgtcgttcctaggaatttcagattattgcaagagcttgagagaggtgagaagggaattggggatggaactttagctatggaatggatgacgctgacgacatatacatgcaatcttggactgggactatcattgggccccctggtactgttcatgaagggcgtatccaccagttgaaattgttttgtggcaaggattatccagacaatcctccatctgttagatttcaaacaaggattaacatgacatgtgtcaatcaagaaactggagcggttgagccacatttgtttcctatgcttgctaattggaaacgtgagcatacaatggaagacgttttgattcaattgaagagagaaatgatgtctcctcaaaataggaagctaactcagcctcctgaaggcaatgaagaagccagggttgatcaaaagggcctggtggtgagatgttgtattgtgtaattccatggagaatccaagcataataataataataataataataataataataatgtaaataactatattcaatagatgatccaagttcacggacttatgcataatgcatttataatgtaattatggaccacttccgtatgttacctggagcaatccaagatatagtagttactatatgtcttatgaaatttttattgtactgaagctgtttttacagcggactctaatttcgaattttaagatcctttttaactgtccttttgtgggttaactcatttataaatgtaattatggaccagtcgctctttaattgctcctcgagccgattcagctcgagctgccctaatcatcataactggaagaacctctaatcgaaagcgcgaaacttgatcagtgttggacgcgctttatacgcctgcttcgccaacgccatgggtgacgttcagatccacaagaccaaac

SEQ ID NO: 116667 - DNA, 535 bp, Glycine max
  Clone ID: PAT_MRT3847_76362C.1
ggctcgagaaagaagtttgattcatcattcatgtctttgtctcctcaggttggatacttggttccactaaatcgaaattttaaggaagaagcttcagttcccaagtttgctgtctcagatggcataaacgttattgggcgtaacaacattcctgtccccgacaagaggcttagccgcaaacaccttactttaactgcttctcccaatggctcggctagtttgctcgtcgaggggacgaacccaattgttgttaattctgggaataagagaaggaagctgaatcctaaagaagaagctaccatttgcaatggtgatataatcgagcttattcccggtcaccatcttttcaaatatcaggtgttgggtggtgatggaaaatcttcaacttgtagaaacaacgaagctcaatcatcattcaaaaacaaagcttcaggcaggagttcccaggataaggttgaaacaagcagccagaaacaaggaaggaatgcagacgcacggaagtcgtcgggtgaagacaatagtgtggaggccattc

SEQ ID NO: 116668 - DNA, 1278 bp, Glycine max
  Clone ID: PAT_MRT3847_76363C.1
gattcttccacaattaggcttacaatgaaccttgtaagaaaaagctctgctggtggttgtctcacaacaagtgatcataacatggaaatgtttttgatgaaataataaaaataataggtgagataatgacagatattaaatgaaaaataaattaatattcaaaataattaaatatcttctataagggattttcaaaggtgtctcactttctagctgctaagcaaaactaaaactagtttctactaaataatatattgatatggcctgtttttcctgtccatcatgttattttaccagcaacgtcacaatattcacaagatatcattagcttgcccagtcgtccttttttttcctatcagactatccaaaaacacaccctacggtgtattactaattgcaccatcaccagataaaacttgggtggtgccttttttctttttctttctctctatcgattctcgtaacaaaccctacccttttgagtcttccaagttttcaccatcgtaatgggttccgaaggatccagcgtcgtggttcctaggaatttcagattattggaagagcttgagagaggtgagaagggaattggggatggaactgttagctatggaatggatgatgctgatgacatatacatgcaatcttggactgggactatcatcggtccccctagtactgttcatgaagggcgtatctaccagttgaaattgttttgcagcagggattatccagacaatcctccatctgttagatttcaaacaaggattaacatgacatgtgtcaatcaagaaactggagtggttgagccacatttgtttcctatgcttgctaattggaaacgtgagcgtacaatggaagacattttgattcaattgaagagagaaatgatgtctccccaaaataggaagctaactcagcctcctgaaggcaatgaagaatccagggttgatcaaaaggggttggtggtgagatgttgtattgtgtaattccgtggagaatccaagaataataataatgtaaataactatattcaatagaccacttcctccctggagcaatccaagatatagtagttactatcatgtcttgtgaaatttttattgtactgaggctgtttttacagcggattctaatttcgaattttaagatcctttttaactatccttttgtgtgaacccatgtcatgtgtatacttgtgtctgaaaattgtgggataacatttgacttgtcatcgaattgtttttcctttggttcaaaaaaaaaaaaaaaaaagcccct

SEQ ID NO: 116669 - DNA, 2253 bp, Glycine max
  unsure (1)..(2253): unsure at all n locations
  Clone ID: PAT_MRT3847_76364C.1
gattcggattgagcgagaagacgacagaagggggttccataaaatgaaatcctactattataagtatgataagaaaacactactgtatcctcgatattgagtttaccatcgtgagccactcagcctgtgtttggtgggagggattattcagcttccctttttccttccctccacccaaccagagttagacaccgaaaatggctttcaaactgaaatcactacctctcctttgctctcttcactccccttcccgccaaaaccctaattcaacactctcaaaccatcacttttctcgtcgcttcttcgcaccttccattcctcccaccctgtgcctatccggcgcagcctcagcgtccacctttcatcgccatcgcttcttcgtaaccgctcgaagccaagacgaagaccagatcactgaggctcttgaacaagaagaagagaaagacaacgaagaaatatcgaggcagggtgagaaaaaggaactcgcgaagcaaggcatatgggatcagataaaggaaattgtgatgttcacaggaccagcaactggactttggatatgtggaccacttatgagtctcatcgatactgcagttattggtcagagaagttcaattgagcttgctgctttaggtcctgctacagttgtttgtgattacatgtgctacgtgttcatgtttctatcaattgctacttccaatatggttgctactgcccttgccaaacaggacaaagaagaagtacaacatcacatatctgtattgctttttgttgggttatcttgtggcattgcgatgcttttgttcacaaggctatttggtgctgctataataactgctttcactggaccaaagaatgtacacgtagtacctgcagctagcaattatgtaaagattcgaggcttggcatcacctgctttacttgttggatgggtagctcagagtgcaagtcttggtatgaaagattccttgggacccttgaaagctttagctgctgctacagttataaatgtcgctggttgtgtacttttgtgcacctatttaggttatggaattgtaggggctgcgtgggctacaatggtttcacaagttgttgcttcttacatgatgattcaaaatctaaatatgaagggatataatgcacttgccttctccattccttcagggaaggaacttctgacgatatttgggcttgctgctcctgtttttataacattgatgtcaaaggtggctttttacgcactacttatatattttgctacatcaatgggtacacatacaatggctgctcatcaagtcatggtccaaacctatttaatgtgtaccgtatggggtgaacctctctcccaaacctctcaatcatttatgcctgaattgatatatggagtaaatcggagtttgtcaaaggcccgaatgcttctaaggtctctcgtgataattggagctatacttggattgttgttagggattattggaacatcggttccttggttatttcccaatatttttacacctgatcggatggtcatccaggagatgcataaggtgctgattccatactttatagccctggctgtaacaccccctactgtcagccttgagggaacgttgctggctggacgggatctgaaatttataagtttgtcaatgagtggatgcttttgtgtgggttcactagtattatgggctttgagtagtagatacggtttgcttggctgctggttttccctcgcattatttcaatgggctcggttttcaatggccctccagcgccttctttctcccaaaggcatcttatactcggaagatacagaacagtataagctgctaaagctaaggactgcctagtttgatgaagtcatcacaccagttacaaggatagaagtatgttttaataaaaaaaaaaagaggatagtagtatgttggaccatctcagcttatgggttaagcgagttaagaccaggacaaccggctaaaaagtgagccatcgtttttataatttgtttagtccgcgagctgggttggctcataggttggagttcactttgatacttatatgtgtatgattgctataataattagcatgaaaaattaattcagattcttaattatattgggcgcaatttatatttgtttaaaaaaaaaaaaaaaaaaaaaaaaaaaaaaaaaaattnnnnnnnnnnnannnnnnnnnnnnnnnnnnnnnnnnaaaaaaaaaaaaaaaaaaaaaaaattnnnnnnnnnnnnnnnnnnnnnn

SEQ ID NO: 116670 - DNA, 582 bp, Glycine max
  Clone ID: PAT_MRT3847_76365C.1
tgcataaggtgctgattccatactttatagcgctggctataacaccccctactcacagcctcgagggaacgttgctggctggacgggatctgaaatttataagtttatcaatgactggatgcttttgtgtgggtacattagtattatgggctttgagtagtagattcggtttgctaggctgctggttttccctcgcattatttcaatgggctcggttttcaattgccctccggcgccttctttctcccaagggcattttatactcggaagatacagatcagtataagctgcgaaagctaaggactgcctaagttgtgaccttttttattttataattcatgaggcgttagaacttagaaggatagaagaatgttgtctgttgcaaattagaattataaaatcagttctattttaacacagattacaatacatttgcattgtaaatgcactgtaagcaagttgctgctgcctcaatctttttcgtgtattttaatattgttcagaatgcttgtaaactgaacaagaatgcaattaaaataattgctgcatgccaaaaaaaaaaaaaaaaaaaatttccttgca

SEQ ID NO: 116671 - DNA, 539 bp, Glycine max
  Clone ID: PAT_MRT3847_76366C.1
gaaataatatacattaattctcataatatacaattaaataatttaaatcctcataataataatagtcaatttttaattaattaaaattcacgatttattaaaaaataattcaccaagacagtaacattttagaggggaggaggaattaatctccattattctcctctacaccaaaactttcattttactaaaaataaaaatcacacaatactgcacttacaattccatcatcgacgatcattcacggtcggttaaaccaacacgtaaaagaaatgatccgtcaccaattaatctctatatatttatcaatttatggttccgatgacgttgctaaatgcagaaggagtttgttgcactggtggcattttctgaggacccgcagctttctccatgtcagcgataatatccaagcaattccctccgaggttgtaaacccccgcagagtcttcagagaacgggattttcccactctcaaacgcgtctcggcacgccccttggtacgacaacacagcactaaacttgaacttagccgggatgat

SEQ ID NO: 116672 - DNA, 128 bp, Glycine max
  Clone ID: PAT_MRT3847_76367C.1
acggacgcgtgcgcacttactctcaagcaaatagatagtatcccatgcgaggattacgattgaggtcatggtcctgtgcttgtctatttgaacctgccagttcccacttaaacattccattgtgacgg

SEQ ID NO: 116673 - DNA, 711 bp, Glycine max
  unsure (1)..(711): unsure at all n locations
  Clone ID: PAT_MRT3847_76368C.1
gctgattctaggttgttgcttcttacatgatgattcaaaatctaaatatgaagggatataatgcacttgccttctccattccttcagggaaggaacttctgacgatatttgggcttgctgctcctgtttttataacattgatgtcaaaggttgtctcaagtattatactagatctgtggctttgtctagagtggtataaccttttaatataatctgaagttctgatgtttaggtggctttttacgcactacttatatattttgctacatcaatgggtacacatacaatggctgctcatcaagtcatggtccaaacctatttaatgtgtaccgtatggggtgaacctctctcccaaacctctcaatcatttatgcctgaattgatatatggagtaaatcggagtttgtcaaagttttcataacaggcccgaatgcttctaaggtctctcgtgataattggagctatacttggattgttgttagggattattggaacatcggttccttggttatttcccaatatttttacacctgatcggatggtcatccaggagatgcataaggtgctgattccatactttatagccctggctgtaacaccccctactgtcagccttgagggaacgttgctggtatgttcgtttcatcttctatacaatggggaagctagcatataataataaaattactnatttcttctccatacttactc

SEQ ID NO: 116674 - DNA, 461 bp, Glycine max
  Clone ID: PAT_MRT3847_76369C.1
aaaaggattgtaaaatgcctctttgttgacacattaggtcgctctatgcctaggcttcaagcaccaatgtattttacctgggtaggggagaaggcagttagggttaattaagatccacaggcctacctcggacttcgggatagtgttggagtagtgggtcggctgttcggcactaaccattagagtaggtttctttaattctcgaatttctagaaggtttctactcgcctatatttcatgtatctagatacaaactcagtccactcggaccagtacagggtccttcccttgcccttcagtatgcttctcgaaccgaaattattcttgcgcctgcaaatgcgactgcgatacttacatggtaggtctcttgcggagaagcttgtggtcagtatatattggtaataaccgaacgtttgtcaagtcctttacatgtgcaggtagatcctaatacctacaacatg

SEQ ID NO: 116675 - DNA, 1584 bp, Glycine max
  Clone ID: PAT_MRT3847_7636C.1
gtggcttctagtatttgctttgaggaattcagttgtacatgatggaatgatttctgtgttactttcttggcgggttcattacaactggggggcgggattttaatgatcctcgacatgctgatgatgcaagatataacctggatggtcgggatcccacgcgtccgtacggttgcgagggtagaagagatcgagccgagaccgctcgcactttgaaagggttcacgaagaaacaccaatccactccgagctgtatgttttcaagagctagaagaaatcaacgatgccctcgctatgatgataaatatggtaatacccgcctctatgttggaccgcttgtcttcgaggactcgttcccgtgacctggagcgtgtcttcagcagatatggaagagttcgaggcgtagatatgaagaatgatttcgcctttgttgaatttagtgatccttcgagatgctgatgatgctagatacaacctggatggtcgtgatgttgaaggaagtcgtattattgtggaatttgccaaggggggtcctcgtggttcccgggaccgggaatatatgggtcggggtccacctcctggatctgggcgatgctttaactgtggcattgatggtcattgggcccgagattgcaaagccggggattggaagaacaagtgttaccgttgtggggaaagaggacatatagaaaagaactgtaagaacaggccgaaaaagttgagccaacgtggaacgagtctttcacgttcaccagtaaggtcacgttctcctacgtcgtggaagaagcaagggatcgaagctacagtcgagaccacagcgacagccgagcgcgatctcctgtcagatgagaacgaagcccaagtttctgaagatagatcacagagtcgtgagccctccaagataaggaagcatagtgcatcacctgaccaaagcagcccacggaagagaggtgacacatctcctggcaatgataggttggccactccatcaagatgggtctgactacagtgatggtcctagagggaaaagtagaagccctgctagccctgcaagggaccgtgatgagggtggctatgatagccctaaagctaatggacatagccgcagccccagccggagccctagggatgatgacaggagccccattgatgaagatgataacaaccaccgtcgctcacagtcactttgaaaacagcacttcctgataaaatgagattcctgtgggtgaagcaccaagtatgacgaacggagaatattgagtgcatgtgtttgttacaaatgttgctaaaattcacattaaaaagaactcttgttaaaaatataagttcaggatgtgacccaatttgtatctgcctttgtttataaaatgcactccagcttaattatgtgacaattgtttctgaaaacagttttatgtatcctatttttcagattcttgctggtcaagcagcatgtatggcttacctagaatatggagtgcatgaatttgtttcaaatgttggcataatttaaatcaatatgaactattgtgagaaaaaaaaaaaaaaaaaaaaaaaaaaaaaaaaaaaaaaaaaaaaaaaaaaaaa

SEQ ID NO: 116676 - DNA, 624 bp, Glycine max
  Clone ID: PAT_MRT3847_76370C.1
aataataatagtaataataattaatatctttcttaaaacatgtcttacaatttgcatgatcttttgattactaagatagtaatgcatgattgaggaggagtgataagacaacctgacgagaaagttgttgatgatacaaagcacccacagactctttggtaacaggggatataataccaacactcaataaccaatcttgcatctcttcctttgaacccatctcctcatcattagtcgcattggtttgagaatttgagccagacaaaagttttagcctcattttctctgctagcatcaccatctctttagccttgctctcttgacagcaatatataaacatccatatcatatttcttctcccagagaatcgcctcaagccatatccgagtctttaacgaatgttagtcacgatattggtcaaattgaacattggccgaagttcaccaaataatgttgggctgtctaatgatcaatattgggctttcaagttagtcagcacaataataagtaacaaaccaataaaataataagtacctgatctacatgattttacaatgatattttttttttccgagaactaacttctacaaattcgttatcaaagattcacaacacatcatgttt

SEQ ID NO: 116677 - DNA, 137 bp, Glycine max
  Clone ID: PAT_MRT3847_76371C.1
acgcactctctaccatacccattcaccattcaactttaacaaactgatccatcctcctgtgccgtattttttcccataccagctctttcataagtccacatactatcacttctacaacattccaactatcctacaac

SEQ ID NO: 116678 - DNA, 435 bp, Glycine max
  Clone ID: PAT_MRT3847_76372C.1
agatcaagcaattgttgtacactgtatacatttcacataacacattccattatagtcacagcagtgcactcagcatctcattccaaatatcaggcaccccagggaggcaccaatggctgcaatcagaggaatggccttttcctggtttctgcttctcatcttggcttattaccctcctatataccgagggatgcccgtctctgcgcaacgcggtcattgttgtgatgtcttgcagatatactggaaatctcattctcttcaacactccttgtagcactgccaaaggttcaggaacatgtaggtggctggaaaatggtagaggctgcttctgattgtagcatttccaaccattttccctgttatgcctaggagacatgcttctaaaaatgacttcagttctcctagggtttagattttgatccacccaccttgccc

SEQ ID NO: 116679 - DNA, 258 bp, Glycine max
  Clone ID: PAT_MRT3847_76373C.1
acgggggcgaccgacgcttacgcccacgcttcctaccacataatggaactgtttttagaagacgacagaagttttcgggggcgggattactacggaagggttcggttgttttaagactacatatgggggctcttatcaattaatcaacacttacatttactatatacacatcttcaatttatccatgactctatctaagcttattgtgcttacctttttgcctcgcttctcctttttcatctagtagatgctgatcaa

SEQ ID NO: 116680 - DNA, 260 bp, Glycine max
  Clone ID: PAT_MRT3847_76374C.1
cttatattctcttaacaaattccatttcttattaataaaggtcatatttaaatacttctcccccttttcaactatccattcaaccctaatcacttttaaacactcatctaactcacaacacacccacacaatacccctcctcaacaattccaccaacacaacatacctaaaaaactacaaaacacttaaactgttcaaatcaaacaaacccccccaaataacaacaccatcttccaatcaaaaaacaccatcttttttaa

SEQ ID NO: 116681 - DNA, 252 bp, Glycine max
  Clone ID: PAT_MRT3847_76375C.1
ctcgagccgttttacctcccctatggctcgtcactccttgctcttagccctcctcctcttcgccgctgtggccaccgccgcgatggccgtggtcgcgatccgacgccgacgacatcctgatccgtcaggtggcgccagctgttggcgaagccaagcaggaggaccccctgctgaacgccgagcaccacttcgcgaccttccaggccaacttcgctatgacctacgccaccaagcaggagcacgatcatcgct

SEQ ID NO: 116682 - DNA, 506 bp, Glycine max
  Clone ID: PAT_MRT3847_76376C.1
gtcacttacagagcagaggaagaatggcagatggatcatcaacaccagcaacaccttctgccaaagtttcagccatcttcatataccctattaaatcatgccgtgcaatttctgtttctcgtgctcctctcactcctactggatttcgatgggatagacaatggatggtggtgaattcccaagggaggatgtacactcaaagagttgaaccaaggcttgctttggttgaggttgaattgccatctgaggcatttcttgaaaactgggaacctacacaagactcctacatggtggtgaatgcacctgggatgcaacctctcaaaatatgtttgagccaacaagggaaggaggtagcaaatgctgtctcagtatgggaatggactggatctgccttggatgagggagctgaagcatcacagtggttctcagattatttaggaaaaccatgtcaactggtccgcttcaattcagcttctgaagttcgaccagtggatcctgattacgtc

SEQ ID NO: 116683 - DNA, 336 bp, Glycine max
  Clone ID: PAT_MRT3847_76377C.1
ctctgtatatttaagggtttttacttcctagatagcataaatttttaaagatttcttttttacatgtatgtgcctgttctggtagctaagtaaatatactttggtttgtctggaaacattgtcaatgagattgtgctggactgataaggcatagggcaaatggatcctctgaactgggactgtaacaccatattgttatcagcttctatagaagctgaattattttgaaacggtttctttttaaaaaaaatataaaattatggaagtacaataaataatggcttgaccaaggactgtcctaataaatgctagacacaacttaaaaaaaaaaaaaaa

SEQ ID NO: 116684 - DNA, 405 bp, Glycine max
  Clone ID: PAT_MRT3847_76378C.1
atatatatatatatcttcatttttctttggattaggtttttaactgttgaccttttttttttttaaaaaccaagcgggaataatgattttttttttttaaggaccgggcacaaggttttttttacccagtataaaaatcttgggggggggccccaaccaaactttgaaaaaaaaaggaaacagtttaatccataacaaaaaagaaattctaggggaaccattttaaaaaccctccggcaaaattccccacggaaaaagcccctggggggcttccaacttttaacaaaggtggcccttaatgaaaaatggtttgggactaggcccattaggtcccaggtgccggaacaaaaactttggtgatacaaatacataaaagggggcccctcttataatctggggggaaaa

SEQ ID NO: 116685 - DNA, 509 bp, Glycine max
  unsure (1)..(509): unsure at all n locations
  Clone ID: PAT_MRT3847_76379C.1
caggaacacaaagtaaagaggagttaaagatctgaagactctcgctcaacgcgtaacactcactcagcttaaataagtaacatgaagaagtcaaatatcatgtgaaggtgcgattagcgcgggttgtgcgctaagtgcgtgactattgactcactcgctaaacgtgacagtcacgcttagcgtgaggtttcataaattttaagcagacttcacctataaaaaagggggaagcaaatgaaaaagacacacaactagacactaaagctccacgagattagagcttcccatagagagcaaaggctagaatttgtgtaggaataggggaaatcaaccattaggagtcattcctccctcctatctccaatcttcttctctccccatcaacctcttgcaattataaagcctctcatgacaatgagatgctaaatcccccattgttgggagtttagcaaccaaacacccgtgatgtaatttcttatctactatttatttaatgctattttaattna

SEQ ID NO: 116686 - DNA, 500 bp, Glycine max
  Clone ID: PAT_MRT3847_7637C.1
cttgttttctatacatcataatatatagcagtgatcaagattttaattgcagaccacatcacttgatgcaattgcaacatttcggttgtggtgatttctgtaaccacagtaggccctgattgtggattgcatcacccacaattggcctgctatcacaacttagtagaactacatgtcattacatcaaaattgagtttctcctataagctaaaaccaactcatgcacattagcttttggagaagttaaatgaaaggttttctataaaagctaagagcacaagttgatttttgtttatgggagaagttcaatttattatacttccgtattttcttcttctataaatacctattgagaagtttagctaaacagaccttaagtcatgattaaggattgataaattgaattacaattcttaattctaaaagtatattgatggtcttaagaagttagaatcctttttatagaactcacactcttttaggatgtgagtcaaatatga

SEQ ID NO: 116687 - DNA, 265 bp, Glycine max
  Clone ID: PAT_MRT3847_76380C.1
cgaggctggtgattaacctctctttctgttttcttgtcaactacagtatcattcaagcacttcacaggtacttcccttagcttcttgacacattcaccaaaaaccagatgaaagaagctagctaacaccaaagttctgtcaagtcaattaagagtttatttcttcattaattttttctacttacatgttgaagaattccacttttttttttgttatgggaatttgttcccccccccgagttctttagggatgcagtatggtttat

SEQ ID NO: 116688 - DNA, 322 bp, Glycine max
  Clone ID: PAT_MRT3847_76381C.1
ttgttttttttctttgtttttttattttttttttctgtttttttttgtttgtcttttggttatcttggaataatttctggatttggaggaacacagcgacttcctcgaccagctggccgacaaagggacccgatacgaggcgggccccaaaaccagctaaagggaaggaagcccccaagccggagcccggggaagggggggcgccaccaaaagaaacaaagaacaccgcaccccaatgggcgccggataaaccggggcaccgaccacccccgggggccaagccgggggagagcaaaaaaaccgaacccccggaagaaggaaa

SEQ ID NO: 116689 - DNA, 599 bp, Glycine max
  unsure (1)..(599): unsure at all n locations
  Clone ID: PAT_MRT3847_76382C.1
gccgcattgaaagtgtggtggttaaaggagttgtttgtaagaaaaatgtggctcaccggcgaatgacgtcaaaagtggataaacctcgcttgttgatccttggaggggctctagagtatcaacgtgttaccaacctcttatctagtgtagataccctattgcagcaggaaatggaccatctgaagatggcagtggcaaagatagcttcacaccaaccaaacatcttgttggtggagaaatcagtctcacgatatgcacaggaatatcttcttgcaaaggacatatctctggttctcaatgtcaagagaccacttttggagcgtgtagcacgttgcacaggcactcaaatagttccttcaattgatcaactttcgtcacaaaagttgggttactgtgaaacatttcgtgtagaaaagtttcttgaagacctaaatagtgctcgtcagggtgggaaaaaaacaatgaaaacatcgatgttttttgaaggttgcccaaaaccatagngtttcacaattntactcataggtgctgacaaggatgacttgaaaaangtaaagcatgtggttcagtatggagtttttgcagcttatcattttggc

SEQ ID NO: 116690 - DNA, 216 bp, Glycine max
  Clone ID: PAT_MRT3847_76383C.1
cagccgtgagctcggatttagcctcgagagcggggatactgtgcaaggcttaaagtgttcggtgaccaaatttgaggcgcaacaagtgagcgatggggagagcttcaagggataagatggatatctattaccggaaagcaacaaaagaaggccggcgagctcgaagagcgcttaaactccctcagacagacgaggaatgtcacaccatttgataga

SEQ ID NO: 116691 - DNA, 425 bp, Glycine max
  Clone ID: PAT_MRT3847_76384C.1
ggccgcgcctcttgttttttattagcgatcattgttggtaacactgtcaattacagcaactgtgaaagcagacatgaagattcatataatagcattttgccatcatgctaggagagtcagttcatctatctactccaaacacataggttctaggtcaagcacgccaccccatgttaggttgactgggagcgatgatcccaagtctgagcagcgatctgcagcaggcctacggtacataggacaatgactagactaactggccgaggcacttggctcgccatttgagtttctagcatgggcctctaggccttccattgtgaccccatcgatgctcaactggcgtgctgaagaagcactagtgggtaacttctgcattccaggttcctctcatgcccgatgatagtgcttggaccgtgaacaaaccg

SEQ ID NO: 116692 - DNA, 456 bp, Glycine max
  Clone ID: PAT_MRT3847_76385C.1
aattcggcgtacggctgcgagaagacgacagaagggacccctaaaccccatgagactttggccaaaggaattttttttgtaacctctcaattgttttttccactcctccaggtatcctaaagaaagacaagaaaataaagggagagaatatattatcaagtttatcaagtaaagccttcccacaaatgagagggttatatgtttctaagagttcaaccttatagcaaatttgtccataatgggcttccacattttctcctttcttggatttgcactaatagagatcccaaggtaaacaaaaagcaatttggtaatcgtacaatttaacatagtagcaaagccctccaaggttacatcaaccacccccgaagctcctacaaaaattttgtgaaagctcactttacgtctcgaaatgagttcaaaacatcccaacatcatcttaatagtatgcacatt

SEQ ID NO: 116693 - DNA, 387 bp, Glycine max
  Clone ID: PAT_MRT3847_76386C.1
ggccggccggtacaggggaggtgtctgaactgtcacggaaccaataatgttgatctctgtcttggggatggacgggggctagacctgtttggcataataaccctggcaagaattgtcctacacccaccacctaccaaggttaaatatggattagtagtgtctgcacatcagtatttcacatgcatatcacaaagagaccaacgagaggatggtatctgcttaaaaaacttttgactaccttgagggatttgtgataatagacagaactggggttttaaataactggcgattatccttcagcccaccagaccgggcccaagctagtcattgtaagtcggatggaagaactctctgctgccttgaaatgggcaatttcttacacgagga

SEQ ID NO: 116694 - DNA, 277 bp, Glycine max
  Clone ID: PAT_MRT3847_76387C.1
ctttttgtttttttttttttttttttttttttttttttttttttttttttggggcacggtggccacctatgcccaactcttgtgtactgaaagttgggatgggtctcttgagcttaataaacccattacacgttcaaatgacttcctccttgctggcggggggcggaccgccccttttttcataagggaggcgtggtgagacataggcgaatggggcccgttaactgcttcctgggtgtttgaggggggaggagatccggcccactagcgtatgctg

SEQ ID NO: 116695 - DNA, 433 bp, Glycine max
  Clone ID: PAT_MRT3847_76388C.1
gaccaaacctcaatttataaacactctagaataagcctgagggcaagattcacacactcactcctgtcacttccctacactcctgcatggccgaaccactatatctagaggaagattacaaaccaaaagattatacccctgaagccaaaagtctatccttccttgcctctattgttgcccttttcatctacatatgtgtcttctataccttcaacctatctacctattctatcctcaacaacaacatcttttggtttttcatgtccaataccctcaatctcatcattgctgctgactatggagcatcctcttcaaacaaacataaacaagatctctatgaagagtatgtgcgacatagtcaagcaagaaactgtgactcgtcatcatacgtgcccaaatatgatcatgaacaattttataaaaaatgcattta

SEQ ID NO: 116696 - DNA, 462 bp, Glycine max
  Clone ID: PAT_MRT3847_76389C.1
gcgggcacgtgtaacgccaatgttaatattttatcagttgacgacagttgtgtgctacaaatatactccatataatcatttatataaaaattataattaatcaataataaataataaattaacatcatgaataaaattacatcaaaaatggaaacaatggaagttgctgacactggagttgcatctggtacaacaaacaaagatgaatcatcaacaaaagatgaaacaacaaataataaagtatcagttgatgaaatgacatcacgtgattattattttgattcatatgcacattatgcaattcacgaagaaatgcttaaagatgaggttcgtacaataacctatcgtaattcaatgtatcacaataaacatatattcaagggtaaagttgtacttgatattggttgtggtactggtatattgtcaatgtttgctgcaaaagctggtgcatcacatgttatt

SEQ ID NO: 116697 - DNA, 769 bp, Glycine max
  Clone ID: PAT_MRT3847_7638C.1
ttgcatgcctgcagtgtgtgctgtaatgttaggattcaattgcaaggtatgatgggactttggaagtatgggaacatggtgtggggtttataaggccaagagctctccaactacaatggctagcttttatggtgtggttatccattatcccaaaattcttataagaaaaaagaaaacaggccctttccctaatattttgtccagacagatttgaatctcttttctctctcctctagataacttccctcttgtgtgctgtacacatgttaattttctcataaggtgggtttaggcccacaaaagtaacccggtagccttttttttacccgattggatccataatcctttcaataccattcacctaaaacactgccttgtcctctatgcagaaggacactgcctgtgggtgctgctatcctcttcccaagttacctcctcagtaacttcgacttccacaagatgaaacttttagtaataagcttcctatgtttctggtctcttgggtggtcatgattgttctagggtctattgggaaatgatcattggtttcccgttcttggaggaaggaatgaagggcagcttccacagttccactggttgagcaacctttagccttcttcagctgggagacatggaaaactgggtgtatttggtagtaggtggcaacaaccacctgtaagtcacttcccttacacggtttgtgaactggaaaggactctaataccaatgtgaaaatctgagatgataggaaatacctatttttaacact

SEQ ID NO: 116698 - DNA, 688 bp, Glycine max
  Clone ID: PAT_MRT3847_76390C.1
catttctaagggaaagcaggacagcagcactgccagatcaagatcctttcgtaaggggaacccagcatcctagcattgccaatgctgcttaggtgagtaagcttatatgtttctggaaatgagcttgctttgttggttaaatgggaatcactaaatagatgtaaagcattttcagtcatatggtttctgttgaaaattgaatttacaagttgtatattgaaatatgatcacaacgaactgttgggcttctaagtttgaagctgatgttgcaacataatgagaacagcagctcaatgagagtttcaatgttgatcctgagattagtgaattaccgacattgactcaatcaattggctcatttggggttgaggggtattggctttgtttgcggcggccggcaggtgatgtgaacaattttgtaagagctatcatggtctatattttgaagccttgaacagttttgtaagagctacaacgactatcatggtctacgtcttggaccattagaaaattgatctggatgcatttggatccttgattcaatataattccattgaagcaaaatttgaatttctcttaaaaacaaatgacatgaatatatttacagttttgcaaacttctttagtggttcagcagcatcttttgcatgatcttattggatggtagagttaccctagaagatgaaacc

SEQ ID NO: 116699 - DNA, 412 bp, Glycine max
  Clone ID: PAT_MRT3847_76391C.1
tcagttctaattattttaggcaggccatttatgaaaacagctcgaaccaagatagatgtttatgctggcacattgtctatggaatttggtgatattgttgttcattttaacatgcttgatgccatgaaacatccatctgaggatcattctatttttcgtgctgagataattgatcagattgttgatgattatatgtttgattttgattctattcttcatggtaggaaacatccatttttatctgatctgcatacttgtcattccttatgcattgaatctgaatctgagtttgaatttgatcctatatataatttttatgctgagagtgaatttgaatttgagtctggttctgattttctgggtgttgcacctcttgatgttgattttttagagtcagaatgcactaaccatg

SEQ ID NO: 116700 - DNA, 532 bp, Glycine max
  Clone ID: PAT_MRT3847_76392C.1
cccacgcgtccgcccacgcgcgggtcgacccacccgcccccgcgtccggaagaaagggttggctttggcccgaaaacccacggccactgcgagtgagtgagtgagagaaaaatgggagagggagagaacacagaaatagaaatagaaatagaaacagaaacagaatcagaagcaacatcgacgacatggagcctcggaaaacacactcagataatcggactttcggagaagctcataaatgggaacaacctcagcgccaagattgaggccgcgagggagataaggaagatggttcggaaatcgtcgtcgtcgtcgaagacgcgcgcgaagcttgccgctgcgggtgtgatcgaaccgctcgtgctgatgctctcttcttccaacctcgatgctcgccaatcctctctcctggctctgctgaacctggctgttcgcaacgaacgaaacaagggcaaaatagtgacagatggggctgtgcctgcactgggggggctgctgaggatgcagaatagcggtgtgcgagaatgaggtg

SEQ ID NO: 116701 - DNA, 180 bp, Glycine max
  Clone ID: PAT_MRT3847_76393C.1
tcactcctactctttttactactgtgtattcccacaatcatttaaactaatttactgtggcattaccaaagggctgtgtaccatttttcataataaaaatcccaaatttcccaatatttgattccacacacattaccacaaaattttttatattacattaaattatttattcttcataac

SEQ ID NO: 116702 - DNA, 4190 bp, Glycine max
  unsure (1)..(4190): unsure at all n locations
  Clone ID: PAT_MRT3847_76394C.1
ccacgcgtccggggtgttctcagtggacgatatctccgatcacttctggcagccgcctatccctgtctccgccgcccaaacttcctcccagatgagccgcagcgcctccgagtgggccttccaacgcttcctccaggaagcttccgcctccgcaccctctcctccgtcttcttcctccgccgccgacgtcgtattcgtcgagatcgaagatcaacctaaacccgcccctccccctccgacaaacggcgccgttctccccaatgcccctggtcccgtcccccttgactccgacgaataccaggccttcctcaagagcaagctcaacctcgcatgcgccgccgtcgccatgactaggggatctttggctaaatctcaagacccgtcccctttttctgaaggtggatcacagccgactaatccttctctagttgaatctcagactacttctaaaggatctattccttctgaaaatgatccatctaagttacaagataaagataccaatgtaccagttgggattccttccatacctgccatgcaaaagaaacctgctgttgcaattaggccatctacaagtggatcatcaagagaacagctgtatttctgactaacatcagtaaggcgctttaaaggtagaattttcacctcttaattgagaaacctgtgtttctaggtcagttaaatgagcctgctttcttcttctagagcgacgggctgactccctattggatagcatcctccttactcgttttacatcagcagggtctgtgttgtcattgagggagagacatctatgtcctcatcatctgactgttctcttgatgatccacttgtagatggcctaattgcaacagcaggtttcttttgtatggcaggtatggaaggaatcccaactggtgcattgatatctttatcttgtaacttagattgatcatttccagaaggaatagatcctttagaagtagtctgagatccaactagagaaggattagtcggctgtgatccaccatcagaaaaaggggacattgagggagagacatctatgaatgacaacacagaccctgctgatgtaaaacgagtaaggaggatgctatccaatagggagtcagcccgtcgctctagaagaagaaagcaggctcatttaactgacctagaaacacaggtttctcaattaagaggtgaaaattctaccttgttaaagcgccttactgatgttagtcagaaatacagcgactctgctgttgacaacagagttttaaaagctgatgttgaaacattaagagcaaaggtgaagatggctgaagagaccgtcaaaagaattactgggttgaacccaatgcctcatgccatgtctgatatatcatcattgggcctgccatcatttgatggaagaagcccttcagacacttcagctgatgcatctgttcctgtgcaagatgatccacatcatcacttctatcaacccacattgaataatcctattcccagtcatgatccgatagtcaacaatggtttggggggcatttcttcaattgaaaatgtgcagcagcagaacgctgcagcagtggtaggtgggaacaagataggtcaaacagcatccctgcagcgggtggctagcttggaacatcttcagaagcggattcgtggtggacctccatctgagcagtaactaagtagccagatcttaaggttgctttgccaaaaaattattctaaaacagttatttctgttgcctattcttctggaatacattgtaaatcatttgatggagcacatgatgctggattcaattagtgcaccccgntggttttttttttttctttataaaaataatataaaaccacgtgtccgcccacgcgtccgattttattttgacgaatatgccctgatgcttccgccctgtgtagctgcgtgcctacctccatcgcatcatacgatatggatagggtgttctcagtggacgatatctccgatcacttctggcagccgcctatccctgtctccgccgcccaaacttcctcccagatgagccgcagcgcctccgagtgggccttccaacgcttcctccaggaagcttccgcctccgcaccctctcctccgtcttcttcctccgccgccgacgtcgtattcgtcgagatcgaagatcaacctaaacccgcccctccccctccgtcaaacggcgccgttctccccaatgcccctggtcccgtcccccttgactccgacgaataccaggccttcctcaagagcaagctcaacctcgcatgcgccgccgtcgccatgactaggggatctttggctaaatctcaagacccgtcccctttttctgaaggatctattccttctgaaaatgatccatctaagttacaagataaagataccaatgtaccagttgggattccttccatacctgccatgcaaaagaaacctgctgttgcaattaggccatctacaagtggatcatcaagagaacagtcagatgatgaggacattgagggagagacatctatgaatgcaaccacggacccgccgattgtaaaacgagtaaggaggatgctatctaatagggagtcagcccgacgctctagaagaagaaagcaggctcatttaactgacctagaagacacaggtttcccaattaagaagtgaaaattctaccttgttaaagcgcgttacggatgttagacagaaatacagtaatgctgctgttgacaacagagtactttagatgagctgtataatagagactgtctctgaagttcaaggactagatcgcagactgaattactggggtgaacgacttgggtcttccaattattgagccatcatccttggcagtcccatcgtttcacgaatgtcagtctgacagaccatgacgtcgtactggtccagagcgaaaagcaaccaaaaatcgccgctgtcaccccgacaatcagaatcgtttaggagacattcctttgactgaaaccgtgcagctgaatggtgcatcagtggtatgtgacatcaaaacggggagaccaacttcccggcatagggtggctagcttgaaacatcttcagaagaggattcgtggtggtgtaccctcacggtgacccctgctaacggacaacttataatggattttgatctacttcatcattttcttgtttctgctagtgataacgacgggcgcactattagtattaatgggctcgttaccctggaatatcttcagaggcgcattcgtggtggtgcagattcacatggaactaattgtaatagtgagcaattacgtaatacgggaattcacgattgacaacacagacggtaatgatgtcaaaagagtagttagggcaaggtgtaagaaggagcaagttcccgtcgacagaataagaatgtagattctgttaactaatctaatgacgagttttctcaattaagaggtgaaaattctaccttattaaagcgccttactgatgttagtcagaaatacagcgactctgctgttgacaacagagttttaaaagctgatgttgaaacattaagaacaaaggtgaagatggccgaagagaccgtcaaaagaattactggattgaacccattgcttcatgccatgtctgatatatcatcactgggcctgccatcatttgatggaagaagcccttcagacacttcagctgatgcagctgttcctgtgcaagatgatccacatcatcacttctatcaacccacatctactaatcctattcccagtcatgatccgatagtcaacaatggattggggggcatttcttcaattgaaaatgtgcagcagaatgctgcagtagtgctaggtgggaacaagatgggtcaaacagcatccctgcagcgggtggctagcttggaacatctataggagcggattcgtggtggacctccatctaatggggagcagtgactaattagccaaatctcctggatgctttgccaggaaattattctaaaacagttatttctgttggttataactagaggcctattcttctggaatacattgtaaatcaattgatggggcacatgatgttggattcaattagtgcaccccgtatttttttaaaaaataatataaaatgaactttactttctagtttataaaaaaaaaaaataaaaaaaaaaaaaaaaaaaaaataattaataaaaataaaaataataatgggtcgtccgcttattat

SEQ ID NO: 116703 - DNA, 847 bp, Glycine max
  Clone ID: PAT_MRT3847_76395C.1
cccacgcgtccgcaaaacccaaactcaagtcactgccatctcgcacgtttgaatccccagaaagaaaaaaaaaatgcacgaaattagagaccctgcaattaggcttttcggtcagaagatccctttccctgaagatgttgttgttgacaaagaagaaaaagaaatagaaagtggcgaggaaagagaacaagagatggaaaaatatgaagaccaaggacacaaggatgctggagttgaaaatgttactgaggaagagctagaagttgatcctcctccaaatgctgaagagactaagaattcaggctcatcccctgaggctattgtgaaccccaaaacaccttccatagaagaagaaacagaaaaatcaaaaggtgacaaaacagagaaggaacaaggtgatgcagccaactcacaagagaaaaccctgaagaagccagataaagtgctaccatgcccccgctgcaaaagcatggacactaaattctgttactacaacaactacaatgtcaaccagccgcgttatttctgcaaagcctgtcaaagatactggactgcaggtggcaccatgaggaatgttcctgtgggggcaggacggcgaaagaacaagaactctacctcccattatcgccacatcactatctctgaggcccttcaagcagctagaattgattctcatcttccacctttgaaaggcaatggtagagtcctcagctttggattagatgcacatgcacctatttgtgattccatggcatctgtcaacaatcttggagagaaaaagcctctcaattgcacaagaaatgggtttcatcatggctttgaggatcaaagactcccccccgttcct

SEQ ID NO: 116704 - DNA, 477 bp, Glycine max
  Clone ID: PAT_MRT3847_76396C.1
agacctatctgaatgcatgctacaatcgtaatgaaggattctatgcgttggtatcgaattatgacatgaccgcgggtggtgtatagactgcaacgtgtggaccaatgcgtggaccacaactcgcatccgccccgggtcaccctccctccaccccatgtgtttcagcttcgttgcagcttgataaccctcccgcccagtccctgggcgccccagcacgtctgcgccacgcctaagccgccacagtcggctcgatacagatcgtcttgtcagccggagtgcgcctcgccgggtggtacttgcgcctgtacaagatccgcttgcaccacttgtacagctccgtgctggccaagtacacgagattcatgccgaagacgatgccccactcccacgtcatggagctcatctagaagaccttgttgttgatgaccgggatgtacacgacggggaacgtcgacagcatgagcacgatcgcgcacc

SEQ ID NO: 116705 - DNA, 1888 bp, Glycine max
  unsure (1)..(1888): unsure at all n locations
  Clone ID: PAT_MRT3847_76397C.1
cgtcaaaaacccaacacaagtaacgaagaagtcactgccatctcgcaagtttcgatccccagaaggaaaataaaaatgcacgaaattagagaccctgcaattcggctcttcggtcagaagatccctttccctgaagatgttgacaaagaagaagagagtgctgaggatagagaacaagagatggaagaacatgaagacgaaggagacaaggatactagagttgaaaatgttactaaggaagagctagaagctgatcctcctctagatgctgaagagactaagatttcaggcacatcccctgaggctattgtgaaccccaaaacaccttccatagaagaagaaacagcaaaatcaaaaggtggcaaatcagagaaggaacaaggcgatgcagccaactcacaagagaaaaccctgaagaagcctgataaagtgctaccatgcccccgctgcaaaagcatggacactaaattctgttactacaacaactacaatgtcaaccagccgcgttatttctgcaaagacggctgcgagaagacgacagaagggggcaccatgaggaatgttcctgtgggggcaggacggcgaaagaacaagaactctacctcgcattatcgccacatcactatctccgaggcccttcaagcagcaagaattgatgctcaaaatggaactcatcttccaactttgaaaggcaatggtagagtcctcagctttggattagatgcacatgcacctatttgtgattccatggcatctctcatgaatcttggagagaaaaaggctcttaatggcacaagaaatgggtttcatcatggctttgaggatcaaagactccccgttccttgcaaaagtggggaaaatggtgatgactcttcaactacatcctccattacaatttcaagtcccaagggagaaaataacaaaagcaccttccaacaacaaccattgccccaaaatcatggtttccttcctcaagttccatgcattcctggtgttccttggccctatacatggaattctccagttcctccacctgctttgtgtccttcaggatttcccctaccattctatcctgctacattttggaattgtggcatgcctgggaattggaatgttccatggttttcctcaagttcacctgcttcaaacctcaagtctccaagctccagtcccaattctccaactttggggaagcactcgcgggacagtgacatgattaagcaagactctttgcacaaagaagaagcttcaacgccaagaaacgggagtgttttggtcccaaaaacgttgagaattgatgatccaagtgaggctgcaaagagttctatatgggcaactctaggaattaagaatgagtcagtgagtgggggagctatgtttaaggccttccaatcgaagaagggtgaaaagaatcatgttgaagcctctccaatgttgatggctaaccctgcagctttatctagatccctcaattttcatgaaaactcctgaattagtggcactggtgaaaagtccttacagcaaagttagtcacttcttgagttatttgtctagctagcaagagacggtgaccatctttgagtgacattgaccttgtatagaagaagcgaaagggtggtagtctctgatttcctcggcacaagtgagacgacgaggactaattctgtctttaatttcattcgacaatattaaaatagagtatataggttttttttcatgtgcttagtttgatgagtgagttcatgtatatgtacatatataaaaatatgtgaaatactgatctttagcctagagagacggaaaagatcttttactttcttgtagtataaaataaaaatcctgactgtagaaaagtaaataattttctttngagnataaaatangaaat

SEQ ID NO: 116706 - DNA, 526 bp, Glycine max
  Clone ID: PAT_MRT3847_76398C.1
gaggtggcggaagggttcacttgcattggtctaatattccagttggagatgaatatgtccctttggcaagtgtaaagggaagcattatcactgggttggtatattacaaagaatgccctgttggtacttataaaaatgtcagtgggtctgatagagctctttgtcatgattgcccatctgacaagcttccgcatcgtgccatatatatttctgttcgaggtggtgtggcagagactccttgtccatacaagtgcatatctgatagatatcacatgccaaactgtcatacagcttttgaagagttggtgtacacttttggtggcccatggctctttggtcttctacgctgatttattagctgtttcgccctctcgatctcagtcttgcacgaatcacttatgtggctgtcttgaatttatgaatgagattatgggctcaaacagcactcggctgtctcactgtcatgtgtacaggttgtatttccatggcccaaatacattcagtgaaccttggcatctacttcatt

SEQ ID NO: 116707 - DNA, 311 bp, Glycine max
  unsure (1)..(311): unsure at all n locations
  Clone ID: PAT_MRT3847_76399C.1
ctccgtctccaggcctgttctgggggctactgtacatggtgcctggtggtgtactgtaacataatggcaatggcatatgcaatatnatcctggtctacctgtttactctcctcacagccgtaaattcaagttccttctgccgccatcgtcatcgtcagtcagagcttctctgctattgctctcgatgtcttgtactcagcgtctgtatcgtctctagtgtgttcgacttacgtggaaacctgagatcagaccgggtatcggcggctgcttgcatggatggaatcgtaaanncatctgtcgtgacaactcaa

SEQ ID NO: 116708 - DNA, 432 bp, Glycine max
  Clone ID: PAT_MRT3847_7639C.1
atttaaaaaaaaatttaaaaaaaaaaaaaaaaaaaaaaaaaaaaaaaaaaaaaaaaaaaaaaaaaaaaaaaaaaaaaaaaaaaaaaaaaaaaaaaaaaaaaaaaaaaaaaaaaaaaaaaaaaaaaaaaaaagggggggccgttttaaaagaaccaaattttattaccccggcattgcacaaaaaaactttttttttggggccccttaattaaatttcctggcccgggttttaaaaccttgggactggaaaaacccttgggttacccaaattaattcccttggaaaaaaatccccttttcccaagttgggttataacaaaaaagcccccaccaattccccttcccaaaaatttgcccaccttaattggaaattggaacccccctttaacgggccattaaaccgcgggggttgtggggtttcccccaaggggac

SEQ ID NO: 116709 - DNA, 266 bp, Glycine max
  Clone ID: PAT_MRT3847_763C.1
cctatattcaaactcataatatcccatattcactatatcccacttacaaacctaccttcataaccatactatatttcccatacataattccaaatacaactctaaaaattatcttatcatacaacatttatcatatcttcaaaatcacattaatttccacactaaaattaatacacactaacttcatatttaaaaacatattaaactatcaactcatccaaatcttatacttcttcaaaaaacacttcacaaatcttaattattat

SEQ ID NO: 116710 - DNA, 254 bp, Glycine max
  unsure (1)..(254): unsure at all n locations
  Clone ID: PAT_MRT3847_76400C.1
atggttntgangaggatttgcaggnggtgatggatnanagnaagaggannacaatnatatcaaccccgggaatcngcaaggcgatntcgcatgangaagcagaagcanttggacgatattgtttcccaagtggctcagntcagaaaagagaacnaacaaataatnacaagngncaacatcaccncgtaacagtacctgagngttgangcnganaantnggtgtnagggccaggtgggtgngttagntacaggcc

SEQ ID NO: 116711 - DNA, 1495 bp, Glycine max
  Clone ID: PAT_MRT3847_76401C.1
ctcgcagttcaaaagttcaaaccccaaaagttcaaaccccaaatcttcaaaatcctcacagcaaacccaaaataaaacaacaacaacaacataaaaaaaccttaacaaaaccaaaaccccaagagaaaaacaccacacttccaatcaaatgttcttcctctctttgcccttctcttcctgcttcagagcttcacaacccaaccacgatcccaccaccctctcaacgaacctcaccacctacatctaccacaccgaatacggcaccgtttcgctgacatggtcacgctccatgctaggccgctccctccacgtgaacctccacaaccactcctcctttcacctccacgtcaaaccctggaggaaaaaagggtccaagaagctttctcacaacacggtcttcctctggaacctctcctccgcgagattcgaatccggacgacccgaacctcgctccaggttctacctcgccatcgaggtagaacacagcctcagcctcctcgtgggggacttatcccccaagagtaaggccaagaagcccagcaaaacacagcagcagctccttgtcctcaagcgggaccacgtccacgtggcgccacaccgcagccgggtgtatcaaaccaaagcgagactcggaggtaaggtaagggaaatcgaaatagattgcgacggttacaacggtaacggtggcgggtacgagaacgagaacgagagtagttcgaggttgttgttcggtgtggatggagagaaggttcttgaagtggcgaggctgaagtggaagttcagagggagcgagcgtgtggagatcgacggggtgcacgtgcagatctcgtgggacgtgcacgattggctttttgagaaggataaggatattgttaatcatcgtagtagtaacaacaacaatagtaataataatggtatcgagggtcacgcggttttcatgtttaagttcgaggaggacgaggtacgaggtagtggtggtgggaaagaggaggagcaacagtggagtatggggagtggtggggagtggaggaatggcaagagttggtcttcttcgtctttgtcggtgtcttctacttctggtggatcttttgggggaagttcttcggttatggaatggtccagtgtggaggagaatgagttggtggttcctcttgggttttctttggtggtttatgcttggagaaggtgaacactaatttgggtggttaaattttttgtttatttgttttcctttagagtaaaagtttagggggagaaagaatgaatttagatttccatgtgtatagaaaagtatatgttcttaatactctaagagtttagtctttaattagggcaaaagatagtttaatttacccaaaaccaattgaattcaagttcttgtaatgcttgaatatttgcatgtatggaagcctgtttgtcgagagaagtcaaaagatcacgatgtacatggaataacacatctgttaagagaagtcaattgaaactccttattaac

SEQ ID NO: 116712 - DNA, 874 bp, Glycine max
  Clone ID: PAT_MRT3847_76402C.1
ctcgagccgcctttatttacttcagcatccaacaaagtgttccttacttacccagatcttcaaatgtgagtgtgagtgttgttgcatcgttgcatgagtcacccatcaaacactgttcaagtaactatttttagtttgttttgtaaatgagggtgtggagggttcacccaccagagcaaaagctttgtcctaatggtgttttgaggtgggttttggtttggatgagtgtgtgttttcttgtgttcacggttggtccaccctctcgctcgatggtgaagaagagtgcatcttctcaattttcttcttgtcctccatgtgattgtttctgctcgtcagcggaatatctcctcgatcctctgggacttgtcaatggctcaatttacggtgcagattgtggcaaacacgatccagttttgaatgaggaaatgaacaagggtatactgaaaatgctatctgaggagctaaatttgcagaaaattgtggccaacgagaccttggaacacaccaaacagttaataatggatgccaggaaaaccttttcgcattaccagaaggaagcagaaaagtgcaacattggggtggaaacttgtgaagaagcaagggagagggcagaggcagagctcattgaagaacacaagctgacagcattatgggaaaatcgtgctcgtgaatatgggtgggtggaatgacagaagaacacactaaaggagtttagttaaccattgctacattatgttatgttaacccttaattgtaacatagcgtttaagcttttatagccaatacacagatctcttgtgatgatttcaaccaggtcagctattccattgaaacaagttttgtgcttcactactttacacataatgaattgatc

SEQ ID NO: 116713 - DNA, 370 bp, Glycine max
  Clone ID: PAT_MRT3847_76403C.1
cctcaatgagttgagtagcttcagaggtggaacgattaaaaagggtgacgtcggattgactgagcggactttatagaccttttattgaggctcggacttttgatgcgggaagaaggagtggctgcagctcttatgatgctacctgcctcatattatgactttcttggatggagctatgctatccagatagataggtaagagatgccatagttggaaggccctactaactgaaagaagaagagcggaaagatgtgtttgttgcttgttctgaatcttgcttctgtcgtcagctgaaaaccctgttgttaaatcttgtaccatgaaccagctgactgatgtgaatactttctattacgatgaacgtcactga

SEQ ID NO: 116714 - DNA, 452 bp, Glycine max
  Clone ID: PAT_MRT3847_76404C.1
ttggggtatgtgttttttttttttttttttgagccgaaaaaagggtttgaaatattttaaccgggtgtgatcttgagctcaaaaatactggtctgaaacgccttacattgattgaatcgaacaaccaaaaactaaacaaatatcggccctgttttatcagaatgaagggttacattcaaggctgacttgccgccacagcacaatttgactatcaccgggggttgtgggggcaccaccatggcattgatgccctcggtctgcgcatacggatggatggtggcatcacttacggcctgtttgggggcaattagaatgaatccttgcctgaatcctaaccccttgcgcaaaaatttcaaccagcttacccatgcggatgttttatcaaaactcacaaaaccgctcaccctatgagctatcctatactaacagaattgctcggacgggacttagac

SEQ ID NO: 116715 - DNA, 133 bp, Glycine max
  Clone ID: PAT_MRT3847_76405C.1
ggcggcgtttctgtgaacctcggaggactcaaagaaaaacaaggtttgtggggttgcttgcaggtcagggcgaacccacaaccccctccgaagaccatggaaaaggttgagaatgatttgccttggttgccgt

SEQ ID NO: 116716 - DNA, 490 bp, Glycine max
  unsure (1)..(490): unsure at all n locations
  Clone ID: PAT_MRT3847_76406C.1
tttcgaatgcgagcgaacacgcgagcacaggcggccgtgccgaattaccggcaacaaaagcgagcagcacacagaagcaagaaaannccaaaaacaaccaacgccacggagaacgaggcagcaagggaaagaaaagcacnacatgcgccggccacagaccacgggagaaataagcagaaccacgcagagaagaaacgccgaacactccccgatangatacaagaggaggggcaaaatctaaactatatatgataatatcttagctttgtgataaatttcaagtataagctggagaaatatcggattagtgcttccactcttctatgtagtgtaggactatgagggtagacatcattatgtttgtgctagctttaactttataattcctactgatgccaattggcgtttaaagaaggtttatttgaaaaacacttgagcgatcgtgcacaaggtgagtttggtgatcttataatggggacaacatggttac

SEQ ID NO: 116717 - DNA, 459 bp, Glycine max
  Clone ID: PAT_MRT3847_76407C.1
ggctaatctgatgaggactttgctgctggcttacctaagggaatgactgaactcaagatctgcagggccatcttgattgtatcagtggattggctgttggggggaggtatctattgagctcctcatttgataaaactgttcatgtatggtctttgcaggtaacacttaaaacacgacaacatgacaatattctattgggtgcattcaaatagcataatctcattcataatcttggcatgacgatgctatcattattgtttcagtcaatgcagcagatttagaagaaaaaaatcttttataatttccaataaatagttcttcagtttttttccctactgacaccagttagcaaataccttctgattaatatttaatgacaatagccaaataaattaaagatgagagagaaatgctggcttccctttttcctctaaaaattaaaactaagacttgctttaa

SEQ ID NO: 116718 - DNA, 1612 bp, Glycine max
  Clone ID: PAT_MRT3847_76408C.1
tacgagagcgagacgacataaggagggaggaacacaagtgttgttgttgttgttgatgatgtttgctttgttctctttctctctcctcaaattttttcctctctctctagggttccaagagtgtcttgaactactccagaaccctctcttgtttttcacaaatttgggtttagtagagtactgacccagaaaagaaggttcaacaggtacctaagagaggggatagaaagaaaaaaatagaaactgtacgtataaaagaagaaagaaacaaagatataaggaaaaagggaaaatattttgaataaggaagatataaggcaatatataaaaatattagtatttgataataattaggtgtagaaatattatggggaggggaagagtggagctcaaaaggatagagaacaagataaacaggcaggtaacgtttgcaaagaggagaaatgggcttctcaagaaagcctatgagctttctgttctctgtgatgctgaggttgccctcatcatcttctctacccgcggcaagctttatgaattctgtagcaccaacagcatgctcaaaacacttgaaaggtaccaaaagtgcagctatggtgcagttgaagtcagcaaacctggcaaagagcttgagagcagctaccgtgagtacttgaagctgaaagcaagatttgaatctcttcaaaggacccaaaggaaccttcttggtgaagacttgggcccactaaataccaaagatcttgagcagcttgagcggcaactggattcatctctcaagcaagtgaggtccacaaagactcagttcatgctggaccagttagctgatcttcagaataaggagcatatgctggtagaagcaaacagatctttgaccatgaagctggaagaaatcaattcaagaaaccagtataggcaaacatgggaagctggtgagcaaagtatgtcatatggtacacaaaatgctcactcccaaggctttttccagcctttggagtgcaaccccacattgcagataggttctgactacaggtacaaccctgaagcctcagagcagcagctagctgccacaactcaagctcaacaagtcaatggatttattcctggatggatgctttgacctaagctctcagtattttagatggctacataaataaaattagcaaacacctaagaccaaagtcaaaatgcctcttgctgttggaaatgtgtaaatgctgcttgttctttagttatttatttgttttggcataaaaacagcagtgactgacttaaaactattaaaactttagccatagtcataggatgtggcatgaaggttatagtattttgaatatctttggaggacaagttttatctgactgaatgacctgttaatgtcatttttcttttgcaatcactttctctttctaatctggctgcattaagagttgtttttaaacttcttgcattcattagtggagcattgtacaatgatatatatgacaatattgtaaagtatactgaggctatggaaatgccacttgaatttattttcaagggtgaactacgaagagaaaaccttgataagattatagatatattaggaagacagtcttaacccccaccccacccccac

SEQ ID NO: 116719 - DNA, 224 bp, Glycine max
  Clone ID: PAT_MRT3847_76409C.1
gacccacgcatgcgtacaaacacacatgcacttagtttttcagttttctgctcagaaccttgcaaccgacacaggttctatataaattcccgacctcaacctatcaagattgcaggttctgaatttgtccaacaacaacttgcaaagaagtgtgcctaaatacctgataaggtatcctgactctgcatttattgtgaataacatttcctttgtaagttcttcca

SEQ ID NO: 116720 - DNA, 383 bp, Glycine max
  Clone ID: PAT_MRT3847_7640C.1
tctcctgcacccccacctgggaagatactgggaagccggggacgaacactccattcccactggactgcgggagctcgatagcctaccctgaggagtgaacacgaggactccctaagcaaattgatgatcacagtgcccaaacccattcttcataaagaagaccttcatccagacagaaacaaagaaagtacaattcaccaagagtccctatgcacaaccttatggtgcatatacatggttaacggatatcaaacacacctctaaagaaggatatagttctgaagagattcgcataaagaaagaagcgtatgagggagaagacgaagtttggcgcaaaatccttgggaacagatattggttttgccattccaaagctgggaaag

SEQ ID NO: 116721 - DNA, 258 bp, Glycine max
  Clone ID: PAT_MRT3847_76410C.1
tcgctctctcgaccgcggacgcgtgggcggaggcgtggggtttgtaaaaagacatagtgcaaatagaggagtttcaagggatgcagaggaacatggatgctcatgattcaaatgataatattgatctactgttgaacgtaaatttggcaggttatcatagaacaggtaaaagattggaaaaaaagaaagtttctgaagataagtttgtgaggggtaaaacacttaaatatgatataggaagtgctgcagtagattctt

SEQ ID NO: 116722 - DNA, 381 bp, Glycine max
  Clone ID: PAT_MRT3847_76411C.1
tttttggtctgcaccaaagacaaaagcgtgcaagcctaataaagatttatccatgatcccacgagggccacgacaatgacatgccctggctggaaaagaaaaacttgctgttagcaattaaatgaaaaactctatatacaaagtggccttactataagagatgattcagcctgtatccaatgtaaccagacccagcaacttgctcaaatacattacatttgttagtgaccactcattggagggtacactgcgtaaccatataaagtccacttgttggtctgtaaacagcttaaccagctacaccacatgccatatttgaggaatgcggacagtactcatagccaccacttgccagcggtctcatgcctaaatacaacagat

SEQ ID NO: 116723 - DNA, 451 bp, Glycine max
  unsure (1)..(451): unsure at all n locations
  Clone ID: PAT_MRT3847_76412C.1
tcctctanagcggccgcttttttttttttttttttttttttttttttggccaaagaatattatttatcttaaacacgaatggtttcttattgagtaacctttgttatttgattgatttccgttttcattgtctctacgggggttatatcctttatgaggacgtccctttgtgtagttccccattgcaacactgttcttcaaaatctcggggaactgtttaaaattttaccctgggcctttctgtaaaagtcaaatgactcgtgaattccccttattgggatttgttaaggcacgataaattgaaaagacctgttgctcttagcttgtttttatatgagcgcctaaaaaaatttttgccatcctggccatcattgacggagcatttttgggactctgcctttgcagaacatgttgggaaaaaagattgccttttccaagactgtggccatac

SEQ ID NO: 116724 - DNA, 766 bp, Glycine max
  unsure (1)..(766): unsure at all n locations
  Clone ID: PAT_MRT3847_76413C.1
ccacgcgtccggtacgttctctctctatctctattaagttgtaactctatttatcactcagatatttgagaaggctttgaaagatggtgcttttgggacttctcatggtgggatttctttctctgggttcatttgtctcagcttctggttatggttggatggatgctcatgcaaccttctatggagggggtgatgcctcaggcaccatgggtgagtaacacttcattcatgccacacacaacacaatgcccattttgtaattattacaagaaacaaaaatatatttttttcatatttctttttcattttatgtcattttaaaaacaaataatgaatttaatgatcatattcaaagcattaaataattttacccagttatttaataaaaaacattattgatatgattttttaaatgtaaattataaaaattaataaatatagtatatgtaatagtttgtaattagttaataatgtaaaattgttttatacaatttcatacataattttttttaataatgtacatactaagagtgtaaatgttttttactattacctaattacaaattatttatagtatcatctatcttatattatattataaatttattaactgttataataatttcgtttctgatgctaagaatgatttatatgtctattaatttcaattaggttatgttaataagtatcttacagtaaccctaaccctangtaagaaattaaaagcagatagttnttataatatcaattccatcattaatgcccc

SEQ ID NO: 116725 - DNA, 267 bp, Glycine max
  Clone ID: PAT_MRT3847_76414C.1
tttttacaccaaacaacatgtctcacacattaaatagggggataacattacctagggagaagctcacactttgaataagacgccgcctattcaccgatccgctctattgacattacacccagctttagttaactatctaaattgacaaacagtcaacaataacggaagccaatcccatgatatgacctgtagcagctgaatacactgcatcgggagcgaaatttgccaatattgatgacaagccattcttctacccattcttgcaag

SEQ ID NO: 116726 - DNA, 362 bp, Glycine max
  Clone ID: PAT_MRT3847_76415C.1
ggggttatggttactttttttttcagtttttgaagtttctgacacaataaagcagaaaacaaagaaaggtaagccatcaatgaaccctcaccagagaatggatgtaagagcaagaaacatacaaaagaaagggcatcaaggcgagaaagtgcaaaaccgaaacaagagatgcaacagaaccaaatttgaggcgaaaatgaaccccgaacctctggaactctgaaaaacctaagccacggaccgacaaagcgaccttgccatgaggatcatcaggagatcgaaaaatactctcccgtacacctccagagaagaaaccaatagtctaagccaatcctttggatgacagaaactgctgacaagca

SEQ ID NO: 116727 - DNA, 347 bp, Glycine max
  Clone ID: PAT_MRT3847_76416C.1
gggcaagcatccgctgcgtccggtttgggcgggggtagccgggtactgggaacagacattcgaaaacttggtgtgactagcacggggggagggtataacggcggaaaccacaataggacgtggatgcgaagtagatgagtttggccaaggggcttcgattaaaaaaaaaaagaaaagaaaaaaaaaaaaaaaaaaaaaaaaaaaaaaaaaaaaaaaaaaaaaaaaaaaaaaccctccttcttgatgacgcactgtcgtcatttcccaaggaaggttccattccgattgcaagctcgattactgggtttgagacgcacgtcgaggacactggcctcgaagtagccgta

SEQ ID NO: 116728 - DNA, 317 bp, Glycine max
  Clone ID: PAT_MRT3847_76417C.1
gtactactcaactaaggccagcaacatatgttcaagcatttgtctgaggcttgtacgatcaagaaagtctcttcataatcatcatcatgtgtcaccatcgtcatcttggtcgtcaccttcttcatcgtattcatcttcttcttcgtggtctttggcgcattataataatcataatcataactcatcgccctcactttgcatgagagacaaaggtcgaggtcaaggacgaagaagcagcaaacacaacaaatgttctaatggacttagaggctgctatccctatggcaacatgaggaacgcacatgtaagccatggta

SEQ ID NO: 116729 - DNA, 345 bp, Glycine max
  Clone ID: PAT_MRT3847_76418C.1
ttagggtaattagttcatgacattgacatgaatgcaaagaaagaactaaggtcgtttgcatcagaggctgctggatttagattacctactgcagatactaaatcgttgcttgcaaaatgaactgttttttactgaaggatacatgagcatggtttttcgggcatggaaaacaagtgaagaacaagaatgttatggcctccgatgatttgcgcggctatgggaagggttatgtagcttaccaggggcagacacttgacagggcagatgcgctgatgctacacattttctacactggggggaggaagcttcaaatttggcctaaaatttcctagggactaaagaaga

SEQ ID NO: 116730 - DNA, 295 bp, Glycine max
  Clone ID: PAT_MRT3847_76419C.1
cagcacgaattgcatcactctcgtccgttaccactgcggccctagaccacgtcaagcgatctctcacaacgccctcatccgttagggcaaagatgagtcgaggaactggaagttgaaaccatcgtgacagcactactttctcacctgaacgacgtctctatcaagtggagtaagctttcaatgctgtgaacgtcgcaggaatcacctcgattggtgtccgaagaacggattcaaattgtgtcgttactcagaagaacgtttcggatacgcttttggaccacacaactgttaaaca

SEQ ID NO: 116731 - DNA, 551 bp, Glycine max
  Clone ID: PAT_MRT3847_7641C.1
ggcttggagcccagatggcctgacattcgccactggtaaccaagacaaaacttgtcggatttgggatgccaggaatctcaccgagtctgtccctgtcttgagaggcaacgttggagcaataagatctattcgttttacatccgacgggcactttttgtcgatggaagaagcagcagactttgtccacatctttgacatcaaaagtgactacaataagagacaggaattggatttctttggcgaggtatccggtatgtccttcagccccgacacggacacactttatgttggaatctcggacaggacatatggcagcctgctttcagtttggccgcctctacaactattcatacctcgactcactactatgaaggtcaaagaaaatatgtgttttccctcggcttataatcaacccagattaggcatcccaaatgaaatttaatttagcctggttttcctcgtaaagaatcctgtaccctggtgtatgtgtacataaaaaaaactgtattttatagacaccagtagtctgctatcctgctttcagattaggt

SEQ ID NO: 116732 - DNA, 169 bp, Glycine max
  Clone ID: PAT_MRT3847_76420C.1
gttctgtctttttggttgattcgggtattttggaactgttacttgaaggcttacaatttttcttatagtgagtcttattatatcttgcggaaccctgggcggagccggtggctggtccaaggattatcggcccgcaacctcgaggagtaacagattttctaatgggggg

SEQ ID NO: 116733 - DNA, 146 bp, Glycine max
  Clone ID: PAT_MRT3847_76421C.1
ggcccggacaacactgatgatttgaactcaaatgagaaaacagttgaatgtacagaggaaaacgagttgtagattgaggcgcgccaaatgtgtccgattgtggggcggaaaatgaaaaacacgacttgttggcaacttaacgtgct

SEQ ID NO: 116734 - DNA, 815 bp, Glycine max
  Clone ID: PAT_MRT3847_76422C.1
cggctcgagcggctcgagacggctgcgagaagacgacagaagggggtggtaaattagagaataaaaacgtgccatgagtatatggatcatgagggacgtacccaacagtcattggtgatcagtactccaaaatatcataagcgttatatcttgccagaagagggcgctccccatcaccatctttacaacctcagagatctggagctttttcattcacttcgaccatgcctaaaaaagatttagagaggcgatcggtttcaccataccggttcccccttctacgcactggatctcggtcatcaagtaggcctacaacacctaaaataagcagaccaaccactccaaatccaagcagacccaccacaccaaatccttctaatgcaagacaaaggtacccttcagagccgcgcaaatcatcttcaatgcgattatccgcagaaagagaccatggcaaagacatagaacaataccctagtaagagtaaacgtctcctgaaggccttactaagccgacgcaagtctaagaaggatgacatgctatacacatacttggacgagtactgatactataaaacctatagaaagcaagggaaagatgtcatagaatcttggaaacaagtttcaattttgcttgctagtttgataggttgcacttctttgtcatttaaaatgaacgtttatatggtaattttccatcatctgtattttaaattaagtgtaactaagcacacaaaattatgatgtgtgatagtgtaatagttcaaactttatttttaagatgaatgctatataatcaagtaaatttggctgcaaaaa

SEQ ID NO: 116735 - DNA, 1563 bp, Glycine max
  Clone ID: PAT_MRT3847_76423C.1
catcccaaagcccatgttacgacttctcctcctcccccacccggtgttccgacgtgctctcctctccctctgtactctattctccaactgtacatgttgcaaaacttgacctgtctctttccttttctttggtaaaaaacgcaacacctaaccgcttagtgtggtgcctttgtgaatgtgctttacactgtgacctggatttgaactttttcattctactgagacctacatttcagcactatcacagccaccaaccatcttgttcaataggactacaaggtggtccttcttcctttactttcattcatgggaaaggtcacaacttctgcaacccagcctgtatctcaagaagcttccaattatgatgaggtttttatgcagcagagcttgctctttgatgatagtctgaaggatttgaagaatctgagagcacaattatattcagcagctgaatattttgaactctcatactccaatgatgaccaaaaacaaatagtggtagaaacattgaaggattatgccatcaaagctcttgtaaatacagtggaccatttaggttctgtgacctacaaagtaaatgatttgttggatgagaaagtcgttgaagtttctgtagcagagctacgagtgtcttgtattgaacagagaataaagacgtgccatgagtatatggatcatgaggggcgtacccaacagtcattggtgatcagtactccaaaatatcataagcgttatatcttgccagttggggagaccatgcatggtgccaaccgcacaaagtcaaaatatgtggggtacaacctagatgacgaagatgaatggcctcactttaggaatgctgttcgagctactatcagagaaacaccaccatctacagaaagaagagggcgctccccatcaccatctttacaacctcagagatctggagctttttcattcacttcgaccatgcctaaaaaagatttagagaggcgatcggtttcaccataccggttcccccttctacgcactggatctcggtcatcaagtaggcctacaacacctaaaataagcagaccaaccactccaaatccaagcagacccaccacaccaaatccttctaatgcaagacaaaggtacccttcagagccgcgcaaatcatcttcaatgcgattatccgcagaaagagaccatggcaaagaactagaacaataccccagtaagagtaaacgtctcctgaaggccttactaagccggcgcaagtctaagaaggatgacatgctatacacatacttggacgagtactgatactataaaacctatagaaagcaagggaaacaagtcaattttgcttgctagtttgataggttgcactttgtcatttaaaatgaacgtttatacggtaattttcttttatctgtattttaaattaagtgtaactaagcacacaaaattatgatgtgtgataatgtaatagttcaagctttattttcaagatgaatgttatataatcgagtaaatttggctgcattttctgtcttttgcacccccttgaaattcaaggtgtccaactattttcccccc

SEQ ID NO: 116736 - DNA, 590 bp, Glycine max
  Clone ID: PAT_MRT3847_76424C.1
cccacgcgtccggtcccagaggagtccatgggatcagttgttgagcttttagggaaaaggcgtggacaaatggttgacatggaagctaacgggacggagggaacaacattgctgaaatacaagattcctaccagaggccttatcggacttcggaatgcaattcttacagcttctcgtggcagagctatattgaatacaatctttgacagctatggcccatgggctggagatcttagctcacgtgatcagggatccttggttgcttttgaagatggaagcactacttcttatgcacttcttaatgcacaagaaagaggtatgttgtttgtccaaccagggcaggatgtttacaaaggtcaaattgttggtatccatcagagacctggtgatttagcaattaatgtgtgcaagaaaaaggctgctacaaatgttcgttccaacaaagaaactacagtggttcttgatgaacctttaagctacagtttggatgactgcatagagtttatccaagaagatgagatagtggaggttactcctgcaagcatccgtatgtgcaagaacccaaagtctcgaaaaaaagtacataatcg

SEQ ID NO: 116737 - DNA, 353 bp, Glycine max
  Clone ID: PAT_MRT3847_76425C.1
ggacacaaagcaacaccccccagggtactaacaaaaaacagggggttaccaccctctttttaccagttaaagcaaaggaaggaaaacagaaaaccctaaaattcaaaaacaggcgggggtactaacaaaacgggggaacattagcggaaacaaccccctcctaagccccacggagtctaaaagctaaggctacagggcaaagcacatggacaaaaaaatggaaatggccaacagtcctttataaggggcaggcagggccccaagccccaaaaaattaggccctgccaaaggggagcattaaagcaacggacaatttttttgaacttcacaagctctgaaatttatggccaggt

SEQ ID NO: 116738 - DNA, 106 bp, Glycine max
  Clone ID: PAT_MRT3847_76426C.1
gtctttactactatctctttcccgctggttttagagacccaagaacaagattttgaactaagatttgcgctcgtttgtgtgttggctaggaagttgggatctctgt

SEQ ID NO: 116739 - DNA, 357 bp, Glycine max
  Clone ID: PAT_MRT3847_76427C.1
ccagtctgccaaggaagaaagaatagcattgaggccaccaatgttgcaggtggttcggttggcttcatttcagcatgctccttcagttccacctttcatatcattaccaaaacaatctagagttgatagtgatgactcttggatggcaacagaagagagaaaggcaggtgaggtggcagttggtggtggtggggtgtctgtggcagttactcgttttccaatggagcagaagcgtcctgttgggcctcttgtggttgtaggtgtcagggatggagttctttggctaattgacaggtacatggttgctcatgccgtatccttgagtcatcctggtattcgttgccgatgtcttgctgc

SEQ ID NO: 116740 - DNA, 2377 bp, Glycine max
  unsure (1)..(2377): unsure at all n locations
  Clone ID: PAT_MRT3847_76428C.1
tgaactagagagacccgcattcaacttgtacattttaaaacagcaaaactttaaattcagtcaacaaaaaattcaaaacaggaagaaaagaacactctcgtgtgtcaggatatgtcacaatcacaatatgagacaacccgcagctcggtacaattttctacaaaaattgaggtaaaaaagggaaacacagctgctcggtacaattgtacctttggaatttaaacttgttacaaactaatacactagatttgcttcatctctaaaatgatttctttacaaacagtaaataaaacatgaattataaatgaattcattttccaagtgcttatgtcaacaatgtggtgggtataccaatcatataaggggatcactcgtaggaactgcaggtggagttggaactgcaggtggagttggaactgtaggtggacttggagcagtagtctctgaaacctctgctgctggtgatacggggaaatcaggtggtgttggtgttggtgctggtgctggattgcccgtagatgctgcttgaacattttcaccattaacatttggatctccatcacttgctggtgtagaggtaggaatgccattatctacagtgctttcacctgattctggttgaggtggagcagtcgcaggagctggcctggtgtctgaggtagactccgatggaggtggatcattacctgatgcaggtgtggattcaggctgctgtgttgtagcactctcttgtgcagctgtggttgtaggaggtgcttccagtgccaaaggcttgcctgggggttgttgggaattctgtgcagcagaagctggttttttctggatggaaataggaccattaagaggtggcatccccggaggcaggatttcaataggtggtttcttccctgcatctgccaaacttgtgagcttgggctcctcaagagaagctaaaaacgcagctgcagcatctgtcttctgtgatggagtaggttcaacctctctctgtagcgcttggttccaaatctgaactaagttcttcaaagttggacgtccatgtgcatgagcatgaagcacagcctctgccagcattccagtatcctgccatgctttctccatcagagcattgtcgcccaaaacagcaccagcaaatgcagcttcccgtcccaagccaagcatgactaagttgttaaccaaaccacttagccgagtcaactctccatgatttgcaaggcgtaatgctaatcctctcaattcatgaccttctaaagcacctttcaccgaaccagctgcagctaacctcttgagagcctcacgggcaatttcactctgtgctgtagcatctgcagcatcaataagatccaaaaactcttttgcgaatttcactataccctgaacaccttcaactatatcttgttttttatctgatactttatttggttttttatctgataaactaagaatgtcattcaaaccaagtccttgagtaccatcatgtccaatatctctgctattactcatggtaagaagacaatgaagagctcttctcaaatcattgctcttaattgccaaatcaaactccaacctcttagatattccaggcaaatgaagtgcttcagtagcatagcccattcctagcataaattgtgctaaatcatcatggtgttctcttccaagtctacttgcccattttactgcactaacagcatcaccataagcagcaagacatcggcaacgaataccaggatgactcaaggatacggcatgagcaaccatgtacctgtcaattagccaaagaactccatccctgacacctacaaccacaagaggcccaacaggacgcttctgctccattggaaaacgagatagtagtcactatggaccagcttcctatcctgggatttttctagaggaaaggaacgtaacataacatttgccaactgtatttttctgcagcttttctggttttcttttatgcattagtcccattcgccttctcagtctcattactgaaatcaggaaaatgccacagacaccccaccaccaccaactgccacctcacctgcctttttttttttctgttgccatccaagagtcatcactatcaactctagattgttttggtaatgatatgaaaggtggaactgaaggagcatgctgaaatgaagccaaccgaaccacctgcaacattggtggcctcaatgctattctttcttccttggcagactggataccttctacagtaattagtgctaactctccatgctctgccactgctcttgccggtgcttctctcattttttgctcttctttcatcttattagtttcaatgtcaatttgagcaaccccagcatccacaaaaaacttttctttagcttattnctagctagtacgcgtg

SEQ ID NO: 116741 - DNA, 166 bp, Glycine max
  Clone ID: PAT_MRT3847_76429C.1
aaacttcaacggcatcgccttccagtgccttcagaagctccctgccgccaacaacacgttcacctacaatggcgacgcacacaccttcgattacctggtcgacgatggctacacatattgagttgttgcagatgaatcaattggagagagaagaccccatggcttt

SEQ ID NO: 116742 - DNA, 375 bp, Glycine max
  Clone ID: PAT_MRT3847_7642C.1
cggccacccgggccggcccaggttttccaaccacacttctttgggctcgcggccggccgcgggagaggtttccggcgcacgttcgcgggcccaagggaaacccacaaaaagaaaaaaaaaaaacaacaccgaaagcagcaggggcggacccacagacaaaaaaggaaccagaagggcctaaccacggacccgagaccccccaccgcacgggcccgcgggggcccctgtggtgagccaccagaataccggggggcccccgcgcccccttcaaccatcagggcggccaaaaaaaccgcccggacgcggcggccctccccaccttgcgcacgcccagcgcggcgcacgcccccccccttggccaggcgctccacaccc

SEQ ID NO: 116743 - DNA, 225 bp, Glycine max
  Clone ID: PAT_MRT3847_76430C.1
gttttgaggcacacgtgtggaggctgtgttagggcttggttcagttgcttgctcaaactgagcagcaagcagcacgcttcttcacagacagaggggccccactcgtaatgatactggattgggacactgccctgcttgattttcataacacacatatctactcaagaattccggtattcaaaacaccactgggatcgttgatagaaaaaaacaaatggggctggt

SEQ ID NO: 116744 - DNA, 301 bp, Glycine max
  Clone ID: PAT_MRT3847_76431C.1
ccgcccttcttttttttttttttaaaaggatgcttctgagtattcggctgtttgccacaaccatggttattacttattagtagactaactcatttcatcacatcaatgctccaaattgcattcaacgaatcaactgctgagggtctctctatacagcataaaattacgtctcaacatactgacctctacaactattaaatataaagagtagatgagtgctagtgccattcatcacatataatgaaaggctacttaagatgcttgaaatccaatgatgatgaggcagtgcactccaatttgt

SEQ ID NO: 116745 - DNA, 253 bp, Glycine max
  Clone ID: PAT_MRT3847_76432C.1
ttttctaatacttgatttatttttttttgttttggtaaattattttttttttatttcacaaaggggcaagggaacaatttgtaaacatattttttcatttacacttacaatatttcaatgaatcaattttaacctgggagggaacaattgtgtaaaccccttgggggggttttcttttaatataatcctaaacccctagatacccttgcccaattcattttgtggaatgggtgctttaaaaaattaaaatggg

SEQ ID NO: 116746 - DNA, 839 bp, Glycine max
  Clone ID: PAT_MRT3847_76433C.1
ccacgcgtccgcccatgcgtccgcttttattgaaatcctcaagcttcaatttgctttgtgctcactcatctatctattataaccaaacactcttcttcatattcttcttcttcttgttcttgttctatctgtgacgagcatcatggcctcgagagcagtgctattgttggctatgtgtgtgcttccggccatggttgtggccattcgcccagcaaagaaccctttttgcgtgaagggtcgcgtctactgtgacccttgccgtgctggttttgagacctcagcaaccacctacattgccgggttagcaacgaggttgtgtacaccaagaaggggtacactgactcaactggagcatacacaatgtacgtggacgaggatcacgcagatcaaatatgcagtgccaagcttgtaagcagccctcaccctcaatgcaaggaagtcaccccgggccgtgacgaagccgtcgttattctcacccgctacaacggcattgcatccgatgataggttcgccaatgccatgggcttcatgtctcaggaggttgcttctggctgtgctgaggtcctcaggcaatacgaggagttcgacaatgagaattaattacgtaattaatttcagtaatactgttattattaatctactttcgatttgggttttctaatgtctatttaattcaatcttgatgtggagtcttatctcgacattttcatattatcatgttatatatgttgatggaccgaccctgcttaattatattattacatcaagatctatcctggactatgaggatgatgtagtctattttgtgtcgttataataaactattcttttatatctgg

SEQ ID NO: 116747 - DNA, 375 bp, Glycine max
  Clone ID: PAT_MRT3847_76434C.1
gcagtgctattgttggctatgtgtgtgcttccggccatggttgtggccattcgcccagcaaagaaccctttttgcgtgaagggtcgcgtctactgtgacccttgccgtgctggttttgagacctcagcaaccacctacattgccggtgctgagattatgttgcaatgcatgagcaggcaatacgaggagttcgacaatgagaattaattacgtaattaatttcagtaatactgttattattaatctactttcgatttgggttttctaatgtctatttaattcaatcttgatgtggagtcttatctcgacattttcatattatcatgttatatatgttgatggaccgaccctgcttaattatattattaaaaaaaa

SEQ ID NO: 116748 - DNA, 923 bp, Glycine max
  Clone ID: PAT_MRT3847_76435C.1
tgtcctttcgtccgcccacgcgtccgcccacgcgtccgtgagcttccattgtgctcactcatctcttacaacgaaaccctcttcatcttgttctatctgtgacgagcatcatggcctcaagagcagtgttattgttggctatgtgtgtgcttccggcgatggttgtggccattcgcccagcaaagaaccctttttgcgtgaagggtcgtgtctactgtgacccttgccgtgctggttttgagacctcagctaccacctacattgctggtgctgagattatgttgcaatgcaagagcagggttagcaacgaggttgtgtacacgaagaaggggtacaccgactcaaccggagcatacacaatgtacgtggatgaggatcacgcagatcagatctgcagtgccaagcttgtaagcagccctcaccctcaatgcaaggaagtcaccccaggccgcgacgaagccgtcgtgattctcacccgctacaacggcattgcctccgacgataggttcgccaatgccatgggcttcatgtctcaggaggttgcttctggctgtgctgagatcctcaggcaataccaggagttcgacaatgagaattaattacgtaattaatttcagtatattattaatctacttcctaatgtctcttgatgtggagtgttatctcgacattttcatattatcatgttatatatgttgatggaacgaccctgcttaattttataattacatcaagatctgtcctggacttgaggatggtagcagtctattttgtgtcgttataataaactattcttttatagctgcattcattgaagggttttgtttttcgtcaagaacaaggatgatgatttctaggaagctaaggtcactgctcttggtttggtttgtttccattaagattatactagggcttgattgtgg

SEQ ID NO: 116749 - DNA, 686 bp, Glycine max
  Clone ID: PAT_MRT3847_76436C.1
gactcatctcttacaacgaaaccctcttcatcttgttctatctgtgacgagcatcatggcctcaagagcagtgttattgttggctatgtgtgtgcttccggcgatggttgtggccattcgcccagcaaagaaccctttttgcgtgaacggtcgtgtctactgtgacacttgccgtgctggttttgagacctcagctaccacctacattgctggtgctgagattatgttgcaatgcaagagcagggttagcaacgaggttgtgtacacgaagaaggggtacaccgactcaaccggagcatacacaatgtacgtggatgacgatcacgcagatcagatctgcagtgccaagcttgtaagcagccctcaccctcaatgcaaggaagtcaccccaggccgcgacgaagccgtcgtgattctcacccgctacaacggcattgcctccgacgataggttcgccaatgccatgggcttcatgtctcaggaggttgcttctggctgtgctgagatcctcaggcaataccaggagttcgacaatgagaattaattacgtaattaatttcagtaatactgttattattaatctactttcgatttgggttttctaatgtctatttaattcaatcttgatgtggagtcttatctcgacattttcatattatcatgttatatatgttgatggaccttat

SEQ ID NO: 116750 - DNA, 1174 bp, Glycine max
  Clone ID: PAT_MRT3847_76437C.1
gcagagtcacatgcgatcaccgacagcgccagctgcaaacattattgtacaatgctcttacaccgcctcagttcttttcctctatgttcccttctctttacacccttccacgtaaccccatcagaccatcataaccacgtggcaggttttagttgccagaccaccttcctctacggtgcgctccaacgcacttgaacatttatcacgcgctttgcttttgttttctttatgcattttctctagcttccccacacactcaaaccatcccttttattgaaatcctcaagcttcaatttgctttgtgctcactcatctatctattataaccaaacactcttcttcatattcttcttcttcttcttgttcttgttctatctgtgacgagcatcatggcctcgagagcagtgctattgttggctatgtgtgtgcttccggccatggttgtggccattcgcccagcaaagaaccctttttgcgtgaagggtcgcgtctactgtgacccttgccgtgctggttttgagacctcagcaaccacctacattgccggtgctgagattatgttgcaatgcaagagcagggttagcaacgaggttgtgtacaccaagaaggggtacactgactcaactggagcatacacaatgtacgtggacgaggatcacgcagatcaaatatgcagtgccaagcttgtaagcagccctcaccctcaatgcaaggaagtcaccccgggccgcgacgaagccgtcgttattctcacccgctacaacggcattgcatccgatgataggttcgccaatgccatgggcttcatgtctcaggaggttgcttctggctgtgctgaggtcctcaggcaatacgaggagttcgacaatgagaattaattacgtaattaatttcagtaatactgttattattaatctactttcgatttgggttttctaatgtctatttaattcaatcttgatgtggagtcttatctcgacattttcatattatcatgttatatatgttgatggaccgaccctgcttaattatattattacatcaagatctatcctggactatgaggatgatgtagtctattttgtgtcgttataataaactattcttttatatctgcattcattgtagatgggttttgtttttcgtcaagaatcaagaatattgatttgctagg

SEQ ID NO: 116751 - DNA, 165 bp, Glycine max
  Clone ID: PAT_MRT3847_76438C.1
atactactcaggagaaactacatattctcaacccatcattttccagaaaactcaaatcatcttccttaccaaatgcctcctaagtatttacgtaactggttgttgagtccattaattttgtctgcaccttggactggaacgatacttcctccccccttacatttt

SEQ ID NO: 116752 - DNA, 582 bp, Glycine max
  Clone ID: PAT_MRT3847_76439C.1
aactcccaagagagctaacgataatatgttcagattacgaattgctctacacctgtccatctcgtcgaagaaacgatctcttggattccaaggtataggtgtgctgctgcctcaaatgcccccttctcatatactaagcgaattcgcttctgatgcgtatccaatcttagcttatgcatctgaccgagtccttgccttcgcgcataccatgcagcattacaatcaatatatccaagcgaagactgaatgaactaacggagtgtaaaggcgtcaatgacaattctagtataaggagaaatgaatgatagatcatggaggctcccctcatcatacagaatgtgaataaccttaccaaacaacgtaatgaagaaattcagatctgcatgattactccaagtgcactcgaaaaccttccagatatccatccagatcgatacttcattgtatgcaaacatacatttatattaccacctctgccatgactacgatcaagaagttgcagcatctccaacgaactcctcaccacccatatcctctcctagagatggcgctcatgtgctactatactaccacgaactgtct

SEQ ID NO: 116753 - DNA, 344 bp, Glycine max
  Clone ID: PAT_MRT3847_7643C.1
tttttttttttttttttttttttttttttggggtggggtttttttttttggttgttttttttttttttttccccaacaggggccaaatattaaaaaaacatttccttcccatttagttttacattccaaaacaataaattccctaataaaccaattttttcacagccccccttaaaaataaaccccccaaattttacttttagtttattagcatggggggggaaatttcctaaaaggcaaccttttttggccgggaaaaatcaggttgtttttttcccttgattacaaaaggcccaagggaattatcccgcttccctccccggggggggggggggggcccacct

SEQ ID NO: 116754 - DNA, 1640 bp, Glycine max
  Clone ID: PAT_MRT3847_76440C.1
cccacgcgtccgcccacgcgttcgcccacgcgtccgcccacgcgtccgagaagacgacagaagggggataattccacgccttatctatctaatatactatacaaaaagttcttatcagtgacagagtaaaggaggcataccgatgacgatggcgatgacgggggtctctgcctctgcaattcagcgggctcaagtgctccccactctcatcttcttctctcttctccaaaccttctctttggacccaacaatcccaaaagcgcgtttcaattaccattgcgaactcaatagcaatagccaatgcgcagaacaaagagagagcgaggcttaagaaactcttcgaagaagcctacgagagatgccgcaatgctccaatggaaggtgtttccttcaccatcgaagacttcactgctgctcttgacaagtacgacttcgattctgaagttggcggcaagattaaaggcactgtgttctacacagataacaatggagcagttgttgatatcactgcaaagtcttcggcatatttgccactgcaagaggcgtgcatccacagggttaagcatgttgaagaagcaggcttagttcctgggttcaaagaggagtttttgatcattggtgagaactcaatagatgatagcttggtcttgagtttaaggtctcttcagtttgaccttgcatgggaacgttgtagacagcttcaagctgaagatgtcacagtcaagggtaagattgtgggggtgaacaaaggtggagtggtggctgagttggaagggcttagagggtttgttccattgtctcaaatatcatcgaactcaaatgtagaagagcttcttgataaggagcttcctcttaagtttgtggaggtggatgaggaacaatctagacttgtcctcagcaaccgcaaggccgtagctggcaaccaggcacagctaggaattggatcagtggtcactggctctgttcaaagcctgaagccatatggtgctttcattgacattggtggaattaatggcctccttcacgttagtcagatcagtcatgaccgtgtaactgatatttcaactgtgcttcaacctggtgacatattaaaggtgatgatcttaagccatgaccgagagagaggtcgagtaagtctttccactaagaagttagagcccacacctggagacatgattcgcaatccaaagcttgtctttgagaaggcggaggagatggctcagacattcagacagagaatagcccaagcagaagctatggctcgtgcagacatgctaaggttccagcctgagagtggattgactatcagcggtgatgggatcctgggaccatttacttcagacttgcctgaagagggactggatttgagtgaggtaccaccagctgaagaatcatgattcagaattgcgtgctcttttctttctgtttgcttacatttttataatattgtttgtaactaactatcaattgttgccgaacgatgtcttgatgccaatgtattattgtgagttaaataaatagaactaattcatattgtcgtccctgttatctttagtcaaattgacaatagtggaaccagttcaaaaccaaatttaaaaaaaaaaaaaaaaaaaaacctcacacaaaagtggaaccagttc

SEQ ID NO: 116755 - DNA, 343 bp, Glycine max
  Clone ID: PAT_MRT3847_76441C.1
ggctgctcgagtacattatagtgcaatagagcggctagctggcacacgcaatgaacacgggcctttgtatcacgagatctacatcagtgttccggagctcctgccaatccgaagtggctccgagggcagaaccatgcgtcagcctgctgcagcactccttcgacgaaaacgcacgaggcgaaactgcctgagcctcatcgtgtcgaacctatgctgctgagctcgcactgtacccggtagcacacggttctgatggctaacacacaccacagccatggatcaggacattgctgactatgggcagcgaatgacgtcaaatgctctacggcacactggagtttac

SEQ ID NO: 116756 - DNA, 157 bp, Glycine max
  Clone ID: PAT_MRT3847_76442C.1
tcgtttgaaccgactaccctcggatcgcgtaggcgacatgtagatggacaccgtgaatatggggaaacccgatcttaagaagatagtttagccatctgacattgctcgcctgctcaagccttggcgccgcaaggacggcgtctatatgtatttcaat

SEQ ID NO: 116757 - DNA, 267 bp, Glycine max
  Clone ID: PAT_MRT3847_76443C.1
ggcatctgatccacattccatattgagatagagatttcaaaattatacaatttatgttatgacattgcaaatacaaggagtctttctttttttttcaaatagaaaaaaaatactgaaaccatgggcttattgatttacatgagattttatttatctatttgatatcataattttatacataaacaaacaaacttattttatgtaccagaaaaaaaattaattttttctctggagtctggaccttattgagcaccttgcagtttcact

SEQ ID NO: 116758 - DNA, 839 bp, Glycine max
  unsure (1)..(839): unsure at all n locations
  Clone ID: PAT_MRT3847_76444C.1
cctcggccctccgccggcagcctgtagcccggccgcccttcgtccttttttttttttttttttttttttttttttttttttttnnaggcagcttttttttttttttggccttgaaaaaccccaacaaaacccaggcgggggatttcattccccccccaaaaggcccccaaagggggcggggcccccccccctgcttttccggtgggcccaccccaccccagaaatggttttccccaatcggggccggcccccagggggccccgggttgggcccccttttattcccaccccggccaaaaacccaaacccaaacccggggccttaaagggccccagggcccaattcatttcccccggactggtctaaacccctataagggcccccgccctggggggaccggcccccccccccgggaagtgggcccctgggggggtgggaaatttgccccagacccaaatcagggccccccccgggcgaaccgttcccaaaatcaaggcccttgaaaccccccgggggttttggaagttggtggattgcccccccccgagaagatgccccccgccgggtcatgggcccccccgggaaatttcccctgggtttccccccccaacccggggccgggtttccaacaccccccgttttatttgccccaaaagaaacacccccccccgggggggggccccccacgggaccccttccccccgggaaggatgtccccgggcccgcggaaaaactttggccccccccccccccccaaccctctttaaaaaaaagagggccccaaagaatttctccccccggattcccccccgcccccccctggggggggggggggggttt

SEQ ID NO: 116759 - DNA, 500 bp, Glycine max
  Clone ID: PAT_MRT3847_76445C.1
caattgtgttgctgtcgtgaaatggctggctcaattggcagcggctggatcacacgcacgggtgtggagtggcacttgcgatcctccaaaccctaggaaccctctcgtatgcttcgatgtcaccctcggtaacattcccgccggtctaatcaatatggaactcttcgcctattttgcccccaaaactgccgagaatttcatgcggttctgcactggggagttcaggaaatcaagactgcctgtcggttacaatgttcgccaatttcatgtcttgattgtcgattccatgattcacgctggtgatttcgcaaagggagatggtacaggatgtgtgtccatgtatggactcaagtttggtgatgaaaactttacagccaaacacatctggtctctgtgccttcttgtcgatgggcgaatagcggccaaaataccgatggctgtcagttctttataacatgtgcaaaatgtgactggcttgacacatagctgctgcctttggg

SEQ ID NO: 116760 - DNA, 341 bp, Glycine max
  Clone ID: PAT_MRT3847_76446C.1
ggaaacaactgtcagattcaaggcagcagaagaatgtactccattctaataggaagtcaagactgagtggtcaaagctccaatgatgtcaaattggtaaacaagaaacatctttctatcaagaagcagacacctatcagcagccagtcccaggacacttctgttgaacgccttatacgggaggtgaccagtgaaaagttttggcatcacccaggtatcaagtaattgtattattaccattagtgcagatgtataatgttattgataagctttatggtctctttgcattttgaattaaaaaacaaaaacaaaaaaagaaaagaaaaaaaaacaaaaaaagaa

SEQ ID NO: 116761 - DNA, 215 bp, Glycine max
  Clone ID: PAT_MRT3847_76447C.1
attaaaaacagcatcttgattcatatattaaagcaacatcaaaagatctggaaaaaaacattacattggggctttaaacattgttcgcactgcccatgagcccaaccatttaacaaacacttctagaatggtccaggagaaaaatagaaggccaagttttgtttgtgaggaaagcaaagtttcaggaaattgtcttaaaaataaaatcactcata

SEQ ID NO: 116762 - DNA, 637 bp, Glycine max
  Clone ID: PAT_MRT3847_76448C.1
ccacgcgtccgctttagaggaaggctaaaaaggcagttgctgccatgctgacaagatctaaagaaagtgagaagactgaagatatgaacatgactgaggaagaaagagttgagaaagagcagaaagagctcatgcctttactcacaggtggaaaattgaagaattatcaactgaaaggtgtaaagtggttgatttccttgtggcaaaatggattgaatgggattcttgctgatcaaatgggtcttgggaagacaatccaaacgattggatttctctcacatctaaaagcaaaaggtctggatgggccgtacatgataattgctcctttatcaaccctctcaaactgggtgaacgagatttctaggtttgcaccatcactccctgccgttatctaccatggtgacaagaaacagagagatgatatccggaggaaacatatgcccactagaacaattggcccgcaatttcctatagtcataacttcttacgagattgctttaaatgatgccaagagatatttcaggtcatacaattggaaatatcttgttgttgatgagggacacagactcaaaaactcacaatgcaaattagtgaaggcattgaaattcataaatgttgaaaacaagcttctttttac

SEQ ID NO: 116763 - DNA, 537 bp, Glycine max
  Clone ID: PAT_MRT3847_76449C.1
attaagtgatagttggcaaaattctaaccaagtgtttaggaaaaattattactataaataaggatgatatattagagtttatataaagtcaaaatcaagccaaaaatcaaaaagtgatcatttgtaaagtaatctcttccttcaaaactttctaatctctttcattccaacataacgatattttggactgccaatcagtcctctttcatatgatgaaatgagaatattccaattaaagaaaatagtattaaaaagagataaagtaaaccttcatattgtagggacctcttaactctaagtcacatgcaaacccaattaataagaccaagcatgatacataagtatcactttttaaacacttaatcaaatactcataatttttttattattattatatcacatcataatatctataatatattttattctcgtttatctattactatgtgtataatgactcattggatgttggatgcccatccatacttttccaataagaccctcctccgaaagcacaaacattcttcttcttcttct

SEQ ID NO: 116764 - DNA, 328 bp, Glycine max
  Clone ID: PAT_MRT3847_7644C.1
ggcccacgcgtccgaaaagacagaacattacgtgtttctgaaagactgaaactttcaggcagggctactatccaagccggtctggtataccttcactttctcccacactacacattaacacatgcaactcgactcacatgatcaatgtagcattttacaactgcaagataccctgatctgtacaacacatgtatatccctgtctctgactctgtctcttgatcacggttacttagttatacttcaattcatcgaccacataccatccttacacccaaacacaccgaactatcattcactttcctttaaccccatactcatactaaatt

SEQ ID NO: 116765 - DNA, 421 bp, Glycine max
  Clone ID: PAT_MRT3847_76450C.1
tcctctagagctgccgcccttgggttttttttttaaaaatgtgttttcaatttacgtttttcagcaaattataaacaatacaatgcattgtctgaaaaccataatgattaaattacaactttaaaatgttaaaacaaagtaacataaaaatttctccatcaatcaaaatgtggtcatcatgagctttattttggcccaaaacatggtaactcttttttacctcctcaggtgcaggctcaccctccaatttaaaaaacaaggttggatgacaatgttctatttgccttggaaaagggtgccctacctggttaatttacaaacaacatttagcccttatttttccacccccgccctggtaattatattttttctgaaagggggaacccctttttttttacacccccccctaaccctttttttc

SEQ ID NO: 116766 - DNA, 278 bp, Glycine max
  unsure (1)..(278): unsure at all n locations
  Clone ID: PAT_MRT3847_76451C.1
gagcggccgcccttggggtttttttttagtnagtggagcattgtaggaaagggaatttattgaagcaaacaaaatgagtaatagaaccatacactgngacaccgactcacagatacagattattggctctgagacnnncaataacttttaatattgtagatccaaggtcggggggggggagccctngtcttatggaccatttttttactccctcnncacattggataccatactttggaacattgtgtcntccaagccagcncacttttttttttgtt

SEQ ID NO: 116767 - DNA, 282 bp, Glycine max
  Clone ID: PAT_MRT3847_76452C.1
attgtcacactcctccgtttgttcatcctatgatctcgtctctgacataacgacgacctttgctcgggataaaacggccgagccacgatcggacggtccttcattgttactgcgtccatgatctgcgatcgcaattttccgtacgacgattacgactccatcttcgactgctacatcggaaggaacaccatctcgccggaagattcctccgaccgggaagacaccgtcgaaactgatgttcacagttccttcaaaggcccttcgcataccatcaatgatcta

SEQ ID NO: 116768 - DNA, 269 bp, Glycine max
  Clone ID: PAT_MRT3847_76453C.1
gtcacaaatgcgtatgtaattgttgaggtgaggttggggttgggggttgggattgggattgaaaactctagagccaaggctgtgctaaaaatttctgaattcccctgaggaagagcccaagggacatcataactggtaaacgacaaatatcccggatttgtaagaaaaacataacaaaagcctcctgtttgggatgaagcacgtgtaaaaagcaaacctcggctccatcccctatgtgcaaaagttattccaacacacccgcgcataac

SEQ ID NO: 116769 - DNA, 448 bp, Glycine max
  Clone ID: PAT_MRT3847_76454C.1
gaccgacgcggccgcagacgcttaggcagaagtccttttgaaggaagctattcaagaacagatagaactctattgactggtgtatctcgtagggagaaattgattaatcatttaataactatataatttcactttcaaattcttataattagtatcttttaatatcttcatatttcatttgaatataatattaatatataaataaaatgaattctaatgaaaatagaaaataacacaaaaaactatacaataaataaaatagaacgacaaggtataaattgcatatatttgcatatatatgcaaatatatgcaaacaatttgcgtccaataggatttgaacctatacctaaggtttaaaatacctctgtcctatccattagacaatggacgcttctatttttctgtattacttttattccttaaccttattaactaaaaaaggttaaa

SEQ ID NO: 116770 - DNA, 1142 bp, Glycine max
  Clone ID: PAT_MRT3847_76455C.1
ccacgcgtccgcgaaaagcgtgtcgaatggatttcacggagaaggatctattcggcgaagattccgacaacgacaacgggtcccactcctccggttcctcttcttcttcctccgtcgcttcctcttcctcatcgtcctccggttcctcttctgcctcttcctccaaagccagcgacgccgccgccgactcctcctccgccagcggcagcgccagcagcggcgccgaagacgacgacgagaatggcgacgtcgtagatagcgccaaggcccgcgcgcatcaccatcacgactacgaagacaaagatctgtttggctccgataacgaagattactgtaaaaccctcgctagaagtccttaccccattcctgtattgcctgccacccgcaatgtgaataatcagggtagagggggctttggccgtggtcgttggcaaaatgatagaggagctggccttcttcctcgtcctggaccatatccccagaggcagaattttgggtacggaaataggtttcagaatggccgccatgatgagcgatttgtctctgagttgaagctttcaaaaagtgaagaaactctatcacgaaagtgcattgcttttcaggagccttgtgatgttggcagggaggagtctgcttggcgtttgctgacgaggtattatgctggctgtatggaacagtcaaagaaggtgagtatactagatcccacctgttttgtttggctgtttcactcactaacattatagaaatgatgatgatatcttgaaggaactccttttctaataaaaatacagttcatatacagtgaccaaatgcttttattttgtgttaatgtgtatgttttggggtttcaggtgaagattatattttgcagtttgctccacctttcaaccgattggagcttctgcaatcccagtcttgcccagatgtaatcactagtcatctggagctgttgtgaaaatttagagaacttaacagttattatttaaacaactcaatatacgaagtaaggggaatcaactctggattttcccccgctgctttgatcagttcactaatttgtagtatagggggcaccctctgtgagtgctgagaattgcattcgcatctttatagaaatttgtggaaatattatggccttgctt

SEQ ID NO: 116771 - DNA, 1826 bp, Glycine max
  Clone ID: PAT_MRT3847_76456C.1
tgtacggctgcgagaagacgacagaaggggattgcatttcactgaaacgagaaaagcgtgtcgaatggatttcacggagaaggatctattcggcgaagattccgacaacgacaacgggtcccactcctccggttcctcttcttcttcctccgccgcttcctcttcctcatcatcctccgcctcctcttccgcctcttcctccaaagccagcgacgccgccgccgactcctcctccgccagcggcagcgcaagcagcggcgccgaaaacgacgacgagaatggcgacgtcgtagatagcaccaaagtccgcgcccatcaccatcacgactacgaagacaaagatctgtttggctccgataatgaagattactgtaaaaccctcgctagaagtccttaccccattcctgtattgcctgccatccgcaatgtgcataatcagggtagacggggggtcttttgctgatgagtgacaaaatgggctgtatgcaacagtcaaagaaggtgaagattatattttgcagtttcagaattttgggtacggattagagtttctgcaaggccagtctgacccacatttagttactgatttgaagcagttaataagaaaatttacagaacttaacaggtattattatttaaacaattcaatatacgaaggggaatcaactctggatttttccccagaagtatgctcagtccacgaatttttagtatagtttcaccctcagataactgctgatattggagctgattataacgatagtaatgatacatacttttccaaaaaagcctaaggctcaaaggacttagccgatcttcttgcttgcattagagacaaaaatatccctcttcaaaacattcttttgcagacattccgtaacaatcttaacgcgatactggaaacaggttataggcgtcatgagccttgggaaatgggagtgcacaaaaggaatggtgttgtctatcttgatgtgcacaaattaccagaaaaacctcaaagtgatttggatcgcaggagatgttatgtaggatattgttttgagagccttgcaactgaagatcctaatagagcagatggagaggggatacatcatgttgatgccaatgttgaattttgtgctgtgattaagacaaaattaggagctcaccgcatcttaatgggtgctgagatggattgctgtgattcgactaatgagggaaagagattttatgtggagttaaagacaagttgtgagttaaattatcacaccgaggaaagattcgagagggagaaactgttgaagttttggattcagtcattcctggcaggtgttccatatattgtcataggatttagggatgatgcaggtcgtctagttcggacagagaggcttagaaccaaagatataacacagagagtgaaaatgaagaactactggcagggaggagtctgcttggcgtttgctgatgaggtattatgctggctgtatggaacagtcaaagaaggtgaagattatattttgcagtttgctccacctttcaaccgtttagagcttctgcaagcccagtcttgcccagatgtaattactagtcatctggagcttttgtgaaaatttggagaacttaacagttattattatttaaacaattcaatatacgaaggggaatcaaccctggatttttcccctccgctttgatcagttcacgaatttgtagtatagggggcaccctctgtgagtgctgagaattgcattcgcatctttatagaaatttgtggaaatattatggccttgcttagttggaatatagttgttttcttcattccaaaaaaaaaaaaaaaaaggagg

SEQ ID NO: 116772 - DNA, 395 bp, Glycine max
  Clone ID: PAT_MRT3847_76457C.1
ggctcgagcggatcgagaaacgatttttatccaaacagggcacaatttccatgtccctaaccccacccccctacgacctccagtacttcaaactccagcccatcaaggaatccatcgggctacgggaaagggacgcgccgctcatgaccgacatgataacctacgccgacgccgacgatagaatcgtaggaaccggttcgggcgggctcttctgcgcgtacgagctcagcaggaaccccgccgggagcgaggccatagatcggcagtcagtgagccccggctgcgacacggggatcggcgggcagatcttctccgcgatggtggtgcgcacgccggcgcaccttttccttgacagctgggtgcggtgtacaacgagcaggaggactacgttgtca

SEQ ID NO: 116773 - DNA, 301 bp, Glycine max
  Clone ID: PAT_MRT3847_76458C.1
gtcgcatgcacgcgtacgtaagctcggaattcggctcgagacgggctgcgagaagacgacagaagggtatgtgtcttacatgtgagcaatgcttaaaaaattgattttttcttcctttttgaagtttcttttttcaaaacaaatattgaatgatatgaaactcactgtctcattctcatcctctacgcggaaactctctatttgttttttctttattttattgcgttcccattgcgtcaaattttcgtcaggctgacacgaaaagtctcactccccgcggcttctttaatgtttatttatc

SEQ ID NO: 116774 - DNA, 409 bp, Glycine max
  Clone ID: PAT_MRT3847_76459C.1
cccttaatgtctagtagatttcagtcaccatattggtatgcccatgatagcaacacttatttcgtgacaaaaccatgttgctcctattttaggaagttttatattttatccctgctgtatttttattctgtatctgttctgcatcttgctattaatactaggtgcgtatattaggaagcaatcccataatcacagggatttgtcccctagaattaactgtccctatttcctaaaatagccaacatgcttgtgtatatataggcacctgatgtacctcataaaaaaacatacaataatattattccttctaaatctgagatttcacatagactggtcatggcctttattagaattgagaatgtatcttgcctaactcaacctaggtggggtactttgtttacttactcta

SEQ ID NO: 116775 - DNA, 286 bp, Glycine max
  Clone ID: PAT_MRT3847_7645C.1
ggacaaaatctcccacccggttccttttttataaaggccccattcgggaataaattaaccggggccatccccggatggaccccccgggggaggggatgcccccttgcccactgagtaaaaaaacttctaccccaaagaccggggggggcctccccacccctttttctccaaatgggaccccaaaaagcaatcccttgaaaggaggggccaagaacctgaaccaacccctaataaaagctttcagggctgggaaaaacccccccaaaaaaatgggaccaaattttag

SEQ ID NO: 116776 - DNA, 780 bp, Glycine max
  unsure (1)..(780): unsure at all n locations
  Clone ID: PAT_MRT3847_76460C.1
caaactcctaccttggctcgagcacactctctctctccaccctccaactgcaatggccgtcccttccttctccgcgcgttctttttctctccctgcccaaaaccactactgccatctctcttctctcccactaccctccttcactctctcatctcgccgcccaagacattcttcttccaacctcttcacacctcttcgctctcccacaacccccatttttgcatcggcccctggcggaggaaccggaggaggacatgccggcggaggtggaggtggaggcgacggtgaatcggaggacagggatcggaaccgagaggaggcgctgctggttctcgccgaggcagggaggccgctggagaaattgccggcggatttagcggcggcggttgaggcggggcgagtgccgggctcgattgtgaagaggttgttcgagctggaaaaatcggcagtgttccggtggctgctgaatttcggagggtttagggagaggttactggccgatgatttgttcctcgctaaggttgccatggagtgcggtgttggcatctttacaaagactgctgcggagttggagaagcgcaaagaaaattttactaaggagcttgattttgtttgtgctgatgtggtgatggccatcgtagcagattttatgcttgtgtggcttcctgcccncacagtttctctccgaccaccacttgctgttagtgctggaactattgctaaattcttctatggctgccctgaaaatgcttttcaggtgggcttggctgggacctcata

SEQ ID NO: 116777 - DNA, 308 bp, Glycine max
  unsure (1)..(308): unsure at all n locations
  Clone ID: PAT_MRT3847_76461C.1
ggncnnccngcgggggaacccacaaaaggggggatatttttaaaactttttccagagtccataaagggggggactaatgccaataaaataaaaaaaaaaaaggccctgcatgccccttcctatgattgggaagcatacctttggatggacatttattcacttatgccgcatatttttttttgaaaggccccttatgctgctttttaccactaaaatgcttaaaatttcacgggtgggaaaaccttgcttttaaaaaacccccttgttgggaacctttatgctttgctggaaaagaaagttccctccct

SEQ ID NO: 116778 - DNA, 1925 bp, Glycine max
  Clone ID: PAT_MRT3847_76462C.1
cggccgctcaggcggcgggcgggtcttctatattgcggattgttcggttttagtctcactgccaaagtagtgtatcattacttatatttatggtcagccagacagccaccagaccaagccgcattttctcttttcatttttttccattaatagttgtaataacaaataccatggacctgatatccagcaaatcaatagaattttcgtagtcaactaattcttgtgacagagtagggagcttctggctcgagaactcctaccagactcactcactctctctctctctccaccctccaactgcaactgcaatggccgtcccttccttctccgcgcgttctttctctctccccgcccaaaaccactactgccacctctcttctctcccactaccctccttcactctctcatctcgccgcccaagatattcttcttccaacctcttcacacctcttcgctctcccacaacccccatttttgcatcggcccacggcggtggcaccggaggcggacatgccggcggaggtggagctggaggtggagggggaggcgaccatgaatcggaggacagggatcggaacagagaggaggcgctgctggttctcgccgaggcaggagaaattgccggcggatttagcggcggcggttgaggcggggcgtgggccgggcccagtgccgggctcgattgtgaagaggttgttcgagctggaaaaatcggcagtgttccggtggctgctgaatttcggagggtttagggagaggttactggccgatgatttgttcctcgctaaggttgccatggagtgcggtgttggcatctttacaaagactgctgcggagttggagaagcgcaaagaaaattttactaaggagcttgattttgtttgtgccgatgtggtaatggccatcgtagcagattttatgcttgtgtggcttcctgcccccacagtttctctccgaccaccacttgctgttagtgctggaactattgctaaattcttctatggctgccctgaaaatgcttttcaggtggctttggctgggacctcatattcacttattcagagaataggtgctatagtgagaaatggagcaaagctatttgcagttggaactggtgcatcactgattggtacaggtgtaactaatgcgttgatcaatgcaagaaaagttgttgataaatcttttgctgctgaggcagaggatgtaccgataatatcgacaagtattgcctatggggtttacatggcagtatccagcaacttaaggtaccaagtactagctggagttattgaacaacggattcttgaacctttgctgcaccagcacaaacttatgctaagcgcaatttgctttgctgttagaactggaaacactttcttgggctcactattgtgggtggattatgctcgctgggttggagtccagaagatacgggattaggcataatggttcttcagttacaagatattttcataggatgatttgggtcaaatcttgtctgttgattcattattgaagtacagttggtttgttgtatttttttttattcctcctgaaagcaatgttgtaaattgagcaataacggagggcagcaagcaccatgactcgagtctccaattatcaccgtttatgctggccagtgaaggtataagatccatctctcgtagctagcagaaagctgcagcatgagatgaatttgagtcacacatcttcactagacatttgtggggcaatgcctatattgttcttgtgtgttttgccttctaaagttaaaaatgaatagagacaaattcaaattggcagtgccctaatagctgttgcttaactttgtttcttttctcattattcatctatttgcttctgtacacaaaaaaaaaataaaaaaaaaaaaaccgctcgcgatctagaaccggacgcgatgaaca

SEQ ID NO: 116779 - DNA, 181 bp, Glycine max
  Clone ID: PAT_MRT3847_76463C.1
ttttaggatttctgtttaggtaagaaaaatccattaggccttctgagtatttgggctcattatcgtatggactgaagtgcaaaaccataagcatggatagaataggccatatgctgaaacaacagctccatatgtaactcttgaaaaaaatcacgaaaaaaaattgagtggcccatgccga

SEQ ID NO: 116780 - DNA, 696 bp, Glycine max
  unsure (1)..(696): unsure at all n locations
  Clone ID: PAT_MRT3847_76464C.1
taaaaagtaaatcctacatttttcattgccattggtcgcaagtcgcaatcattgttatcttgttgtgtctggtacagtgacttccagcattttgattttcgtgtgtggcgcggctgtggctatgcgtttctttcctttcctttccatttgtgtgattcgctgcaatttcgcttctatcactcactcaccgttacatttcattttccgctgaacaccaaacatgtgatcctcacacttacaccagacagaacagaaaagtcatttgttgtttcatgtttactttaaactctctctctccaaaaaacaacaacaacaagaacagagtgaacaatagtaaccgttgatggcctcggtgacgggttttctagtctcacccgcgggagctgtaaggcaccactggtttggagttcgggcggtgttgtcatctgaatctggaacagtggcagctgtgaacggatcttcttcgcagaatggttccttggcacttaaggaggaaaaaaaggtgcctttgttgcgaggtgaagaagaagaagaaggtttggcagcactttgggatgatgggtatgggagaaggagtgtggaggattactttgctgcagctaaggagatgtgcaaatccgatggaggcccacctcgggggttttgccccncttgaatgtgggcctcctttcaaggattctcctactcttctttttt

SEQ ID NO: 116781 - DNA, 1678 bp, Glycine max
  Clone ID: PAT_MRT3847_76465C.1
ccacgcgtccggtgattcaaaattatttgtcaaaagctggaaaaaatatcaaccagacaactaaaaaaaggaaagatataattagataatagttgttaataatgtttatggtcttaaagccttgctactctaatataaatataacccaatcatactccggaatcaattcattcaagagaagttcaaaaacagtgtaacaaaaagaaaaagaaaaaaaatatgaagttcgctataatcacaatattgttctctttatttcttcttgactttggttttgcacaacagggggatcttgacatatcaagatttggaggaaaaccaaatacaaatataggccaggctttcttaagtgcctggactcaagcatgtgcatcaccaactgctgtcaaaattgtgattccagctggcacataccaaatgggtgcagttgatgtcaaaggtccttgcaaggctcctattgaggttcaagttgatggaacaattcaagcacctgcaaacccaactgaccttaaggcggctcatcaatggtttgttgttcaatatgttaactctttcaccctgtcgggtaaaggtgtttttgatggtcaaggggcaactgcttggaaacaaaatgattgtacaacaaacaaggactgcaagatgctttgcatgaattttggttttaatttcctcaataattcaattgtccgtgacattacttccaaggatagcaaaaactttcatgtgaatgttttggggtgcaacaatttcacatttgatgggtttaaagttagtgcaccaaaagatagccccaacaccgatgggatccacattggaagatccacagatgtgaagattcttaacacaaacattgcaaccggagatgactgtgtctcattgggtgatggttgcaaaaatataactgtccaaaatgtgaattgtggacctggtcatggcattagtgttggaagccttgggaagtacgatgctgaagagcccgttgcaggtcttctagttaagaattgcactttgaatggaacagataacggtgtgagaattaagacttggcctaacacgccaggagcaattacaattactgatatgcattttgaagatcttaccatgaataatgttacgaaccctatcatcatagaccaagagtattgtccttggaaccaatgctccaaacagaatccgtcaaaaatcaagataagcaaggtttccttcaagaacattaagggcacttcaggaactaaagaaggggtggttcttgtttgtagtagtggtgtaccatgtgagggtgtagagatggctgatattgatctgacattcaacggagctgcagcaacagctaaatgtgctaatgtcaagcccacaataacaggaaaagctcctacttgtgcagcctagaatgagcaacaacaataatgcccatttttttttaacaattttcttttactatttttcctatgtagagaagcaagccatccccattaaaagaggaggtgtctagtaattgtattctcttgtgaataaatacttcaatgtggctatggtaaaataatgatcatatatgtaatgtttcttcaataccaaaagaagtcttctttattcatcttattaattagcttgtaatatgttccaaattcatacccaagtttaaagtttagaaaggacgtcttctttatttatattaaaa

SEQ ID NO: 116782 - DNA, 381 bp, Glycine max
  Clone ID: PAT_MRT3847_76466C.1
aagctgtgctattctaggtcctaacacttgcactaccgggagataccagcatctgtctcatgccattgctcctaacccagatgcgatgtatggggaaaccctaatcccgcggttctgagacatcgaaatcgatcgaacgaagccgaggagtacgatgagatcgtcagcatcgcgaatcgcagggtgagcaatcttatagggcatgtcatcgaaatcggcctgtaggatcgggttttagataggaacgactattacggcggacaacgccttgtgagctagctgacccaggtatgaatgacagaccggggccatgacgcgtaccctctacacctatacgctagcatggactacctcgtcgttatgaacgccatagctattatc

SEQ ID NO: 116783 - DNA, 449 bp, Glycine max
  Clone ID: PAT_MRT3847_76467C.1
accagaaattataaactttaatttagaagtcctaaacattgcccatttgaagggggggagaaaaaaaaaagttctgttgaagattcacaagtccattctattttgccctgaaaactggttttgtgtcaggggatggttgggtccttcgagggtatttgagtagcaacccttttgaaaaaagacctggtcccttcaaatttttgatataggggtgcaaaattttccattcccattttggcctttttttgaaaaaaatggaaaaaccctcggttggagggggagggaaaaaccccaccttgaaggccccaacccctgtttaaactccaagtttttttgttaaaacctcttctttcacaaaaaaaaagggggaagccttccgtgtggaaatttttgtttccattcatccatgaaactttttaactttttcttacccccttttaggaattttt

SEQ ID NO: 116784 - DNA, 311 bp, Glycine max
  Clone ID: PAT_MRT3847_76468C.1
ggggaaaattggcaaaaaaattgaacgcctttggtccctttggaacccaaaaaaaattaggggaaaaagacttttttgggggccccataaaccaaaagaagggttttttaatttaaggcccactgtgggggccttttaataaacaaaatcccatggaatttatggggaaaaaacttttaaaaccctttacaagctgcaacccaaaattccgggtttaagaggggttaaaaaaaaaccggggggcttggcctccctgaataggaaaggggcccccagaagggggcccacctcccccccggggaaaaatttcc

SEQ ID NO: 116785 - DNA, 467 bp, Glycine max
  Clone ID: PAT_MRT3847_76469C.1
attcctttttttttttttttttttttttttttttttttttttttttttttttttttttttttttttcaaaccccaaggggttaaaaaggggttgttaaattttttttagccaaaaaagatttaacttcttaaaccccaattttttgagggaagggggggcccttaaaaggcctttaactttatttttttttaagggaaaaaaggcttgggggaaaatctttttttaagggaaggggcaaacttttcccgtttaatttggaaaggcccccttcccaaaaaaaaaaaacacatttttttttggggaggttactgggaaaattttatttccgggtggtggaacaaccaattaaacaccctttctttattgaattttttttaaaaacaaacccttgggggaatccaggtttaaacaaaaccttttgggcctttttttttttttgggggaaggggggtgttttacgggtttt

SEQ ID NO: 116786 - DNA, 511 bp, Glycine max
  Clone ID: PAT_MRT3847_7646C.1
ctcggaattgggctgaggcagcactctcctgctctgccagtgggcgaggtgatggacacctgtggaggtgcttctagagtactagggcccagacagaaactcatccttggagccaagagctagcctctagacgccaggatcctgctctatccaagatgatgatggactgcccttcagttgggccagctggctcagcctcatgcatgagacgtctatgctcgtagtgctgagcatagagccatcgtagaggagaggcagcatcgagaatcatcttagcgattcactccaacatctatgatgtccaatgaccaatggcacggaggaagggagccatcaggagtatcagcctgctttggacctcatcgctcttttacgatctctggacatacctaccgagaaagatgatgattcccactgcagagttatcattgctgcccttttccaacgggctgtgctgcagctgctgtcaagtgcacagttggaagaagtatcagctagggaccgtgatgtt

SEQ ID NO: 116787 - DNA, 284 bp, Glycine max
  unsure (1)..(284): unsure at all n locations
  Clone ID: PAT_MRT3847_76470C.1
ggccaagccagtgtccattgaggtatggaacccaagtgggcaaatacagagttgttagcaccaaaccaatgcctggnacnncgttcgantccattctccnggttcaaatgaangtncngccttnaataatgnaccgagacgaaaacgnttctgtccagtngaagacatcattgnctttnattggtgataagtgtgatggagtnattggacagctgactgaagactggggagcncagtngttctctactttgagcaaagccggnggcaangctttcgtaaacatg

SEQ ID NO: 116788 - DNA, 234 bp, Glycine max
  Clone ID: PAT_MRT3847_76471C.1
ttccggcagttcggaggcgggagttggcatgactcatgtattatcctgaaagtctggttgaaaatacggcacattttagatattctttttagtatacttttcatctttgtagccaaacgcttgcatgtgatgtaaccctgttaattcaggtaggtgttaaatgggaagtattgtagcacaattatgcgatgatatgaaactgtacagtataaaaatgacactaatgaatcttgg

SEQ ID NO: 116789 - DNA, 1558 bp, Glycine max
  Clone ID: PAT_MRT3847_76472C.1
ccacgatcgttagctcctcatcaacgcccacacaataaacttatatattcattccgataaagtaaacgtagaagaaaacattttatcatctaatctgaaattgtgctctcaattgaagcaatggaagtaacagctgctccagtgccttatgtccaagaaattgcaaaggaggcattgaccatagtgcctgagcgttatgttcgaccagttcatgaacgtcctatattatctaactctacacctttacctgaaattcctgtcattgacttgagcaaattgttgtctcaagaccacaaggagcatgaactcgacaggcttcactatgcatgcaaagaatggggtttctttcagctaattaatcacggagtggactcttcattggtggaaaaagtgaagagaggtgctcaaggattattcgatcttccaatggaagagaagaaaaagtttgggcagagagaaggagaagctgagggatatggtcaactcttcgtggtttcagaggaacagaagttagagtgggcagatttgtttttcatgttcactttgccaccaaacaagaggaaaccccacttattccccaaccttcccctgccattcaggggtgatttagacgcctattgtgaagaattaagaaaacttgcaatccagatccttgaccagatggccaattctcttgcaatagacccaatggaaataagagagttatttggtgaagcagaacaatcaatgaggatgaattattatccaccatgtccccaaccagagcttgtgatgggactcaatcctcattctgatggtggaggcctcaccatccttctccaagccaatgaagtggaaggtcttcaaataagaaaagatggactgtggattccagttaaaccccttcccaatgctttcatcataaaccttggtgacatgttggaggtgatgagtaatggaatctaccaaagcatagagcacagggcaacagttaactcagagaaagagagactttccatagccacattttatagcactgctatagatgcaattatatgtccagcaccaagccttgtaactccaaaaacaccagcaatgttcaaaccaatcagcgcgggagattacttcaaaggataccttgcacaagaacttcgcgggaaatctttccttgacaccataagaattcatgctgaaaatgagaatagctcttagaacttcaaaaatggatggaaaacattaaattttaatgtacgacacaggcttctgtatttggcaatgcatttacttttgcagtgaagcatgtcattccaacagctattgtatgagtaaattgaggccatgtccaaaaatgagaggcttttaaacaaagttaataaatcattaataaagataattattataaaaattattaagatggaatgtggattccggttcaatctcttccaattgcttgatcattaaacattggagacttttagaggtatttgaacaaaactattcacaactttttgtgtaagttgagtatctatccattaaatcattgtaaaatagtacatccaagatgagaataaggccttta

SEQ ID NO: 116790 - DNA, 474 bp, Glycine max
  Clone ID: PAT_MRT3847_76473C.1
gaacagtgctaaattggtaggagtggtttgagctaattgatgttctatggataggccatgacttcagtgatgcagatgtgttctaatgtcacattttttatccatatggttgtttagttgccagtatattcttagctgcatgttggtataaactttctctttactgactggcaactttatgcccatatatgtatgttgtcacctaagcaggttttctggttgcgtgggtgtgtgaaagtcgatggagcttggatgggatcctaaaaccagatgactcatagcttaacttttgtttggatgtcttaaacatttagtttttggttgttttcttcccctgttaaccgtgttttataatcaggacatgcgtgtcatgatattccggttctggtattaaatattagttggacagccattttagttaagttctcatttattgtcatatatgcacaagacatatatgaagtaataattttt

SEQ ID NO: 116791 - DNA, 378 bp, Glycine max
  Clone ID: PAT_MRT3847_76474C.1
gcccaaaaccgggaatatttcatatcaataaggattgggggaaaaccccaaaaatcccacattcttttgggaaaacaggggttgggaaaaataaggggaaaggggtttaggaaaaaacaattgcccaccaagcatgctaaaacatctaaaaattccccacccggtttttgaaacacccccattttaaaaatttttctttgggggtatataaaagcgcaacccctgaacctgggaaactcactttcttaaaccatacacttggcaaggtcgttccggaaaaattttgctggggaaaccatgtttttgagggtcggcttacttaaagggacttgcgggtcttgaaaccccactcggggttgacccccaaaaagttttttt

SEQ ID NO: 116792 - DNA, 157 bp, Glycine max
  Clone ID: PAT_MRT3847_76475C.1
atattgtccaattataaggcaccaccaccaactcatttcaatattctctcttgtctaaaaaaacaagtatgaaattcaagtcaagaagattagacgcagaagcaggtgcactggacttataattgctcattttgtcatagtcatcttgttccaatta

SEQ ID NO: 116793 - DNA, 157 bp, Glycine max
  Clone ID: PAT_MRT3847_76476C.1
aatcctcacggttcggacgctgcatgacctaattccggagattgaggctctgttttcggaccacttcactgtgtcgctcatgaatgaagcgattactatttggatgatgttcggagaagctattaagggcatttttatggagctggagaattttatt

SEQ ID NO: 116794 - DNA, 183 bp, Glycine max
  Clone ID: PAT_MRT3847_76477C.1
gagaggacctatctaaatgcatagagggagacttgtgttgcagttcccgattctgcgtggaaacagaatgctgcgccggatatgcaaccatatatggacacaaccgctgggtttgacatagatgccaaaggaagagcgctagtttggaattacgagtctgcagaccgcgactttggttcatgc

SEQ ID NO: 116795 - DNA, 104 bp, Glycine max
  Clone ID: PAT_MRT3847_76478C.1
gaaacagtcatccaaaacgattttactggactacttaaatgagcggtcagcgttacagcatgtgctagggtaccatggattgagaacaactgcaccatgagaca

SEQ ID NO: 116796 - DNA, 275 bp, Glycine max
  Clone ID: PAT_MRT3847_76479C.1
gggttaaaaacagcttttttttcgggatcaataatacaacattccttgggatacataggaacccaaccccttttttttctccttcttccattttcaccccttataaaaaaagggcgttttttattcttttttgggcaccctcaggcttgcgatcatcataaacatgtggaacaatttttggcctaaaccaatgtgctctccaaaatgtacgcattacttaaatggggatgttctttggctcagcccacaacctggtaattaaaaggggtattcat

SEQ ID NO: 116797 - DNA, 635 bp, Glycine max
  Clone ID: PAT_MRT3847_7647C.1
acggctgcgagaagacgacagaagggggaattgggaaaggaagaagcattgattgtgtttggtggaagatgagtgaattggtgtacagaatcagtacggcgaaggagtgggaggagttgcagagcaatggatccagtttcggtggggaccttgacaagtcttctgctttcatccatctcagcaagctcgaccaggttcggtcaacactggagaactttttcctgaacagcaaggaggaactctacctgcttcaaattgatgctaaaaagctaggtgatggtttggtgtatgaaattgtggatggtaaaaatagcttccctcatttctatgggccatctcgaagctttgttcctctccctcttgatgcggtaataaaagcagagaaactaacactcacagatggtcgattcagttgtagtttgcttgattaagtattctgctgatcatttgccatcttgttgttgtctcattcttctttgtattgagtgcataatctgaatgtttgccgccttttatctatcttagaatctctgtaatggataaacaaaaccttaataccttcttaatgaaggagatggatgctgacatgttgctgtttgaatcctataaaaaaaaaaaaaaaaaaaaaacaaaaa

SEQ ID NO: 116798 - DNA, 281 bp, Glycine max
  Clone ID: PAT_MRT3847_76480C.1
gtttggatgatatgaatattgcggggtggaatgcaatgatggctggttatgcacagcatggggattatcaatctgcttttgaactgtttgagtctttggaaggttttggacttgtgcctgatgagtatacttttttggcgatattgactgctttgtgtaatgctgggatgtttctggagatttatcggtggtttacgaggatgagagtggattatggtttggaaccgagtttggagcattatacgtgtttggtgggtgcaatggcacgtgctggagaattg

SEQ ID NO: 116799 - DNA, 463 bp, Glycine max
  unsure (1)..(463): unsure at all n locations
  Clone ID: PAT_MRT3847_76481C.1
tttattgctatctacaagtacttgttaaatgattaacacaatgcttctggccggtttcattgcgcacttgctttttaagacataaacgaagtaaagaagaaaaaagagaggcatcaatggggttatcaactctttaaggacctaatgatgaaaacgccacctgttcaagattatattggaaacggggatttaccccctgataggtaatttgacccagccatatttaatacgtatagcgaataccaccaaacaaggataatctgcattatagggaacgatttcaagaaactatacaagcagggaagatttgaagaggcntttggnctttgtatggaaccgagccnaattttttgggggctttgactccaagaaagcaacatatcatttgcaacnaagagtgcggcctttgattaagcttggggaagggtttctgcagggtaattggttgaggtggtgagggaaa

SEQ ID NO: 116800 - DNA, 256 bp, Glycine max
  Clone ID: PAT_MRT3847_76482C.1
ccacgcgtccgatccctctttcttcctcttcctcagtagtgcgattttcgattctcttctctgcaactatgcctaaccctaaggtcttcttcgacatgaccatcggcggtcaacctgccggccgcatcgtgatggagctctatgccgacgtgacctccagcaccgccgagaacttccgcgcgctctgcacccggcgagaagggcgccgggcggaacggcaagcccttccactccaaagcttcgtccttccccgcgg

SEQ ID NO: 116801 - DNA, 1440 bp, Glycine max
  Clone ID: PAT_MRT3847_76483C.1
tttacactgcttcgtgctccatagataattaaggacttaatttaaacgtgataacagtgtatggcagtaggcaaaaaaatctgccatatggcaccaccatagtggacctcccttcacaaattacctatggcagtaggcaaaaaatctgccatgccattcagtcatggcagctatggcgccaccattcaacaacaatgtgtcagaccaaagagggaggtattaaatgtcaatgcttccaggaaatagaacatgctgtggatgtcagatactaaattcatacagaatatacaaataatttgggccatcaactagcagagcagataacctaagcagcttgaattcgcacctagttatccatgacttgctatcaactttcatgcaatgtagaaatttcaacttcccacgcgtccgtacggctgcgaaagacgacagaagggggaaacggaactgtgtaagaagagaaagaggacgcagcaaggccgaagcagagtttcaattcaattcaatagcgatttagagtttccagaaaagaaattgattttcagtcagtatcagatggatcattttgcagcacatgaagagcaacttgcttcacagagaatgaggcagaaacttgaagaagtaaatgtggctgctcaaactaatcttgcccctgtccaagactatgtcaattatacactccagaaagcatattttaagtgtgcatatgagtgctttgatagaagcaaaaggcaggaagaaataagcagttgtgtcgaaaattgcagtattcctctttctaatgtgcaacatacatttgatcatgagatggcacagtttcaggagaggttgaatagatctctgatggtgtgtcaagataagtacgaggcggctaggctacagaagaaaaatgatgctatgaatgatttggtttcctgtgctgaccagtcaatcctggaaagcatcaagacgctgccacatcttgccaacaagttgaaagcttcctttggaattagtgacaatggctcctagtagcacgcttttctagtgggaaaagactatcattgtcgttattggttcattgtagcttttttcttcttccatacatttaatttaacccacaagaaaatacttgcattgcaaacagatcattgatcataagggtgttttctcaacatgtgagagttttagtcaacgatggacgttgtaatttgcaaaaaagtttaaagttcaaaaaaaaaaaaaaaaaaaaaaaaaaaaaaaaaaaaaaaaaaaaaaaaaaaaaaaaaaaaaaaaaaaaaaaaaaaaaaaaaaaagtagaatgcttaaaaagaaccaaacatattttttttaaagacagggtaaaagacacaagtctgttcaacgtgaaagcattaatttatttggttatctcgtctggattgattatttatgaaaatttgatgaatggattccatcctt

SEQ ID NO: 116802 - DNA, 402 bp, Glycine max
  unsure (1)..(402): unsure at all n locations
  Clone ID: PAT_MRT3847_76484C.1
agttgatctcagtttaagtggttggtaatgtggaataaggttaaacggctagatattgtagaaaatattcaatgttccatctgttatgatcatagtcaacaaatcatgtagagaaaatatacttttatccccaggatcagtttattttgtcaaaataattcttttttctttttgtaagcttcccaagacaagtaatgccaaatggagtatttccttaaaattgattgttacccaacatgtataaagtattgagttgctactattgctgtttatttagggctaataatttcttttttatgttgtatggtggcagatgccattttcggatcntgtaggtgccatgaacttaattttcacatgatggtggtcacggtttttccttttgatgcatttcccaccctg

SEQ ID NO: 116803 - DNA, 766 bp, Glycine max
  Clone ID: PAT_MRT3847_76485C.1
ctactctctctctgccctcatctgtggtctttgcctgcgccacctctggtcgagcgactcttccgcctcattgctctctcactctcttcttcttcgccgtttcttgtcggccttcgctgttcactctctcgctaaatttcaaaaccctagaaccgcttctctaaccgcaaatcaaaatcaaatcgaatccaatccaatcgacgcgctaggtatttggtgttcggctgctgttttctctcctagctgcttctgctgttttatggaaaaatgtcttatcagttaactgtcgagatgtttcagttccaaccatgtggttcgttgcaaacagtatgagtgcttccatggtgtgttttggaaggagtcggatcttgttaggttaatttgtacttgcaactgacaaactcaacctcagcttaatctttctatatcttatagatggatcgacgtgatacttcaggatttgtcagcgggggtgcattaaacacctttagacaaatctaaccctaactttgtagataaacatctcttttttacccggaggtcaggaaggctgtactgtgaaattcataaataggattagatattcttttggcagtggtttcatcactttcatggatgcgaggttcaagaactttttaggatttgctgctaatcattctgcaaatgcattcaagattttgggcaattctatgcaagttgaaggaaggggagctaattatcatgggacagataccatcttacgacttgattcccctggttcttcaat

SEQ ID NO: 116804 - DNA, 1240 bp, Glycine max
  unsure (1)..(1240): unsure at all n locations
  Clone ID: PAT_MRT3847_76486C.1
ctgtaagtgacgattgcgtaaaaaaaaaaatacattaaaatttaacaatcaaaagacaaacctgaacacaattagcagaaaaaccacaaaaattggaacaaagattcggcgaaggctaaaggaagatgagaagaagaccaggaattggagggttgcagacgcacgccgctgcaagagatcaattccgtttgcttggtgaaaatgtcgcaaagatcagaactgatttgatgaaggagcagcttgccacctttcgctctcagctcgaagatttcgctcgcaaacacaagaatgacatccgcaagaacccttcattcagatcacagtttcatgagatgtgtgctaaagttggagtagaccccttggcctcaaacaagggtttctggtcagagctgttaggacttggtgacttctattatgaactcggagttcaaatagtggatatttgcttggccactagagcccacaatggaggactgatcgacctgcacgaactctgcagtctccttcgccagagacgaaaaagtgatcgtgaagttgtttctgaggatgattgtctgcgtgctattaagaagctgaaggtcctgtgctttaggtgctgggtagtggttttgaagttatttctgttggaaagaaaaaacttgttcgttcagttccaaccgagttaaacaaagaccacaatgaaattctagaacttgcccaggctcaaggatttgtgactgtagatgaagtagagaggcggttgtcatggagttctggccgtgccatcgatgcccttgatacattactcgatgaaggacttgcaatgattgatgatggccatagagatggtagacggcggtactggtttccttgcgtgtctcccatctcatcttcaataggagttgattcctaataaatttagtgaaaggaaactgaggtctggtttttgaagacctatgtatgtttagattgttacaaaattgatatttattattgcttttgatttcttgaattttttgtcctaaaataattgtattgtatgtttatctagtgtacacatatgtatggtgattgggaactggaaatgtatacttcgttttctgtaagtgacgattgcgtaaaacaaaagtactaaatttttttgatcttaaataaaaaaacaactccagatgtgtttaaaggttctggtatcccatatgtttgcacatcantgcattgttcaacataaatgtgctcctacttttacagcatgcctttgact

SEQ ID NO: 116805 - DNA, 488 bp, Glycine max
  Clone ID: PAT_MRT3847_76487C.1
agcccacgcgtccgctggtttctctctctctctctctctctctcagaaatccaccttgtgatggtgccctagatccatggcttctctgtccaacctttgcatgtgtttcactgttgctgagtttcaaggctaccgtttatcctctcttccctctctgggtcctgggaaaccctttggtgggtcccacattcacaactttgcaaactcacttccacccaaaagcttgtaacttgtgaacacccttccagttagtatttcacgctctcttagttccaaatttggaatctttgatgcttccccgttcataaataactggtatttcattggataaatcattccactgagtaaaaagtgttttttttgttgttttatttttactattttgaagatttccgaggtttggtttgtggaatttcaggttgtaaactgtttggtcaggttattgagtttttttggatggagtgatctgagatcacatttggggtttt

SEQ ID NO: 116806 - DNA, 726 bp, Glycine max
  Clone ID: PAT_MRT3847_76488C.1
agaaccctgccccgacgtttttatggctgcgagaagatcaattcaggggagactaggccgacatacacttttcttccgatgatttggagatgttttcatctgcggaaactcctccgttctcaaaaccctaacccgacgccaccattcatccgatccaatgagttcgagaggagccagcgcgctgctatctcgagccagcaggattcgctcgaagcttcaaacggcgctggaagccaccgttttggaggtggacgacgtgtcgtaccagcacgcgggccacgccgccgtgaagggaagttccgacaaagaaacccacttcaacgtgaagatcgtatcgcccaagttcgagggccagagcctcgtcaaacgacaccgtctcgtctacgacctcctcgccgaggagctccagagcggcctccacgccctctctatcgtcgccaaaacgctccacgaaacaaaccctaataagtgacgcgtcgggagtgtcaaagttcgaggcttttccgcctttcattcaattttgctgggaggatgtctcactggatttgaagcttaaaagtatcaactataaagatgattgcaaatcctcagagaacagcaaattgcatttcattgtttggatttttagtggaagtaattgaattatgggacagataacaattataattacaataatataaaatttcgaccttgattttacattcgctgcgaaaaaaaaaaaaatac

SEQ ID NO: 116807 - DNA, 607 bp, Glycine max
  unsure (1)..(607): unsure at all n locations
  Clone ID: PAT_MRT3847_76489C.1
caccattcatccgatgagttcgagaggagcgaccgcggtgctatctcgtgccagcaggattcggtcgaagctgcaaacggcgctggaagccaccgttttggaggtggacgacgtgtcgtaccagcacgcgggccacgccgccgtgaagggtagttccgacaaagaaacccacttcaacctcaacatcgtctcccccaagttcgagggccagagccttgtcaaacgacaccgtctcatctacgacctcctcgccgacgagctccagagcggcctccacgccctctccatcgtcgccaaaactccccacgaaacaaacccttctaagtgactccttgggagtgtcaaagttcgaagcttttccgctctgagtgccgaaatctttggtcttcttttgtttggaacgtgtttgctctgtgaatggaaccctaatcatcttatgtggctgtgtggtccgtagaatgtgagatgttttacgattatttgtgatcaaattgattatgtattactttcatcctacttatttaatacgcttgtgtacttttacttattggatgtgcataacaaattcagttatcttatttcaaannannaannnnnnnnnnaanna

SEQ ID NO: 116808 - DNA, 764 bp, Glycine max
  Clone ID: PAT_MRT3847_7648C.1
gctctaggggggcatgttggttcgagcagaaattcaagcactagagaaggatggagacaagatggctattgccaaggcatcaatgcaaagtgtccaccttcagatatctgaaggtgctgcacaactcactgcgtatagagggagctctcatcaggcatttgctctgattattgatggaaaatcacttgtttatgcattagaagataatatgaagaacttgtttctggagcttgcgattcgttgtgcatctgttatttgctgtcgctcatcaccaaagcagaaggcactggtcgctagattggtcaaatctggagctgggaaaacaacattagctattggtgatggagccaacgatgtgggaatgcttcaagaagcggatataggggttggtataagtggtgttgaaggaatgcaggtatttggaacggttacttctggtgcatggacattggtgttaccggtggatctcatctatgatatgctattttttctacaagaatatcacatttggttttactctattcttatatgttgtgtatgcatcgttctctggacaacctgcatacaatgactgtgtttgtctctctataatctctttttttcatcactccttatgattgcacctgaagtatttgataaaaatgtatcggctcggtactgcctgaagtttcctttgttacatcaagaaagagtacagaatgttcttttcagctggcatcgaatactcagttggatgcttaatggatttatcagtgccataataa

SEQ ID NO: 116809 - DNA, 288 bp, Glycine max
  Clone ID: PAT_MRT3847_76490C.1
cggacgcgtgggcggacgcgtgggcggacgcgtgggcagccgcgttgactccaacatatgggctggtgcgggaccatcataacttggtgctgagagcagttgtcaggcttcaccagctccgataattccccggcgggggagctatcgaaaattcaagtctggtgaccaccgtaggcggtgagcaaagccttgtgtttggactagaacatggtgatggcgttttggaaggagcatctcaaggcagaccaccagtggatcaatcacagatgggtatcccccaattaaaga

SEQ ID NO: 116810 - DNA, 415 bp, Glycine max
  unsure (1)..(415): unsure at all n locations
  Clone ID: PAT_MRT3847_76491C.1
aagcctggtcaaacgacacggtctggtttacgacctcctagccaggaagctccagagcggcctccacgccctctctatcgtcgccaaaacgctccacgaaacaaaccctaataagtgacgcgtcgggagtgtcaaagttcgaggcttttccgccgttaaagctccttcctctgtcacagcgacccattcagctcatccactcattttcattcaattttgctgtgaggatgtctcactggatttgaagcttaaaagtatcaactataaagatgattgcaaatcctcagagaacagcaaattgcatttcattgtttggattttttagtggaagtaattgaattatgggacagataacaattataattacaataatataaaatttcgaccttgattttacaaaaattnnnnnnnnaaa

SEQ ID NO: 116811 - DNA, 383 bp, Glycine max
  Clone ID: PAT_MRT3847_76492C.1
gtgaaaatggaagacaatcatcatcatcatcatcaggaacttggtttgcctagacagttcttgggggtcaataataaccctagcacaaatgagcaatattggagtggtggtggtggtgccacttctgcttggactgatctttctgctttcagctcttcttccactactagtaataacgcactatagaattttctgctatctctttgtgaagtttctggcttttggttcttctgtttcctttcacaaagtttcaaccaacttggttataattaaccccacgtgaagaagcttcgaggatggttaagtactttggtttcattttaaaatcaaatatgaaaaccctaaggatggtagaacctcttctatggttaatctttatattg

SEQ ID NO: 116812 - DNA, 318 bp, Glycine max
  Clone ID: PAT_MRT3847_76493C.1
tcctctagagcggccgcttattttctttactttttctcactttctgcgcgttttcaacacaacacaacacccccaacccatgcgaaattttctaccacacctatacaccccttaactaaccaaaacctatttagaaacccaaaccaacaacacccccattcataacttttacaccactatcaaaaacctgcaatttcctgacccaccagattcacaaatattaattcgctaatacacacttatctataaataactgaccatactaactatcctgctcaacaacaccatcataaccttcataaatgctattatcatcac

SEQ ID NO: 116813 - DNA, 189 bp, Glycine max
  Clone ID: PAT_MRT3847_76494C.1
cgcgtatcggccttcattgcttctcatcaatccctcccatttttttcccttcaatccgtttctatggcaggtgtcgcttacatcaaggcttccttttccgacaccccatttctctgttccaaacccagaacctatattcttccatccctagccagacctcgcataggaagctcctttttatccttttct

SEQ ID NO: 116814 - DNA, 382 bp, Glycine max
  Clone ID: PAT_MRT3847_76495C.1
catgatgaaggcctcttacgacaccaagtccgacctcatcctaatggacctcgccggcgaaaaggaggggcagatccagagcgaggacaggctaccgaagagtgtgattagtggagatctcagagaacctaatactggaaccgctcatccctgccgctctctacaggcacggaaacccatttcttctgcagattgagcctcctacttgtgaagccgagaccccctctatgctccccagcttggcaagttgttcgagattaccccatagaggaaccctcagcttccggactaggatgtcttcctcagagcaggcgatatcaacgaagcgactctttatccgccacacgactgttcaaacgccataggggaactactgatacat

SEQ ID NO: 116815 - DNA, 259 bp, Glycine max
  Clone ID: PAT_MRT3847_76496C.1
cggctcgagctaagtttatatagtgaacagtgagccgcatggacacaggtgactgttttctcctttttgaacccctgcttactccagagtcaccacctctcctggctttctgccaatcttcttggccacagtttctcggtcttcttttctggcttctcttccttggcctgaatgctacatgtaagtgatgtcagcttcagttttcttaacctctcttctcttaagttgctatcatcctcatatctttaaatatcatcta

SEQ ID NO: 116816 - DNA, 415 bp, Glycine max
  unsure (1)..(415): unsure at all n locations
  Clone ID: PAT_MRT3847_76497C.1
agccagcgngaaggagacannccgcangcacccgccgcgcccagnggncaaaagaaagggcacagaagagngggagaggaanggatacgngaccccagagggagcanngagccccgncaagggacggcaagccggaagagaccccaaagaccgggacagaccancggaggcccgncccgagagggnccnagagacaggggcngaaggggaagccgggccgccggancncaggggacaacannnggaacnncncccannngggncngcgaggagaaggggcccgggagncaancgggccacgccgggaagggcaacacnnggggcggcncngaaggaacgcgncgaccngcaagcgccgggcccccaagggcaggacttgncgggcggngacccccaagcnagcaaggaagaaaaa

SEQ ID NO: 116817 - DNA, 505 bp, Glycine max
  Clone ID: PAT_MRT3847_76498C.1
tgttatacatgattcataggttattagtggaatgtgtaacagcattttactctgtcattgcctttccatttcttgtgtcactttttgctgtttataagattgaaaattgttttctaatgtagggaaaaatgtttaccatatatctttttatctgcactaagttcagtttgcaattgcattatagtgctgatattttcttttaagcagaattttttttatgtttaagtttgaccccctaaaaaatatgctaacaattatgagtccaatgtatgttgtttcttgctcacattgcctccaacacaatcattttggctgattttgtatatagcctttggtatgcccaaaggttgttgaattgtttgatgtgcatttatactccttaaatatttgtgctggtttacattactttttgtttttatctttatcataaattagttgaatgttgtattactttcattttgtcaacgcatttttgtttcttgttcatagtgctgtattcacttat

SEQ ID NO: 116818 - DNA, 254 bp, Glycine max
  unsure (1)..(254): unsure at all n locations
  Clone ID: PAT_MRT3847_76499C.1
gcactgcanaattttcattttaaatcnttgatttctnatatttctgcttttnntgtgtttcgtganatgggnaanctggccactgagaaactgttcgatatatattatcngttgaaaagaggcnagataactttgaatctgtcgtaatggagcntcnaagnatgaatgggggcatattgggggttgacccactccgggatctctaagnaagcttcataccgtcgatgttgatgaggttgtncgtggttgaanag

SEQ ID NO: 116819 - DNA, 421 bp, Glycine max
  Clone ID: PAT_MRT3847_7649C.1
attatggttctgtttttttaagattttttttttaagaacgtaaccatagaaaagcttgcttaaactacacactgattgcacatgagggagctgtattttaataatggtttgtttaaaaaagacatcccaattttttctcatcctgaattgcagctcatagcacctaagaggaatgcaaggcataaaatacaatgctgctattatttccctcatttttgagaaatctatatttttttgccactaaaaaagaggatggaagaggtattaaactgccatccaattattaataaccctcaataacaccaaatctattttttggaaaagtatgataacacaagctgcacaacaatgttgtgctatttttgttacaatgagggatacagaccacataggcagactgaagaataggtaaagctaaatt

SEQ ID NO: 116820 - DNA, 350 bp, Glycine max
  Clone ID: PAT_MRT3847_764C.1
gcccggtaggttcacctgtttcgtaatggcctcgcactcagacaaggatgtgaagtcctacacttctggaggagattcataagctcacagacagcccgagctcttgggtgatcctacatcatacggtgtactcatttgaccaagtttatcgacgagcatcctgctggggaagaagttctaacagagcaagctgggggtcatgctactgacacctttcaggacgtcggcctctctaccgatgcaccagaactgtccaaacatacatcatccgggagcttcatccatatgacagaccacagatcgtcaccccttcggaaactctcatcactactggacgagtctaatctcca

SEQ ID NO: 116821 - DNA, 183 bp, Glycine max
  unsure (1)..(183): unsure at all n locations
  Clone ID: PAT_MRT3847_76500C.1
tnagtctcatgcacgcngacgtaanctcggaattcggntcgagcnaaccctgnaggggnaganngatncnggaatgnnantnggttcgttcatggnncgcanaatnnctaggctcncccgcngcagtacttggtcattctatntncccctctattgatccccancgnnaaatatntcatnaan

SEQ ID NO: 116822 - DNA, 318 bp, Glycine max
  Clone ID: PAT_MRT3847_76501C.1
gaagctgaaggggtttcttttttaggggtagtacattgattgtacttccagttattttatcttctgagattatatttccaattttgctgtgaaaacagtaatagcgattgatttgaaactgatacatacctgagagcatcaaggaatcgacgaatagaagattcatttgtatttcttgttgatatggaaactgatgtttctatcatgtgtgttgcgttttcacaatccttagttggacaaaacccaagttctccatctgtctctctgctatggaggtgttacacccatcacattgtgcattacaagtctattgcgctg

SEQ ID NO: 116823 - DNA, 264 bp, Glycine max
  unsure (1)..(264): unsure at all n locations
  Clone ID: PAT_MRT3847_76502C.1
gactacaagcgagtcacatgcgaagtgaaagtgnggaaaaaaaagagaaaaaaaaaaaggcggcgcggctagaggatacgagctaagctaacctacccgggcatgcgatatcatatctatagtgtagcgtaaactaaattcaatggactggccgttacaacacacacgactggaaagaaaaaaccctgacgtaacttaattgaattgcattgcagtacattttcgtttggtgagctaatataatagaggacaggcaccgaccga

SEQ ID NO: 116824 - DNA, 810 bp, Glycine max
  Clone ID: PAT_MRT3847_76503C.1
gagaactagtctcgtgttttcccatcctttaatcccatagatgtcccaaaacaaccaagtattactaatgttccttgtgctgaacataaccagcttgatgttattcgtctcagccaacaaagccaactttcaagcagtgaaagaaaactaatgtcaagggcacaaaggcaaagacaattggcctttgctgcacaaaagcagctcctcaatgatctagaaacctcgaagcctcacgagcatgagtccatgaaagaggcagcacaagacacttttgctatattagacaacttgggtgcaaatgacacacaattctttgagcatgttttgtatttcataaaactcacatcatcggttgtacaaatgactaaatccatcgaatgtcttgaggaggacaacaagcgtcttgaggacgagaatgccaaactcgcccacattcgtgacctctacgccaagaccgaagatcagttccaagcctctgatcaacgaaggcaattactttccaaagagatctctgactttgaggccatgcttgttgagaaacgaaaccaattgaagtcgtgtgaattggaaacttcaaacatgcgaatcgaacttggtggtttgagaagaactatgttggaagctgatacagccttgaaggctagaatgaagcaagcagagattgcaggtaaacttaggaaagagagagaagccaaacaaattgcagccaaaacagcactcgagaaggccaggcttaaatcagagtattaattaattatccaatagtatttgtgagttctgtgaactagagttgtaaatattagtgtttaa

SEQ ID NO: 116825 - DNA, 1496 bp, Glycine max
  Clone ID: PAT_MRT3847_76504C.1
gggtctgtctctttcatccttcaattgtggttagtttattcttaattgcagagttgaatcaagtttttattttttttatatgggtttgtgttattttattgggaaaggaagacttattctggtattgacttggcctttgggattcccactactgtggttgttaggtgcttgttttgtgttgtgttgtgtgtgttgtttcctcctctgtaccatcttgatttcattggtaacagtaaaaggaaaaggttctttcttgtggaaattagaaaagggtcccttgctttaggacagtgagagagaaaagtatttcttcctggtgatgtcttttgattcgtctctggaatcttatgcaaacccttccttcccttttgcttgcttgcttgggagatagaggaaataataggtaaaagtatgtgtgttgttgatcattgtgtttcccaaaattcctgttccaactgagtcaactttttcaattgcttttctcatctgcaacaatcagctagattaagcatcctattcctacttgattgtctctttatatttaaattttcatctgtctcctcttctttaaacgccaatccaatttgaatattccccctcttcttttcgcgtaactctgcttaattgggttgcttactttatcttggattatttgctaactgaatcctaagtgtaattgagatggacggtgatatatttggagaattaggcaattcaactcaagtagatagcaggcttttacaggtatttcagaagagcttattgcaagctcaagatattttgaatcaaaaccggttgctgatcaatgagataaaccaaaatcatgagtccaagatgcctgataatctgagtagaaatgtgggtttgattagagagctcaatagcaatatcagaagggtggttgatctctatgctgatctctctaattcctttaccaagtccagagaagcttcttctgaaggtgactcctctgggactctgaagtctgatggaaaagtcaaccagaagagaattagatccagctgatttattgaatttgagctttcgggcacgcaatcaagaagtttattctgaatctggaaggaatttgtttggtgagactgtgtaacttcctccaaagtatttttgtgccaagtcttccatattggtgtttatgtttagagggccagagatttagttaatcatctgatctataaaagtagcttcaatttgaggactatacaattgtgattttgtgtaactatgtttaaattcatgaaatggagcatgttcacggaccatttagtcaagttttcaagcttgaccttcttagatccaattgatgtttggtggttaagttctagatagttattcatttgttctgcttgtttgatcatttgattggttgttgttagttgcttcccctttggttctgtatttggatatttgatgcctgagatccaataactaatttactgcttaataaatgtcatcatcccttctgtagtcataacaac

SEQ ID NO: 116826 - DNA, 1374 bp, Glycine max
  Clone ID: PAT_MRT3847_76505C.1
ttcggctccgggctgtcgacaggccccgtgccccccgcgccccgcccctttcaagatcaaaaaaacttttgtatgtcccgcgctgtttggtttgtccccgcaactcacacacgccgtggtgtaaacgaggttttaacgctatcatatcatctgtcctctttcttctctctggatttttctccatcatttcagggctttctttcttctcttttgcctcccatattccattctcctcaaaatatctctacattttcctctctaccccaacaaaattccaaaaatttcccctcctatctccttttcacgtcacttaccacaactgggatgctccactttcttaaggattatttgttaactgagtcctaagtgtaattgagatggacggtgatatatttggagaattaggcaattcaactcaagtagatagcaggcttcaacaggtatttcaaaagagcttattgcaagctcaagatattttgaatcagaatcggttgctgatcaatgagataaaccaaaaccatgagtccaagatgcctgataatctgagtagaaatgtgggtttgattagagagctcaatagcaatatcagaagggtggttgatctctatgctgatctctctaattcctttaccaagtccagagaagcttcttctgaaggtgactcctctgggattattttttacaggattatttgttaactgagtcctaagtgtaattgagatggacggtgatatatttggagaattaggcaattcaactcaagtagatagcaggcttctacaggtatttcaaaagagcttattgcaagctcaagatattttgaatcagaatcggttgctgatcaatgagataaaccaaaaccatgagtccaagatgcctgataatctgagtagaaatgtgggtttgattagagagctcaatagcaatatcagaagggtggttgatctctatgctgatctctctaattcctttaccaagtccagagaagcttcttctgaaggtgactcctctgggactctgaagtctgatggaaaagtcaaccagaagagaattagatccagctgatttattgaatttgagctttcgggcacgcaatcaagaagtttattctgaatctggaaggaatttgtttggtgagactgtgtaacttcctccaaagttatttttgtgccaagtcttccatattggtgtttatgtttagagggccagagatttagttaatcatctgatctataaaagtagcttcaatttgaggactatacaattgtgattttgtgtaactatgtttaaattcatgaaatggagcatgttcacggaccatttagtcaagtttttcagcttgaccttcctagatcccattgatgtttggtggtc

SEQ ID NO: 116827 - DNA, 521 bp, Glycine max
  Clone ID: PAT_MRT3847_76506C.1
agcccggaattcggctcgagggaattagtggtattcttaaagatattttatctttttctggagtttcttctaaggcctgtgtttgtcctgcattaagtaggccgccagaacagatatttgagattgtaaacctcacgaatgagcttctgcctccattgccacatggaacaatttctctccctatcatctccaacatgtttttgaaagggcccattgtaaagaagtctcctgctggtagctctggaaaacaagaagacacaaatggaaatgttcctgagatatcggctcgtgagaaactattaaatgatcagcctgaactacttaagcaatttgcgatggatctccttccagttttaatacagatatatggttctagtgtcaatggtcctgttcggcacaaatgcctttctgtcattggaaaattgatgtatttcagcacagcagagatgatccagtctttgttgagtgtgacaaatatatcaagtttcttagctggcgtcttagcatggaaagatccacat

SEQ ID NO: 116828 - DNA, 472 bp, Glycine max
  Clone ID: PAT_MRT3847_76507C.1
gtctatatataacagtgcatagaaaacaactttagtttagctttcaaacttatcttattttgtttatataattgatattcaaactagtttttaattgtctataatgaaattatagttatgaataatgatttttaaaaatgagttggatctgagtattttttattaatgattttaaaatgtttttttatcttgttggaaagtatacattttttatgttgtaattctaagtttttatttttaatatataattggagaaaaacaaatatatatatatatatatatatataataaatttataagtgaaaaaattaattattttagtctgggtataagattttataaattaaagaatttaattattttattcatatacagattttagaaatatttttatcattttatcaaaataaaaaaaaaatggaaatgaagaaatttaattgttttatccaaacacaagattttgaaaatgaaa

SEQ ID NO: 116829 - DNA, 281 bp, Glycine max
  Clone ID: PAT_MRT3847_76508C.1
caaagtggttaaaccctttaattccatacctttcccttctatctttccattttttcttttagaaaacccattagacccccgcgtaatcataagcatagctttttcctaaaaaaaatttttatccattcaaaattccacacaaaatacgagccaaaaacataaatagtaaagcccgggagaaatataaaataagctaactaacattaataagattacgcccactacccaatttccaaaagggaaacctgcctaaccaactacattaataaattaaccaacgc

SEQ ID NO: 116830 - DNA, 703 bp, Glycine max
  Clone ID: PAT_MRT3847_76509C.1
tccggaattcccgggtcgacccacgcgttcgtccacgcgttgttttctctgtttgcagcttcttctgtttctctctctcaaattcaatgttgttcatgttcatgtctatgtccatttgaggttgagagagagaggcactcagatacgtttccgttcagagacagacacaacacaacagaaagtgttcagagagagaaatagtgaacgcaacaaaacaatgtcttctctggatttgttactattttctctgagcagggccttttgtagtcccatcgccgttttctttcagatccaggggtgtttaatttgcttaacgcttgctcttgggtgggcttgtgctgcttatgtcaggaacagagagatcaaacaaatgaaggattgtatgaagaatggcaatagcttttctttcctttgtcatgacattaacgaacttgagcactcctatcaggtcgatcttccaagagtaacagtgattatgcccctaaaagggtttggagaacataatctccataactggaggagtcagataacatctctatatggtggccctatagaatttctttttgtggtagaaagtacagaggatcccgcttaccatgctgtatcacgattaatagcagaatttgaggatcatgttgaagcgtcggttgttgtagctggttcgtcaacaacttgtagtcaagaaattcacaatcaattggta

SEQ ID NO: 116831 - DNA, 363 bp, Glycine max
  Clone ID: PAT_MRT3847_7650C.1
cttgcacttcaacataatttgcatgaactcaatgaccgatacctgcggatagagaccagcatataagttgtactgcacctaggaggtttattgtagaatgagtgtgaagagagcacgtacacggagaaaatccaacatcatcttgcaaagaattatgctgtgatcgacagcgcagaggaagctgattatacactcatacataatgggctttcatcagagacatcatgatgaggctgaggctacgtggacctgattatcataatcacgatggctaacactgaaggatccaaggattgatcacgcgtctagggccttcctaggataagacaggcgcaggacggtgagcacaatatgagggctgat

SEQ ID NO: 116832 - DNA, 396 bp, Glycine max
  Clone ID: PAT_MRT3847_76510C.1
tttattttttttttttctttttttttttttatccagaagtgggaaaattgaggcattaaaataattcaaggaaactgttaattaaacttatgtgtcctatatatacttaaaataccccctttttaaggaccttattgtttttgactgcaaatcgcggcctagttaaaaacctagggttttacatggaatggctcttatatgaactcagggaaatggcaaggcttgatcattaaaggacttttaatccttgctttgggaaaagaaaacatccacatttaatggtggcaatcaaaagggtgagaggctaaaaatttcctactgcgacttgggtccctacaaaagttggcttttaaaacattttaattgcacctagcttgaggttttttattaaggggg

SEQ ID NO: 116833 - DNA, 358 bp, Glycine max
  Clone ID: PAT_MRT3847_76511C.1
caggacatactatgtgatgccaaaaattttattgaatgacggagaaatagaacttgacttaaccgaaacatatatctgccctctcgctggtgggcaatctccctctcatgtctcatatgccctaccacagaaaatatcatccccttttctaatccttgacatcaccgaatgaattattatgtcccacaatttcattcatgtaccatcctgtgactcatcttcttctcgttgacactgtattctcaaaggacatgtcaaaataactccatgacagactcactggctactactatcgatatatgattgccttaggatttagataccttgctatgaatccaactactataagatggagtat

SEQ ID NO: 116834 - DNA, 347 bp, Glycine max
  Clone ID: PAT_MRT3847_76512C.1
ctctggcgaactattcgatcactctctctctctctgttacacgctgtcatgctctccttgagttgcgccaatggcgtcgcagctgctacaatggccggggccctgacgacgacaggcatcagtagagacggcaacatcgacctgttcactaccaatgccgcaggaaaagccgaccaagatgctgacttagattcagagagcatcatgaagcgcatcaaagagctcgtgccaagacctacgcagaccctggctcgaaccaacgacctgagcctttacggactcgccatggccatggactgccaggtggtctgtgacgtgggatgctacatgtgaataacgctatagct

SEQ ID NO: 116835 - DNA, 1274 bp, Glycine max
  Clone ID: PAT_MRT3847_76513C.1
ctgaaccgtgcgggacccaagggtcagacctcacccctttcctcgccttgcctgcttaattcgtctcggtattttgataaatttattgacttgttttcttctgtcttagggagctctaaaaaccacatttttcttgccatttagtagtccataaataaatgcagaaccagaaatgatagcagagtccttaataaatgaccccatctttgtactgttaggatagctgagtttcctttgtcttctcagctttgaccacttggcacgctacgctacgttgcattttcaaccatcactcttttgtgttcaactagtactatataatagtggacacctcggttgttcacttgtttttgttttctcgtgtatatctcagtgttgatcttaaaggggaaaatgagttacttgggtttgggtgttagtccaggtactgttccagtgtaccatggaacaaaacttaaagtgttggataggagggtgaggataacagagctggtgttaaggtgtgtgagccttggtcttggagttgttgcaattgttcttgtggtgactgattcccaagtcaaagagtttttctcctttcagaagaaagctaaatttacagacatgaaggctttagtgttcttggtagttgcgaacggactaactgttggctactccttaattcaagggttgcgctgtgttgtgagtatgattaggggaaatgtacttttcagcaagcccttagcttggctcattttttctggtgatcaggtaatggcatatgtaacagtggcggcagtggcggcggcagggcaatcgggtgtgattgcaagggttggtcagccagaactgcaatggatgaagatatgcaacatgtatgggaaattctgcaaccaagtgggagaagggatagctagtgcttttgtggctagccttagcatggtggtcctgtcttgtatttctgctttcagcctcttccgtttgtatggtggtaacaaaaccaaaaatgtggttggtaggttagaaactagcacctgattcaaggttcttcgtgtatatgtagtagtgaatgattatggtaatatgagaatggcaactattgcaattatcacttctattgcaatgatcacttaataattgatggcagtaatataaagtttaggttctttgataaatttagccacttttgcatatccttacatcccgtatggctaaggctaagtttgtgaatctgttagcacgagttccaattaatacattaaaagtccaaaacagagaagcagatacttgcgttt

SEQ ID NO: 116836 - DNA, 190 bp, Glycine max
  Clone ID: PAT_MRT3847_76514C.1
ctcggctcgatcctattactcttcactgcaccaagctgaagatacaaggggcctgagtttctaccacactacgatcgtagaaacagttgcttccaagaccatggcggcatgggccatttttcaaaccatatatactattatatgttatggactaacatgaagtcctatttacgagatcttgtactctatg

SEQ ID NO: 116837 - DNA, 1304 bp, Glycine max
  Clone ID: PAT_MRT3847_76515C.1
gtaccatgttccagatcaaataaactcatttcctctgagatgaatttcgggagggcagagaattcttgtgtctttgatgctggttaccagaatttctgttttggggtaggtcatgtaaactatcattaccaatgagtgaggatacatatacaatgcaatatgtgcgagacaggtgaaccaacttctagatataacagagaaaaaggtcacgcttctacccacgcgtccgcccacgcgtccgcccacgcgtccgcccacgcgtccgcccacgcgtccgaagaaaccttagtttgatattttgattggttctgtggagagtttttttttctttggtgtggtttttggtttgtgctgtttttggttgggaataacaatggccgatgaaggaaacaaaagcaataacttctattcgatcttggggttgaagaaggagtgcactgaattggagctaaagaatgcttataggaaacttgcaaagaaatggcacccagatcgttgttcagcgaccgggaattcagagttagtggaagaagctaagaaaaaatttcaggaaattcgggaagcctattcagttttatctgacgccaacaaaaggttaatgtacgacgtgggagtctacgacagtgatgacgacgagaacggcatgggggacttcttggacgaaatgctaacaatgatgagtcagaccaaatcgaatgaaaacgctgagaggagagctttgaggagttgcaacagctttttgaagacatgtttcaagcggatattggattggatggaggcccttctcttgcttcttctgattcctcaacttcatctgcttacatgacttacagtgaaagttctagttcaaataaacgcaattcctctgagatgaatttcgggaaggcagagaattcttctgtctttgatgccagttaccagaatttctgttttgggacaggtgaaccaactccaagatataaagaagaaaaaggggggaattctaggaggaggtagaagtagacacagaaatggcagaaagcaaaatatgtcctatggccatgatgtttcatcgaatgactaccctggaatttccacaaagtaaatgaccttatgcaactaaaagtttaggagggaaaaggactaaggatgatcatagtttatacaaaaattagttctaggccattgttgccttaccatgaaaaatctatggtagtggcaccttcaatttcatgttcccaaggttgcaattgtacaatcatgctagtactttaaattttaaatctattgagaacccatttaagtctctttcatttaaaaaaaaa

SEQ ID NO: 116838 - DNA, 1347 bp, Glycine max
  unsure (1)..(1347): unsure at all n locations
  Clone ID: PAT_MRT3847_76516C.1
aattccatatgttccaagaacaggtgatttgatatcttgtgacagatagaataaaatttgatntgttctttgttgtnaaagtgcatcttcgtgcagaattcttttaagttatgtagagtttcttaatgatcccattatcagattaccaaagcttactttcactataagttcatggttaagttagaacgtttggagattgtatatattgatgcctgattgtcttccagatttcataattggtccaaactactactatttttggcctgaattcccgattgctgtcatttttatgatatgatgctggatggtcggaagccagaagatgtgaatgatgtacttgggatgcgagtgatattgaatcctaaggctggagagaatgcattagaggctggagagagagcatgttataggactcatcagatcatccaatctatgtggaaggaaatcccttatcggacaaaggattatattgccaggccaaaagcaaatggatataaaagtttgcatatggcagttgatgtgagtgaaaatggtaagacaagaccattgatggaaatacagataagaacaactgaaatggacaggctagcagttggtggaacagctgctcattcattatacaaggctggccttactgatcctgaggaggcaaagcgtctgaagaccatcatgttggctgcagctgaattggctgcgctgcgccttaaaattttccaacaagtacaaatcataaaggaattgaaattcaccagagggatagagtgtttcgccttcttgacaagaacggagacggtaaaattagcattgaggaacttacagaagtgatggaggagcttggtgcaccaggagaagatgcccgagaaatgatgcagctccttgactcaaatagtgatggctccctcagttctgacgaattccatatgttccaagaacaggttgagttggtgcgtaatttagaggtccgagatgatcaatacaagaaattattggatgagaagcttcatatggcagatgagagtggtttaattcaagtttatagtaaggagttcggcaacaggcttgcgagctagtgcttcatccatttgaaacgaatgacagaacaaaacacactcaatttactccacttgtgatatgatcattaagctagagccacgcgtaagtgatgtaatttccatgtaaattaattaatgacagaaattccagagataaagaaatttgcaatatcttataaaaaaaaaaaaaaaaaaaaaaaaaaaaaaaaaaatatggaaatttttctttattattctatttatttttaatattattttagttatttcattaaatttgcttttattattacttttt

SEQ ID NO: 116839 - DNA, 230 bp, Glycine max
  Clone ID: PAT_MRT3847_76517C.1
atcgcgagcggccgccctttttttttttttgctttttacgtttgaattcgattcccatattttaagcctagaacccccgatgtctacatttcgtttccatacaagacaataacggtaattaaaaacccaacattgaaacctgaaaccgattagagtctgatagccagaaaccaaaaaggattcccattgttctgagatcaaacgtttatttcaatgcgggagttgagaaa

SEQ ID NO: 116840 - DNA, 437 bp, Glycine max
  Clone ID: PAT_MRT3847_76518C.1
atccctctggtgtggaacatttaagatggtccggcacaagagggaaatctgacttgttacccccaggggggtcgcccaccccaaagacacaaacaacccttcaaaagcgccccaaaaaggggagggggcgatcccggagaggactgggggccccccaaaaaaaacaacattgcgggggggccctaacaaaattgcccccgaaaaagggcccgtgacctgttcaagaggcgggcaaatattgggtggccccaaaaaaaggcaaggaatcttttttcccaccgggggtggccccgagacccggggggaacaaacccgggcgtggcttgtaaaaccccccgcgaaaagggccatgaaaaaaaaaaccgggggcggggaaaacaaagaggttcccggggagcccccgcgaaaacccacccgggggggcgggcaacaaaccc

SEQ ID NO: 116841 - DNA, 154 bp, Glycine max
  Clone ID: PAT_MRT3847_76519C.1
aaaatgacatgaggaatcctacagttgataatagaaggaagagaaagtgactgtataatacgacatgtaaattgattataaaagcaatgcaatgtggttggatcaggcaatcagtttatttttccttcttagttgaaagattgaagtggtgata

SEQ ID NO: 116842 - DNA, 369 bp, Glycine max
  unsure (1)..(369): unsure at all n locations
  Clone ID: PAT_MRT3847_7651C.1
ggctcgagttaaaaaactcttngttgcaccacgcaccagccatctgcacccggggcaggtataatttaggacaccaacgctgttgcagaaatcgtatggagtagttactatgagagagcaaaacgttgagtacgcctacgctaagcttagcgagtccgcgctatatacttcctcttaggcggttctgatctatgcctcaacctccgacggggactctctctgagccctaaaaatcatcttccacattcgcgaatacggttgcatccaatacgcgggctacccagtggcgtctaatgacgagatccacaagtacacgctcagttcctcctgaaacgacgagcctctctccgtcgcattgggtaaatgggg

SEQ ID NO: 116843 - DNA, 242 bp, Glycine max
  Clone ID: PAT_MRT3847_76520C.1
ggaaaaatggccaaaggaaggtaattaaattttaaggtgggcggatgttgattttaggttttgttgcttaaccaacaatggttgaaggccgtttacgtttgcaaccatgcttttccaaaacccttccttgtacatttttcccaaaaggaaaaagggaagggggaaaattggaacccaaggggttggaaacctttccatttgccaatgacaattttgcaagcccaggaacggtttggttaaaa

SEQ ID NO: 116844 - DNA, 296 bp, Glycine max
  Clone ID: PAT_MRT3847_76521C.1
atgtttgggttttttttttttttttttttttttttttttttttttttgccaaccaaatagcttttttttatggtaatagtaaaaggcatcaccttagctcttgttgtcccaaaggtgcaaaccgattcccaacaagtattaacacacgggcagtactagttttgtggttaaaacatcgacaaagtcatcaaaatgtttaaccatacatttatttttatttttattggatattaggatccattcacaatcccttatttgagctttataaaatcatcatccctcacattttactcatt

SEQ ID NO: 116845 - DNA, 367 bp, Glycine max
  unsure (1)..(367): unsure at all n locations
  Clone ID: PAT_MRT3847_76522C.1
nnnnnnnnnnnnnnnnnnnnnnnnnnntttttttttgaaggggaaagacatccacttcataatataacaccgccacatctttcaatacaaagcatgttgtattcctgaagggaccttaaaagtataagcgggaatgatcctcgcatcataaaaaaaaagaatcaccttttgtcacaaaatccttcctttaaaatgaaaaatttttttttgcccacatattcaaaacccactgaacaacccatgctatactttttataaatcatccaaagaagacgttttgttttgtttgccaccggcttactttgcttaacttttttctccactgctatcaatgtagagggcggaatccgaatttaggtccttactt

SEQ ID NO: 116846 - DNA, 440 bp, Glycine max
  Clone ID: PAT_MRT3847_76523C.1
gcttagggtagcaagcttgtagttaattagccaaaatcatcggttcaatttggaggcactgcttctgcatgcttactccctagcacccgaaggggaaagagaaccctgatgaggttggaattcactgcaagggttgcatgcttttgatgcctttcctgtatgtatattatgatttcatattgtttattggtttgattcacacttcttttggtttttgcatgatgatcttattcataatcatcaatgggaagaggctttaaaaatagtttcaaatttgtttattctgattataaaataacctaaaccgagcaaatgatagtagttggggataatcaagcactataatatgaaagagtcatgttagtgcaatggtctgtatgctaagtgttgtcttttttgggttatttgttcgaattgacactgcaacgaacttttgcacc

SEQ ID NO: 116847 - DNA, 1704 bp, Glycine max
  Clone ID: PAT_MRT3847_76524C.1
acgaatatacatattcatatcaacaacaacaaagtattatcccactaaatgagataagttacagatcacatcttgccattcggaacagtacatatccatgtcaaattatcaataatcatcaaaacccggagacataaaacctatcaatccaatgctgttttacatttatatgcatttttccaaatccaatgaatttattttacagtatacataaagatgttggcagctaaaaccaggtcagtggtcaggactcagtaaagaagaatacatgagcttcacgatatcgttccaagacaacattaaagaggggatggattggttctaagagattagagtaggggcccaatactaggttaggcagcggtggagaatctgggtgctttgaccagctatactggcacaatgagagtccacttaaacagtaacatgtgtgatagtgatctctacgtttacccggtttgtctctcagtccacccgcttgctcctgtgcacataagagaatatattgctgtaaagcaatgctgtgaaaaagtggttcttgtgctctccactcattaataaagttatagccgatacttttataatcagctgaacaggactgactagtgccttcatgcttaccatggcatgttgcatgactagaggtcccatccaaactttcttttgcttcagatacatcagatatcgtaaaagtctgtgatgcctcttccatttgtttattgataatggaagataatctttgcaatagagcaacggcacctccctgattacattcaagtttcaatcgaactatatcacaaagaagattgatgaagaaaaagtaaaatttcaatcacctgccaaaaggaatagcatccatccaccaatttatttgttctcccctggaatccacattccttaccttgccggaataccgcccattcctaatgcaatgcctcagataattaaatcgttcatataacttaagtgtcagaaacttaaaagttcttatgaactgtaagccagtagaaaaggaacaattctcttacaactagtcgaggcagatccaagcgattaacctcaccaatcagaatcattgtagctaatccacaaaaggtgtacctgataaacaaatagtcaagaataagaatgtgccttgtacctccttttgtttttaatcacacctttcttggtgaagtggtataataagagggagggagagtgtatgatgacacatacccaccatgagcctcagaaccaggttcacctgcaatgccaccctcatatgtttgacagctgcaaagaagcacagacaccaaataataaaacatgtattgcataactacacaagaagaattaattatgtaaaatgtaagcaaatgcccttaagattgaagttaaagaatcaaaagtaaaaattttgtgtataggtgttatcattgtactcctactgtgatttcaaatgcaacccaacatgattttgaataaatatatatatatatatatatatatatatatatatatatatatatatatatatatatattatttttttttttaattttttaacagtaccctcaaggcactcattagcagaacctattaattatttcatttatagttgactattggactgacattaaaaccaagaaatcctaagttctgcagtgcaaagccatcaaatagctggaacaataattagccatctaaaccatgtctaattct

SEQ ID NO: 116848 - DNA, 193 bp, Glycine max
  Clone ID: PAT_MRT3847_76525C.1
tttatcgagagagtgagactgagtaacgccgtgaggtgaagcctacagagacagccttcagaaaccctcaatttgtttaacgcgatgtctgtattgtcctcttgagaaatgcaaacttcaccgacttatcacttcacactgcaccgatcaactcaacattttgtttttggtagctatggcgtttgagcaaaac

SEQ ID NO: 116849 - DNA, 106 bp, Glycine max
  Clone ID: PAT_MRT3847_76526C.1
cagatatgctgttttcgactttgattttggcaccgttgattactgccggaagagcaagatcttcttcattgcatgggctccaacagcatcaagggtaaaaccaaga

SEQ ID NO: 116850 - DNA, 418 bp, Glycine max
  Clone ID: PAT_MRT3847_76527C.1
gcgtccatccaatttttacatacaaacattttatatggattctggatttattgaacgtacaatgggaattgggcgatggcataacaagcgtgagatccctataattcctacaatctactaagttaagctaatctattaaatacttaaatgctgggatattcaactcatcttcctatatctccaaaatcgtggcacgagaacacatatatcaaatcttaatatatgccctgagatcattttactattacacccacattcataggtactgtcctatcaatgaacgttgaggcttttttacgaaatgtgatgatcctcttttcacttatatagaaattcatatcaatctatgactccactcatcaacgtaatcataacactacaaatatctactcttacataatccacccctaataccatt

SEQ ID NO: 116851 - DNA, 178 bp, Glycine max
  Clone ID: PAT_MRT3847_76528C.1
ggaataatgaaaacacaattttgttgatattttgggggtaaccaaacaattgttttgaatcaaaaaaaatttacaatattccatttttttcttttggggcgtgaaaaaaaccatattcaacaggcaaccatcttatggttactgcaagttttccaacacctcccttctaaccttacca

SEQ ID NO: 116852 - DNA, 279 bp, Glycine max
  unsure (1)..(279): unsure at all n locations
  Clone ID: PAT_MRT3847_76529C.1
ttctcattgattcgaagganctccaccncggtggnggttgctctataactantggatcccccgggctgcacgaattcngcacnagccataangcntgagtggtccggatcttgtgttgaantcctggntggtctggaaggatgcgganggtangccanagtgggtcaangatcttgaccaantggatggggttnancaaccanacanagagtccatccgtcctcgccccaancaccacctcctgcggtcnctacccgcttgggattttgtggaccgcta

SEQ ID NO: 116853 - DNA, 270 bp, Glycine max
  Clone ID: PAT_MRT3847_7652C.1
gacacatgcccatcatcaaagtttcttcctttctctgctctttgtcttctctgacacatttggggccttgttgagtgtgtttttgcgagagggtatggcgaaggacgttgaggttgctgaacgttgctccttccctgggaaagactaccaagaccctccaacagcaacactcattgatgctgaagaactcacaaagtggtccttttacagggctcttaatgctgagttcaatgccactttgctcttcctctacattaatgtgctcacagt

SEQ ID NO: 116854 - DNA, 476 bp, Glycine max
  Clone ID: PAT_MRT3847_76530C.1
gagaaatgctttaggtgtaatatgtgataatgtgtgtactgttcacaaaagaaagttgtaacagacaaattatatgactgttatgcttgagggtgggagggaaatgtttggcagtaaagtagtgacaagactagaagacaagtgcagcagtgatgagaaattgagaatgctgaggtggtttattcactggagagaaagataagtgctcacagtgatagccatggtgcaaaaagaatacgaaagcttactcaaaggaaagcagttgattatacaagcacagttgtgcgttatatgcagattcgtatgtcgcagcgggattcaagggataggactgtactgcaacccaccccggcagcagcaattgatatgttgccagcagttggctatccagacaatccatccacaagctttgctgctaaatttgtcatacatctctaaataaaaatcgttgccccattaatcgcgttctttggact

SEQ ID NO: 116855 - DNA, 246 bp, Glycine max
  Clone ID: PAT_MRT3847_76531C.1
cccctcggaattccgagctcagtcccgggggcttcaggataggcctaataagaaaacaaatattccaatacatatatgaacattttggggcttagggttgaaaaggtggaattggaattccccgagggaatcccatctctttatctttgggttaagcatgcgcctaattagaaatcaggtaggttcaatttatatttgtacaaccttgacttcttagttcttggaaatggggaatgtggaattccc

SEQ ID NO: 116856 - DNA, 566 bp, Glycine max
  Clone ID: PAT_MRT3847_76532C.1
ggaaagttcactggacgagttggaaagccttatgctcccctaagaaaagtggtggtcttggtttgcgattgttgagtcatatgaacaaatctctccttatgaagtctacctagaacatgtgtacaaaaccaaatgatctttaggtgcgggttgtgagaagcaaatataaatgagggaaggatattcttccttaaattgacccaaagaaaactggaacaaacttctggcagggtatagttcattgttgggagaagattactcatgataatattgctcgaaagataggcaatggccgatcggttcatttttggaaggatgtttgggtccttcaagaagggaaacttatagaccaaaggttgaattttgtagttcataacgatgatattcctgtttgttttttcgttaatgcgtctggctagtgggatttgaatcgacttcgatgtcaagttcccatgcatgttgtttcaaaaatccaacaacactatcctccaactgggtcaagaaatgatgattcagtgatctggggttcttcccaatatgagagtttttcgactaacgaagtcttc

SEQ ID NO: 116857 - DNA, 365 bp, Glycine max
  Clone ID: PAT_MRT3847_76533C.1
aatttattttaaaaaaaataaaaacaataaaaaaggcggtgaattttaaaaatagaagataacaaaaaaaacaacaaacacatcaatcttacaaaaaaattgcaacatttaaagaaaagtttgaatacccttttgcctatagaaattgtattgtgcaatttgtttcttattataattactctttttcaatttcaaacatgatcatcgtatgcaggttttaccccttttacaagtttgtgagacctgtgttttttacattatttcttacttgtgaatggtttatctctccttttgtatagtgttactatagttttactttttttttcctattttttatcatttatccattttttcaattccttttc

SEQ ID NO: 116858 - DNA, 270 bp, Glycine max
  Clone ID: PAT_MRT3847_76534C.1
gacattcatacgtgccatgcgtgtcccttccaattgcccacattttcacgctcgcgaatcactcctctctctccaccaatggccgagcagctcacggatgacgagatcgccgagttcaaggcggacatcagcctcatcgaaaatgactgcgatggctgctatattactattgcacctgggactgtgatggggtcaccacggcaaaatccagctgatcgcagagatgcatgatattattaatgacgttgatgctgatggcaatggaagcat

SEQ ID NO: 116859 - DNA, 457 bp, Glycine max
  unsure (1)..(457): unsure at all n locations
  Clone ID: PAT_MRT3847_76535C.1
actagtcaacaaacataattctcttcctagtcttgtccttaaattacaacaactttcaatcctcaatctgctccatcatatatatatagtaataatagcagcaatggataatactcccagattgcttcaatcggtttcaagcttgattctgattctaagcatttcatcattggcctcagcatctctgaaagtgggtttctatagctcaacgtgtccatctgctgaggcaatagtgagaagcgcagtagagaaagcaatatctgccaacccaggcatagctgctggtctcatcagaatgcatttccatgattgctttgtcaggggttgtgatggttctgtgttactagcatctagaccgggtaatccaatatccgaaagagacaatttggttaacaacccaagctngcgtggcttcgaggtgattgaggaggccaaaaatcaaatagaggatgcatgt

SEQ ID NO: 116860 - DNA, 122 bp, Glycine max
  unsure (1)..(122): unsure at all n locations
  Clone ID: PAT_MRT3847_76536C.1
aaaacattgacagcgatacnagtttgggtggacaaagtgacgagttgtctcctntgggaagcntgactacnnatgcancanaaganactgancnggntccttctcctgaaatttntgccact

SEQ ID NO: 116861 - DNA, 1380 bp, Glycine max
  Clone ID: PAT_MRT3847_76537C.1
actaagctcggaattcggctgcgagctcgagccgcttcactccaccttcttcattcccacccaagtctcaacatacaacaatattaacatgaatatgaatattaggaatggatacagagaagataaatcattctgctgtttccaccccaaacaagtacttattggggtgtgccccttgtgcttgaatgagaggctcctcatactggctgcaaaacaaggtcaccatcaccaaaaccgttcttcttcctcgtctaaatcttcacacaggcttcaagttagttccagacacagaaaaccaccctcttctattcacaagatctttgcttttggttctctcttcactcgcccagaatcccaccacaacaactatgactatgatgatgtctctcccagtccagaagagtcattcatctcaatcaagtttgaagagaatggggtggcatcgtgggaaaagagcacagtgtcaaagaaggtgtcgtcgtggaaccatcaaaacaaggacaacaacaagagcgtgatagagcatgggaagtcacgtgacacatttaggtggcgaaagaggataggacacatgctccagctcattcggtggaagaagagcggtggtgtgtgccacgtgggcaccaaggtggagggagtgaaggtcagaaagggttggatgaggactctgacaaagagaaaaacaactaccatggaataaaaataaaggaaccatttgtgccctttggtcctcactttgcagtgtgcactgtaaagttatatcatagtcatactcgtagagtcaaaattagctttgttactatctaaaaaatgtgctttagattacaaaaaacgaaaaaaaagggtactagtgctttgctttctttgctttgggggatggatcatggggttcttcttgtaatttcattttttttttttgtttctaatttcttgatgcctatagacagtaccgcctgtaaaagggtttgttgaaattgctttggttttgagatttatccttaaaataagataagatgaacttttgggttgccaacttcaggtatgtcgctccagccttgtcccatgatttggcgagcttgaagcaattggcggctttatcgaagagatcggcggcatcttcatacttggagccaaacaagccccaaccgctgagcttcttctcagcctttttctcgaattcctctcccttcgataactgatcggccattttcctccgatcgaaacaaagcaattgaagatggattgattgatcgaattcagtgcgttgcaggaacaagaagaagaagaagaagaagcttcataagcgaaggagcaaaacgatattacattagactgtgttgacgaccaagtccaaatccaaaacccgcaaattcagaattg

SEQ ID NO: 116862 - DNA, 1337 bp, Glycine max
  Clone ID: PAT_MRT3847_76538C.1
ggaaagggccaatgaaattctaccatcaattcctaaagagtatcataacagtgtggctcgttgcctggagtcacgagggatgatggagggtgctcttgaagtagctactgaccctgactataggtttgatctagccatacagcttggaagattagagggtgctaagggtattgcttctgaagtgcagagtgagtccaaatggaagcaattgggagaattagccatgtctactggaaagttagaaatggctgaagagtgtttaaaacacgcagcagatttgagtgtgttattgctgctatattcttctttaggagatgctgaaggaatatcaaaacttgcaactcttgctaaagagcaagcgtagcttccaagaccaaaagataaataaagcaaaatgcaattctggaatgagtttaactttgcagagtcattcatctcaatcaagtttgaagagaatggggtggcatcgtgggaaaagagcacagtgtcaaagaaggtgtcgtcgtggaaccatcaaaacaaggagaacaagagagtgatagagcatgggaagtcacgtgacacgtttaggtggcgaaagaggatagggcacatgctccagctcattcggtggaagaagagcggtggtgtgtgccacgtgggcaccaaggtggagggggtgaaggtcagaaagggttggatgaggactctgacaaagaggaaaacaaccaccttggaataaaggattcctcgctttgcagtgtgcactgtaaagttacatcatagtcatactctcctagagtcaaaattagctttgttactatctcaaaaatgtgctttagattgaaagacgaaaagataataagcaagatacagactcgtttatattagtttttttatagctatgtgcagcatcaacatgggcctgtgcagcttcatgcttgctttccaacttcaaatgacaacttgccaacttcaggtatgtcgctccagctttgtcccatgatttggcgagcttgaagcaattggcggctttatcaaagagatcggcggcatcttcgtacttggagccaaacaagccccaaccgctgagcttcttctcagctttcttctcgaattcctctcctttggataactgatcggccatttccctccgatcgaaaccaagcaagtgaagatggatggattgatcgaatgcagtgcgttgcaggaacaacaagaagaggattcgtaaacgaagcgaaggaccaaaagctgtgttgacgaccaaagtccaaatccaaatccaaatccaaatcaaaaccgcaaatgaagaaaaaagaaagcagcgtaagccgtaaggggttttcagaaatgcg

SEQ ID NO: 116863 - DNA, 379 bp, Glycine max
  Clone ID: PAT_MRT3847_76539C.1
gcggtttggtttgaaatttaacaataacaaatacaacaaacagtgacatgtccttgtttgttgtatttgttattgtggtcaactggtcagcgtctgcaattggtttgaagctaagtatattcctgtatattacacttttcctagtgcatttcaaaatcttggtgcaactcagaatgcaatttccacagattgactttcgcatgattgcaacgtactgccagactattatttccatttcttaaacaaaagaaaagtaatttataatgctttcatgcaggtgctgaggttgctgttctttgcatcaccaaatctggggaggttctaaattatcaggcattcactgatgctaaggggatatacacagtggccgagacaatgc

SEQ ID NO: 116864 - DNA, 308 bp, Glycine max
  unsure (1)..(308): unsure at all n locations
  Clone ID: PAT_MRT3847_7653C.1
ntncgntcncgngcncgcggncctcncntnttangctcgcagtgtngnancgcncnngagnancnttnacnccaccccacgncccnaggnacnntctnctcnnctgtntagtnnngggtgtnnngttgcttatgtgntgcggagtgtganatgtggtcntggtggngctngnntnnggncannttgtnctcangnnggcncnncctggttggtctnnngttttngnngnnntgtncttannggncatggtgggtgtnnntgtaggtttnnttngggtnnggntntngnccgctccncnnactgnnngn

SEQ ID NO: 116865 - DNA, 295 bp, Glycine max
  Clone ID: PAT_MRT3847_76540C.1
ggtctagggctggctgagcttaagccataaccccttggaccggcccgtgagcagcaccgagctctgctggagcaaggcttggcccatcagcacgggcagtaacggctgtgagcctacttcttctctactacagcagggatagctgatgcgcagagggccctcccatagtacaaaagagccagcctctcctgggatggaggatacatgacgatgtctagaagagcacttttgacttactcaagacttggacaggcaccgcaccaatgcacccctcctatcatgcagtgacagctga

SEQ ID NO: 116866 - DNA, 343 bp, Glycine max
  Clone ID: PAT_MRT3847_76541C.1
tttctttatcacctacttacttaactcttcatgagcgacataaacctctataaacttctatccctttaaatttgtcctcctaacctcagctctattaataagagctatcttctatgaacgtactaaatattccattacaatcaataatttcaactacaattaattaaactttattacaactttatattaaactttacttttcatttttcatatacataatcctataaacattcattcttgttcttaacattacttacaattataaacttttaaatcacatttccttctatttatacctttttcctctttaccattcatactctttatttatttaaactaactt

SEQ ID NO: 116867 - DNA, 440 bp, Glycine max
  Clone ID: PAT_MRT3847_76542C.1
gcgtccataccgagcgagaagaacaacaaaagggggctccgaaattttgtaacaatggccaaaaacggtggcttccttgtcggaattcttgtcttggccttggacattgctgctggcatacatggaattcaagcagaaattgctcaaaacaaggttaacgacttgaaggtgtgggcacttgagtgtacggatccaagctatgaatctttcaagctacgagttgctgcttccattttcttggtctttgctcatgcaattgctcacttgcttggtcggtgcatttgcatgcaatccaaagaagaatgccaaggagccacagccaatacggttttagcagtgacttttctcattttatcttggatattattagggattgctttttccttgctgatattacgctcctcagccaactcaagatcaagagaatcgtgtgggatatc

SEQ ID NO: 116868 - DNA, 394 bp, Glycine max
  Clone ID: PAT_MRT3847_76543C.1
aattcaaagccagaggctacagaattgatctattcactcctttaatcacgaacctactaatgataccattatataatatatacctgttcaaccacacatgaattggacaaagggggcacttcactgtggtaagcttacgtacttatttatagcaacaataacaccacatcagtattcatggccctgttcctacaaatcacatctggttgaaatactaaagctctaagtttcggatgtgtacctagattgaatagagtggtaatgacctttaactcttttacagcactgagacttaacagatgccctcttcatgaccgtatctctagaccctttttcgcctgttatgcgtgtgatgacatctatagagttcaatgctcgtcacatctcggagcaa

SEQ ID NO: 116869 - DNA, 336 bp, Glycine max
  Clone ID: PAT_MRT3847_76544C.1
cttgcagtgagcgagttatctccggaatatccatgcacctctcctacgctgttggttgcacacttgctaaccctctctgatgatctgcaaccactctgagggggccatgctaggagaagggtgctccctaggagatcactcccatggggtggggcccgggatccttagggataagtgccacattactctgctagattgctcttacatccggcaaatgatgaagcgaaacatgaccaaggttttaaggacacctctagatcctgaagaggaggtcctggctattctctgcacttacaatcctgtccctgatcacaaagattacctacatgcgcccca

SEQ ID NO: 116870 - DNA, 421 bp, Glycine max
  Clone ID: PAT_MRT3847_76545C.1
acatgattaaaggcaaattggattgaaattagacaatattgggggcaaagggaaaaattttggaaacgtattcggaagttaccacagaaaattttaggggcctggtgaaaaaaaaaaaaaatctaaattgggattattaaaggtggacctaattggaacgaaatgaatgtattttttccaaaaatcggtgcataacttcaaaaggaacttttaagccgcaagaggcgggatgctttggaagttgtgctccgctatcaaaggaatagggtgagaaaaaagtcaaaggacatctccacccgccatggttagggtgtagagacaaggtttctgcgttcaaatcttgaaccgcttgtttaaagaacgggggaagctttgatgggtataccagcccgaacacgttccgtatttttccagtgagaat

SEQ ID NO: 116871 - DNA, 277 bp, Glycine max
  Clone ID: PAT_MRT3847_76546C.1
ggaatgcggcacgagggactatgacaccgcgcgcctcctcctcaatctcaagtccttctgcctccgcatggacgccttcggcttcttccccttcgtcagcgccaagaagaatgagctggactgtctactcgccgggatgccgttggcgctcgccgagtgcgtctatccgactaaattcctgctggaggcgagcctccactttgttgtcttggacaatatacgttagaaggccgtccacgacttgagctggacctgcatccttattctggaatcgata

SEQ ID NO: 116872 - DNA, 234 bp, Glycine max
  unsure (1)..(234): unsure at all n locations
  Clone ID: PAT_MRT3847_76547C.1
gctaccaagaaaaacacaaaacaagagacctttttggtgctggggatttatttgttcnctggcttgaagccttgctaaatagttacctacgcccgcttttttccttgcttattgggagcttttaccggtttcattttttcccattcttatccagaagggggccaacctgaatcatttgccttgttctcatcgaactttgaagcctttttttggcatgcctcaaggcatttaaag

SEQ ID NO: 116873 - DNA, 333 bp, Glycine max
  unsure (1)..(333): unsure at all n locations
  Clone ID: PAT_MRT3847_76548C.1
taatagnnnanntnacnngagacaggaattcggctcgagcngncttgngtanatntcgagnntcttggggtttgntggagatgacgatggcgttgtnagngggatcagagnnccattaccgcgctgcccatngtgacanncaacttncnngagctcaaancncncgcctttaccanatncntagntctcccttcacacagaggccaactncncngnggctgaaatgcaaganggagagcnacggcgacattctgcngggnancactcgcacggtgacgangctgntgngacnngnngtgtngctgatgaaganggnggccattccagtggtga

SEQ ID NO: 116874 - DNA, 212 bp, Glycine max
  Clone ID: PAT_MRT3847_76549C.1
aatcataaaaaatttctgtaactggtgagtttatctaaggcttctgaagcatgatgaagttgtaacattatagcctttgtaactggccaataagaaccatggcatgggggcagggacaagcacgctttttataagagattctctcaaggggatctttattcctttcttctgttgcgattgtttggttttgactctgcatgatgatgtattgc

SEQ ID NO: 116875 - DNA, 254 bp, Glycine max
  Clone ID: PAT_MRT3847_7654C.1
attgccattggctctctttctttgccgtaccatttgaattgaatgtgattgcaattgcaaatccccccttcaattcaattactactttcacgacctaatctaacccttcgctctgctctgctctcacttcaccatattcacacccagatggaaactgtttgtctccactgtggcgacagaggctttccagagacatgggttttttgacccgaatgtatggcttatgcgctgacataggtttgttggctctaccc

SEQ ID NO: 116876 - DNA, 963 bp, Glycine max
  Clone ID: PAT_MRT3847_76550C.1
acttcagctcgagaatcggcggtcgggtggttaactaagcagaacattagtatcaaagcacctcaacttggaaggttttccatagcaatatggaactccctatcaaatgaatcacataaatctgccatcaagatttttgctcctaatctaacagatttctcttatgagggtgatcttgagcaacatatcattctgttgaattcagcatcaattcgtagtgcgtctgttgtggttgttattgatgaggacaacaaagaaagaatggaaaatcttgggtttaaagtgcataatcttcttgcacaaatccgtgaagtggagcgattgaaactattgttttacaaggttttaatgcatgtcagtgatattttcagccatctacctgcatttggaaggttggcatccctacaattaaatgaggttactggagaagctctgttaaacattcttcacaattccccatttcttaatactcttgttttaaaaaatggggtatctgaattaaataaagatgttttgacttctgcatcagtgcctcagtgctttcagtctagcctcagagtttttcagttcaaagaatttaatgtgcatgagcatgagcttcttttgctgaaatttgtgatggcaaatgcaaaagtcttggagaaaatgactatatatactgctttttggctgcggtattcagatactgacatggaaaaggtcaaggagcaaatactctcttttccaaagtgttccgactttgtcatgatacaattatctaatgttaacagttgctgaagaggaggtgtcgttaataaccataggtaaaaggtgtggtgtcatagattcacaaataaaggtgaccctgatttcaagatatgtttgttttacttttcatttttttcatttcacatttttaagatttagaaaatgggattattttctatttttcaaaaataaaaacgttaaaaatgtgtttgattt

SEQ ID NO: 116877 - DNA, 415 bp, Glycine max
  Clone ID: PAT_MRT3847_76551C.1
ggctcgaggggctggagcaaccctccaaacaacaggtaagtatatataaaaccatcattttgaacaccaggtctgctctcttgttgtctcttatggtacatgaggggcttcggagacattattcatgctaagctactgacgttccgcggggcatacggggtcacttttcagatccgtgagtggactcctttacccatgatcatttcggtgcgtcctcagttacctgactgaggggcaccctactacaggaacaactctcgttgtcgctctttcaaaggtgctatctacacttgtgtccgttttcacttacacacacgccttcggttactttgtgactgcgggactgacagctatataagctatgcactcacgtcttgtgacgagtgccgcgcaacatgaaacttccacatgaaag

SEQ ID NO: 116878 - DNA, 2060 bp, Glycine max
  Clone ID: PAT_MRT3847_76552C.1
tttacatgcacttcacagagattcaagtgttagcaaagaatcagacgagacagttcaacatcaccctgaacggaaacctattgtatggaaatatgtctcctaggtaccacagtgtccgaactatatataccacttcaggcatcagtgggaaattaattaatttttcatttgtgatgaccgagacttctaccctacctcccatcatcaatgccattgaaatttacagagtgaaagagttcccgcaacaagacacataccaaggagatgttgatgcgattacaaccatcaagtctgtttatggggtgacaagagattggcaaggtgatccatgcagcccgaaagactacttgtgggagggtctgaattgtacgtatcccgtaaatgactccccaagaatcataactttgaacttatcttcaagtggattgtcaggaaaaatagacccttcaattttaaatctcaccatgttggagaaattggatttatcaaacaatagcttaaacggtgaagttcctgattttctgtctcaattacaatacttgaagatcttgaacttggagaataataacctctccggttcaattccctcaacacttgttgaaaaatctaaggaaggttccctatcactaagtgtgggccaaaatccatatctatgtgaatctggtcaatgcaatttcgagaagaaacaaaagaacattgttacgcccatagtagcatcaatttgtggggcgttgattcttctagtagccgtggcaatattgtggacccttaaaaggagaaaatcaaaagaaaaatcaacagctttgatggaagtgaatgatgaaagtgagatctcacgcctgcaatccacaaaaaaagatgattcattactgcaagtcaaaaaacaaatatattcatactctgacgtccttaaaatcaccaacaatttcaatacaattattggtaaaggaggatttggaacagtttacctgggctatatcgatgacagtccagttgcagtgaaagtgctttctccatcgtctgtaaatggctttcaacaatttcaagcagaggttaaacttctaatcagagttcatcacaaaaacttaacatcccttattggttattgcaatgaaggaaccaataaggctctcatatatgagtatatggctaatgggaacttacaagaacatctctctggtaaacacagcaaatcaacgttcttgagctgggaggacagacttcgtatagcagtggatgcagccttaggattggagtatctgcaaaatggttgcaagcctccaataatccacagagatgtaaaatctacaaacatcttgttggatgaaaagttacaagcaaagttatctgattttggtctatccaaaattatcccaattgatgggggaactcatgtgtcaactgttgttgctggtactccaggttatctagatcctgagtactacatatccaatagattaacacagaaaagtgacatttatggctttggagttgttcttctagaaataatcacttgtcaaccagtaatagcatggaatgaagaaaggactcacataattcaatgggttagatccctgattgggataggggatatcaggggcattgttgactcaaggttagaaggagattttgacattaactcagcttggaaagccttagaaatagcaatggcttgtgtttctaaaaatcccaacgaaaggccaatcatgagtgagattgctattgaactaaaggagacattagcgatcgaaatagctcgagcaaaacattgtgatgccaatcccagacatttagttgaagcggttagcgtgaatgtggacaccgaattcatgcccctggcgaggtagaagcttacctaaagaagaataagataatgtcgtcaaaaataagtcattaaagtgtgttggaggatgaagacgagttaatgaaatcaagccacaaaagagatgtgtgtaaaaataaataatgaaagaatgaaaacctgtgttatttaatttttccttgtataagatttatagagttttataaaacatgataatataaaatagttttataatatt

SEQ ID NO: 116879 - DNA, 421 bp, Glycine max
  Clone ID: PAT_MRT3847_76553C.1
gcatcacatattatttttctttggggcaacacaaaaaaaaagtacaagggacttgaaccttacaaaggaaaaactcctcaaaccttacaaaggataaaagcccaagacactaccgactttaattcaaccggtctctactgccgtgagccctttgaattttgaaaacccttctgactatggtttcaggcaacacttctgcctgatgtgtaaagcacaaaacgcctatgcttttttaaatacaacacacctttctgtgttgtgcttatatgcacctttctggcgcaagattaatacatcccctttcacaagagatccattcatccccattttgctgaggtgatgaatcaaccttcattcccatttgtggtttccaattccaattcttctatttaattgggcataacatgggttaaactcattt

SEQ ID NO: 116880 - DNA, 744 bp, Glycine max
  Clone ID: PAT_MRT3847_76554C.1
tgatctgtgttcgcgacagactattctctcacctgaaaatgtcttgctgcaccggtaactgtggttgctgaagctcctgcaagtgcggcatcagctgtggaggctgcaagatgtacccagacttgagctacactgattcaaccaccaccgacaccttggtcatgggacgtggcacctgttaaggctcaattccagggtgctgaaatggagtgagcccgctgagaactatggctgcaaatgtggaccaaactgctcctgctacccctgcactgtgcaagtgacgtgtcgggagagcacgcttcacgcagacatagcccttaattaacaataatgataaactattactgtgtagctaataactcatgtattatgtctgtgatggttctcgtgcactctggtgtcccgtgttaaacaaacatgcttagaataaagcgcgcatgctttgcctttcagcacgatcaagtgactgggactagcgatgcgtgagctaagctcatgcctgctactttatctcttcttcaatgctggcgtatagccaacagtccatacgatcgcctattctgaatatgatcatctctatgatattagatccatactgacagacattaacacagaaaagtagagctcgggcgggcaccgtcccatcgccctatataggcgattctttcgcttcttgcctcttttacagttggactgtaaccctgagtaaccactaactcttgagaatccctattgctactgcct

SEQ ID NO: 116881 - DNA, 353 bp, Glycine max
  unsure (1)..(353): unsure at all n locations
  Clone ID: PAT_MRT3847_76555C.1
aattcggctcgagcgtggatacaatgaatctgacattttcatgctttcatctttttctgtgattgttttgcaggaaagcaactaatggtaaaggttgcagagatggtacctaggcatcatggaaggaccaagaagcaggatcctgcatcaacatcaactgctggaccttccaccaaatctgggaagggtggaaaaaagaggagataattttgtgtttgaacattgtcttacatgtgtgatttcgagtgttgtgccggatatattatttattataattataataggactaattactacaacaaagttaaatttttcccaccccaatatgtgtttgttaactttagcagaatana

SEQ ID NO: 116882 - DNA, 319 bp, Glycine max
  Clone ID: PAT_MRT3847_76556C.1
atatcaagtctctcgtagttgagcaacgaatgttcttatgcaatccaaatggtcataacgggtcacacgaatgtcctccttaggcgcataatatatcgagacgcttgaaaatgtacaacgaatgctttcgagaatttcaaatggccataacttgtcacacggatgtacgattttggcgcatcacatattgtgacgctctaaattgaaaaccggaagctctcgagaaattcataatttgtcacattgaaaatcttattcttggggctattataatattgaggtcgcttcggaaataaacatccgaatgcttctcgtgaaa

SEQ ID NO: 116883 - DNA, 405 bp, Glycine max
  unsure (1)..(405): unsure at all n locations
  Clone ID: PAT_MRT3847_76557C.1
ccgccacaaattggccttacagagggagaaacaaattaaggaaaagctgagaaagcaagagcggagaagtttggtgacaattcaaatttgaatatgaccaaggctgaaagagagaggacaacatctttgctaccaaaactcacccaattaaaggaaaaggcatatgtttctggtagtccaaatgatcatcctgacaatgttaagaatgttgataatcaaaccattagcaagatgaagctagcccacattgagaaaaggccacctanggtgcctcagccacctccttaaccatctgatggtgctcctgttagtgcaaattcaaacccttcaaatggagtatcatgtgctccacctcaacctccgcctccacccccaccagaaccaccaggtggatcacttcccact

SEQ ID NO: 116884 - DNA, 1110 bp, Glycine max
  unsure (1)..(1110): unsure at all n locations
  Clone ID: PAT_MRT3847_76558C.1
ggcaaagcaccatacaaaaactgctgagtcggatgtatctatccaacatgggttggcatatgctactggtacaaatacagagggtttcaatctgagaagacgaagaattgttaaatctagggataccgttgagcactcgtcgtctagttcacatgcttcttcttccttttcttcaggttttgctcatgaaatatggtccatccttttaacattatggtacatgaagtggaagcttttaatttcatttagtccctatctcatggtggtggtggcctttcttttatttgtctattggaatggaagtgttgttctgggtgcaaaagaagcgcatgcagttaccccacattttgcacagatgctttattttagtctggtttctgtattggctcaggctcctatgcacttcactatcactcaagctgtggacctgtttcagatgtttcggaagagtaggccccttctttactttcagatgtttctggcccttgttgttggcctgctttcagtacactttttcagtgtagctcatccatacctgcttgccgataatcgccattaccctttttatctttggaggaaagttatcatggctcactggtcaattaaatatcttttagtcccagtttatatatgctcatggctctccatcatccacatgttgggaaaatttaggagtaaaatatgggtattggcatacttcttggctactgctgctgttcttgtaccaactccactaatagagttcagatactacactataccattctatttcctggtgcttcattgtaacaatagggatgatcaaagttggattctcacaggcacactgtatattggtgtcaatatctttacaatgatgatgtttctgtttcggccattccattgggatcatgagcctggaattcaaaggtttatatggtgattcaattcatcagaaaaacaagatttgtaacacaaactgccctttttattaggcttttacccccagttttacaagagtaaaattttaaatctccttagttaatatgataatccttttaattacttgaataaaagttctaatgtttaccacctttcattttatatttcctgtaaatacgaagattntag

SEQ ID NO: 116885 - DNA, 308 bp, Glycine max
  unsure (1)..(308): unsure at all n locations
  Clone ID: PAT_MRT3847_76559C.1
ctttnnttttttttatttttttaacaaaatacccggggaaatggggggaccgtatataggaatcttaacaaaccacctccaccagttcatgttgtcatacctaaaggcttctgctaatgatttaaaccaccacacactacatggtgtttactaaaaatttaacataacgcgctttcataaaccactttatcattcttaaatgctcctattggcacaaacctttgagacccctccattttttcttatggccaaactccaaatatttcaaactttttctttctttaaaaaatcactcttatgttgaaatt

SEQ ID NO: 116886 - DNA, 120 bp, Glycine max
  unsure (1)..(120): unsure at all n locations
  Clone ID: PAT_MRT3847_7655C.1
taacgatacggctgctataaaccacaccatgggtgtattacacatgctcaatgtttatgttgctttcagtcagtttagatgatactgccacatcnttgaatcaacctttgagagtccaaa

SEQ ID NO: 116887 - DNA, 103 bp, Glycine max
  Clone ID: PAT_MRT3847_76560C.1
ctcgagccgatcacagccttactctcatgtcttctggtctaacgtgttcccttcgcaagtgagagatggcgcaaattctgcttcatgggactctccacacaac

SEQ ID NO: 116888 - DNA, 316 bp, Glycine max
  Clone ID: PAT_MRT3847_76561C.1
ctcacgcatccgctgatcaagagactggaaatgacactgtgtataacactgtggataacaacgcatttgtaagtataacaactgcaattgcctctgacaggcactttgaatcaagcagtcacctaacagaagtgaccactgcagcaagcaccaactcgaccttctctgggactgatacatgaagtgcatctgaacaatcttctgcagtgatggtatcagagtctgtccaagcttatgacagaactccaaacacaacaactaacgcagatgtcgatgaagctctgacagatggattaaagcagagtgtcgatcggac

SEQ ID NO: 116889 - DNA, 884 bp, Glycine max
  unsure (1)..(884): unsure at all n locations
  Clone ID: PAT_MRT3847_76562C.1
aagtagaaagatagagccaagaagttaatttacggtatttacatacaaaaagatatatagagaaagaaattgagcattaagtgttggaagatgagcatgatggctatcattagcaaactatattgttcatcttctcagacggtgcttggggtcaggaagagacctcatgtggtgaatggagggggttttgtggtcacggattgtantggccagagggttgttttcagggttgatggttgtgggattcatgacactaagggacagttgattctaagagatggggaaggagatgctttacttctcatgcgtcgaaagggaggcatggttgaggcccttggcatttacaagaagtggaatggttatagtgtaaactatgaaggattacagagcctggttttcagcttgaaagagcccaataattgttgtttggttaagaacaatgcgattagaatctccattgaacccaggaatgctagtaacaagggctgggactatgaggtcaggggttacttccctgataggagttgtagcattgttgatgttagaggcaacgtaatagcacagggtggggtgaaccaggaagtggagaaattgatggaaagtaaggatctnnntcatgtggtggtgaaaccagggatcgatcaagcgtttgtttnnngagtcattgccatccttgactacatttatggcgaatccacatactgcagagtccaaaattgtgcttattagcgtgctgtgttttgctgaattattattttataattaaaaccaatagtggttttttctcgtatgacaaatgtgtatatatgaaagaagctaaaggggatagagagggttttggaggaattaaggggacaattaaccaggttaggaagatgccttgt

SEQ ID NO: 116890 - DNA, 1490 bp, Glycine max
  Clone ID: PAT_MRT3847_76563C.1
cttttccgtcactcacacacacgtgctccctttctctcccgtcaacccaaatcccttttctcgttcttcccaattccaatttccaattctccggccatgtcaaccgcggcagcggcggggggcgacatggaggcgggtttcgcgaagctccagggcgaggactttgagtattacatgcagacctactccatcgtcctcggccgcaactccaagaagtccaccgtggacgtcgacctatccagcctcggtggtggcatgaacatctcccgccaccacgctcgcatcttctatgactttgcccgacgccgcttcgccctcgaggtcctcggcaaaaacggctgcctcgtggagggcgtcctccacctccccggcaacccccccgtcaagctcgattcccaagatctcctccagattggggacaaggagttctactttctcctgcccgttcgcagcatccttgttgggcccgtcggcccgaggcattaccctaaccacgccgcacccgggcccgtcgtgccgcactataataattaccatttgggccccggcccggtgaagaaggcgccgcggcgggagtactatgaggaagagtttgatgatgaggatgatgttggtgggaggaagatgcggagggatgggtatgatggatatggctacgctggtggcaagtcttcgctgtcagcacctatggataagaagtctgaaggcagatcccgagtagatcgagatgctgataatcttcagcttcagcagctggaagaaaaggatgtagtatcatctgtagctactgttctttctgatctctgcggtcctggagagtggatgcctatggagaaacttcataccgagctgttggagcaatatagcagtgtttggcaccacaacagagtgaggaggtatctcacatcagaagattggcctggtcctgaatccaaagggaagccttggtatggcttgcttatgctgttaaggaaatacccggagcattttgtcatcaacacaaggtccaagggccgtgtcacccatgagtttgtttctcttgtctctcttctatcgtgacctcgttgcccccggcccccaaaaatctcaaactggaaagaaatagctattagccgtggttgcttctaaacagtgatatatgatttagctcctagaaatctgtataaaatttcttctgtttttttttggtaaatactttgtcttgttactgggttaaatatgttccccctcccctccccctagtgctctgagagcagaaatggaactatttattttctttctttttcatggatttagaaactgggaagttaagacttcaaaattactgagttggctatgtctagttgattcaccccataaataggtcctcagggatattaaatgcctgtggttgagatgcatgcaccattatgtttacattacaagcaccttgagtggtatttcaaaattaatggtccaaacaagaatccaacatgtattttcaagttatt

SEQ ID NO: 116891 - DNA, 266 bp, Glycine max
  Clone ID: PAT_MRT3847_76564C.1
ctcgagccgctcgagccgggaatttttgcagcccaacatgctggttgttgatgttgagaaatttgtttcaccacaacaaggtaaatacatgtcatgattttcatagacttttgcaataaccgatttacttggtagtcttggtgattcttttgaataaaaattagatattgtgctcatcaacatatcatggatatttacgccaccagtttctggcaatcaattattgttcaaataaagtatgaaatgtcgattttactcgtctgtgt

SEQ ID NO: 116892 - DNA, 287 bp, Glycine max
  Clone ID: PAT_MRT3847_76565C.1
gggaagggggggaaggggaccccaaaaagaaaaaggggaaaagggggaaatcctaaaagcaccgcaaaaggggccaaagggttcaaaacccttaaaacaggagaaagtggggaaagcccaaaaaccccaaaccttttcacccaaaccccccaaaaaatgggacgcccgggaaaacccggaaaagccggagcggcccaccaggtttcccaatattgacctaaaaagaaggcggggaagaaccaggggaaaaaaggggcaccgggggaaaaccggggaaaaagtcaaaa

SEQ ID NO: 116893 - DNA, 409 bp, Glycine max
  unsure (1)..(409): unsure at all n locations
  Clone ID: PAT_MRT3847_76566C.1
ccccgaccgtagcttnggattgggattcggccacggacatcatagagcttgtagaaaccaacccgcgatctccagcacctgggttgatgaagccaaggacatatggggatccagtggggcaatagactacaaggcctgcgagacccacttatttcgacagtggagccgagactacatagctcgacctgcagcctacataagaacggaagacaggaagtaaaagcacatgaatctagtgcaccaataatcatatcatcatacagtcccttgtgtggaactaaaaggtaacagtgagaacaccattgtatataccaactaacgagcagagggtttggcacaaatctatggaccttctcggtggaggaatcttagtggacaaaaccggggattggatcacacttatacaaaa

SEQ ID NO: 116894 - DNA, 414 bp, Glycine max
  Clone ID: PAT_MRT3847_76567C.1
ttgatcgatattacttgtaacagttttatgaaaatgaatgtccctcatttcttgggttggggaataatggaagcatggcaatgccatgcataccatatgtttcctcttctaatgaacactgtctatggtgcccgtactccagaaagaaaatgcgcaagttgctggcttgctgtggaagcacacaacatctttgtcttttaaaccatccctgaaaagtgtcgttgaatcaacaaaagaatacatccatggcgaacaatatagatcagactcctaatcatataacctacaagctgacttttatgccagagacctcgtaatccatcccaaggacacatttgtgttcaggatatatgagaccgtactcttttatattccattcttcaaaaaacatggctattgtggggaaaaattaac

SEQ ID NO: 116895 - DNA, 547 bp, Glycine max
  Clone ID: PAT_MRT3847_76568C.1
cccaattatttgccgattctctcgctgccgctggtacgcgaaacgctctgaaaatgctgctcacgcgcattgagcagggcgaattcactgagctgaaggcggcacagatgctgaagacgttcagtcgcggcaatggacttgccgccccttccgatcgaattgcggacgcacttttggcactttgcaagtcgggacgagtgcaggactctgagctgctccgaccgatgagttggctcagtttcggtgccatcgctggcgaattaatgcaattgaagcgccttctgcgcatttcaccggttggcactccgttgggcgaaaagattgagcagtgtccggaccacaaaatggagctgtacacgaaggctctgttggaacagttcacttccattgctgacgataaccttgtggagaaaacaattgctctgaaagccattggaaatgccgcattagacgaagtgccaaaactgttggtcgatttgattaatccaaatgggacggaagaaccgaaagcggaggaccaaaagagggccatgggcgaaatcttacg

SEQ ID NO: 116896 - DNA, 437 bp, Glycine max
  Clone ID: PAT_MRT3847_76569C.1
ccaccacgcccgcgtaatgacagaagacgaaaagatggaagtgattagaaacaaaggcattcccgctgatgttcttgcaaagcgagctcatgaatttgaaaaacatgttgctcacgaaagccttaaggatcaaattcctgctgctgacatgatgactacaactaacgtgcataaacaggcaaagaaaataagccttagacaaagagcagatggagaacttaagctgcctactgatgggaagctgaataaggggaaacacattccgctatctaaagccacagcaatcaaaaatcatgtgctgacaatacccataatgccacaggaggaaattctgccaaataatgcacgctgagacaaaaactgcaatgggaccttaaacttgcaacccacaggctgctgcaatgcatgtggcatctatctgaatctacattgagagc

SEQ ID NO: 116897 - DNA, 456 bp, Glycine max
  unsure (1)..(456): unsure at all n locations
  Clone ID: PAT_MRT3847_7656C.1
ttcttacgaaacaatcagaagcacatctctttaccacgtcttgcgggacaaaagaagacaagcttctgcgatactacaccgaggggaacagcatccatccatccctcctgaaccgatcgatctctggttccttctccttcttcttcatcggagcagcaaatctacaatttctagctataagctaatcacgccatcctcaagctcaagcactggttgagccatggaggctggaggaggctcatctcgttgtccacgacgacgaccaccctcttcttgctctcgccctggaacctngccgccggatactccaccgatgcctacgcacggccaatccatatgacggtgatgatgatgctcgatctgggccagctaggacttgtatgaacagnacgcaacaaagcggccggaccgggcattttgtcccactccggccatggtgcccatcatctcgctcgt

SEQ ID NO: 116898 - DNA, 260 bp, Glycine max
  Clone ID: PAT_MRT3847_76570C.1
ggctcgaggattggtgagtaatcttgttttttgcaaacgcggcgagggcattgacatgctgggaggtatcctcaatttctctgcttgaaaaagtgacattgagttaataaggaagttgctgggctagcttgacggctcttgaacagaaaagttgcagaaccaggatttgatgtgtcagatgaaggaaacggtagagaccagctgatgatgctgaatagctgcacagcccagtcatgagatactgtcttgatttccagggc

SEQ ID NO: 116899 - DNA, 168 bp, Glycine max
  Clone ID: PAT_MRT3847_76571C.1
ggaaatggagcctacaatagacttataaattagtacatacttatagttctcgatgataaaaaaataagtgataataagtaatactatcatagtcctaaccggtgaaaaacaaaattaatagcaggatattagattaattagattaatgaagttagttaactaagctaa

SEQ ID NO: 116900 - DNA, 419 bp, Glycine max
  unsure (1)..(419): unsure at all n locations
  Clone ID: PAT_MRT3847_76572C.1
gtacgcctgcagtacgcgtccgnattcccggtcgagcacgcgtccgaatcctcttcttctcttgcggctagggttttagcgcagcttcttctagatttaaggaagatgggtaaggaaaaggttcacatcagtattgcggtcattggccatgccgactctgggaaatccactaccactggtcacctgatttacaagcttgcaggcattgacacgcgtgttattgagaggtttgagaaggaagctgctgagatgaacaacaggtctttcaaggatgcctgggtgctgcacatacttactgctgagcggcaacgaggaatcgccgttgatattgctttgccggattttggagcatcgacctattatcagacagagtaagggtggccgtggcttcctggtcttgtgttgcccttccgccccct

SEQ ID NO: 116901 - DNA, 452 bp, Glycine max
  Clone ID: PAT_MRT3847_76573C.1
cgtaggtgtcctttgctctgctaacaagagcatggtttttgatctgaggaactatgatctcctactttatataatagtagcagaagacaaagaaaaaaggtgttccgttgaagacgggggaagatatgaaggtggcgaatgaggctatcttatatgttaacggagttcgcagggtgttacctgatggattcgctcatttcactcttctcgagtatctcagagatataggtctgaccgggacaaaactaggatgtggggaaggtggttgtgggagcttgcacagttatggtttctcaatttgatagaagattgaagaaatgctcacactatgctatcaatgcttgcttagcacctctatattctgtagaagggatgcacgtgattacagtggagggattgggaagctgcaagcgtggactacaccctgttcaggaatccctggctcgggctca

SEQ ID NO: 116902 - DNA, 263 bp, Glycine max
  Clone ID: PAT_MRT3847_76574C.1
tttgttttgctagcttcacactactcaccttggggagacctaatcgacaccggcctctattatcacacgtttaaagagctcttgcgatagcatctttcgcataacgcgctgagcatgaaggcaagaccttactgatggagcaaatattcgatgactcatcctctacttccaacaaccataggatcacaaacatgcaccacaaagcagggactgtatagttgctatttccacagcgctggcaggatcgtttaaatcttccttga

SEQ ID NO: 116903 - DNA, 334 bp, Glycine max
  Clone ID: PAT_MRT3847_76575C.1
ttttttttttttttttttttttttttttttttttttttttttttttttttttttttttttttttttttttttttttttttgggaaaaaacccatgggggaaacctttggaaaaatcccaaaaagttgaaaaaaagggagcaggccaaactttaactccctttttaaaaacatgaacatgggcaaaggacccttttaatttttaggggaagaccctcaccccttctttttaagggcttccagtaaacaaaaacctaaattttcccccaaaaaagaaagacctgttttcttttttcctgcccaaggttgtttattttaaacacgcctaaggattat

SEQ ID NO: 116904 - DNA, 233 bp, Glycine max
  Clone ID: PAT_MRT3847_76576C.1
atacatatatttaacgatttattctattgaataaaaaatacgggcatcagggacaccttgtgtacattatcagcactaactcataccatatacaatatgaaacaatgacaataagattgcacacgatcatcgatgtacacatatgattacgctctgaaagatctttggctatcaccactttcaaccccttccagctatgtagaatctacagctgattgcagatcatgcgttct

SEQ ID NO: 116905 - DNA, 336 bp, Glycine max
  Clone ID: PAT_MRT3847_76577C.1
ttttacttttttttttttttttccgcgaattgtaaacttaattacacttatataacatactcagtttaatatccagcgggggtaaggctttacttttttagttaacactcccatagttatctatttagggcatgatgataatgcctcaccagaaatgagttcaaagatagttactgcctgcaaggcatattgttccgcacccagttgcacccttaaagggttcttttgttgtttacataaattaaggtactagctttataataacaccaaaatggagtaagtacactaacgagggcatgaacacattcttttactagtttacacaaaagaaggccc

SEQ ID NO: 116906 - DNA, 352 bp, Glycine max
  Clone ID: PAT_MRT3847_76578C.1
gcgtccgtgctactacaagacgacaacaggggacggatgagtttgatgctagacattcctgaatcaactgttacgatatggaaggtccttgctttcttcgtcgctacgacttttgcagcatggaatggccatgcgtcagatgggtgccctccccccagtgaacaaccggttatggtgcgcgtaatctagatgtgcaatacgcactttgggtgcttgcagtcctcaccgacaacatccttggactggtgatcattcctgaattatgagttgacacaacagcagtgtacacccatggaggacacttcctatccaaatgttggatagttaacctgcacacttacttttaagcgat

SEQ ID NO: 116907 - DNA, 366 bp, Glycine max
  unsure (1)..(366): unsure at all n locations
  Clone ID: PAT_MRT3847_76579C.1
agcggctaccggtttgatgtatcaaaactggagccagtagttgccaaggtttgttggcgcattattttctgcaatcgacatcttttgttggttatcactttttttttttgaatacctgncttttttggttttgtctgggtctcctttttttttttctccagcaagagaatgcaacgatgtgaagatcgaccgagtctatattgggtgttgtttggttcatgaaatgtaacgtagagggtaatgttaatggtttccattcgattactggcggtaacaagtttgaatagtccggtatcaatttttagtatggtatctgattacggttgggctagagcagacatgatttaacgttttcacttatccatt

SEQ ID NO: 116908 - DNA, 372 bp, Glycine max
  Clone ID: PAT_MRT3847_7657C.1
gctcgagtgatcttccgaggtgggttcagtcagtttttcgcgaagaatggaccgcggaggtggtcgattcggagctcatgaggttccacaacatcgaggaggagatggttcaactgttgcaaatcgcaatggcttgtgtttcccttgtgcctgatcagagacccaacatgcaggacgtggtgcgtatgattgaggacattaaccggggcgagaccgatgatggcttcagacaatcctccgatgacccttccaaaggatccgagggtcatacaccacccccagagtcaaggactccacctagctctctcacaccataacaaattactaaaagcctttcttcttcttcttcttcttcttcttcatcattcaatg

SEQ ID NO: 116909 - DNA, 403 bp, Glycine max
  Clone ID: PAT_MRT3847_76580C.1
caacaacaaataaatgccacaccccgacaatacatgcttttttcctccatacactttataatcccatttttgaaaaaaaaaggccttaaaccaatatcaaattcccttttccgagggtttggccgaaaagccacctttaagcacagttggccggttttagcgttgcttttacgggtaagggacattcaaagatttaattcctttttaattaaaaaaacggggagagaccttaccccttattccgggacactttttaaacccccaacccttaccttggggggcccttaaacccccccaccaaatttttgggatttcccactttttgaactgaattaagatgcaaaaaattccagtcaccccccagcccgggaaaaaccccattaaggggacttcttcggcaggg

SEQ ID NO: 116910 - DNA, 251 bp, Glycine max
  unsure (1)..(251): unsure at all n locations
  Clone ID: PAT_MRT3847_76581C.1
taaaaatgtttgtttcattcctatttacctcaaaatctggggtgcttttttaccatgacgggctggtcnaccaaatctatgatgctgtcctcgacgcttgcctcgaacaggacccaaacagcaaggttgcctgcgaaacatgcaccaaaaccaacttggtcatggtcttcggagaaattaccaccaaagccaatgttgactacgaaaagatagtgcgtgacacctgcaagaacatcggctttgtcttaaac

SEQ ID NO: 116911 - DNA, 469 bp, Glycine max
  Clone ID: PAT_MRT3847_76582C.1
aatattacattttttggttttgaggctggaagaaaaaaatacaaagtgctacgacaaaagacctgtttacaacttagatttaaaactagcaccattgaaaaaaaaaaaggccctttttttttttgaaagacaaaaaaaaaaagcggactataaaaggagaagccattccctttctccccccaatgagaaagcctggctgaactttgcagcaggacaaaccttcttatatacttagaggaggaatccatgtagataaccccggctgcaaaggccactccgggggatggtaaccaggctagacccacatataaattgggctaccgggaatcgattcagctacatgggagacgtaaagacccggtacccaggccattgaacccggtggcccactgctggacccggtccataattcaagtccctaccataataccaacgtgaacaaagcaaagcctccattccactccaacca

SEQ ID NO: 116912 - DNA, 730 bp, Glycine max
  Clone ID: PAT_MRT3847_76583C.1
acgacccacgcgtccggttgagcatacgcattatatgcccaagagatggcggggcaaagaaagtactgaaatggtccggattgagtttgaaaccttattccagtatagtgggatgatgttacttgaggagatggcctcgattttccttactccatacttacttctgttggttgtcccaaagcgggttgatgatatcttgcagtttattgcagattttactgtagatgttgaaggtgttggtcatgtttgcagttatagtgtcttcaattttcaagagcatggaaacagtaattatggttctccgtttaatgcacctcgcagccagagaagttcccagggaaagttggagaaatcatttttgagctttcagagtagttacccttcatgggaaccaaatgctcaagggaggcagtttctgcataatctgagaacattcagagaccaaaacttagcaggacacataaaccaacatggattttcccctcctagactgtggagaggcagtcccaacatgggaagcaatggagacagaaacaggtttacatccagggaaatgccatatagtacttttgcaactggcaatcatttgggttctttgtggctaattgaatccagaaatcaaaacaatcatccctatcttcttgattggtactacacttcccaacctcatgatacagctcaaagacatgttcaagctgatgatccatttgaagtaacggagcatcaattc

SEQ ID NO: 116913 - DNA, 587 bp, Glycine max
  Clone ID: PAT_MRT3847_76584C.1
ttcttttttttttttgttttttattttatagtttttttttttaaataaatgtttttgttttttttttactttttacaaatcatcttttttttctatcccggggatgaagagctcatatacaatctcaaaccccataattaaaaaaaaaaaacatacctaaacacaaaaaaccttttttttttaaaaaacgccaacacccggaacaatgtcaggggggagaatatgaccaatcaaattgatacgccgatggaatctaaaccaacgacagaaaaaaccataaaaaagagcggaaatttgcccgaccaaagaaaactgttgacaatagcgaacaaaaaatccggtacaaactggccaaaaccggttttaagaaaaaaatatcccgcggggggcttataccgggggtgaaccaccaaaaaacgacaaaagttttacgggggtaagaagcacggggctacttgtacttacgcgaaacggcgtaaggtctacccaccctgataagaaacgctggagaaagaaaaaagagggggcggcagtctcaaaaagcagactcttggggccttcccaaaagggatgctgaagaattcaat

SEQ ID NO: 116914 - DNA, 356 bp, Glycine max
  Clone ID: PAT_MRT3847_76585C.1
cgtgcggcgtttttttatgaattttgttgactagactatcagttattttgactggccttcccgtaccgtaattgtgacctggttggtaacatcataattgtattctacatctcaatgaggaggaaaactacagcgtgttattacctgcactgtttggctgcactgattgccatcatactgcagaacttccaattccacaagcctattgatgctatacttcttgtgtgcctccatatttacttttctagctgccttcttcaggtacaacggcttggaccacattttgagctgtggaacttagtcgcctgccacagattattggcttgtcaagacgctacatgctatagcgggtatta

SEQ ID NO: 116915 - DNA, 431 bp, Glycine max
  Clone ID: PAT_MRT3847_76586C.1
cgagctcaacccacttctgctagagaacaacagatgggggccagtatggatgcagagaccgtgacagcaactgctctcactgtaactctctcaccgttttttccgctttgatggaacaggttggtaaaactcatgcgtttttaagcttccattccatatcattttcaattttagattcttttccctctactctgcattacgagaaggttgataagatatgcgatggaacatacagcgtcatttacaagggtcgctaccgttccaccaactagaccatcttcttgaataaattctcttgcagcatgatgatgatggggttcccagcaccgccatcctcgagatttctctcttgaaagatattcatctcatgaacattgttaggttgtatgatttattacttgatgtgaagagtttgtatcttgttttcgagt

SEQ ID NO: 116916 - DNA, 170 bp, Glycine max
  Clone ID: PAT_MRT3847_76587C.1
atcaatgggtagaatataaaactgtaatctttattcagtgaaagaaagatggaagcaattgccttgttaatttgggtgtttgctttcacattctaaacgtgcattaacattaaaacccatgtcaaagaggatgaaactacgcgcggaagcaactttcagacgtggatcaa

SEQ ID NO: 116917 - DNA, 787 bp, Glycine max
  Clone ID: PAT_MRT3847_76588C.1
atattcatcatggtatgaatcaatattccttacaactaactaaaaaacaataaacagttacgttgaaaaaagaagcaaataagcctcatcgtcctttgtacaaattaacagccaaatcattttcaaacagtggatttccttaaggagagggctattttttttcctttctaaagagagatttatatttagaccttaagaagagggagggcatggaagagattgacaaggaacaaagcttattgtgggagattgcacacttatacaattcatatccccacaacttaaccaactagagagactcaagtgttctattttctattagggacttctactattttgtaacttatcttcatcatcattaactcttttgttttggattgatcagcaagaaacaaaacaatcctaaatcccaaaatgtttgtcattatcaaagtgacgagtctcttaattagaagtgtgatatgcatctcctgtggcgtgcagccactgttttcctcttctgtttgttttcctctttccaattcttggcaatgtcatgagccacattaattgcatccaatgatgcaccagaaagacctttccttgtgaaccctacagcataaagaccacctttgcctctccacccatttggaaatgggttccttggagtcccatcactggtaaaaaaatcattctccttcaaccatgatggtacatgcatgtgatacccagttgttagaaccacactttaagccgaattccagtcaaaaactcatttcactaattgcacattattatctacatttaa

SEQ ID NO: 116918 - DNA, 1369 bp, Glycine max
  unsure (1)..(1369): unsure at all n locations
  Clone ID: PAT_MRT3847_76589C.1
ccacgcgtccgcttgaaggttataggaaaactgagcgaggggaaggcatctcatgttccgtatcgagattcaaagctaacccgcctcctgcaatcttctcttagtgggcatggccatgtttcacttatatgcacagtaactccagcatccggctcgagggaggaaactcataataccttgaagtttgccagcagggcaaaacgagttgaaatatatgcgtcacgtaataagattattgatgagaaatctctaattaagaaataccagagagaaatttcagtcctcaaagtagaacttgatcaactaaagaaggggatgctagttggtgtcaatcatgaggagattttgaccttaaagcaaaagttagaagaaggtcaagtgaaaatgcaatcaagattggaagaagaggaggaagccaaggctgctcttatgagtaggatccagaggctaaccaaactcattctggtttcctcaaagaatgcaattcctggatatctaactgatgttcccaaccatcagcgaagtcactctgttggcgaggatgatattgaaaatgagagtcagaaagattcttctgcagtgtcatcagatcagtttcatgatggtagacataaaagatcatctagtagatggaatgaagagttctccccagctagcagtactgttactgaatcaacacaagctggtgaactgataagtagaacaaaattgacagtgggtgggatgacaatgtctgatcagaaggatctactggttgaacaagtcaaaatgctagccggagatattgctttcagtaccagcactctgaagcgcttgatggagcaatctgtaaatgaccctgaaggctccaaaattcagattgagaacttggaacgtgagatccaagaaaaaaggaagcaaatgagggtgttagaacaaaggttaattgagactgaagaatctcctgtggctaattcatcgctagttgaaatgcagcagacagttacaaagttaatgactcaatgtaatgaaaaggcctttgagttggagctaaaatctgcagacaaccgtgtccttcaggaacagctaattgataagtgttctgaaaacagagagttgcaagaaaaggtgaagcagctagagcagcaactggcggcaattaatagtggtacattgtcagtgtcttctgaacagtgtgcatcaggagaaaacattgatgacttgaaaaagaaaatacaatcccaggaaattgaaaatgaaaaactaaagctagggcaagttcacttgtcagaagagaatagtgggttgcgtgtgcagaatcagaaactctctgaagaagcttcttatgccaaagaactggcctctgctgctgctgtggagctganaaatt

SEQ ID NO: 116919 - DNA, 1617 bp, Glycine max
  Clone ID: PAT_MRT3847_7658C.1
ccgcctgggtgttttggccgcaggagccaaaaccgatcactgggaaagcgaaaattgttaccacgaagattctgttgtcgaaggaggaggaggaggaggaggaggatggtttgcaaagcctgttggctgagtgggtggagcttgtgcaacctagcagggtggaatggatggatttgctcgacaaattaaaagagcataatcctggtttgtactttaaggtggctgaaatggtattgactgaagattctttccaaacacatgtatctgactactctaggcttattgatatctatgctaaagagaatcgctttgatgatgttgagagaatgttaaagaagctgaatgaaaatggtctacaagtagatgcttcaatagccagtactttggtcctcatgtactgcaagagaggtgatcttgcccatgcaaaagaagcatttgaagtcttgacgagcctgggcttccaaccagacgcacatgtctacaactcaatgatcacagccttggtgaataatggccagcctaagttgggtgagaaattgatgagggacatggatgatagacttattacaatcacaaaggacatatacatggcattgctccgttcttattctcaacttggtgatgttgcaagcgctgaacgaatttcaacaactatgcaatttgcaggaatccagcagagtacggataaggagacatgcaccctgcttgttgaggcatatgcacttgccagtaaccctgatcaggcaagaagccattttgactgcatgataaaatctgggcatcagcctgatgataggtgcactgctagcatgattttggcttacgagaagaaaaacgacttggacaatgctttaaatcttcttttggagttagaaaaggatgggtttgagcctggggttgccacttattctgttcttgtggactggttgggtaagttgcagcttgttgatgaggctgagcagcttttaggcaaaatagctctgctgggtgaggctcctccctttaagcttcaagtaagtctttgtgatatgtatgcaagggctggaaatgagaaaaaagcccttcaaagtctaggcgttctggaagctaggaaggatgaattaggtcaagctgagtttgagagaattataagtggccttattgatggtgggtttcagaaggatgcacaaagaatatgtcagatcatggaggcacagggttttgatgcatcaagggttaagtttaaactttcgaaacctgtctccagagcaccgagtttgagatagtttagtggtcatgagtagggccattttagtctttctctgccaagtgaccaacaaatacgctgccttattaaggaagcatggtctgctggatttatcataccatgtaacaaataaggatgagtttatgcttgtcagtttttcagttgtactgtgtttatgaatttttcctttgttacaattttaccagtgctcagatcactgatttacatctcttattttgaactttggtcatctgtatatacaaatatcttttgtgacatgttcatggcattttctatttaatgtatacaatatttttttggtgtttgtccaaaaaaaaaaaaaaaaactcgagactagttctctctctctc

SEQ ID NO: 116920 - DNA, 793 bp, Glycine max
  unsure (1)..(793): unsure at all n locations
  Clone ID: PAT_MRT3847_76590C.1
aatctcggctggttttctatcgacaaattgcctttacactgtacattgcaggatcattctttaagttaagaaaaatgtagatcaaatataaaaatatattgaaaggccatttccaagctgtcaactgcaaaatttcctgttgagcaataaattaacaaataacataacttcatttcagaggggccaaattaccagagttacaattcaaactgttacgatgccaaatttgctgcagatcagatgaatattgctatcttattcgcacgtatacaacaattgaaccttgaagatcacgatcaaccttgaagtgagcattaaaaaatcttttttcctctttataatcaagtgaaattaaaaggttcttcaatttttgttcttcagaatcaaataaaacaacgtggctgggcaaagacttgttttttgcatattctgatacaaaaggaatagggtccatcaagaaacggtcagactcatcaggaactcctttctcttcacttggtgtgcaatcgagatccagcattggcaggttatgatgcagcatcgaatagtagggagtggcatggcaaggcgttaggaatagaattcttttcacttgccgcagaagagcttccctagcaaggtggttcatggcatcctcgggtcctctctgatgaaccttgctcatgtacaaagccattggaatattggtagcaagcaaaaataagatagcagctcccatattgggaggaaatctcgcatgnnttttatagatttttttctttattctnnncatnnncgggatcttcnatcacag

SEQ ID NO: 116921 - DNA, 318 bp, Glycine max
  Clone ID: PAT_MRT3847_76591C.1
cgtcctttttttttttttacatgcaacaatacacctacggaaaacagtagctgtctacatattcacacctttgcccaaaaccagttgcatatttgatgcaaaacattgtacaagggttcctgcagggctttataaaggcccgaggagctcaggcaaggatacacacaggttaccaggattactacccttcgtgggggtgtggaaagaaacatatattcgtagcaacaaatctagactaaagaacctgcacccccggtattatcaactacctttgataaaaggcacaaagaatatttttaaccctaaacttaccacatt

SEQ ID NO: 116922 - DNA, 405 bp, Glycine max
  Clone ID: PAT_MRT3847_76592C.1
ataaattggtttttttttattttggggacaggggggaggaaaggtgggaaaaagaagggggttaagacggaaaattaggaggggaccctgggggagaaacacatttgacaatagagggtggtagaaaagtatggggtaaaaagaaaggaagctgtatgggtgggagaaaagattttagaggaaaaatgcaaaaaaaaaaaggagactgaagaaaaaagaagaaagtttgggggggataaaggaggagctaaggaaaaaaaatagggttgggataagtggttagtttatagaaggaaaaaaaggatgtgccaaaggtaaaaaataacttgtgaaagggcggggaagagaagttaggaaataggatgcggaagtgttttttttttggaatataagaaagggcaaaaa

SEQ ID NO: 116923 - DNA, 218 bp, Glycine max
  Clone ID: PAT_MRT3847_76593C.1
gggaatggacgcggggacagtaaccgttgagtacattcccgacgggtgtttggcttgtattttcaagtttgttcccggcggttccttctaatgtaaccgttggctcaaggtttcaacctcaaaatgcctttcacttatgttttcataaaataactttcatcaattttttttcgcttcgattcctcgtcctttggagctcataaccatgatagtgtcaa

SEQ ID NO: 116924 - DNA, 412 bp, Glycine max
  unsure (1)..(412): unsure at all n locations
  Clone ID: PAT_MRT3847_76594C.1
gaagttgagcaaaaaggggcaataggaacatagctttcaccttatcacttcttacaatatgaaattgataacttgacagaactggagatccacggtccagagaattgatcatgcaaagatctaatttttactacttaccaattgaaaagattactactcgtgcaattgacaaacatgaaaacttctgcaccttatcacttatcctaccaacatggtgataaataatggctatccatgggatggactattcaaaaaaaactcaccagcgtatggtactgctcagtatctgaatatgaatgattcctatagaacgaacatgcatttatgaaatggaagcaacactatcctacctacagcaataaggatactctaattcacaattcccaatgtngatataggcaagttaaataat

SEQ ID NO: 116925 - DNA, 300 bp, Glycine max
  unsure (1)..(300): unsure at all n locations
  Clone ID: PAT_MRT3847_76595C.1
ccaaccacattcttattaattatcacactcccaatattatttctaaatacaanttttcctcccttctataccaataattttccctacaaacaataccaatattcaaccctatcaacattcatattctaaaatttatcccactatataccaaacttctccctaaaacatattaccaccaacattcttctctcaaaaaacaccttattctatcacaccttaatcccataacctctcatcactcaaatatccaaaacatcctcttaattctaaattaactctataactatttttacatttctt

SEQ ID NO: 116926 - DNA, 584 bp, Glycine max
  Clone ID: PAT_MRT3847_76596C.1
ataacttgagggaactcaactaatctaatattttagatagagggtccttatgactagtatcctcaccattaacactagatgaatcatgactcatgttagttcttaagttatgattctttcttattggggatttgtaaaagtaggataatctttctgagacttccaacacacttcctaaaattattacacactaatgaaagtagggtaacctattggagacttccaacacacttccaatgaaaggtttttttgttataaaatttgaaagcaataaaggtaaacgtacaagtgtccaattacaagtaaattgtcaattacaaaattacaaaaagtcctcaagtttgatggttgttctctctttggtatttcactcaatttaaagtatttctatagcaaatttaatcgatggaaattctaaaaaaacatgttaacaacattcagcacaagacatgtgaggaaatacatggaaaaaaaaatgaaaaaataacaatggaggaaaaggtaaagctgaaaactaatgaaaatttaaggagcgcctacttgaagctcttgtactctgatactacttgatggaaagctgcttg

SEQ ID NO: 116927 - DNA, 3004 bp, Glycine max
  Clone ID: PAT_MRT3847_76597C.1
acgcgataaaattttttacaatctctatccggttccaagcatacaattacaaacgggggtcaaaaccataaaacggaaaaataaaaactacaaaggaaacaaaactaaacacaatagtgtccgtaaaaaatggttgaatttccaatggcaagtatagaacaatctattctctctctctctctttttttttttttactttgaaatacttcaaattcattttgtctcggttaattgtgggacagcaatatattgctacaatggtgttgccacatttttatcttgcaattgtggaagcacaggtaggatcatctttgtttgaccaactttctttaattcgacaagcctgcattggcctttcaatttggactacttctgcagcttctttctccaattgcctacaatatcttccaaacgtgtctacactaaactgaagcctaaaatctatgccaaatagaaagctcatctccaacctgtttaattcagacgtgctcactcctccaacttttgcatagtaagcattgttgtagaatgcgtcatctataaactttgctgctagcatgatgcttgttatcagaagccggtgcacattaagtgaagtcaatttgatttctgtgtgttgaatgaatctgtccacatatatgtgtgccacgacaaagcatgatgggctgcaacctgagtacttgaagatacgatcaatgtactttcgaacgctcagagtaggagctcttaaaccgtgaaatactgtaactacatcttttacgtgctttgcctccaatagcgtttcgtttctctgaactgatctctcaagaagtgaagagagaagtgataaaacccgaggaactcctactcctttgtctgattccttaagccccagcgaaaggtatatatctgagattacatcctcggtttcaagagcaagactccccatatccaagaaaacaaaaattgtgaagttcttcgaagtgatgatgactatagcgttgtggcgggtgtgtgtgctgattcttgttcttgtacataagggtgtgaggcagggaaacagtggtgctgtgaacacagatagatcatctctgtttccccacccacaccattctctgtgtgcagaagcagagcaacagttgaaagatactaatgttgtgtctgtctatgatgtgttgttctgttactcacataaaacgatttcttcttcattcctctttctaccatagggtctctacaatcttccaaagtgcaaggaaaaattgttgtttgtgatagaggagggaatgccagagttgaaaaaggtagtgcagtaaaacttactggtgggttgggaatgattatggccaacactgaagccaacggtgaagagcttcttgcagatgcgcatcttttagcagctactatggtgggtcaaaccgcaggagataagattaaggagtatataaagctgagtcagtacccaacagcaacgattgagtttagaggaactgtgattggtggttctccttctgctcctcaaattgcttccttttctagccgtggaccgaaccatcttacatcgcagattctgaaacctgatgttattgctcctggtgttaacattttagcagggtggactgggcgtgtgggtcccacggatttggacattgatcctaggagggtcgagtttaacataatttcggggacttctatgtcgtgccctcatgcgagtggcattgctgcgttgcttaggaaggcttatccagagtggtcacctgcggcgattaagtctgcattgatgaccacggcttataatgtggataattctggggggaacattaaggatcttggaagtgggaaggagtcaaatccgtttattcatggtgctggacatgttgatcctaatagggcacttaaccctggcttggtttatgatttggactctagtgactatttggcgttcttgtgttctgttgggtatgatgctaatcagtaatttcggttttcactagagagcctgcaaactgaaagtgtttgtgaagggaaagtggggaggactggggaggttggctagtcccggtgacttgaattacccttctttcgcggtgaagttgggtggggaaggtgatttggttaagtatagacgggttgttacgaatgtggtatacaggttgatgttgtttacactgttaaggtgaatgctccacctggtgttggtgttggtgtttctcccagcacgcttgtgttcagtgacgaaaacaagacgcaggcgtttgaggtcacatttagtagagttaagttggatggttctgagagttttggatccattgaatggactgatggaagtcatgttgtgaggagtccaattgctgttacattgagtggtgcatattcatcatccatttgaatgaattgctgtggagacacgtctttctcaggctatggatcattggatttagtctctttgtaatttttatcatgtttgcttattgtacaaacgacagaataacgacttcgaagtagttgatgaagggcttctgataatttggggaaatcagatgtgatttttaagatagttggatcagattattgtggtttcattacacgtctcatttgattgatattaggttatgtcatgctaagcgagatgtatatggcagcactgcagctagatggatttgccgaaatatactagggacatttgaatcttgcaagccttttctggcttatctctaactgatgtcaattggggtcggatggagcggtgaaccctcatcatcaatttgaattgcactcgggtgttgctgtggaaacacatcattcattcacaggtgatggatttagtcaagtctctttgtaattttctgtaatcgtattgccttattgtaaaaactataaaatacgttttaggtgtgctctttcttgcaagtgtactcaggaacaactttgaagcagttgacgaaggggttctaataaattattgaactaaaaaataggagtaactaaaacgtaatgatataaaaaaaaaaaaaaaaaaaaagac

SEQ ID NO: 116928 - DNA, 557 bp, Glycine max
  Clone ID: PAT_MRT3847_76598C.1
gagtcaaatcggtcaaacgcagttaataatttaaaatattaacagcgaaaaaccaccacaaaatttgtttcagttcttcccttctccttcctattcttctccccacacaaacccaaaaaataaaattctacctaaatttctttccccaaaatcctaactccccagaatttcgctacgccctctatatcctctccaaccgcctcaccccgacactgccgccgttgtcgactcacgtcgcctgggtagcgagtcaaagaagtgagtcagtccgactcgacggtgattcttttctcctcaggaaccattgggaacttgaagggtatgttcctcatgcacagcaactttattgcactaattggagggttctatcacctcagaaacgtggtggatggtgacccgcacctggtgtcgctcttcacgtaacccctgttacacgtgttcgggttcttcatgctggttagagccattaccatcagggagacgctcgtcttcctgcagaggttcgacttcgaagggatgctcaaggccatagagaagtatagaatcacctacatgct

SEQ ID NO: 116929 - DNA, 676 bp, Glycine max
  Clone ID: PAT_MRT3847_76599C.1
agcatgatgggctgcaacctgagtacttgaagatacgatcaatgtactttcgaacgctcagagtaggagctcttaaaccgtgaaatactgtaactacatcttttacgtgctttgcctccaatagcgtttcgtttctctgaactgatctctcaagaagtgaagagagaagagataaaactcgaggaactcctactcctttgtctgattccttaagtcccagtgaaaggtatatatctgagattacatcctcggtttcaagagcaagactcgccatatccaagaaaataaaaattgtgaagttcttctaagtgatgatgactatggcgttgtggcgggtgtatgtgctgattcttgttcttctagataagggtgtgaggcagggaaacagtggtgctgtgaacacagatagatcatgtctgtttcccctcccacaccattctctgtgcagaggcagagcaacagttgaaagataatgttgtgtctgtctatgatgttttgttttgcttctgctgttactcccacataaaaggatttcttcttcttcctttaattaatcccacaacctccttcctctctcaccagatagcccccgtctggaatttcaccacaccagtcatatatcatgacaaagccagtaccattcatgttccaggaaactatttttcggacggcgtgg

SEQ ID NO: 116930 - DNA, 611 bp, Glycine max
  Clone ID: PAT_MRT3847_7659C.1
gcacgcatacgcccgctcggaattcggctcgaggtttagtactcaatgtcggtcatccttaccctgatgagcctcatactttatatactgtcagtctgggctcttgtagtatccatatcagcagacacatcatccatttcacaatcccaatccctcagccttggaagaaccatcgtttgtacacatgagcctcagaacctggattcttcaatcattgaaatccacacagacgctacctcgggatttggttcacgaatattccgtctcaaaacattgttcgggtcgcagactgtggcaacccaattaacgactcctttgccatcttgagcctaaacagctctggccatttggaccttacacacaacaacactgttgcttgctccacatgttctctaagagaaacacagaatgcagtggcctagctcttggattctgggcaatccgtgataacggacgaaaacgaagtgattcaagaggcatatctgcggcacagttttgattatccttctagtacaaggttatcaggaatgaagattggatggcacctcataagagatctcagtattcaccctacagcttgtaagagtgatgatgatccaaccgcgggagac

SEQ ID NO: 116931 - DNA, 238 bp, Glycine max
  Clone ID: PAT_MRT3847_765C.1
cttgtttgttttcattgcttgcttctattattgacttgcttttctctagtcttcatggtgctcgctggtaaacttagaactgaactgggggtgaaagcattcgctaccaaatggttcaccctttaaccacgcaacttcaccattgttaagaacctttgggaaagagggcatgaaaccatgctgcatgatggtgtgaccggcaacggggttggtaattgggttaaccactggacttatg

SEQ ID NO: 116932 - DNA, 3626 bp, Glycine max
  Clone ID: PAT_MRT3847_76600C.1
cggatctgaccttacgcgaaagaagaaccctggaagagagcgatccataatccattgttaacaacaaacaaggacacgcaagacaaaagcacgaaactcataggtatacacagctatctcttgagcttcttagcaaagagaattttgagcagaaacttggtggtggtgttggaagaggaacaatacatcgtccctttggtattccggcaaacccagaatccactgttggcttggatacaccgttgtgtaagctgtgttgggattttaaactttcaaactaatcagtacctcagcttgaactggttgcaggtgggaccaatatgatgtgcaagtttggtcgatatagaacttgtccaaaaggttgttcggatctgcaagggtttcttgccgtcaaagtaattgggagatcactcagtcatcagccttctgagttgtggctaaagatggtggaagaattgtcacagcattctatacttgattctaatactgaactacttacatgcctccaaaagatcttgaatgttttggaagatgatcctgtcatcaaagtgcttcatggacctagggttatttcctgagcagaattcctgtacctctctcattgatatgtgggcagagtcgtgcagtctagatgacaatggtacagaggcaatgtccatcatcaaaaaattagactccatgaatctggctaatgtcttggtagcaaggaaaaatgctagtgacacatacaattactactacagtaaccactacatcatccttcatgaccttctgagatagcttgcaattaatcaaagcactcaagaagcagctgaagagagaaaaagattgattattgagataaatcaaaatacaccacatttttggctctggtagaagaaaaaattgcttgatccccaacagaccactgctctaacattgtataaatcaactggtgagttttattttttcataaaatggtttcaagaatgttataatcaactggagatttatattttttaaaaaaatggaagagtcatctcttaaacaactaatgtcatatgggttgtatttgcaaatgaaaattgctgttcagcttggcttacaattcaaatagttctagttgaggttctgtttataaatcttcgaactaaacagtattcctttccagacttcaagaaaggaatgaataagcttaacgttatggtattgataaatattaaaaactaatctccctacatttgtaacatggagctacttgtttattacattcacatgaaaagtccaaaaccctatcggaatcttgaagagttaattattgtaaattataaagttatcgatggattcatctaactggagtctatgatatcacctttttaaaacaagctcagcattatttcttgccactatctcactgtagagcagcaagaaattggaaatttgatggatttggaactcttaagcctcagttcctgtactgatttggaaggtataacagcctctattggtagtctttcaaaactacgagttctggacatctcaaattgcataagccttacctagtttaccgtaagacttagttcatgtgtctattctggaaaatctctacatgcgatttgatgcaatgtctaacttatccttcttaatagctcaatttgtgtatgtgacaatcttagtgcaatctaattagctaagggctttatccaacaatatcgagccaagcctactcaaactagatataaattcatactctttaagtaaagtttccaagtattgaaagctgttacgagggaggatcaaacagatatgtcaaggaagcatttccaaactaaaatttccattcttaatttagattttcgtaaagttgaaggtcgctaaagaagtggtatagaaatttgctccaaatattgtattcatgcagatgcagatcgatttttattgaatcaatcaaaaaactaattgaatgtttcacaatgatctggtgtgccatcaattttatcttttctaattaatctgcaatcatgtgtcatctctgcaaacatactctcctgatagagagactttaagactccattgttcaataacaaaattcttgttgttctagtagctatttacttgtttttttataaaacaatcaatttcttttggatcaattcatgccgttgagtgtattagggactggtgtattttaattcagcaagaattaaagagtttcatacaaatcttccatctaggagcattgtggtagtttccatacaaaaatcttgattattttggaaggtataatgccgttgagtaatttatggaactcagtatttttattaccgtagaacagaagatatcaatcatgctggtgtaagagagaaaatttatgaacaggtcaaacatggatgattttgttgttacaaggtatggtggaggttcttaaatagtttgatgcattgtgtgataaatcttgtaaagaaacttatatttgaaaaacaggtaaggattccgttcaatggcagtgcaagagaaaatttatgaacagacaactgaacatggctgattttcctgttacaaggtatggtggggaaaggctcgtaacttgatgagctatgtgtgataatcttttaaagccacttatcattaaaaacatgaaaaggagctctgctaaatttgttagacttttaggcatgggagcagcaggcaaatgaatgctcatgaagaaagaagcttctaaccttgtgtggaaaaatccttgtgtggaaatggagtagaagcaaatagaaaggaaggaaatgactaattggatcaagatatcaaatttctactgcttgtgagaggagaaataggaagtcattttcatgagatccacctgaaaatacttcccttttaattagtacaaatatttttatatatataaaaactttcttttcttctttttcgcagtcaggttgtctttcccaagagtccatgatcacaaaaagcaaaaacaactaaatacagttttcacattggattatggtaaaaggaaacatcccccttattaatcagtgctgaaggggatttgctgttaaggaactcatcaaacacaaaacctttatgaatatccaagttcaacaaagagattcataattttgtgatcagctaagatatccatccttttatatatccatcaattggatggaagaaagacagcttgagtgtcaactcactatgtccgaagcatctaatggtatgacataactgagcaatggttctggggtctaattcaaaattctagtagcaatgtgcttgtttgtctgtaaaaagcttgaatattttggaacataaggccattgagtgttttagggacctatgtatttttattcctaaagaccagaggatcccgatcatgccgctgcagcagagaaaatttatgaacaggtcaaactgaacatggctgattttgttgttacagggtatggtggcatgctcttaaataatttgatgtgctgtgctataatcatgtaaagcttaagccacttataagaataaacaggatacaatattttatttgtcaccttctcaaaaacgcccaacttgaagattattgtagagatattatttgaacactatggatatcaagtgcccgattttcaaagtgatgaagaagcagttaagcg

SEQ ID NO: 116933 - DNA, 826 bp, Glycine max
  Clone ID: PAT_MRT3847_76601C.1
ataaaaaaaaatacaatattttataataaaaaaatattcaaccttgtacaattgtaataacaaggttttcaataaaaaaatttaccttcctccattacttttgttgaatttgtaatgggaagctgaattcataaataaataatatatatacctcttatcaatgtagcacaacacctcaagatttcagaagtataatgacatccaaaaatttaaattacaaacgagcaacataacacgaaaacagaggaaggtcgcacaaactgacctcgagacctcagtcaacaaaattatgtgagccggcactccaacatgaacatcaatagttgtcactgtacaaaaataaataattatcaaattttaagctgaaatcctcaagagaaaacaaaaaacttcccacgtggcgtagatcggctccttctaaattcaggcaatgtagtattggtgccctccttaagattgcgacctgtaccatgtagtaaaattttgttttcaactttgctggacaataaaggctcagctgcttgcattattcctcttgatccaatgttctgagaattcctagagatgttctgatgtatctttttaatatttacaacaccattgactgcagactccatgaggcgtatatcattttctgactcaaaataatcgcttttccgaggtgcctccatggtcatttctcggccaatttccatgtcagaaccaggtatcatatcagccttttgaatcctaaagggcaagtgctgaaaatgcttaaccttggccttactttcagccttgtttttcctagtaccaccttgtcttactgaaccaggagcttgcttga

SEQ ID NO: 116934 - DNA, 325 bp, Glycine max
  Clone ID: PAT_MRT3847_76602C.1
ggcaggggctactttttttttatttcaaaacaattgaattttaaagaacagaacacgcaaaagagcaaaaatagcggggcacggggcacctggaaagaactacactttcacgcaaacgagattgggggccttaattagagggagcaggcacaaaaaaaaaaaaaactagggcataatttgggtgggaataaacaaaaggggctagggattatgctttaaaaaaacattaacacatagcatgtgcacaattggatatatcatgaaacgcaataggggtttaagtgacaaacagacatggggagaatattatgcctcgagccgaaat

SEQ ID NO: 116935 - DNA, 288 bp, Glycine max
  unsure (1)..(288): unsure at all n locations
  Clone ID: PAT_MRT3847_76603C.1
agccccaaacgccccggagaacggnnaagaccctgancgaccnnaagagnccccaacaacgacanaagacacaaaaaacggaggggcccctccagaagaggggtgggagcagagaaaaaaaannagaagaagaagaagaccacnagaaaggggggggggggaagacccaaacgggaagagagcacggggangngganagnggcagcaccagccacacgcacaaggggcaccaccccgggcaccagggggagaagccaagcacccacgggacacacggggccaagggaa

SEQ ID NO: 116936 - DNA, 306 bp, Glycine max
  Clone ID: PAT_MRT3847_76604C.1
aggtacagatgatcagaagacgtcaaacacacagcaaatgtccatgctataaaaggatagataatgcaaggtcactctgcatgcaaggactactggagatgcatgcagcgggacagtagccgggacaaggacaaaatcctagacctgcaaggttacccagaggacccatgccgcaggcgcttgcacgaggctgtattctagacatgtatagcctgctctatcaaaagggcttgaggtacgtcaatggatgctaagcagaagccaaaggatcttgctatagggccataggaccgaaccagccatcgg

SEQ ID NO: 116937 - DNA, 151 bp, Glycine max
  Clone ID: PAT_MRT3847_76605C.1
gtctaccaatgtgaaaggcatacttaaaggacttagatacatatcccaaatattcgaagagaaagaagaagaaattcaaatcgtgttgccaactgatgtaaagcatgtagcacatatctgatcagatgatccatcagcagatgcaccaagt

SEQ ID NO: 116938 - DNA, 853 bp, Glycine max
  Clone ID: PAT_MRT3847_76606C.1
cgagcagaaaacaaaggccaagggtagaagacttcaaattatttaaagcaattattttttattttttagaaaacaataaatatttggcccaattttgcccctatcacaacaatcttcctgcataattctatgtaccaaagacagacaaattcaatcattagttatcattttcttttctcaaacagaaacatcaacaaattttttgtgaagcatatggtacaaaactaactattgaggaaataataataataataatcttactacaaaagaaataagtaaggcaaattacagtttttcaggaactccaataacttgttcttcatacacaggcacatgttggctcagtgatgcagcttgtagaataaggattgcaggcatgtttgtgcataaactccaaagatagaagtttccacacaagcccctgaataaactattttcttcaattacagccctttctccattttcatttatcatcatttccctccaagtcatcaactgtctccatcggctcaattatagataagtaggtgctgtcatcgggagtgatgcctttacttaccatttctttgaggagctcttcagcatgctcaccttcctggtttttgcacaagccttgtataagagcattgtaagtgagaatcgtaggatcaaatcctgtagtcatcatttcatcacgaactctaaaagcatccttcatatcgcctcttttactgtaaccactaatgagtgtattgtaactaatatgatcaggtttgatcccccttctcttcatctcatcaagaagttggcgagcttcttccactttcccctccctgcagtatccttgcatcaaggtgttataagtgatttcatc

SEQ ID NO: 116939 - DNA, 349 bp, Glycine max
  Clone ID: PAT_MRT3847_76607C.1
tttaatattctttttccaagtttcctctcaaatcaatcaaacggtttttaacaggaactgtgattaaacatacccctagatattaaaaccaaactttttccaatcccttatataaaaattctcagattattaaacaacacagtaaccaactttactaacttttcaaatctttctattaaaacctatcgtttattaaaattatcacttcaacacttatattttataatccttaaacatataaaagccccaccttcactcaatattataataatctaataaagatttattttctactcaacaccacaatccaatttctttttttttttacaaaattaaattcataaatttt

SEQ ID NO: 116940 - DNA, 203 bp, Glycine max
  unsure (1)..(203): unsure at all n locations
  Clone ID: PAT_MRT3847_76608C.1
cgtgggctgacgcgtgggtgtatagtcagaggcccatgctttcctttcccccggaaattatacggngaattgagaagagttgaacatggtgatcattctcgcaaatcagctgcacaggctgtgatggcacatcaaagcacctgaggaaggaagaacagttgtggagcatgattaccttccatacttttattcccgttcatttg

SEQ ID NO: 116941 - DNA, 893 bp, Glycine max
  unsure (1)..(893): unsure at all n locations
  Clone ID: PAT_MRT3847_76609C.1
atctgcgtccgctccctacttaaacctcatatgaatggtaagaatatcccggattttttttattgggtttgttgtaattctgttgttgagtagaatattaagaaggtcgcacacaatgaaaaggggagaaaagatatgtccgttttcgttttcaataggaggaaccttgtcctgtaaacaaggccctgtgcatcccttacctctgctcttatcacacacacacaaaggtcttatatattccaaaccaaatcaatagctaaacacttacccttttgcttaggccagtcgaaactaaggtacaaacatggatatagaactccctgctgcaactgccaatgaatcacaacaacaaaagtttgctctacctgtggattctgaaaacaaggccactgtgttcagattattttccttagccaatccccacatgagagcttttcacctatcatgggtctctttctttgcatgcttcgtgtctagctttgctgcaccaccccttctccccataatccgcgacaacctcaacctcacagccactgacattggaaacgccggcgtggcgtcggtctcaggcgccgtcttggcaagaattgcgatgggaacagcctgtgacttggtcggaccgcgcctggcctctgcatcattaattctcctcacagcaccgtttgtgtacttcacatccatcatcaactcttccacctcttaccttctagttcggttcttcaccggcttctcgctggccacatttgtatctacccagttctggatgagctccatgttctctgctccggtggttggttcagccaacggattctctggtgggatgggaaaccttgnaggangggctacccagctcatcatgcctctagtattctccctcatccgcgacattggcg

SEQ ID NO: 116942 - DNA, 530 bp, Glycine max
  Clone ID: PAT_MRT3847_7660C.1
gccttgtcctttttttttttttttttttttttttttttttttttttttttttttttttttttttttttttttttttttccccaaaaaattgggggggtggaccctaaaagggttataaaacttttttttttatccataggcaaaaagaaaacaaacacattttggggggtgataaaccgaaaatccgggggcgggcaagggcaacatttttttttattggggggggatattgattaagggggggggaaaatcaaaaccttttggaaaaaaaagggaagggggggtttgttccctttggaaaggaaaaaatggttttttccggaaagggggtctttttaaaaggggggggagggttctctgggcaaaaagggtctaaaataagggggatgctttttctttgaacttgaaaacagaaaaaaaaaaaagtctggaacttttgaaaatcaaaaatggggctgttaagccccaccagtgggaagggttaaataaaagccctaacaggggggggaccacgtattctcaagccaatt

SEQ ID NO: 116943 - DNA, 379 bp, Glycine max
  Clone ID: PAT_MRT3847_76610C.1
tgcggccgccctattcttctttttttttttactggccctcaataattcatatatactaccaaaaaaccatctgcttaaggcaattaacagatgatttttctgtacgcaccatacttaactcctctaggatctaaaagctactttggctttctttatacctaccaaaccgtatatacctatctacatactaaaccaaccctccttcttagtgaaaaatttagtaaaactaaccctgaaacgtataaaggggacaataccatgttattattgccaaaccgaataccatcctcactagggagtaaggaccctactattattcacccggtaattaaagtctgtgacctctttatcatgtgatggatcgggattttggactagc

SEQ ID NO: 116944 - DNA, 526 bp, Glycine max
  Clone ID: PAT_MRT3847_76611C.1
gttggtcgaagaggatggaaggctcatcttcgacaaggtggaaacggcgtggccagaaaagcaaagggtagagaaggatgaagtgtgtgagagagaggacaaggaaaaagtgcatggtaaatcaagaattaaagggacagaaaaaaaaaaaaagagaaaaaatcacacccatggattcaaaatttataaaatctaacgatgtacttctgcatggtgcgaaaggtgttatgcttgccgtctccaaagaacctaaaagttatgttaattttttcgccacctccatctttctaccctactcgcttctattttccctatcctaacttagggtacgtatgaaggaaaaagcgcagggaaagaaacatgcagatatacaaattaattaaactatgacaatatgtttccaactttcttaacgaaatgaccctttaatacttgttacaccttttaattaactaaagaattcttttcctatttacttaaatttgtgcatttactttaagatttattccctttgtcctcttttatt

SEQ ID NO: 116945 - DNA, 921 bp, Glycine max
  Clone ID: PAT_MRT3847_76612C.1
tctcgtgcgagaatttgtgttaccactcatggcagagcttgagagtcctaatgttatgcctaagcttatatcatttctctcatctctcctcaaaagggtagctgaatctaatgatcttaaccagcaacaactcctacaccaaaaggtctcagttttccatggcttgactcgccccaccatctcaattcaaagctaccttgagagaattttcaagtatgccaactgcagtccatcatgcttcattgttgcatacgtctaccttgatcgcttcactcaaaggcaaccctccttgcccatcaacttctttaatgtgcaccggttactcatcaccagcgttatggtggctgcaaaattcatggatgacttgtactacaacaatgcttactatgcaaaagttggaggaattaccacaatagagatgaactttcttgaggtggactttttatttggtttgggtttccatttaaatgtaacccctggcaccttccaagcgtactgtgcacatctccaaagcgaaatgctgctgatgcaaccactgaattttgcagattcttccttaagtttaggaaaatctctaaaggcacatttatgctacaatgaggacgaatcttcttcccatcaaaagcaacaacaattagctgtttgatttcttgcattacctcaatgcatgtaatctagctgtagatgtatgaacctattatagattttcaaattaaattattttggtcctgctctcttcttacttctttgtgtctctaattagtaaaagaaaatttctatttttctatttctgaactctggttaaattatttggcattgcacagaactacagataatggtctcttctttacagtctggctaaatgagtggtatttttaattagctctactaatataataatttattgtttctttgtaaaaa

SEQ ID NO: 116946 - DNA, 538 bp, Glycine max
  unsure (1)..(538): unsure at all n locations
  Clone ID: PAT_MRT3847_76613C.1
ggaattcggagggttggagnnnggccaggccagggcattggtccaagactcaaccttaagtgagttggattgggttgacccttacagggggggtttggcccaatggatcggatcaatccgttttgacaactataaatgtaccaacatccaaaacttaagcttttggggtagctagtttaggacaatatgtaattcatttatgtcacataattcataaaaacacttaatgactcactttaaaagcttcaagttggaaagcaacgggattttcacaatatattaagaaatacaccagcgtggttttaaggcagtgagctcgatgtaataaaatttctttgcaagtacaacttacacataaccaattgcaagtcgaattagagaaatgatcctggtccttactgaatcatacgcacttagaaaaccactgtgaacctgcaataattcatcaccaacaacaaatgaatcttatgctcttaaagtcttctagacatctactaaacatgtctgacatatataaaccttccaacagttaacatac

SEQ ID NO: 116947 - DNA, 405 bp, Glycine max
  Clone ID: PAT_MRT3847_76614C.1
aggcttttaagccttaatttctgttttttttttcctaagcattttgtttccgtatttctataccatttgcgatattaggtacataaacttacacatatctgggagtgaacgttatttaattgttagattcataaacttacacatatctaggagtgaacgttatttacttgttagattgggcttttaccaatcatgcctacttatgttaagttataactgatcatgattcgaaactattttttatttagcggtcaattctcccacgatggtagaattttattaatgggtatgtaatacaatgagtttttatctaatgcttgcacaagtacacaatcatagtgtcttattgacatgcactggggaaagacatgctttaccttgtttccatcctaaatataagcccta

SEQ ID NO: 116948 - DNA, 364 bp, Glycine max
  Clone ID: PAT_MRT3847_76615C.1
acgcgtccggttgaatgacttttttcaatcagaaaatttgtggttgctttacagtgttttgctgcttcggttcggtacagttatgaccaagtggcctagagtttgtttggagatgctttttgttgataatgtggttgggttgaggtttctattatttgaaggctgcttgaacatggctgcagcttttttcttttttgtccttagggtatttcatcaacctgcttaccgagggaagtatgttgacttgcaatttccatgtacatctattggattcaagttttctagtgttcatgttattaagaagccgcttgtgtttgagttctataatttctctgaagtgaagaattcaaagtggatgatctta

SEQ ID NO: 116949 - DNA, 505 bp, Glycine max
  Clone ID: PAT_MRT3847_76616C.1
gtgagagaattgaaagcagttgcttgttttagaagagcgacctgtaccatcttttttcttgtgtccaatctttcaggaaataatgcatgatcctcaagttgcagcagacggatttacttatgaagggaaggccataagtgaatggctggaaaatggacatgaaacttctcctatgactaatttaaaattgactcacctgaatctcactcccaatcatgcacttcgacttgctatccaaggctggctttgcaaatcttgaagttttattaattcatttatgaatgttgtaaatatctacatatctattttttttgcttgattacattgcctttctttgttgctttctagctcaaatcaatcaccatagtgtttgatgatagaggattagttgatttctattgtttatgctatcctgaatgagtcttgtacgttctgactgacctattgtacattcaaaattacaacttgagaactaatagaattttatacggagatgagttgtaat

SEQ ID NO: 116950 - DNA, 215 bp, Glycine max
  unsure (1)..(215): unsure at all n locations
  Clone ID: PAT_MRT3847_76617C.1
gtcncacagcacgcgtaacgtaagctcggaattcngctctcancctnncagangcggcnatgcncaggcgggaggtnacntttccntntaccatncncaagattgnagatagagtacncncccgngcngannntccgtggatcatcgaccaagncgtgtcnctcgnnagagcnacnatgtnggatcntacanngtnangtaagatncncagcngt

SEQ ID NO: 116951 - DNA, 1865 bp, Glycine max
  Clone ID: PAT_MRT3847_76618C.1
gaggaattcttttcaaggcaaaagaatcccagagttgcttggctctctacaccaacttgagataccttgatctgtcacattccgattttgaaggaaaaattccaactcagtttggctctctttctcatttgaaatacttaaatcttgctgggaattattatctggagggttcaatcccacgtcaacttggaaatctctcccagttgcagcatcttgatctcagggccaatcaatttgaaggaaatataccctctcaaattggaaatctctcccagttgcagcatcttgatctcagctacaattcttttgaaggaaattctcggcttcaagaattgaacttaagaggagatccaatcacccggtacgcatccggacctttcaatattttctgccttgaaggattggatctttcaaaaaatcaattaaatgggaaaattctagatagtaccaaattgccacctctgttggagtctttgtcaatcacttcaaacattttagaaggtggaattccaaaatcatttgggaatgcatgtgctttgcgctcattggacatgtcttataatagcttgagtgaagagtttccaatgataatccatcacttgtctggatgtgctagatattcattggaacaattatatctaggcatgaatcaaatcaatgacacactacccgacctctcaatattctcatctttaagagaattatatctttatggaaacaagctaaatggagagattcctaaagatattaaatttccacctcaactggaggtactatatatgcgatcaaattccttaaagggtgtgctcactgattatcatttcgctaatatgtctaatttatactccttggacttatctgacaactctttattggccttgacatttagtccaaattgggttccaccgtttcagttgagccacataggattgcgatcttgcaagctaggtccagtatttcccaaatgggtggagacacaaaatcaatttagggatattgacatttcaaattctggaatagaagatatggttccgaagtggttttgggctaaattaacatttcgagaatccatttcaatgaatatttcacacaataatctccatggtataattccaaattttccactaaagaatctttaccattccctaattcttggatcaaatcaatttgatggccctattccaccatttcttcgaggtttcctgtttcttgatttatccaaaaataaattctcagattctctttcatttttatgtgcaaatgatacagttgaaactttgtaccaattagacctttcaaataatcgtttctctggaaaaattccggactgttggaaccatttcaagtcattatcttatttggacttgagtcacaataatttttcaggaagaatacctacatccatgggatctcttcttcatcttcaagcattgctattgagaaacaacaacttaacagatgagatacctttctccttgaggagttgcacaaatctagtaatgctagatattgcagaaaacaaattatcagggctcatccctgcttggattgggagtgaattacaagagttgcaatttttaagtttggaaagaaataatttccatggaagtttaccattgcaaatttgtaacctaagtaacattcaactcttggatctctcaataaataacatgtctgggaaaattcctaaatgcataaaaaaatttacttcaatgactcgaaaaacatcttcaggagattatcaacttcattcatatcaggtcaataccacttacacaaggggtaaccaaacatatgatttgaatgcactcttgatgtggaaaggttcagaacgaatattcaaacctaaagtgttactactttga

SEQ ID NO: 116952 - DNA, 271 bp, Glycine max
  Clone ID: PAT_MRT3847_76619C.1
gaacctttgggctgatttagtgcttgctggtcgtgagaagatgatagacggggcataaaatcaatctctaccaaaaagggaagagagaaaccaaaaagttggtggctgtctcaacttacttaagtccatgtatgtgcgtacatcatcattcagtctactcacatagttattcatacctaacctattggttgctgacacataatgcatcgatcgagaaaatttcgcttcaattcaatccaaccgttacgtaacatacctcctcccagttagt

SEQ ID NO: 116953 - DNA, 438 bp, Glycine max
  Clone ID: PAT_MRT3847_7661C.1
ataaacttcgcgaaaatgtaagatatcacagtatatactatcagtgacatacattacagtacaaacatttattctttagctagctagcctcctggatcatagtatactatctatatttgactcacgaacgacacattctggcctcccaagcgcaaaataacaaagatcattattccttggatggatgagggtgacgatcgctcatctataagatggtagaacgcgccgttgcgacaacttgcatgcatgggcggcccaagagagagagattcgatgagtgaggtaacgtaagtaataatagcgatcgatcacatcattgtacgagcagaggcgtgttctttacagaaatattcatctgaacggctcacgtaacaaggtctgctcccagcgcaactataataaacaggccttacgtaataagcgtcataacatggtggg

SEQ ID NO: 116954 - DNA, 719 bp, Glycine max
  Clone ID: PAT_MRT3847_76620C.1
tcgtccactcgttcgtccacgcgttcgagcttattgaataaatattggtggaagcacacagcacacagcacaagcctgaaagttgaagcgaaagaaacgtctaacccgaatggtgtaataatatggagagggggtaattccacccaacagaagcagcgacactgacacaccaaactacaaatctgaaatccccctttgacttttttcattttgagacgcctcattcccaactttcctcccaaacacccttttatttttttttgtgagtgatttcaaagcaaacaaataaaaaaccatttaacgctctctcttattattccaatttccaaatcacaaaacaaaaattctctctctctctctctctctctctctctctgaatttatactccaatttccatttccatcgataggaagaaggaacatagctgactgaattcggaatctgaatcgtactcgccttgtctttgttattcgcactcctcgcacttcgaatccgttgctggcagctgcagatcaaaccttgtttcacctgaatgctccttctggactcgatttagatcgagttcttcgtaccctgatagtgtgggaggatatatatgaaaaacggggtgatggaatgcactgtgtgccattccaaattggtttccccctcctccaagactatatcaagggcttatgatcgccataaaagtaggatatcgaccaagcaacgtgctctc

SEQ ID NO: 116955 - DNA, 417 bp, Glycine max
  Clone ID: PAT_MRT3847_76621C.1
gctcctaggcggcggtcgcccttttttttttttttttttttttttttttttttttttttttttttttttttttttttttttttttttttttttttaaaaatataagctttttgacattttatccggggggggatacctccaaactaataaaattttggggcttttttcaaaagggtctactacaaaaaaggcttatagctaattggcaagtcccaattagggccaaaatggacaacttcatgcctacaggtttttatatatgaaggggggctccgcttggggaaaaaacctcaatggtggtagggggacaaaattttaatttacttaaacccggggtctacaaaaaggggcaacaagcttagctgggcaaaaaagggttggaagccaaaaatgcccccccaaagttgggtccccccg

SEQ ID NO: 116956 - DNA, 1133 bp, Glycine max
  Clone ID: PAT_MRT3847_76622C.1
actctgaatggctcgcgcacactactcacaactcacagcacaaaccgtaacagaaacaaacaatgagaacccaacgtcttaaccatctccttctctccctcttcctcttcgcagccgcattctccagcctccacccgacggccaccgccggagacgaaggcgcaccgtctgcaggcgacggcgaccgcgacgccgatttcatccgcactagctgcaacaccacgctctacccggaagtgtgtttcacctccctctctcgctacgccaatgcggtgcagcagaaccccggccatctggcgcgtgtggccattgccgtaagtctctcgaaggttcaccgtgcggcgtcctacgtctccaacctcacgcgcgacgccgactacggcggaagcacgcgcgccgctcttgctctgcacgactgcttctcgaatctgggcgacgccgtggacgaaatccgcggctcgctgaagcagatgcgtcagattggatcgcgccggcgccacgcgagttcgttcctgttccagatgagcaacgtgcagaatgagcggagtactgcactacccgaaaaccagacctgaacggatggattcacgtacgtgacggactgtcccatgaaaacgggtgtatgcgatcgcgtcagcaacgtcaagaagttcaccagcaatgccttggcgctcgtcaactcctacgccaacaagggaatgccttgattgtgttacagtctgattttattacttttcgagatttacaagttaaagaatagattgtgttaaattttccgtcaaaaaacaaaaagtgcagtgtctgtgtgggtgggtggggggggggacgcgtgagtccctctttcttgtatgtaaattttggtattcttgtagacagtatttgctgtcacgcaagaaagtggagaaacgcatcacttcattcacgtgatagaatggagagtgtagatatatattagaacaaaaatatcaagtgaaagtagagtttgcaacttttaaagttgagtgtggaactttgacttgttactttttagtttgttgtggttaactgttatattattttgtgtttttgtttaaattaaaaataataattttaaatttcaaaaaaaaaaaaaaaaaactcgagactagtttctc

SEQ ID NO: 116957 - DNA, 431 bp, Glycine max
  Clone ID: PAT_MRT3847_76623C.1
ccaaggtccaccgcgccgcctcctacgtctccaacctcacgcgcgacgccgactaccacggcagcacgcgcgccgccctcgctctccacgactgcttctcgaacctcggcgacgccgtggacgaaatccgcggctcgctgaagcagatgcgtcagattggagccgccggtgccggcgccagctcgttcctgtttcagatgagcaacgtgcagacgtggatgagcgctgcactcaccgacgaagaaacctgtacggacggcttccaggacgtagcggactgtcccgtgaaaacggatgtatgcgatcgcgtcaccaacgtcaagaagttcaccagcaatgccttggcgctcgtcaactcctacgctaacaagggaatgccttgattttcaaccacgtgtcagattacttaccgtccgattttatacatctcc

SEQ ID NO: 116958 - DNA, 576 bp, Glycine max
  Clone ID: PAT_MRT3847_76624C.1
caccatgcatggatccacacacagtacaccccccttcactgtcatccacctcttcccatccttataataacaatcacaaaacgcatcatctcccttttcctactcataaagatcaccatcatttcatttcccatataaaaaggcacacaaagtattaggaataataatatattaacaacaacgacaatataataataatttctttctcccttaataaacagagcctgctctgtttcttcttcttcttcttcgcaaaatgatgccgaaacaaccgatgaacgttttgaccacaaaaccttcacctttgagcaccatggtggtgatgctgatcctctgcattctgggtttctacgctctgcatttccctcactcttccacacattgcgcggacctcgcgcacttggagaaaaacggtcctgcggctgtgctcatttacggctagggtgacacgtctcggaaggggtaccattcaccacacctgatgagaggggggatccctctttctacacaaccctttacgtgcttaatcacttcacttattttggctctttcggtccatacaacaacctataccac

SEQ ID NO: 116959 - DNA, 1487 bp, Glycine max
  Clone ID: PAT_MRT3847_76625C.1
aaacgcatcttgattttatttaaaaaaaaaaatagaaaggaagggaaaatcgtaatattttgtcctttttttattttatagaaacaattggtgtgaaagtagcagcatattagcggtgcgtgattgattctgtagcgacaaccgaggaagcctctacccaagttcattccgttgacctttttttctaatgatggcggaatcgggcgaggaagagatagttggtaaacctgtccaagagctgctgttgaatcccgaaaatctaccaaaaaattacatctacgaggaaggtggtgctggatttcgtgatgctcttgtgccatcacaggatgatgatattccggtgatcgaccttcatcgcctttcatcttcatccatctcacaacaagagcttgctaaactccaccatgcactccattcatggggctgcttccaggcaataaaccatggaatgaaaagctcatttctggacaagggtgagagaagtttcaaagcaattctttcaacttccaaaagaagaaaagcaaaaatgtgcgagggaaagggacccacacaatattgaagggtatggcaatgatgtaatatagacgctaaagcaaaagcttggctggactgacagaatttccctaaaaatgtttcctgaggatgagaggaagttcaacttttggccccaaacccctaatgatttcaggagtattgtcctacagtataccgaaagcctcggactgctaagtgaagtaattattaaggccatggcaaagtcactgaacttggaagaggattgcttcctaaatgaatgtggagaaagatctaatatgattgtgagggtcaactactaccctccatgtccaatgcctgatcatgttcttggcgtgaagccacatgcagatggatccaccataacttttctgttgcaagacaaagaagtagaaggcctccaagtcctcaaagatgatcagtggtttaaagttccaataatccctgatgctctcctgattaatgtcggtgaccaaatagagataatgagcaatggaatcttccggagcccagtacatagggtagtgataaataaagcgaaggaaaggctcacagtagcaatgttctgcgtcccggattcagaaaaagagattaaaccagtggataagctagtcaacgagtcaaggccagtgttatacagaccggtgaaaaattatgttgaaatctatttccagtattaccagcaaggaaaaagaccaatcgaagcttcaaaaattaccttttgatgaagctgaatggttctcggaatttagttaaacaaaagagactgcagatgcaatcaaatttgtataaccaaattccaagttatgcccgctggtataaattgaattcgtgttgatgtgttagataacttacgattgagatgtatggactatggagttttatttgtgtgcagcgggaaagtacacggaggttatctgcacaattataaaagttgaaaggtaattgcattt

SEQ ID NO: 116960 - DNA, 426 bp, Glycine max
  Clone ID: PAT_MRT3847_76626C.1
catccttaatcaatctgtttctagagatcactttgaacacaatggttaatagtcactctttggcaccacatgattgactaatgggggcaccctcacacccgaaagagcatcagggatcggctaggatgaatgagactgatatctacactcatgaattcctgaactagctattattttaaccaacgagcatatgctacccttgacagcaatttacatactcaatggcatccattctaggaggatgtgccccaatatcttcatcccatagcgatgaactgatcccatagtcttgatcctggatccgactgtgatgtattaggtgctactgcttgagactttagcgctatttggacctggtctgaccatgagccgagggataaaggctgcaatggtacattacataaccggttctaccacctgatccaa

SEQ ID NO: 116961 - DNA, 429 bp, Glycine max
  Clone ID: PAT_MRT3847_76627C.1
ggctcgagtttggccagactcttgtggccaaattcttcatttcgctggaaccacacgctttgggcagactgtgtgcggcatgtttctctctatcccccaatctgaaggagctcatcatcacctcatgcaacaccgcggtcgacgacatccctaaccaaatcaaaaactcgaccctctaccatgaactcggcacccaccacatgacaaaccaggccacggacatctgcagggaggtactatgttacgctggctacgacattcgccgaacccttcacaccttggaaaagtcccacctaaacatggtgaacgattactcctatgacctcaaggattggatgcgcggcactctaacacaccaccagacatcatcggattggttccacaacaccaacagctatgctcgaaagaccatcgctaacggtctcaacc

SEQ ID NO: 116962 - DNA, 358 bp, Glycine max
  Clone ID: PAT_MRT3847_76628C.1
ctgtcttttatctttttttatttcatcctttttccacccatggcacccaaaaggccaagggggggaaacacaaaaccgcacaaccccgccccacccaaaacgggcacacggctcgcaaagggaataacaataaccccccaaaacgaaaacatgcccccagaacaatgattaaactcaccaaaaacagtatcaccccgctaaaccagaaacgggacaagccacccaagacaaaaaaaagtgcccaactaccactaaaaaacaggtgaacacccaaattgtagccggccaccccacgccccaaaccgaaaaccaccaaggcaagaccattttccccaggttttccacccacacaccgcaa

SEQ ID NO: 116963 - DNA, 206 bp, Glycine max
  Clone ID: PAT_MRT3847_76629C.1
tattctgtgtcatttttcttcatgggagaaacagcccacagagctcaccaacaagtactccaaaactaagtaagagtttaagctttgagatgcaacaagatgagctaatcgaaaagcccatgtctcctatgcagtacgcacgatctggtctgggaacagcagagatgaatggcaaactcatagctgcaggtggctataacagagag

SEQ ID NO: 116964 - DNA, 866 bp, Glycine max
  Clone ID: PAT_MRT3847_7662C.1
cccacgcgttcgccctcgcgtccgcgaaagtcgaagaagcaaaaagggggtgggtcaaaattccgccggagaaaatctttgttcggtgtttgcaatcgggagagagagcaaggtcccttctcaaggatggcgatgactgtacacgtccttgctgggttggcttttatgttttcagctagcattttgcttcagattctggcatgtgcaatatataacaattggtggccaatgttatcagctctgatgtatgtgctggttcctatgccttgcttattctttggaggtggatccactcaatttctaatgagccgtgatggtggtggttggatagatgctgcaaaatttttgactggagcatcagctgttgggagcatagccattcctataatcctcaagcacgctcatatgattgagacaggcgcgatgctcattgaacttgtatcgttcttcatttttatatgtactgttttatgtttccaccaagccggccttgatgatgattggtaacagtaaaatcgacaaagttctaacaccctgctagtcattagggtttgttacccgtaaaaagggaaaccagatagtgaaacttacgacaaccatgggagaagaaatgtatgttcaaacctctgtaaagctctgcagtaattgttttttttgtcaatgtgtattctcgttaaagtaaggtatttgtggtaattttgatttgtggagaacacgtgacatttgacttcattggtttctatattgttcataaggtgtgtataacgttgtataataattctgttaacaacactgtatatgtttctgcacacacaaatgctcttgtacacgactacacgcagatgaacccatatttgtggttaaaa

SEQ ID NO: 116965 - DNA, 238 bp, Glycine max
  Clone ID: PAT_MRT3847_76630C.1
gaaacaccaaaggggttacagggggcattataaagtaggtgggtggacactatcggtcattcaacgggttgtcaaccggcatgtaaagggacatgtgaccaccaaatcaacgggcaagagtttttttgttaggggcgtgaaattattaaaataaacgggggctttattttcaggtatgaaggacttcctttacacaatccgcttagatgcggttgatcaattttcaatggccaatgtc

SEQ ID NO: 116966 - DNA, 371 bp, Glycine max
  Clone ID: PAT_MRT3847_76631C.1
aacctttggctgatgtactgcttgctggtcgtgagaagctcatagaagggggcaccggcggacgtcgtacctttctggtccaagggcgccgccgttataatcgacgcggccgaggtacgtatcggggctaacaccgttgcgacggccggcggacctttaagaaaagaaggcacggagaggaaggacgcgacgatcaagaatgctcttacccataagctttaggtcctcgtttccgaaaagtacgtcgtcgttaatcgcctccgccgccgtcaatttagtaaatattaacgtaccgactccgaaggaacccgtcttactcacctttgagaagaataccctcccgccgatcagaccggactataataaggtac

SEQ ID NO: 116967 - DNA, 498 bp, Glycine max
  unsure (1)..(498): unsure at all n locations
  Clone ID: PAT_MRT3847_76632C.1
gtgagataggaaagattctcagaatctagaatatcagcatggtttttttgcagggacaacaaggtttgaattaggaacaattaaacaagatattaaggcacttgtggggctgtgtgtaaggtttctagagcattggattacagggtaacatttgcatggtgacagaaggatttggaaagccaatgcacaaagttttgaaactttgtaaatgtgggggttgattagatcaaattgtgggaaagaaaaatgagttgttttccttgttgtacatcacaagagaggatcaacaagaaatcattgaagaagagcattaaggaataccatgaagaaaaaattctagcctcatttgccaacatctctgttaaaacagatagtggcaagcgaaatctcataacaaatgagctagcaaagcttgggaaaggaaacattacctctaagatatttccatatcgtgagctatgtgttgcaactcanaactttaccctgccatatgattgg

SEQ ID NO: 116968 - DNA, 248 bp, Glycine max
  Clone ID: PAT_MRT3847_76633C.1
aaaaaaaagggacgcagggtgatgagtaaaccgtgatttcaattaaaaacaataaagacaaccctgcccaaagtggtttgttggacatatcacatggtctaagaaggactaaaaataatcctccttaaaaaaagccaactgaaattagccattatacgcattatccgtccaaatttcatgaccaccaaaaattctgtttttacaggcacgaagtgaacaggggggcacttttgagtataccttcaatc

SEQ ID NO: 116969 - DNA, 503 bp, Glycine max
  unsure (1)..(503): unsure at all n locations
  Clone ID: PAT_MRT3847_76634C.1
ggctcgaggagactccaaaattggctggactattaccagcttaagtttgagagacatcctgaccggaggccaactgtcaagactggaattttagggctttggggtgggaaagttgatgctatcgagcactacaaacattcaattaaggaacttgataagatgatgacattggaacgccagaaaattataaaagatcccaaatctattttgccagttgcttttctttcattcaaatcccgatggggagcatcagtttgtgcgcaaacccaacaaagcaagaatcctacactctggctgactgattgggccccagagccacgtgatgtatattggcggaacttggccataccatttgtttctttaaacattcgaaagcttataatatcattgtcntgtgtttgccttggtatttttctacatgattcccattgctattgtgcaatcccttgccaatttggagggtcttgaaagagttgctcctttcctcagaccagttatagaat

SEQ ID NO: 116970 - DNA, 653 bp, Glycine max
  unsure (1)..(653): unsure at all n locations
  Clone ID: PAT_MRT3847_76635C.1
tccgggtnanatttaggtggttgcatattcgattttctaacgcagcttacnttacgctcgggatacttttatagagatagaacctactctgtcacttcttgtctataatagctgctcgacctgcattcccttcttagctcatgtttacttggaaaccccactcgtctcacatcttcccaaaaccatgaggtccctacatacccacatcctcctaaaatgattgctgctctcgaggtgtgggaaatctagtgaagcctgtcacataccagtgaaccctcggctggaacacatgaccacattcttcccatattgaaggcatagtacgcatgcactatgatcccttattgacgaaatagggaatgaaaacatcgtgccgataaccaaattaaatatgttgtatatcatcgaactttctgcacatgatttgatgtagactagacccaatcctatgctgcacttcgacatgctacctatctgatagtgatgagagattggactttacttatagtttgctatgattccagaactactaatgtaacatcatgtcatgtttgctaccatataagcccctaaccccccttctacttatttatgttaagaattattcgagattcggatgagtgatagaaacaggtccctacgagacgccacta

SEQ ID NO: 116971 - DNA, 164 bp, Glycine max
  Clone ID: PAT_MRT3847_76636C.1
ctcattacagggcctcccgctccgatcagcataatagcgatcgcttgttagccgccaaggagcagtcgcaagagaattgtacggaagaagctttccgtccccttagaacagctccaccacccccacattctcatgatcatgtgcttcttcacaccggtggttgt

SEQ ID NO: 116972 - DNA, 323 bp, Glycine max
  Clone ID: PAT_MRT3847_76637C.1
ccggcagcacggctcatctgacattgcaacctaacaaccccatattccaatgttgcatcaccattactgacggatataagcaacaagaaccggcgacgggccggcataactctagtacaacagggctctctcgagagaaaaacttagctgcaagcccacgcaaaccacaatttttcatggcaacaacctcttaacctataaattggcggcgacagtcaaaaccgatgccaatgcttcatgtggagaacgtgtcaaggaggaaggggcatcgagacacacaaagattatgatgtcacagggtgcagataatagagagaggacag

SEQ ID NO: 116973 - DNA, 239 bp, Glycine max
  unsure (1)..(239): unsure at all n locations
  Clone ID: PAT_MRT3847_76638C.1
cttcaagtcaggaggaggtgacccttttgggagctactggaagcccatttgtgtgcagggttcatattgccctcaagttaaggggagttcaatacaaatatgtccaagaaaatttgaggaacaggagtgaactgcttctcaatccaccccagtacaggaaggttccccntgtttattccaatgagagccataccaagttctttgtggattgttgatacttttgtgaactgtggaaacac

SEQ ID NO: 116974 - DNA, 291 bp, Glycine max
  Clone ID: PAT_MRT3847_76639C.1
ggggaccaaacaaggaggaaaagctaagcctgagaagaaacccaagtgtgataagaaggaatacgacgaggttgacatggctaacattcagaagaaaaaggaagaggagaaggcgctaaaggagtggaaagccaaagcgcaacacaagggaagctttggaggttctgggctcaagaaaagtggaaagaaataagggctctttatcatgaatgtatacatacaatattgagccctgtaacttattaccatgataacattatggcttattgtggacttctttattgctctaat

SEQ ID NO: 116975 - DNA, 366 bp, Glycine max
  Clone ID: PAT_MRT3847_7663C.1
tttaaaccacttaacatgattttttccataatttgcgttatgtttatgccaatcattttattaagatttaatagagggtatccttgctcatgaggctcccacatgtctcacatcattgcggggtctttcagactgctaagccttgagtattctaaaatctgattggataattttattattatagtatatggtggctttgcggtataagagaaattaaatcacttatccatgtttacaaggcccaagtccatataattcaaaactttcacataatgaattcaacaatactctgaagtttactattacacatagatacttaaggacctaacgctaacattgataatgaattaattgtcattttatcat

SEQ ID NO: 116976 - DNA, 208 bp, Glycine max
  Clone ID: PAT_MRT3847_76640C.1
atggttgcccatgacatggtaccctcaaggttacttggccaatgtgcctatgacaaacatgtacatgcttccaaacccaacaacatggtacccataacgaacctttagattctacaaaggtcctgtattgttcccattctgacatggcctgaattactcaagatccttccacagcttagcacttgccctcaaacaggtatctatgtct

SEQ ID NO: 116977 - DNA, 391 bp, Glycine max
  unsure (1)..(391): unsure at all n locations
  Clone ID: PAT_MRT3847_76641C.1
aatnttcacacataacacacccttactacattattacgaggtgtgaaaaaggtgtgaaaattttaaaatacgcaaaacatagtgaacgcgagggtcctgccttattttctttcttgagttcaaccaacaaacaacccaaagaacacaccatttccagattatgccgtggtttcagaattttgagaaaatctgggggacacctatggatcggataaaggtgtcttaagagttttaccaacattttgaaaatcttgagaaattctcaaaaaaagttcacaatctggggactttttggggggggcactaaggccactcaaatgccttgaggctctcttagcccccccttttctacccattttaaagccctcattcggccctcgtgcctattttg

SEQ ID NO: 116978 - DNA, 242 bp, Glycine max
  Clone ID: PAT_MRT3847_76642C.1
ctcttccgatgcaatatctggtagcgggaaggcctgtcagtattacattattggtgctggctgacattatgaatacgagatttcctgaatgggtgaatcagatcataccataaggagtggatcctattgggaaaagaaaatcactctctatgcaatgaagttcacgctcaaatcgtaaccaatttgactaaactgtttttgatgatgacgaaactcctaaaggttccatgttggatcttaaa

SEQ ID NO: 116979 - DNA, 1037 bp, Glycine max
  unsure (1)..(1037): unsure at all n locations
  Clone ID: PAT_MRT3847_76643C.1
cccgcgtccgcagagaccaaaaccctgacggaattgtagacgaaacagaacacagaaagagcgagcaacggccattcgatttcgatgtggcgcagtcgtgagtaacgtgcaataccacgggtaacgcggttttctggctcacctttccgcattttccttcttccctctcgcacccataagtacccctccctaaatcaacgctttcctcacaaaaaacaaaagctcacttctcatcattcattcatcttcgttctaagagccatgtctagcaccgttggccagaccatcaagtgcaaagctgcgattgcatgggaggctgggaagccgctggtgattgaagaagtggaggttgcgccaccgcaagccggtgaagtccgtttgaagatcctctacacctctctttgccacactgatgtttacttctgggatgcgaagggccagactccattgtttcctcgcatttttggccatgaagcttcggggattgtggagagcgtaggcgagggtgtgactcatctgaaaccaggtgaccatgccctccctgtgttcacaggagagtgtggagattgcgcccattgcaagtcagaggagagcaacatgtgtgagctactcaggatcaacaccgataggggtgtcatgatccatgatggccaatcaaggttctctaagaatggacaacccatacaccatttcttggtaacctctacattcagtgaatacactgttgtccatgctggatgtgttgcaaagatcaaccctgctgctccacttgacaaagtttgtgttctcagttgtggaatttgcacaggttttggtgctactgtaaatgtagcaaaaccaaaacctggttcctctgttgccatatttggacttggagctgttggccttgcggctgctgaaggtgcaagagtttcaggtgcttcaagaatattggagttgatttagtttctgcccgatttgaagagctaagaagtnntgggtaatgagtttgtgacccaaaggtcatgataaactgtgcacaggtattgctgaatgac

SEQ ID NO: 116980 - DNA, 441 bp, Glycine max
  Clone ID: PAT_MRT3847_76644C.1
gctgcgagaagacgacagaagggggagaccaaggctgcttcctagagtgttttgttattgtgccattgccatatatatcccgtgtttttaaatttttttcttcttgattttccattttaagtatttaaggtgttcagttctcctgtcatactttaaacagttcaaatactttattaaatatgctttccttcatctaattaggtattcagtttttgaccgcatctgtcatctacaacaccgtttattggcattgttcctgttcggtagttagtttggatggatttgagttctaaaagaacgtgtttagtacgagttggttatgatttggatcgtcataacctagtttgaagttgcaatttagtccctctgatggtagaatgtatatgttttcgagttagtttctgaatttaaataaatcaaaaaaagttcttgtttgttagt

SEQ ID NO: 116981 - DNA, 1391 bp, Glycine max
  Clone ID: PAT_MRT3847_76645C.1
cttgatcctctgagcggccgcctttttttttttttttttttttttttaggaaagataagaaatagaaacaatgcatatagactcgaatgcagcttagtggccaagtggttttattttatttttactgctagtactcttcttttgcaaggaaacttcaagttctcatatagactcggatgcattcatgatgctagctcgaaaagactgttatggccaaacattcttgtttactcctctcaaagaagagccccaagttctcataatagtgactgaaaattcgaccgaaatcagattttggtctaaaaaaaaagtagaatcctaatctcttgattcaggaaagctctcggctgcgcttagcagcagcaacaacagcattcatcagtgttccacggaacccaccattttctaactcatgaatgcccgtaattgttgtcccacctggagaagtaacgtcatctttgagctgtcccgggtgcttcccagtctgggagaccattgatgctgcccctaatacagtttgagaagctagacttaatgaaagatcacgtggtaaaccagctgctactcctccatcagccaaagcctctattgctaaataaacataagcaggaccactgccactcaggccagttattgcatcaaaatacttttcctcagctttccatattttgccaattgacccaaataattgggctataatatttccatcttcttccgttgcagatccccccaagctcattacagatgctgcctggccaacagctgctggggtattaggcatcactcttataaatctgtcgttcccagcccattcctgaagatctttcaatttggtaccagcagcgaccgaaaccaaaagcttgttcttcgtcaaaagcggcgtcaatttcgacaccacgtctttcactaattgaggtttgaccgacaaaacgacgacgtcgctttcgcgaacgacgtcgtcgtttgaagggagaacggtgacgccgaaggactcgaaggcgccacggcgggcgaggttgaagtggacggcggtccgaatgcgagaaggcggcaggacgccggagcggacggcgcctcgggcaatggactcggccatttttccggcgccgatgaagccgagagtgtaggattcggcgggaatcggaaagatttccattttaggttaagtggcagagaatcaatttcgatttgcgcaaatgttgctgctggttcagttggttagggaagcagagaaagaaagaaatgacgcactcactcacgcagatatataaagttaggcccctatttcccttgcagttgtttgtttaacttgcatactcaacttgtcacattaggtggaaggaaatagcgagagcccccttctgtcgtcttctcgcagcgtctggtggttc

SEQ ID NO: 116982 - DNA, 947 bp, Glycine max
  Clone ID: PAT_MRT3847_76646C.1
gagaatcgaattcattactatacaactttttgtgttgggaacgaaaaatacatttatttaattctgaaacgctctttatcttctcttcctcctcataggccttactatgacctcactcacgcattgaagaaggcaacgctccttgcagctcaaatctgcaaattaggctttttttccccccaacagtgggttttgcttttctctggaattttaagttttggggttttctttcaatcagggttcagtttattcaagttttacaatttcgcggctctgaaactattagatggggaattgtttgcgtaaggctcaagcggatgatgattctgatcataatgtggagtttgcttctgggaatgtgcaagttattactaccaaagaatcttgggaccaaaagttggaacaagcgaggagggacagtaaaattgttattgcaaatttcagtgccacatggtgtggtccttgtaagatgattgcaccatattattgcgagttgtccgagaaatacccatctatcatgttcttattagtcgatgtggatgaactagctgacttcagcactttatgggacatcaaagccacaccaactttcttctttcttaaagatggaaaagaggttgacaaacttgtaggagccaacaagccagagctggagaagaagattgttgtgattaatgatgcagtgcctcataagcaatagtgatcgtcgttgttgttgttgttgtagatctattcatagaagctctgctcttctcttctcttctcttctctcttcatatggcagtgcgtattctgcatgtctttcaatcccgtgacattgtcattgtatttcttttttaatgtaaatatatgacgtttcaaatgaatgttttgcattcaaaatttcaacatgttgtcactgtggtatctttgaaatataatgtattggtgtgccttatccttaaaaa

SEQ ID NO: 116983 - DNA, 112 bp, Glycine max
  Clone ID: PAT_MRT3847_76647C.1
acctcgcgacctcaaaatccagctcccaacctagatgcacaattgcccgataattttgctttcgctgatggtcacctaacctattgtatcaccgggactaattccatacaca

SEQ ID NO: 116984 - DNA, 185 bp, Glycine max
  Clone ID: PAT_MRT3847_76648C.1
cgcgtatgcgtgctctcaattctgctctcgaacaagattcgcacagcacttgggaaaggtaagaaaattgtgtatcttactagagttgatctcctctctctagtacgtcctatctggtctgctacgccgtggtgtctaagaatgtacattctgagttctaacgccactaaccctatgctgacgcg

SEQ ID NO: 116985 - DNA, 283 bp, Glycine max
  unsure (1)..(283): unsure at all n locations
  Clone ID: PAT_MRT3847_76649C.1
gcgagcgccgcccttacgcgtctgncctttcttttgactatttcgaactccgtcataggggggaccaacaggacggccacgttgtacttattagactcaaacctcaacaacacgacaactttaagcgatgatagaagacacgctcttctcaacttacgctaaaggtaggcggcgtcaccaacacctgagaaaaatgttgtgaaaataataccctacggcaaccggttggcgtagtttcctaatgcttagccacccgacttactcaacagaagtatgaacagct

SEQ ID NO: 116986 - DNA, 590 bp, Glycine max
  unsure (1)..(590): unsure at all n locations
  Clone ID: PAT_MRT3847_7664C.1
attcggctcgagctcgaaagtggaaggaaaaagggagggtcaaaattccgccggagaaaatctttgttcggtatttgcaatcgggagaggcgagcgagcgagcgggcgagagacataaggtcccttctcaggcatggcgatgacagtacacgtccttgctgggttggcttttatgttttcagctagcattttgcttcagattctggcatgtgcaatatataacaattggtggccaatgttatcagctctgatgtatgtgcttgttcctatgccttgcttattctttggaggtggatccactcaatttctaatgacccgtgatggtggtggttggatagatgctgcaaaatttttgactggagcatcagctgttgggagcttagccattcctatcattctcaagcacgctcatatgattgagacaggcgcgatgctcattgagcttgaatcattcttcatatttatatgtactgatttatgttgccaccaagccagccttgatgatgattggtactagcgatatccacagagtactgacgtcctgctagtcattaagggttctgacccgcanaaagggaaaccagatagtg

SEQ ID NO: 116987 - DNA, 929 bp, Glycine max
  Clone ID: PAT_MRT3847_76650C.1
ccacgcgtccgcttaacattccaagttccatagtttgcaaagagagactttagacttccaaaacatgagaaagttgtgttttaaccccaaaacggagtcgtttgctttggcacgcagttctccttcttcgccactatccttaacctcaagcccaacgcttccgaggctgagcttttccgaagaagctgaggcactgatactgaaatggaaccctgacacttccgcttacgccaaagtcacttccctcttctacgaggacaaaaacgaagccaaacactacattgactgtgttaaccagcttcagaaatccatgcattccttgctctctcagaacccttcctctgagaaactcattctcgctcataacctaatgcagatggctatgaagaggctcaagaaagagttctaccagatcttatccatgaaccgcgcacaccttgatccagaatccgtctccgccagatcctctcgcacctccgccaactccagcgcctccgattacgacgacgacttcgctgctgaggacgacgatatccgcgccgccggcgactctatctccgaagtcgagcaggtttcttccggcgccatggcagatctgaaactaatcgctgactgcatgatatcttccggttatgcgaaggaatgcgtcagcgtctacatcttaattcgaaaatctatcatcgacgaaagaatctaccgcctcggcgtggagaaacttagctcctcgcgcgctaacaagatggattgggaagttcttgatttgaagatcaagagttggttagaggcgacaaggatttccgttagaacactctttaacggagagagaatactctgcgaccacgtcttcagttactcagattccgtcagagaatcatgcttcgccgagatttcaagagacggtgcctctctccttttcggattccctgaac

SEQ ID NO: 116988 - DNA, 434 bp, Glycine max
  unsure (1)..(434): unsure at all n locations
  Clone ID: PAT_MRT3847_76651C.1
acgcctccagtaccggtctcttattgcgggggggacccacncttccgtacggtttatagaagaccacatatgggtttattatgttccattaaggatctatgggggggggatttataccgcgggcggcttaatatatatgtattttgtacggatcaatattgtatgcataattcatagtctacaaaaggaggtaaatactaagtttattataattaccaacccttttttaccaaatacaaaaactgtataattcaatggttgtaccaccacaagcatgtaatcctcctgccatttcattcatattcccgttaccacctaggctatgtttagtcataagctcctcatccaacttttctgcaatgctattgggtttctaatcacactacattgatctatgactatttgctctttatccctgtaagagatccattcac

SEQ ID NO: 116989 - DNA, 376 bp, Glycine max
  Clone ID: PAT_MRT3847_76652C.1
ggctcgaggtcgcacatgatatagagatttttgggctaatgactatagtggggatatggggggttgaaacactttcacatgagcgcccagcagtgtgcagaggtacctatattctaatgggcagcatggatgccgtagatatgcacgcaaaacctgttcttgcttctacaggtagatcgctacctgaatgaaccagtcgtggatggcaatgctgggagaggtttcaacttatttggccaaacagatcactcaacgtgattagtgctggcttgtaataaatctggaaacaacgcggatgcattgcatgtgcacacaggtagtcttgaaatgctgaccaaacaaatgataagaatgatttcgatcttggatgctacat

SEQ ID NO: 116990 - DNA, 194 bp, Glycine max
  Clone ID: PAT_MRT3847_76653C.1
cccacgcgtccgcccacgcgtccgcccacgcgtccgcccacgcgtccgataagttctcggtgagttctgaaaaatgggttccaaggttttgcttgttctagttatgttcatggccactatacttctgatttccgctgcacccaatgaataccagaattttgacaaaaaagatgggaagcctgctccaaatgggg

SEQ ID NO: 116991 - DNA, 476 bp, Glycine max
  Clone ID: PAT_MRT3847_76654C.1
gatatggaacttcttcaaacaatatttctcatgaaaattaaatttgctgctcatttattttataacaaccttaactattgatttttcagtcaactattactctccaccaactctctaaagtgtatccagcacttcaaaggagcctaatcacaattttctatctttcttcagtttcttggatgctatatttttttaaatgggtaatgtaactgtggtcacgaggttttcatgatgaaaaatgttaattgatttgtacattggtataataacatatggtcctctctaacttctgttgctacttgccatgtagatattctctgagaggagggggcaatggaaagctgcaacacagtcccaagagttttttaggactcttcaacgctattatagcaatgcttacatggatgctgaaaagcaaaatgcaattaacatgtatgtcccttctgtcgtcttccgcagcctactcgagccgaatt

SEQ ID NO: 116992 - DNA, 629 bp, Glycine max
  Clone ID: PAT_MRT3847_76655C.1
ggcgcacagccgccctgaggacttcccgcttatccctctgtcaattgcggtttcatttcatgtttcggacccaaacagtaacacacttcacatttatgatttattcaacacagtcaacgaacccttcacaaaacgcatcatcaatcttgttttccaatttccttccgatctgtaaccgtctattgattggattatagcgtatcgtatgaactctagcttgctttcgccatggaaaatcaacagttagtggagacaaatggagcaggttttcaagctgttgagaatctgcgagtagatgatttggaacttgatcaggataaacaatcgaaggaggcaaaggctgagaaaattggtcacgaagacgataaattggatgatatatcagaccagataaatgacggggaagatgcaaggtctaatacaaaagatgagagtgggaatttgcaatctggaactcaaccagaaaacttagagaccaaatctgaaactgaagtcagtactgataagcgagagtattccggtgataagatgggtgcaggtggagatttggagcctaaaaatcaagaaacaaatatagataataattctggacagattgacttggctaaagaagtggctgatagggaatc

SEQ ID NO: 116993 - DNA, 380 bp, Glycine max
  Clone ID: PAT_MRT3847_76656C.1
ctggaccttgggaatttgggggattgtgggacataaaaaactcaccatggggggaaccggcaaaatgccccacctgggggtggggaaagcataacggcattcgccctagcccaagtacaaccgtcaccgaaacccaacttccgaagaacctaaacggcaagccctaaccccaaggccgggcgccgcctttggggctgcccggggaagcccccacccaagggatgggggccgacaccgctggagctaccacagctccgaccaaaggcccaaaagggtagctggaaccgccccccgaggcccaagcggtggacccggcgcaaactccccaacgttcaaaaaagaaccatgcttgcttgggaattggaccggtgacaaaggaa

SEQ ID NO: 116994 - DNA, 1628 bp, Glycine max
  Clone ID: PAT_MRT3847_76657C.1
atttaactatggttggggctttgaaagacatctaaaagtaacagtaatagtaatatacataacataaccaatggaagcacgtgcaggagtcagaatcaaacgtatctcgcaagaatcttttggctcattcatcagcctttcaaatattccaggaagggtgtggattgttatacttaagagaggtgagcctagataaaagtaatagtcatatacataagtaacataacctatggaagcgcgtgcaggagccaatcagcgtattgcaagaatctctgctcatcttcagcctccaaatttccaggaagggagtgatgttcttcttaagagtgctgagtgcagagcaaagggtggggcacctggattcaaagttgcaattttgggggctgctgggggaattggtcaacccctttctttgctgatgaagatgaacccattggtttcagttcttcatctttatgatgttgtcaacacccctggtgtcactgctgatgttagccacatggacactggtgctgtggttcgtggctttctggggcagcaacaacttgagagtgcactcactggcatggacttggtaatcatacctgctggggtaccaaggaaacctgggatgacaagagatgatttatttaaaattaaatgctggaacttgtgaggaccctttgtgaaggaattgccaagagctgccccaatgcaattgtcaacttgattagtaatccagtgaattccacagttgctattgctggggcaggttgtcaagaaagccggtacatatgatccaaagcgactacttgggtgttacgacccttgatgttgtgagggcaaatacttttgtggccagaagtatgttggagttgaagttgttgaggcaatagcggtggactggttctgcaacactgttaatggcatatgcagctgccatttttgctggtttatgcctcccagtagcttcactgcagaagaaactgaatacctgacaaatcgcatccaaaatggtggaactgaagttgttgaggcaaaagctgggacaggttctgcaacactgtcaatggcatatgcagctgccaagtttgctggtgcatgcctccgtggcttaaaaggagaagctggggtagtggagtgtgcttttgttgattctcaggttacggaacttcccttctttgcaaccaaggtacgtctaggtcgtgctggagcagaagaggtttatcaactgggtcccctgaatgagtatgaaaggattggattggaaaaggcaaagagagagttagcaggaagcatccagaagggtgtagagttcatcagaaaataaatgtgataaggaaaaactagtttttgtctcttatatataaggaccatgtgtaatgcttctctttgttcatagatttttttcttcttcttaagaatagtactctaaatttttggtgtcatccgtaattgctgatgataacggatttgacatcagtggaactgcttaataatctcagaaagatactaaaatatcagccttttgtactaattccagatcttattttctttaatctttaacatattcataacaaaaaaaaaaaaaaaaaaaaaaaaaaaaaaaacacgagactagttcaaaaaaaaaaaaaaaaaaaaaaaaa

SEQ ID NO: 116995 - DNA, 1663 bp, Glycine max
  Clone ID: PAT_MRT3847_76658C.1
caaaattgagaaaattttatattaaaagggaaaagcattgaacatatatgtcatcttcttcattcccattattgggcttatccatgtcattttattgtctggtcatagctttaaattcttttgcacccctcattttgttttctaatatataataactcctctgcttcaacacactacttctccctctctccctctctaatagtaacagtaatagtaatatacataacataaccaatggaagcacgtgcaggagccaatcaacgtattgcaagaatctctgctcatcttcagccttcaaatttccaggaagggagtgatgttcttcttaagagaggtgagtgcagagcaaaaggtggggcacctggattcaaagttgcaattttgggggctgctggaggaattggtcaatccctttctttgctgatgaagatgaacccattggtttcagttcttcatctttatgatgttgtcaacacccctggtgtcacagctgatgttagccacatggacactggtgctgtggttcgtggctttctggggcagcaacaacttgagagtgcactcactggcatggacttggtaatcatacctgctggggtgccaaggaaacctgggatgacaagagatgatttatttaaaataaatgctggaattgtgaggaccctttctgaaggaattgccaagtgctgccccaatgcaattgtcaacttgattagtaatccagtgaattccacagttgctattgctgcggaggttttcaagaaagccggtacatatgatccaaagcgactactgggtgttacaacccttgatgttgtgagggcaaatacttttgtggcagagatacttggagttgatccaagagaggttgatgttccagtggttggaggtcatgctggagtcacaattttgcctcttttgtcacaggttaagcctcccagtagcttcactgcagaagaaactgaatacctgacaaatcgcatccaaaatggtggaactgaagttgttgaggcaaaagctggggctggttctgcaacactgtcaatggcatatgcagctgccaagtttgctggtgcatgcctccgtggcttaaaaggagaagctggggtagtgggagtgtgcttttgttgattctcaggttacagaacttcccttttttgcaccaaggtgcgtctaggtcgtgctggagcaaaaaaggtttatcaactgggtcccctgaatgagtatgaaaggattggattggaaaaggcaaaaaaaaagttagcaggaagcatccaaaagggtgtagagttcttcagaaaataaatgtgataaggaaaaactagtttttgtctcttaaaaaaaaggcccatgggtaaggcttttttttgttcaaaaattttctccctcttcttcccacgcgtccgctaaatttttggtgtcatccgtaattgctgatgataacggatttgccatcagaataataatctcagaaagatactaaaatatcagccttttgtactaaaaaaaaaaaaaaaaaaaaaaaaaaaaaaaaaaaaaaaaaaaaaaaggaaaaaaaaataaaatagacgagcaagcaaacaaaaaccttggctaatagggacactctaaattaaatgcactgaacttaaatttacaacctctgcgactgggaaaactcttg

SEQ ID NO: 116996 - DNA, 408 bp, Glycine max
  Clone ID: PAT_MRT3847_76659C.1
caatcctgcagttctcgtttctccctccgagcatcatcactcatgggaaagagcattctggggactggtggagctggatacatcggcagccacaccgttcttcaacttcttctcggagggtacaacgccgttatcgtcgataacttggataactcctctgagatcgctattcgcacagtcagagatctcgctggagatttagggaagaatctcacatttcacaagcttgatttgagggataaaccggctcttgagaaggtttttgcttcgacgaaattcgatgctgtcatccactttgctggacttaaagcagttggcgagagtgtccaaacaccactgctctactacgacaacaacttaattgggacaattgttctgtttgaagacatggcttcccatggatgcaaa

SEQ ID NO: 116997 - DNA, 277 bp, Glycine max
  Clone ID: PAT_MRT3847_7665C.1
ccagccaaaactaattttggtgctgcaaaatattttcaaagatgaactacctggcaaccctggctacccgatttccctccttaccaggtaccaccaaactccctgggctttggcccaaattcccatttcatattataaggtccccaggggaagggtttgcccctttctgggaaaccggatgaaaaaaaattttttacctggcctaagcctggggtttatgacctgccataaaagaccggttcctaaaagatccaggggcccggggggccaccccgga

SEQ ID NO: 116998 - DNA, 514 bp, Glycine max
  Clone ID: PAT_MRT3847_76660C.1
ggcggccgccctttgctttttcttctttcaaagcataagcaatcagaacgtgccttgcaaactttcggcacattaaaacaactcacctagttactttgagctctgacgtactaataacttgtaacttcacttaaggttaccatcatttacaaacaccactttttcttttaaataccctgggcaggcagaaaagcccaaaaacagaacctgcccatgacacagcgggcttcgcctcaggaaatatctttaaactcctggcataactgcgatgtcactcatactctcaggacagttgtattcctgcctgcgtggaccaaggacgctttctgcacagaaggcatcacgcgagggctcgaccctatgagtactaactaatctggtggcagaaaacactgcccttgactgcccgagccagggcataatttgctgccgaaacgaactgctgctcaaccatacgagctctagacgaaggggcttctggagatctgagattaggctactaaaactccatggg

SEQ ID NO: 116999 - DNA, 124 bp, Glycine max
  Clone ID: PAT_MRT3847_76661C.1
atttattgccataggccgagggctctagaggtattgatggacctttgtattccaaatgttttgatgagttcttagcggtcgatgggatgatggtaccgtacggagttccatttaaaggaacatg

SEQ ID NO: 117000 - DNA, 403 bp, Glycine max
  Clone ID: PAT_MRT3847_76662C.1
aattcggctcgagcaaattctcttaattattttctttttcttgatgaaagcaagctaaaaaaccaggcatcaccttcatggtagtaatcatcatcaaaagcaccacatgccaggtggaggagacagtccctatgatgaccctttcttgaattcttgttgctgctgctgccactgttttcttgctatctcatacattttcagtgctttccaaagatgcatccttttttttccttgttaccctctcttcaagtgctttgggtggaatgaatctgctcctagatatcaacatcatcacatccaacacacggaaatggaatgattcatcttacttatcactcatccattccatgtattttagtttcttcaatccttcctctcccttcttccaaagaaaatatcctga

SEQ ID NO: 117001 - DNA, 247 bp, Glycine max
  Clone ID: PAT_MRT3847_76663C.1
tgcacatttgcacccttctcagttctctcaatcaaatccatggcaacaaacgcaaactgcgaaatgcccctcacacaccaccctcattggttctctccaaaatccggaatttaccacagcaaacacgcccccgtggaccttcccaacgacccttttctcgaccttgtttccttcattttttcccaccgccacaatggggtttcggccctcgttgattcttcatctgggtgttccatttcctacccaa

SEQ ID NO: 117002 - DNA, 603 bp, Glycine max
  Clone ID: PAT_MRT3847_76664C.1
cggcggccgccctttatttttttatattttttttgttttttttttttttttttttacccttcaacatgaagggttatttattgcttgaggcgaaccgagagtatccctcttagtttagaactcgccatagaaaacatgtttaagtgcaaaaattttaaatatctttaccgccatggcaagcaggccaacaaaaattgccaacaagggggaaaaaaaaattcggctccttacttgggagctttacaaagtttaaaggttttttcatgcaaaaacctatctgctggtgttgtaaaatttccaccatgctccataaaatcttcaaaaaaaaatcgttttgctttaccctggggcagcaccacaaattggctttggtgctgttaacatgggaaaataatgccttacctccttggcgagaattcctcccttaatcgggaaactttggagaggataaatccttgaaagacgagagctcttctaatgtaccctttttaaaacctaaaaattagaagcttccggctttaaaaaattgccatgagtaaagaccacggataagggcgcacgtgaactggtgtcagacccaagttgggctggaattattacccc

SEQ ID NO: 117003 - DNA, 299 bp, Glycine max
  Clone ID: PAT_MRT3847_76665C.1
gttcatcaggatgatgcacatattctctgcagggatccccatttgttggatgaagcgatgataggctagactttcctcacttatctccttaagatattgggtttcacgtatgaactgaagcttccaacgaggcccgagatatacctatgatatattgccacttgggacaaagctgaaagagctcttaaagaaactctatatgattttggccagccctgggcactgactgaacgggatggcgccttctacggaccaaagatagacatgagggtttctgatgcattgagtaagaaagtcca

SEQ ID NO: 117004 - DNA, 557 bp, Glycine max
  Clone ID: PAT_MRT3847_76666C.1
caatatgtggtgtaggattttcttaaaaagaggaaattttttttgttccaaaaacaaaatcttatggttttctatgactgtgactccgctcagtttttttattttcttcattttctgtatttcatattgatatttcagcatgatcattttaagcctacatctataaccaacttgattggtctttggattggaatacaagagcagtttatctgagaacttaccaactttttaagttgaatttaacagccaagtttacacttgtttctttgaggtgattttctttctttggtgaaagtcctaataatctagttgctttaattatgtatcagatgatggggcaagtcaataaagagagactggcagagtacctgggagagctacagcgtaaagaggatacgaatgaccgctatgttgctgctctaagaggagaaactttaaccagaaaaccttatgtgagaatccaaccgattccagaacaaactgacaccaaggcaaacaaggagcagaaaaaaatgaattagttgcagatctccggttattgtgaacggacgcgtggg

SEQ ID NO: 117005 - DNA, 124 bp, Glycine max
  Clone ID: PAT_MRT3847_76667C.1
taccaaactctaattcggcgcagcgggtcagatatccctacgcctggaacatttccctcataaaattcgctcttcctttttgccgtctcgggaatccagcgcgaggtgtgaatcttttctctct

SEQ ID NO: 117006 - DNA, 213 bp, Glycine max
  Clone ID: PAT_MRT3847_76668C.1
gagggaactcgaacagcaaacctactattaaaaggaagggcccaatcctaaaaatagttcaacgggcccaacccaattccaattccaatcaagctaaattcaaatttcggggcttcaaaaagaatacaaatatttttaatcctcacaaaaaaagccgggaacaaagtttactaaatagaagcgaaatcttaaaataaaaaaacttcaggggcg

SEQ ID NO: 117007 - DNA, 371 bp, Glycine max
  Clone ID: PAT_MRT3847_76669C.1
tccacgcgtccggccaaacgcagtaaatggccaaattgtggctgctttcccttgccttcggcattggcatcgccccctttctttttgccgtgcccctccaaaaggccaaagggacgacgcgaaaatggttggccgaacacatggacgaagtgatcagcgaaatggacttggccaaagcatacggagcaccgtacgatttggtcgaacaaacgcttaacaaacggcggaaaatgctgcgaaaaacggcgaagggaacgagcagaaacattgggcccaaaaatgcgaaggatgccgcgtacgaccacaaaatgatacggcacaaaatatttccgatggcagccgcttcttatggggacactgaaaatgtgaag

SEQ ID NO: 117008 - DNA, 527 bp, Glycine max
  Clone ID: PAT_MRT3847_7666C.1
ccacgcgtccgcggacgcgtgggtccagatggaagtaagcttgaggtaatgacttgcaggccaaggtcagatcttttcatgaatcttccagctctgcacaaacttgacaatatgcttcttgaaattttagatggttgcaaggatatggagttttggtatgttgaccaagggattgtagcccaagatgcagatggatcagcttcattttgcaaaagaattcaacggcaagaggataaatggtggctcccagttcctcgtgtccccccttctggcctcagtgagaactcaagaaagcagttgaatcacacaagagaatgtgcaagccaaatactaaaagcttctatggctatcaacaacggtgctttagctgaaatggaagttcccgagtcatacttggaaacccttgctaagaatggaaggacttgcttgggggattttatttaccattacatcacatcagagaaattctctccagagtgcctgcttgattgcctagacctctgctctgagcatgttgcactagagat

SEQ ID NO: 117009 - DNA, 299 bp, Glycine max
  unsure (1)..(299): unsure at all n locations
  Clone ID: PAT_MRT3847_76670C.1
gncgcgcgcngcgnngnnngcncggnanncggcncgcncncagaacacccgagcgagcaccccanacaacncgncacagngcncncncgncccncgagnncncncncccnngngcgnngcacgncngcncngccgccngctgcgncganncncanccgcgnngnngannagnccgcncncgncagcgncnngccnccancnncnnagngcngggnngnggnccnnnnngncnnnngncnngccncnnccanggnnnncancnnnanngncngangncangngcngnannngnnnggngg

SEQ ID NO: 117010 - DNA, 223 bp, Glycine max
  Clone ID: PAT_MRT3847_76671C.1
atcgagccggaatgtctgagttcttagtctgacacctggtttagagaacctttgtatcatcgctgctttctgacactaagttctttgttggtggtgatgtctcgtctgaggccaggaatgaagctccaactggctcagaacgcttggcagtgggtcttcaacaaagtgcaatcataagtccagaaactcaacattctctgagccatcacagccagcttcaaac

SEQ ID NO: 117011 - DNA, 302 bp, Glycine max
  Clone ID: PAT_MRT3847_76672C.1
atcatatcattacatgaaatgaaaatgccatttttttacttctagcacccaacaacatcatctccgagtgtggatacttacaccaagagccgagcgagacacctacccattcgtccaaatgactactacttcgacaaaacgccgtatattcctacctcattctgtgcttcttcttagcaccattgctatgcctaagaatacgctctttatcaaccaccgaagaataagatgccttctttcaatacaccgatgcgcctgagtgatcgaaacggggcggaaagtatgaaccttagacaaagtgt

SEQ ID NO: 117012 - DNA, 1013 bp, Glycine max
  Clone ID: PAT_MRT3847_76673C.1
tttttatcctcaactaggcctcgttccaaacaaaagtccacagaaaccttttttggttataggcggcggctaaaagccagaacaaaacgcagaacaactaatcgagaatgcaaagttcccgaagcatcacctaaaagcttaccatgcacaaaatcagggtgcccctcaaaatctagtatctaactgcatggaaagaatataaataaacacaaaaaagaatataaacatcaatgtatcaagtccaagtccgaggtgctggattaattacttctccagccatcagaccattcagcttcatctgtaacaggtttagtgaaggatgaatcttgaccccattctccattatttgatgaatcttgaccccattctacattgtttgagggcgatgcattatcttcagtaaagcaagtgttctctccagtgtcctcatcttcataaagttccaccctttcaggaagagaacaaccctgataagatgaattgtccacacagtgccacaacatttggctccaatggtcgtccttgcagataatatgcgggttcccaattataaccagcaatgatatagcacgggttatagccacattaaaccttctataattgctcaaaaagccaagacagtggactctgtcaaactcattgtgtttgatagttgatcgaactgtagatatgataataacctccttctcttgtccttgaaattgttcgacactgcccactttgatttcaggcatatctagattttcaagtgtctgttttattttcagcacttgttgcctatatggagttattatgccaatgttttcctcctttatattcccaccggctatcagtctcctgacaacttctataaccttacttgcttcaattcgattgaaccatgatgggttattcccttctctttcatcacatccttggatgccatagaaaataatagggaaatccttaataggtagcaaatccccaatcaccatgaaagatttggagtctctacaggcaaattcggcacgagg

SEQ ID NO: 117013 - DNA, 1563 bp, Glycine max
  Clone ID: PAT_MRT3847_76674C.1
ctgcgagaagacgacagaagggggagaataggcctttcaatgaccaaaggtacttcttggatgatgagaagctcaaggatttggggtggtctgagggcactacttgggaagagggtctaaggaaaaccatggattggtatgtcaagaatcctgattggtggggtgacgtttctggtgctttgcttcctcatccaagaatgctcactatgccaggagttgagaagtactatgatggctctgataatgtgaccggaaccgcttccaatggtgatgttaaccattctaatcagaacagaatggtggttgttccagccacaaggaataatgtgtcaccacaaaaggcatctttgaagttcttgatatatggtggtgcagggtggattggggggcttataggaaacatttgtgagaagcaagggataccctttgaatatggcatggctcgcttagatgatagatcacagatcttgtttgattttaggaccattaagcctactcatgttttcaatgcttctggggtgattggagcattaaatgtgaaatggtttgaagctcataagccggaaactatacgtgctgttgttgttggtgtgttaacattagcagatgtctgcagagatcatggtctcctcatgatgaattatgcctttggtggtaacttggaagacaaagcatattccactgatgccttctattttagaacacaagccaaggttgaagagttgctaaaggaatatgaaaatgtttgcaccctaagaatccaattgccagtgtcatctgatctcagcaacccacataacttgatcactatgataacaaggtctgataaagtggccaacattccaaacagcatcactgttttggatgaactcgtaccaatttcaattgagatggccaaaaggaattgcaggggcatttggaacttcacaaaccctggtactgtgacatgcaatgagattcttgagatgtacaaggattatgttgaccctacttttaaatgggttaattttacacttgaacaacaggctcatgtcccttctccaagcactaatgagatggattcatcaaaactgaagaaggaatttcctgagctgttgcctgtcaaggactcattgatcaaatatgtgtttgagccagaaaagaaaagcttggggttttgagtagcataattaaccatatataaatgtatacatttcggtctctatcattttattttcccttttttggttagtttggtttagtttgatagaattgaatttcatattccttttacctttttttttttcatttgtatttgcttctgctttttgtagatgcttgggttttgtagtttatattttctattccataacagaactattttggtcaaaatcaaaagaagttgaataaagggttaacccctgatgtatgaaactatgaatatatccaaattcgtccatggatttttttaattattcattaaaaaaaaagatccttacccttttgataccacaacaacatacctcgcgcgataacgtaaaaatgaactgggatcttaaaaaaaattttttgggggggggcccc

SEQ ID NO: 117014 - DNA, 165 bp, Glycine max
  Clone ID: PAT_MRT3847_76675C.1
tcgactgctgctagaatactacagaagggcaataaatattaatttaggggtacacatgttggggtgaatttatattaatgggaggagtgggtatatattataagaacggttttgggtaaaatatataaattgattatattcttatttctaagagtactgaattaa

SEQ ID NO: 117015 - DNA, 567 bp, Glycine max
  unsure (1)..(567): unsure at all n locations
  Clone ID: PAT_MRT3847_76676C.1
tacgttttcggcagatttatgatgtatacttgtgataatgaaaagtggatccctatggcaccgaaacaggaaacatatgataaacaatggattaaataaagtaactcgttatccattttcttgcccaagttgggatctctatttttttatagggtcccaaatntagcaattaattgtaccaaaatatntacccaatcgatgtcatgtggagctagagcatgtcattttgaaacgtacatgcattttatttttatattttatgggtgcaacatggaagatgaacggcagggaataatcgcaagctatctatcaatcatttattaatttatttttttcatgcaaatttcaatagtctaccttgcaagaaaaggaattacgattgaataatgctttgtctttatgaaagattcgacgcgattggatgcctcgccaaatataattgggtcactttcaagtgttgttgtgagtagaaggactgagatctggaaggcaaaaatttagaatcaaatttgttgtattcaattttcaataataaagttatattgaagtttagtgattgtaactatt

SEQ ID NO: 117016 - DNA, 295 bp, Glycine max
  Clone ID: PAT_MRT3847_76677C.1
gtcagcagaaaaaaattaccccttttctaagggtcacttggcaaacgtaatttcattacctaaatgggacaaaaaaaccctccttaaaccccccggcccattgccaattttttgtttttggccaaaaagtttttccccccccccatttaaaaaaaggggaactggtttttcctcaattttgaaaaaaaaaaaatgaagttgggttttaaaacctttcgaaattaccagattaaaaagcggggttttggcctcaacaatttagaccgacagggtccacctttttttggaggggcat

SEQ ID NO: 117017 - DNA, 257 bp, Glycine max
  Clone ID: PAT_MRT3847_76678C.1
gagacctcaggtcaagccgggctacccgctgagtttaagcatagcagtataaaataaaaggtaaaaaaaatccgaaccgccactcgatacgatcatagcttacctttgctttcatgtcacatcatatctcttctaatatgtcaacttaattcacttcacttccccttactttaaaacgtcgtgaactggaataaccttaccttacccaaattaattgcctttcaacacaatttcctttacccaacttgtattataac

SEQ ID NO: 117018 - DNA, 204 bp, Glycine max
  Clone ID: PAT_MRT3847_76679C.1
cacggctgcgagaagacgacagaagggggtcggggcttactgtagacaataggccattacatcaccaaaccgcataagaaaaactacctccaatcattacagctaagctaagagtaccgtatgacaaatccgtgacatgttttttgaatctccaagaaacccagctccattataccagaagcattccatgacatatggacgact

SEQ ID NO: 117019 - DNA, 322 bp, Glycine max
  Clone ID: PAT_MRT3847_7667C.1
agaagagctatgaccacgcatgacacacagccgtaaccttttttttttgtgtctcgagcctttgttcactcttcttctcttgcaactagggttttagcacaacttatggggagggaaaccccctctccaaagaaaaatttcccattagggcaccaggccttcacccatttaacagttgacagttcccaaccaaatgtccacatccaaaacaccataaaatttttattctttcaaccctagctaatgacaagttcctatcaaccttttctgaaaaagaaatttaccagcctaaactggagatgggatcacacttcttcacaat

SEQ ID NO: 117020 - DNA, 401 bp, Glycine max
  Clone ID: PAT_MRT3847_76680C.1
tctcgcgtccgcggacgcgtgggctacaagatttggatttgtctcacaaggcatcccctggtgagatcacgtcggctgtgggagggttaagcagctagcagggatcgaatatggcaaataactgtctgggaggtcctataccacctgccgatggtgagtagaaaacatgttcgaggctagatatgagctataatcagctgaagggcagcataccctgggaaataggaggagctgtgtcctagcaagaacttggactggaaaagaacttactaaacgggaaaatctcaacggtaattgagaactgctgtttgctcacaactttgagtgtgacacagcacaagctgagcggtccaatacccgccgcagttgcaaagctgaccaacctacgaactgtggatgtc

SEQ ID NO: 117021 - DNA, 358 bp, Glycine max
  Clone ID: PAT_MRT3847_76681C.1
ctcgagccgtttaaaaaaaaaataaaaaaaaaaaaccaaaagagaaaaaaaaaaaaaaaaaagaaataaaaaaagaagaataaaaggagagcagaggataaaatactggaaccaaaatgaagaaaaaaaaacaagactaaaaatgaaggggcggcgcacatttattggtcctcatcccacgcggaataaaattccgtccagcttcctgtaagggcacctattttccttaaagggggcaatgataagttcagggaattatcgaatatggatgattctcggtgaaaagttgataacattaaaaattgcataacaaatatgaccctgaaagttaaagttaaaaaccgggggtgcctaaagg

SEQ ID NO: 117022 - DNA, 317 bp, Glycine max
  Clone ID: PAT_MRT3847_76682C.1
ctatcatatgtgtagagaatctctactttttgcgcgctctggaatccaccgtcactctcccttctcaacgcaaggccatcttcagcgaccttctctcaagagacgttgctcttttcttagaacgatacgggtccaaactctcgtgcagtgagcttaacgaattctattcgatgaaagacggttatgaagttaattggcacgcgaagcggttaaagagcataattagtccgacttctgaagaactgaagatgcggccagtgactgtgaaaaatcggaggcgcgcctgcttggacaaactgctgtgccaagggcattac

SEQ ID NO: 117023 - DNA, 1937 bp, Glycine max
  Clone ID: PAT_MRT3847_76683C.1
ttttctttccttctcccaaacacacttgaactccagtcatttccttgaagttccttatgcaaatcccttcagaaaatctctaatatccaattgtcaacaatcaccattgcggaagcccaaaacaaatccatttcaccgaagaaccatgaccgttacaacagaattcgcagcagcgacaaacgacgaggaggtgccatccggcgtcgttttgttcgggaagtatgagttaaggcggttgctgggagctggcgcattcgccaaggtgtaccacgcgacgagcgtggaccacacaacccaaatccatttcacttcatattccttcaacaactcgtcacctgaaccgaaccatgagagaggcgcagaacgacatcgttgcaacagaattcgcaacgacaacaaacgacgaggaggttccgtccggcgtcgttttgttcgggaagtacgagttgcgaaggttgctgggagttggcgcattcgcgaaggtgtaccacgcgacgaccgtggacgacacgcaccagagcgtggcgttgaatgccgtgagcaagaacaatgtcctgaacggaggcttcgcccccgccgcggcgcccgccacctcctccagccccccccccccccgccccaccatcactgaccccttcgaggctcccgcgtccggttcaatactctccctcgtcatgtcctacccgactggctgttacacacggtctgtgggacccctacctacgtggcacccggtggtctcccccagattggccttccggcagctgatctccgccgtgaagcactgccactcccgcggcgtcttccaccgcgacctcaagctcgacaacctcttactcgacgaggatgggaaccttaaggtctccgatttcgggttgagtgcggtcacaggtcagatccgacccgacgggctgttgcacacggtttgtggaacccctacctacgtggcgcccgagattcttgcgaagagaggctacgatggcgccaaggtggatctttggtcgtgcggcgtcgttttgttcgcgctcattgctggctatttacccttcaatgattacaatccctccgttctgtataggaagatttaccgcggtcaattccggttcccgaggtggatatcacatgatctgagattcctcttatcacgacttttggacacgaatcccaagacaaggataaccgtcgatgagatctataaggacacgtggttcaatgcggatggcgagtatcggttcaaccgggttttggtcaaggagagtgagtgtgaaaagcaattgggtcgaaccggattcaagtctttgaatgctttcgacttaatttctttctcgaccgggttggatatgtcgggtcttttcgaggacccgaccggatcgaattcggttgaacgggttgtttcgacagtggtgccagagaaaattatggagagagtggaggcaatgacggaggagggaagggtggtggtgagaagggagaagaatggtggtggagcaaagctagaagggcaggatggtaatttgattggtattgttgtggtttaccaattaaccgatgagctggtggtggttgaaatgaaaagaagtgaaaagggaggggggtttggggggcagttttggaaagataaactgcggccactgcttcttgaattggcaagtgaattggaagagccggtctctcggtgatttctatagaatataatttggtatctatgttttttgttttgggtaacaaccgtaaaccattgtttttatggattggtgaaggtttaggtaatgttttaaggaacttatataagtatatagtaaagaaatgaacatgtttaatactactagaatttaaagatacttttggactctttttcataagtttaatttattagataatctttgcaataaattttcctactgtgaatttatgtgaataaagcagaattaatactt

SEQ ID NO: 117024 - DNA, 481 bp, Glycine max
  Clone ID: PAT_MRT3847_76684C.1
gccatcccaacaagggaaaataaatatttcaacataccgatggtgaaaatcaacttaaccaactttttggaagggacccaaagaacctaaaaaaagggccaaacttgaaagcaaaaggatgagggcgccttcctttcaactataaccccttaccgggggggtaaaataaaccaaatgccttattatcaccctcaaaaaaaaagggtgcctgggccaaggaattttcaaaaagggaaagccaatgggtcttggtgaaccggttttttaacaaactcaagctggtccctttggggaacccttaggaaacccatggctgtggcccccgatggagccccacccaaatatttgacaacggcggaaccccccccatttacaagttttattggaaaaataaagcgggggaaaacaaaaagggatccccccctggtcattgggtctttttggcacccaacaaacccaacatttggatatcggttaaacc

SEQ ID NO: 117025 - DNA, 324 bp, Glycine max
  Clone ID: PAT_MRT3847_76685C.1
tccaggaaggtttcccgtcatcactgtatgacgtcctccttctttgggggggggggggggagaaagtaagctggataaagaggaatagtaggggcaacagccgtagtaaacaccccataatgcagtacagtgggattagaacccggttggatatgcaggtgagacgtatgcacggcgttttacatttgcaaaacgcccgaaggattgtatatgagccgtgattagagctgattagcacagaatccagggtagagcttaggccttagaaggcagaagcgaaaaagcatagactcgatgtttagagagggtcgtgcttaggagggg

SEQ ID NO: 117026 - DNA, 257 bp, Glycine max
  Clone ID: PAT_MRT3847_76686C.1
gaattgaatcaatggctctgttacaccgagtcatgcacactatcactataccatccatgtatcagcatcagcggtggcaacatgcttggatgctgcctcctctcaccatttggatttgtggcatataatttttcatcttctttaggttccctccttcccttgatctctctttctcatgcattgcccttttgtttctttctttctatctgttttacagtttcaatcacactccgttatggttattacggcgattcttg

SEQ ID NO: 117027 - DNA, 651 bp, Glycine max
  unsure (1)..(651): unsure at all n locations
  Clone ID: PAT_MRT3847_76687C.1
atttgcaaactccagaatttgcaagttttttcagtcattggatgcatggagcttaaagcattgcctaaaggaatcgggatgttgattaaccttcgagagctgaaaataaccacaaagcaatcttctctgtcacaggatgaatttgcaaacttgagcaatcttcaaaccttgagttttgaatattgtgtcaatttgaaatttttgttggaaaaggcacaactcactcaactcagttcccttcaaatattggttgttagatcatgtgggagcctaatgtccttacccctttatattctccctaaactagacgctctgtttgttgcagactgtgggatgataaatttgtttttgggtgatgaaagcccaatcaaaagatggaggatgaaatttctgcatgtagagaattttccgtggctacaagtacttcctgaatggatcgaaggagctgcggatactttacagacattgatgatttataatttgcctaaacttaagtttcttcctgagtgtttacctagaatgactcatcttaagaggctncatgttgcagaatgtccttcactgctcttttatccaagtcacatccattgcctcactacccttagaagatttgagcgtagatggttgccctgcatgggactgggagtacat

SEQ ID NO: 117028 - DNA, 935 bp, Glycine max
  unsure (1)..(935): unsure at all n locations
  Clone ID: PAT_MRT3847_76688C.1
cctttctccctcctcagctcctccacctctagtttcagaaaaacctcgtcactctgcccccatgctttctctccctccctccgaccccttctccaccttctccgccggcttcacgccgtgggaccacgatgaggattcccacgccctcttctcccccaaacccgtctcttccagctccggctctgacgacaaatccgaaccgaaccaacatgtatccgcctcctccacggcgatggaggagcggaaacggcgccgcatgatatcgaaccgggaatcggcccgcaggtccaggatgcggaaacagagacacctggagaaccttcggaaccagttgaacaagtgcagggtcgaaaaccgggaactgagtaaccggttgcagttcgtcctgcaccacttgaaccgcctccgaaccgaaaacgaatggttacactccgagcgaaccttgctccgccaaaaagtcgccaacttaacacaaattttgattttccaacaattccaaactttctcccctgcatggacatgcaccaacaacaacacctcgctcatgacaattaatcaagttaattaaaccctatatatatatatagagagagagatttataataaggtcttggtaaaaaattccaagtggtctaagatgtcctatatgtaattattgttaaaagttagataaagtcttaaagagatggtaaagggtgggatttttgggaaaaatattaggcaaggttttggaaaatattagttcatctttttcaaaaccaaaaggattattgtatattgccgattataatatatctgtgtaaggtattagttgggaaaatttttatttcattaaaaccaaaccatnggggtttttntntntnaccgaatataatnttttgttttaaaaaatacttttctttttttgtttccnaaaaaaaaaaaaaaaaaantcg

SEQ ID NO: 117029 - DNA, 196 bp, Glycine max
  Clone ID: PAT_MRT3847_76689C.1
gtgttaaattctgatcactggatagtttaatagaacacagcccagaaacacccataggacatgcatgctaaaaagattatattaagcagcatggtcaaaatcaagtcttaagccgcaaatgattcaactacacacatttcacaggaacgcgtgcatactagatcagacctatagtgaacaatagagatcccatcca

SEQ ID NO: 117030 - DNA, 547 bp, Glycine max
  unsure (1)..(547): unsure at all n locations
  Clone ID: PAT_MRT3847_7668C.1
tcggaaattcggctcgagatgatgttaatgacctaacaaagggagaagaaagagtgaaaatttcatgggtgaataacactactaatgatttcccaccaccctgtcactacataccccgaaaccttgtgttccgagaggcttatgttaatatttctctatctcgtattgggaatgaggattgttgttcaacttgtatgggcaattgtgtattgtcatctaaatcatgttcttgtacaaataaaactgggggtgaatttgcttacactgcaaaaggcctactaaaggaagagttcttggatgagtgtattgccctcaaccgtgatcctcaaaattatttctattgcaaagcctgtcctcttgaaagatcaaagaatgatgattgtttagaaccatgtaaaggacatttaaagaggaagtttattaaagagtgctggagcaaatgcggctgtgggaaacattgtggtaatcgggttgtccagcgtggaataacttgcaagttgcaggtgtttttgacttcagacagaanaaggtggggtcttcgtacctt

SEQ ID NO: 117031 - DNA, 442 bp, Glycine max
  Clone ID: PAT_MRT3847_76690C.1
aattcccggctcgacccaagcgtcagtccaggcgtcagaaggctgctaaatgaggacagaagggcatgtgggtaatggctcatactggcggaccttgacgcgccaagacacgttctgaagccacggcagaggactgtgcgataggtatatgcagttctgacagttccatcgagagccatggtggccgtgagtggaatcaacattgcctttaaccgtgaagcagttggtccagcattgatcccggctttgatgctggcacgggaagggaaattgaggtgggagactatagaagatataaggtgtggaatgtgtgtgaaagttatatgtgatcacataagccttgatgtgagaattgggttaccagatgtttggacaatagattcgagtgatacattacagatctatgaaaaagagtgtgaatgagtgcatttgatggaagatg

SEQ ID NO: 117032 - DNA, 507 bp, Glycine max
  Clone ID: PAT_MRT3847_76691C.1
tagcattcataaagaaataaaaacaaaagagaagcacgaacagtaactttagaagatcgatcatcatcaatggctgtccaagtttatattgtgtactactctatgtacgggcatgtggagagattagcagaagaaataaagaaaggagctgattcggtggaaggcgttgaggccaaactatggcaggtagctgagatattgccagaagaggttcttggcaaaatgggagcaccaccaaagagtgacgtaccaatcattacccctaatgagctctctgaggctgatgggtttgtctttggcttcccaacaagatttggaatgatggctgctcagttcaaagcttttatagatgcaactggaggtttgtggaaaacacaacaacttgcagggaagccggctggaatcttctatagcactagttcccagggtggtggacaagagactacagcgctaactgctataactcagttggttcatcatggaatgctatttgttccaattggatac

SEQ ID NO: 117033 - DNA, 402 bp, Glycine max
  unsure (1)..(402): unsure at all n locations
  Clone ID: PAT_MRT3847_76692C.1
aanncggcncgagaaacctaactactaaaacaaataaactaacatataaaatcattccaagaaagtctttatagtaaaaataggggtaaaacactactttatcataagaactgataaggcccgacggattattagattcagaaaattttattgcagctaattctttagttactccccctcatattcagcctgagtggtattatttattttcttacgcaattcttcgttctattcctagaaaattggggggagtcttgtctcttatgggatcaatttttatttgttctatttaagttattgtaaaatcaaagtaagggtcaattggcttttaccctagactaaatttagctgattttataatttatgggaggagaggtatcttaaaagggggtgggggcgaat

SEQ ID NO: 117034 - DNA, 385 bp, Glycine max
  Clone ID: PAT_MRT3847_76693C.1
aaggactataataccgtcagccacactttacattccatcctcactcacacactccaagggagtcataacaagaagaaggaaaagaataaaaaaaaacacttcccagacttcaaagacctcatattctacaccacacaccaattcctccgttctctcttttttttaataaattttttttctttcttttctggcacaaccacacctatttttagcaacttgctcgcatgcttacaaacccctccattgagaagcctttttttttgcaaagcaaaaatcatatgaataaaatcattctgcactcttccaccacccccatactgctctactcttactccaggtgcatgtcctttgtttcctcccctgttcttcgaagcaagagatccaa

SEQ ID NO: 117035 - DNA, 765 bp, Glycine max
  Clone ID: PAT_MRT3847_76694C.1
tcaataatcaacacggattgaatgcacttccaaagcttctctcttctcatacacattggagcacagaaagagccatcacacgggccacctgatacacaaaaacaacaacatatgatggctcaattaaggaatgtggcaattcttgtcgtagtcgttgtggctgcagtgttactacagagcacagaagctaaagattacgaggtgggaggtgccacaggttggactagttttcctcctggtggtgcttctttctattccaaatgggctgcaaattttacattcaaactaaacgacagtctagtcttcaacttcgaatctggaagccacagtgtggtggaacttaccaaagctaactatgaaaactgtgaagtcgataacaacatcaaagcctttaatagaggaccagctagagtcaccctcaatcgcacaggagaattctacttctcctgtaccttctcaggtcattgcagcagtggccaaaagctaagcattaaggtcactgattcttcatcaccagcacctcagaaagcaccagctgaaggtccttcagcttctgctcctccaccacagaatgccccagctgaaggtcctaattcagcttctcctcctgcatctggttcaggttccaatgaaggagctccatcatcccaaactgaaccagctcctatagcccctccaccacacggctcagccacacttcttgcttctaccttctctctatttctcatcaccattgccatcaattttttgtctcatttttaggat

SEQ ID NO: 117036 - DNA, 237 bp, Glycine max
  Clone ID: PAT_MRT3847_76695C.1
actttgttttgcttgtgttgatgctgaggaattccgattggctcagatttgtggtctcaatgtcatcattcaggtggatgatttggaagaggttagtgagttttaccagaacagaggatgctttaatgaactgatatctctaatggagagtggacttggactggagcgtgcccatatgggtatctttactgagttgggagttctttatgcaagatatcgtcctgagaagttaatgga

SEQ ID NO: 117037 - DNA, 947 bp, Glycine max
  Clone ID: PAT_MRT3847_76696C.1
atttgatactactttgtaattgacaatttctcagaacagtctagtatgctggaggggggggtagccttctcgatgtgcaggtttccttaattcttatgcaatatgtagctccatcatctctttttctttttccttttcaagttgggtgcaagcctggaatttgatttttgatattggagagggaagaaagaaggtgaagcccccgtgttgtggttcgaaacctctgactctgtctgttgccaacaccagtttgaacccgatttgatactactttgtaattgacaatttctcagaacagttatgctggcttgcatttaatgtataatttgtttctcgatgtgcaggttttaaaggacggtatgcaacatttagggaatataatatgtagcaagttgggtgcaagaatggattctgagcctaaacgttggagaatcttagctgatgtgctctatgatttagggactggtttggaagttctttctcccttgtgtccacagttttttcttgagatggcaggcatagggaatttggccaaggggatgtcaattgttgcatcacgagctacaagattacctatatattcttcatttgctaaagaaggaaatctaagtgacctatttgctagaggggaggctatttcaactctctttaatgttgttggaattggaattggaattcaattagcatctactgtatgtgcgtcaatgcagggaaagttggttgtggggcctctactatcaattatacacatatacagtgtttctgaagaaatgagagcaactcctgtcaatacattgaatccacaaaggactgcaatgattgtggctgattttctcaaggctggaagtgtatcaagcccagctgatctaagatatcgagaagatttgctatttcctcgaagactcatagaagatgctggaaatgtaagagttggtagggatttgcac

SEQ ID NO: 117038 - DNA, 200 bp, Glycine max
  unsure (1)..(200): unsure at all n locations
  Clone ID: PAT_MRT3847_76697C.1
gnccttttttttttttttttttggattttcctttctacgaacatgttattcaaattcacttataaaagacaagttgatcatatcatgggtaaacatgggttttgtcccttctacgggggggggaaacaaactggctaacaacctacaacttttggatgacaactgagttgggtataccagcttggtctatagactggttc

SEQ ID NO: 117039 - DNA, 315 bp, Glycine max
  Clone ID: PAT_MRT3847_76698C.1
aaaaaaaaaaaaaattgttaatgggggccccaattttttaaaaaaaaccctttaaacaaaggggcaaggttttttttagggggttgccccacccaaaaatttggcttccctttttcccaatgggaaaagggcctggtaaaaacaaagcaaatctgccccaaaaggctgcttaaaaaaaaacctttttgggggctccccaacccttaaaaacataaacctgtgtaaaggtaaaaattgtttacccttgggttttataaaaaggggggggccccttcccccccgggggggaaattttagggggggcccccccttttt

SEQ ID NO: 117040 - DNA, 251 bp, Glycine max
  Clone ID: PAT_MRT3847_76699C.1
ggaattcggatcgaggatgcatccacggatcagacccatcgccggaaaaatcaaatgcgcggcgagactcttctgttcatcttcgaagatcacgccggcgggacgccgtagcaaatcccgacgactctcgcgggtctccgagcccgactgacggagaaatcgccgtcgctatcggatttcgtcgcgcttaaatcggacagcgcatactcagtggaggtcaaggagaagaagaagccgcttccgaagccgaa

SEQ ID NO: 117041 - DNA, 396 bp, Glycine max
  Clone ID: PAT_MRT3847_7669C.1
tttttgatgcagcaaaatatagatatattatgtatgctggccggagcaatttgaaggaataaccattcaaaaggatgtctaaaatcaaaacaacagtattatggttactgcaaacgacgaaaaacccctgaatgcactcccaatatacacgactttataacaacaaatacaccttatgctcaaacaacccaattgcataatttttaacatccacatctaacgccacaacaaaaatacaaccaaaataataaaacatctggactgtgagcacttcaaacgaaggggccatctaaacacaagcgacgatcagatgctaacactatcactgattgagggttccgaaaacaccggtacaagatttggaagattcatgaacaagcgtttaaatgaagatta

SEQ ID NO: 117042 - DNA, 562 bp, Glycine max
  Clone ID: PAT_MRT3847_766C.1
caaccatcaaaaatggaattcaccaatttcctaactttatacatgtctatctccaacatcctctcccgaagtcccccacttaactcactcgctcactagaaactagccacctttatatgtttagagaactctcactttggagcaaagtcaagtcaaacattactcttcaatctttacccacaaaagtttacccaaagtggagccttcttgttggttttgctgtttttgtgtttactttctttaaaactaaggtatgttgttactcttctcccaatgctgttgtttcttgtcaccttgttataaacttagtagtttatgaaaagtgtaacgcccttgattataagttccattaaagaaaaatgcttattctccacctttaggtactagaaattaataagtaggtctaagcgtttcgttcaagatcaagggaaaaatacatgcagattccctttagtaacaagaatttaaatctttattttagagaattaatgttgagcagagtgtgctagatattataaacctgatacttgtcttttattcttatggataaaaaaaaaaggat

SEQ ID NO: 117043 - DNA, 324 bp, Glycine max
  Clone ID: PAT_MRT3847_76700C.1
gggagcctccgaggggccggcgcttttttttttttttttttttttttttttttgagggggaaaaaaaatggttgtcttgggcgccagtgtgctttgaaaacaaaccttgctaaattgcgtaaaaaatgcacacttttattccaagcgattgacttttgactaaaattaaatgactgtccaattaaagtctgatacctgtaacatgatacatgggcttccaaagacgcaaacattgctggggaccaacttggcgctgcccgtaacattacaaattgcttgagctagatttttgcctgggctctacaatgataaatttatgtctta

SEQ ID NO: 117044 - DNA, 635 bp, Glycine max
  Clone ID: PAT_MRT3847_76701C.1
cccacgcgtccgaatcaatcaattgaagaaaagagagagagaaaatgtacgtggatcacgcgttttcgatttcagatgaggacataatgatggatgcagcgtacacggtgagcaacaaggcacccatgaaggagatcgccctcgccgtttcccttctcgtctttggaaccctagctatcattatcggctccctcatggcctacaatcacgtcggcggcgacaccactcacggtaaccacattattaacatcccttttcagaattcctgctactatttataattattattttaatgatggataggtctgttctttgcgatactgggaacactcttgttcattccgggtttctactatacgcgctttgcctattgtgcttacaagggatacaaagacttctctttctctaacatacctcccgtatagcctatgctcaactaccacctttatttatgtatagaacatcctttttttttatttttattttgcctcacaagtgacaactaatgtatatttgatattgcttgcattgctctaaactggtatagtatatttattactgctaagattttgttttcttttcttctatagaatcaatcttcttgctctgaaatcttttctctctggtttcattac

SEQ ID NO: 117045 - DNA, 916 bp, Glycine max
  Clone ID: PAT_MRT3847_76702C.1
ccacgcgtccgcagagaggtgcaactttaataggaagcaaagcagaattcaatcaacacacgcagctcgctctcatttatgtcatcaattgccgaaaaccttagctaaatctgaataatcaatcaatcaattgaagaaaagagagagagaaaatgtacgtggatcacgcgttttcgatttcagatgaggacataatgatggatgcagcgtacacggtgagcaacaaggcacccatgaaggagatcgccctcgccgtttcccttctcgtctttggaaccctagctatcattatcggctccctcatggcctacaatcacgtcggcggcgacaccactcacgggccgttccccgccttacctggagcacccttgttctctttggggtccccctatacgccttcagccacgtcggcggccaaaccacacaaagacttctcattatctagccctcctcccgtacctcctcgtcctagcaaccctccttattataatcatctcccgggttgctctctgccacattgggggcactcccgctcactccctgttctttgcgatactgggaacactcttgttcattccgggtttctactatacgcgctttgcctattgtgcttacaagggatacaaagacttctctttctctaacatacctcccagatcgtctatttttaattattgtattttttcatttaaaatccaacttgtgtgtatttgatccttcttgccgacgtatagcctatgctcaactaccacctttatttatgtatagaacatccttttttttttttttattttgcctcacaagtgacaactaatgtatatttgatattgcttgcattgctctaaactggtatagtatatttattactgctaagattttgttttcttttcttctatagaatcaatcttcttgctct

SEQ ID NO: 117046 - DNA, 431 bp, Glycine max
  Clone ID: PAT_MRT3847_76703C.1
gcttgaatgttgtcttcatccacacttccttcggattccaacacaccaaacagaacctccacctacgcaatccaaaccaaattctctgttctcttctttctcaacatttcaatactcaattccatccctcaaatcactcttcctttttttctctttctaacatccactcctttctctcctaattattattattttaattttcttttcaaacaaacactttttttgccaattcgatttgcttcagcgtcgaggagccatcgtcgatttgtttcccttctgtctgatcttctgaatcagtgttttacagagagatgggtagccccgagaagaatgaaaataagggctttttcgccaccatgacttccggcttctccatgttcagcagcgccatgcaccgatctgtcaacgggatgctgggacatgaaggggta

SEQ ID NO: 117047 - DNA, 735 bp, Glycine max
  Clone ID: PAT_MRT3847_76704C.1
gtggcttcaactgtgcagaggcagtgaatgtggctcctattgattggttaatgcatggacaaagtgctgtcgagctttacaggttacaatgccgcaagacatccctgtcacatgacaagctgttgtttgggtcagcactggaatctgtacgagcccttgcagagctagctcttggaaaggaaactccaaaaaatttgaaatggggaagtgtctgtgggaaagatggagatcttaccaaggcagttagggcaaggataaagatggaagaagaaaggctggactgtcttccaactcatcttaagttgctgaagatgaacagtaactttgatttgtacaaggaaagagaatgcttctcttgcttctatgacttgcacctatctgctgtgggttgtgagtgctcccctgacagatattcatgtcttaagcatgctaatttgttctgctcgtgcgaaatggagaaaagatttgttctgcttcgatatactataagtgaactgaataaattgctagaagcattagaaggagattcacatgctattgaggtgtgggcaaataaaaactttggaatggtttctgccaatgccaatgaggtttgcatagataaaccagatcttgagaaagacatgtacagaaccaagaattgtggaagaaatggaaagctcaactgggctgtgtcaagaccaaggataggtcaaatttaaaccacctaaccagtcctattagtcatattactac

SEQ ID NO: 117048 - DNA, 312 bp, Glycine max
  Clone ID: PAT_MRT3847_76705C.1
agagaacacaattctcttattgatgttatgcttacagtttcagattgatgactctgaggaggtgtcatgaaagatgatcccattggtattttctcaggataaatccatctatgaagcagtggagagcgctttccatacaatatatatcaggaaaagtccaattgaaactgccaataatcttttgagtcttgccactgattccaatataggagatctagcatctcttgagttatagtaggtgccctggactctaagggtgaaatatattgcagcatgatatctcattatgggattccttattgctttaatgta

SEQ ID NO: 117049 - DNA, 209 bp, Glycine max
  unsure (1)..(209): unsure at all n locations
  Clone ID: PAT_MRT3847_76706C.1
anttctagatccgccgagcggttcgccgaccttagtggatgtttcggntcgatatcggnaaatnagttgncaggcgacgaatagcgtgcaatgctgtaggaggatnntgctcctgatgagttgtacgtgcgtgatntanganccttncgcgtacattcattggtccatcagnctgtgttactctcgtggtgtaatatngtatattcgcg

SEQ ID NO: 117050 - DNA, 492 bp, Glycine max
  unsure (1)..(492): unsure at all n locations
  Clone ID: PAT_MRT3847_76707C.1
ggtccggtgcggagttcccggggggacccacgcggccgcaccgacgcagatctgtcttcccaagcaggggctaaatagtgggtnacttnttnggatggggaaancgagagaanagacgagtgcgtcatggggtgtaccgggggggggaccttgatcgcgccatcaaattttacacagaatgggtangagtgaggcttttgaggggaagagatatcccanaggggagagggggggatgcgtttcttgggtttgggcctgaanaatcccattttgtgtgggagttaacatataatatgggggacctctgtgaattgggatgggttggcattttgcgattggactcagggatttataaattggggagcacataggggggggggggaaacatacaagggacctgggcaggtaaggggaactctggatcggctttgtagggcctgggggatcttttggactatccaagagctacaggcatgagcattttggaaggat

SEQ ID NO: 117051 - DNA, 364 bp, Glycine max
  Clone ID: PAT_MRT3847_76708C.1
gctcttctaagaattgctgtgaagaatggtcagccccttttcacatttgctgttgacaataatagcaacattcttgtggccacagtgaagaacttggctgtctcaaaggaagacaagtgcaaccgtatctatacatttttcacctttagggagggcaaaaagaagaacggaagttggatgaatcaagcaagcaaaaccaaaggtccggattatattcgtcatgctgttgcccaaatgaaggtttctgattcgcaccattatgattcaactagtcagaattgtgtgaactcctctacaacaaaagagtttgttttgttttctgtaaagctaaaacagggagatgctcaggtcactgactatgaac

SEQ ID NO: 117052 - DNA, 236 bp, Glycine max
  Clone ID: PAT_MRT3847_76709C.1
aacaactagtctcatctgaagggcgctttttaaagataacaggggggcccctcaaaccttcccctttcacttttgagaagtccatattgagaggccttccctctctcttaatgaacttttcttcattcatatttttttccagtctcaagattatcaatactgacaaaccttatctaattaatgttatcataacttttacgattttaacttattcatttttcaacaaaaaaaaaata

SEQ ID NO: 117053 - DNA, 344 bp, Glycine max
  Clone ID: PAT_MRT3847_7670C.1
ttttgttcctcactgaccaagccatggcgatgagaaccaaacaccccatagctggggttttatttttcaccttagacggagaaaaaacctagcctttggcgaatgccaagaaacccacgaagaaaaagacaaccgggggaaaacaacaggcaaacaccaaggcccacatgcacagtaaaacacaaaaggtgacatggggataagctggcaaacatgagacacggatcatcgtatgaagcaagatcgagagaaacaaaatcgggaggaaactcgtgagaagaaagaagaagaaagccgtgaaaaggaagaataacaacaagagcagcttgaggaacaagatgaaa

SEQ ID NO: 117054 - DNA, 1259 bp, Glycine max
  unsure (1)..(1259): unsure at all n locations
  Clone ID: PAT_MRT3847_76710C.1
ctcgagccgaacaaagttttggtgcagaaataggccaggagaccctgcccgtgatagatttaacactggcatgccaggatatgctgaccaaaatcctgttgttggtcggatgggtggtaattttacaatagctgaaggcccaacaactccaggaccatttgcccctgggttgactcgaaatgagggtaccattccaggtgttggagttgcaatgcccttatctattccttctcttgacatgcctcaaggggagcagaagcaaccccatcctgtttcaatgggtgctcctcctcttccccccggtccacatccctcccttcttaatgccaaccaacagcaaccataccaacagaatcctcagcagatcccacaacatcaacaccaggctctaccacaacagatgggtcctttgcctatgcctccaaatatgcaacaactacagcacccttcccattctcccttccctaatatgcctcgccctccaccccaaatgcctattggcatgccaggatctataccagggatttcatcagtgcctacatcacatccaatgccaatgccaggtccaatgggaatgcaaggggcgatgaatcagatgggtactccaatgccacaaggtccttatgtaggcatgaatcaaatgcattcaggttccttgcctacaagtggagggcctcctcttggtggttttccaggcaacttgccaaatatgcaagggccatcaaatgccaattatcctcaaggtgcttcatttaacagacctcaaggtggccaaatgcctctgatgcaagggtatagtccttaccagtctggtaatcaatctgggatgcctccaaacgcacaaccatagaataggaaattgctttcttccttcataggtgtaactttatctcgtgatttcggtccctttctgtataattcatgttttgatctgatgctgaagcttcacataaataaattgtttctcttttctttattgatctgctgcttgaagttcaacctaaagaaattgtttctcttttcttcatttcaattttgtactttcccccttttgttgtgaatgatttcatattttagttaaggtttacagataggttggctagacgtaatttacattctacacatttgtttgactattatatgttatattaacggcattttaaatttnnnaaaaaaaaaaaaaaaaaaaaaaaaaaaaaaaaaaaaaaaaaaaaaaaaaaaaaaaaaaaaaaaaaaaaaaaaaaaaaaaaaaaaaaaaa

SEQ ID NO: 117055 - DNA, 1031 bp, Glycine max
  Clone ID: PAT_MRT3847_76711C.1
tttacttcatcacaagcccaatatcaaacggcaaaatttgaagagaaacccaactgccccaatactctattaaacaagctcaagagagaagaatcaccagacgcagcgaagaaaaattctcctgagcctgcattcaagaggcaaagaattgagactccatctccattaccaacttttaaggttaggaaagaaaagctgggggaccgcatcactgctcttcagcaattggtttcacctttcggaaagacggatacagcatccgttcttcacgaagccatcgagtacatcaagttcctccatgaccaagtcagtgttttgagcactccatatatgaaaaacaacggagctcccattcaacaccagcaggattgtgataatctgaaggactcagaaggggcaaaacaagatttgagaagccgagggctgtgtttggtgccgatttcaagcacattcccagtggctaatgagaccagtgttgatttctggacgtctacatttggaggcgcactcattggcaggtagagacaagtggagaactcgtgacaataataactatatatttataaataaactaaaaggaagaagaagaagaagaaaacacgattatgctaaagagaaaattaaagctgaagagaacaaaagagcaaaaaagaaaaaggaagctactcttcaaagaggacacgtaaagcagaatgatgtacactagtaaatgattagtgactactggaagagatcgaataatagattaattagctataggtgctttaagaagttttagtgtttttattattaacatcgatgaggggcaggaacaagtgctaaattcagaggcatttgacatattagattagagtttttgttgctgctgtggttagagagtcagtattatatgcctgaatttagcagatggggctagctagctaacacgccttttgttcctgctataatcgatgtattattgtagtatatattttgaatcattaaaggggttttacaccaactttaattttttttattatttatatgaaaaa

SEQ ID NO: 117056 - DNA, 507 bp, Glycine max
  Clone ID: PAT_MRT3847_76712C.1
gaattgagactccatctccattaccaacttttaaggttaggaaagaaaagctgggggaccgcatcactgctcttcagcaattggtttcacctttcggaaagacggacacggcatccgttcttcacgaagccatcgagtacatcaagttccttcatgaccaagtcagtgtattgaggactccatatatgaaaaacaatggagctcccattcaacaccagcaggattgtgataatctgaaggactcagaagggccaaagcaagatttgagaagccgagggctgtgtttggtgccggtttcaagcacattcccggtcgctaatgagaccattgttgacttctggacgcctacatttggaggcgcactcattggcaagtagagacaagtggagaactcgtgaccataataactatatatttatatatatatgtgtaaactaaaaggaagaagaagaagaaggcacgattggcaaagagaaaattaaattaaagctgaagagaacaaaagag

SEQ ID NO: 117057 - DNA, 174 bp, Glycine max
  Clone ID: PAT_MRT3847_76713C.1
acgaggtagcataggagagtcgacgcgcacgagtctcacgcgggtgaaggggtaagacgggaaatctgtatgagcagtgtaaaattttgtccatttctcacaatctgagagttgatttactgtggcatgggacccatcgaaaattttgaatattttacgcttatttcgccgcaa

SEQ ID NO: 117058 - DNA, 526 bp, Glycine max
  Clone ID: PAT_MRT3847_76714C.1
caacgaaacgcaacacaacacatcgtaatacggcattccgttcattgtttctttcaactcaactcaactctctctcacccaccacaaaactagcagcaaaatttgaacaaactaccgaaacaaaaacaaaaccaaagcaaaaatcgttttttttttttctgttcccacgcgtccgatcctcatctattggattaactgattaatattattagggtcccttgtaaaaagaagattcttcatccttccacacaccccccacaactactgggagagaaaaaaggaaggaaattttgctattttctgagactcttgattttattttatttttatattttttctgctctgaagaagaaagatggaaatgatggcataccagtttactcggttaccttactcggattccctcaaactgctcgaggctgatatacagcatgcaaatgctttgttagtttcatctctctctctcttcatcttaacaacttatctattactttctttcttcttatgtgtagttttctattttatg

SEQ ID NO: 117059 - DNA, 443 bp, Glycine max
  Clone ID: PAT_MRT3847_76715C.1
ctcgagccgctcgagccgaatcggctcgagttcaaacaaatctcacttaattacctttttttaaacaaaataaaggtagatctaaaaagtagccagtgaaagattttagaattgacagtattttcttataattttgctttaatgttctgtaggtgggaataatgacttgacctttcaatctagaaaaaaaatggggatactttctctgcaaaagtggtagctggaaaatttctctaaaggttctttatgtgcttgcgaggggcatgcatgtcctcttgagcctaaaccaaatccgcatgtgttgtcaatttgccatgttttatttcattagttcgaataatgtattgatccggtcattcttttttttaggctctaaagaatgactcattttcaagctcttaatttgttacacacttgacatttacttattgaactagaacttg

SEQ ID NO: 117060 - DNA, 277 bp, Glycine max
  Clone ID: PAT_MRT3847_76716C.1
cccggtcgaccacgcgtccgtctttgaaaactttttttcattaagtttttgacgcttactaaatgtttaagcttttattatttcattattgtatctttcaatgtatataatttttcttatttgatatatctattttctgcctcatgaatagttatcacatgcttcttcttggtttgttgttagctagttagagaagtgagagagtgagggcgagtagtattattaaaagggagatgttgattacaaacacaatccttggaacttggtacacaccaat

SEQ ID NO: 117061 - DNA, 346 bp, Glycine max
  Clone ID: PAT_MRT3847_76717C.1
tctacgcgaattaatgctattggattttagcgctatattgtaagaagccctcacgcaacatatgacagggctctttatttgctttcatacattgacggttattatgtcaaacggagatttgttactctcgattcgaaatacatcacatatgttcattctaccatatttaaaatgcattacgtcaagattatagttgttcttgataaaagggttgctatattggatgggattacttgtaccaagggtgacactctttcttctcataagccaatttacaaatctatgacgcgctgtttaagtctgctccctatgttatttatttggggggactaccataaatttttca

SEQ ID NO: 117062 - DNA, 1338 bp, Glycine max
  Clone ID: PAT_MRT3847_76718C.1
ctcttcacaacaagggaaccgtgagtttccatgactgtgcatagataaaattattttctataccgataatgaaaattcatggtaattgtgttggaaggagtttcatgatacaaaaatgcaaagcaaaaatggttacattttaaccttattattgctgttactatacgcgctgtcttcatctgattctagggagaatcaatatagactacgacactgggaaccaaaactcatttgtgtcaaaggttacttatgcaaatattcctgccgcaggtgctggatcaacgatagatataacatcattgcaaagaagagatcggaagcaaaatgattctcctgggtaaactctttccatgaattggctaaaactgtcgataattaagctcggcaagacacgaggataaggcgtctttcacttgcacattattggagttcatatcaagggcatcttcatatagcctttttgcttgctgcagtaactttaccttctctttactacttcccggccttaagcgagatcgctgctgcaatgccacaccccatctaaacaaagcatctggtgcataaacattgccctttaacagcatagcatcgaacttgtcaattgcagccaagaacactctttcagcctcaaaagcagcacccggaccaatatctgctatcaattggcctcggaaagaaagagcaagaccccaattatacagtgctctcacatcatttgaatcaactgacaatgccagcctatactttcttcctgcctctactagtagctcttcacactcttcacaaacatcaataagaaatggcacaacttcttctttacaattgactttattcctcagtcccttcaatattctagtatgttttacagatgatggttggatgctcccagaaagaagagttctcaattcacgactaatcttcaacttcaattctccatgaagaaggtaagtgtttcctaactggcctacagccaacaaactcatgggcttcaactccacagccttggatagtaagtttgcagacctgtataacatgatttcagcctgctcttcaccctgcctaccttttataaactctttcgcttgttttagaaggtctgttgcttcagcaagatacctatcaaacatcatatcatctgaaaactttgaagatgattcattctcgtgtgcagacaaatcatctgcaagatggtgattatcatcgtaattcaccgtatcatcgttatactgagacctgttagatccaccctccctcttgtagtgagcagacctgaaagtctcatgacctccatcgagcagctgctcacgcaaaaaagaggactcactttccatgtgtttt

SEQ ID NO: 117063 - DNA, 276 bp, Glycine max
  unsure (1)..(276): unsure at all n locations
  Clone ID: PAT_MRT3847_76719C.1
ntaggagagtgntcgtgagncaacaaacaagaaaaaattctatttngttcctcaactnagtntcttcactcaatccgattcgcttntctgctcncaatcggagctctctcttctcttctgttctcttcgacggcgtctncgtacatccccgaaccgnattcctgacccttcctatgtccgnattttcganaacnacttctcggcnncggcgagaagtcccggggngcttcaatgactccanggagangtggntgtggngcggaagttgcnaaagtt

SEQ ID NO: 117064 - DNA, 301 bp, Glycine max
  unsure (1)..(301): unsure at all n locations
  Clone ID: PAT_MRT3847_7671C.1
acagagaagggacacaattacaataataaatatagtttgacatcagcatgcaatcgaaaggtgtgtgcgtcgcttccttgccttggggggagggaacgcacgcatcgaactacccacggggnattatactcatcaagttaaataatgaaactattcaaaccatgatgtatcctgcatatacaacactcaatcccactcaagttatctgtaaatatataggcttaattcatgcacacagattgaaatatctgtacatgcacacacatcacagccaagacactgtcgctgtccatgaaccaac

SEQ ID NO: 117065 - DNA, 295 bp, Glycine max
  Clone ID: PAT_MRT3847_76720C.1
acctaatccaccttcatcagataaacccctcaccattgtttggtgatatctccatgccaactatcgacaccttctctttgttcatatctgaatctacgaagatgggaggagagcgcttctgctgcgatggagaactctgcgcaaagtacaaggttgtttgagcatgagaatgcccacgttgagaaggacccctccatgcccacatattaggcagacaacgataacgttgtcatgcactatgcacccgaacggtctatgaggcaagaaatgttccgcgcattcgccatacacgcct

SEQ ID NO: 117066 - DNA, 285 bp, Glycine max
  Clone ID: PAT_MRT3847_76721C.1
cccacgcgtccgcccacgcgtccgcccacgcgtccgctcagaatcattaatttcttccatctggaagggtgagcgattggacaaattcttgttcatgcctagcaaaagtcacagcctatcctcattgattggttggtacttctctctctctccatcttttgaataacttttttcttttataattacacactaactaaatagaaattattttaaatgtaaaattttaataattcacactctgtatacattcttctttgttgaattcaattttagatttgtttgatt

SEQ ID NO: 117067 - DNA, 540 bp, Glycine max
  Clone ID: PAT_MRT3847_76722C.1
tggtacaaaatgatccgagccccctatgtcaatttcagtaaggtaactaaggtttacaataattaatttcagtagtgcgttaccttgctgctctatctatcgggtaatcagtctcttggtcaaaagccggtacctaattcccctgctggtgggccgatcctcgtctagcggtgggaaccggctggtatggatcaattgcttgccctgtctctcttctgttcaaccatcgagaatccgcagttctctttttgggtggaataataggcgaaggaatccgcagctattgaatcagctgttagaaagggacgaagtggcttagttgaacatagtgggacggaaggttcagaggcttcccgtccccggatggtgtaagtccttctcttactgttgaagaaagcgagaacggtaagtactaaactgatagaagactcccacttgtggctaatagtctttattgtggggcacctttcggttctggagaaagtgcattcctaggcggtagctttccaagagagccctacggcagtggaatcggccgat

SEQ ID NO: 117068 - DNA, 439 bp, Glycine max
  Clone ID: PAT_MRT3847_76723C.1
acagtcttaaattagcctgatcctatacttaaaggaacagacacttttcattccaatgaaaagagaaaaatgaaacaacgtcacgttacattgcggacgcataatcactgaatcattagttgaatttgttaaagaataaccgtcaagcgtaatatcgtgtaagacaagaagaagagaagcaaaaaagaagacagaagcattgttgcagtggtggacatgtcatccgtgtattccattccggactccgtggtgtcatcggcaggtcctctgctccacatgccaaggttgttgtccctggcattaccgagaacacctgcggacatggtgagaaaagagatgcgatcagcggatttgggttggacgctgtatgccttctcatacttaacttcaagttcttcaccagacgcaacaaaaaaggccccgttcaggagaatgtcac

SEQ ID NO: 117069 - DNA, 255 bp, Glycine max
  unsure (1)..(255): unsure at all n locations
  Clone ID: PAT_MRT3847_76724C.1
ctatttctcagcaccagtcagcaacaacaacacccctttcctttcaacaagacancaaacttgnttcacagctttttttgttctttcacctcgattcacgaactgggtcatcctctgattgtggnttattggatttcatttgagtacaccacacccccaagatttggatttnaaccaaaaacnagtcnttgtggttggcaggttgccattaangtgatatcataagggattcccaaaaatctgttgtgtcnaccc

SEQ ID NO: 117070 - DNA, 339 bp, Glycine max
  unsure (1)..(339): unsure at all n locations
  Clone ID: PAT_MRT3847_76725C.1
tgtaatcctttttttttntttttttngggagagtatagccaacattaaacaactctatttttatggccagtttgactaaaaaccccaaaaagaggtaattacctaagcagaacagtttgagtacaacaggctataactagattttattttttacatgagcagagggaaagagaacgttttcggtatccaattccatatatggggttgggggggaagggtaaacaatggggcgaatgcaacatgtattttatcaattggcagaggcttatgttgaaataatgaccaccttctactggacaatatgcgttggtatgtgatttcaaacttacgagacgggac

SEQ ID NO: 117071 - DNA, 345 bp, Glycine max
  Clone ID: PAT_MRT3847_76726C.1
ggggactgaataaacagaaccataccccgggggagacacatacctttttcttcaattagaccgcaggtaattaaggtctccggatttcatatggatgttgcatagaggtcaatgctaccgatttgcaggccggactgagccggtggatcacccactgtgagttatttctacttctacacattgcaaggggaaccatgttaattatttgagactgtgccgacatgcaaacacgcttcaaagagaaccacggctgctcgtgaatatctgacaactgatttcatcagaactactccctgctagaatgcactccattggatccctttttcgcgcattatcgtttgacat

SEQ ID NO: 117072 - DNA, 173 bp, Glycine max
  Clone ID: PAT_MRT3847_76727C.1
aacttgtaggcgatcaacctacccctagagcgagccggaaattagctagccggaacctggggcataccagcttcctgtgtaaaattgttattcagtcactagcccacccaagatactagccggtagctgggtgaaagaggaatacggtcacaattcaaaccgcttacaaccta

SEQ ID NO: 117073 - DNA, 676 bp, Glycine max
  Clone ID: PAT_MRT3847_76728C.1
ctggaccctgggcgccggggtatgtagctgggtcggccttcaagctccttgagatacagaaccagcactagattatgagctccggctcctccgttctcgacctcggttgcgcccccggcggctggcagagcttgggtccattacgtaacggcggctccaaagaaggtcaaggtgcgattctagggttcagaccatctccgccggctaaaaggtctttcccccaaggagaacgggttctgcatgattctctcggatatgtgccttggaagcagaattcgcacgatgcttcttcttcggagtgttgaaagttggagggcaccttgctattaaggttctcgagagtgaggatgcaaagggttcttccttgctagcttacttgtctgcatcatatatgattgatgtgttgttcaattcaattgcttttggttgtgtttctaatgtgttgttgtttggtggaagacatcgtggctcagacctaaagctacaaggccttcgtcaagagagaattatttgatatgttcaaggtttaaagccagatgctaagaattgagatatagattcttttgcactatttgtccggggaaatgttaggcatcaatttgcttgcattgcacatcttggtgtcatgatgccaattattgtcattgtgaaattcattattttctagctaggaaaa

SEQ ID NO: 117074 - DNA, 459 bp, Glycine max
  Clone ID: PAT_MRT3847_76729C.1
ggctcgagattccattctctatgtgtattaccctacctctccctttaagatgcaaatcttagtcaagacccttaccggtaagaccatcacccttgaggtggaaagctatgacaccatcaataacgtaaaagccacaaaccacgacagggtaagaatcctccagaaccagcaacgtctcattctcgccggaaagcaacttgaggacggtcgaacccttgatgactacaacattcaaaggagagtactcttaacatctctcgtgtcgagggggcatgcaaagctttggaaagacacttaccggcatgaccataactctagaggttgaaagctacgacagcatcgataacgtcaagggcaataaccatgacaaggagggtatccatctagtgcagcatcggatgatcttacgaagacagcagcgtgaggacaggcgctatctagccgactaccacataaaga

SEQ ID NO: 117075 - DNA, 364 bp, Glycine max
  Clone ID: PAT_MRT3847_7672C.1
gtatgaccaagactttttttttaatcgcatatgggccattgaggccattgggggaacatttataacctcaacacgctgtttgtttcttctattgatttgtatgcataaattcttcttttcacataataacattcccctttactctttcaaacctaatcttgaaagatataattaactattatatatttttacaacttatagtaaatcacttaaaattgatctaatccgacatataaaccatctcggttccttctaatcgattttcacgaaaagtccttgagcactgaaaccttataaatgggtttgacaaaagataagcacttaatctactttatgtattaccttcttcccacttttaaatttt

SEQ ID NO: 117076 - DNA, 342 bp, Glycine max
  Clone ID: PAT_MRT3847_76730C.1
ctcactggggtggagagacagaggagtgagaagaggcacaacttagatgggatgtaggagaggcacgagtgggtgtaaactgtgaagaagaaatggagaaagatagccgtgtgggtgagaagaaggagaagggttaaaacttataagcgaggggaaaacggggtgtgaagggagacgagtagaataggaattttttaaaaaaaatcaaaaacaaattgggtagtgtgaagacaaaaacaaaagtattactaactttttctggtatttttttatatttaagattattgtcacttagattaaaaaatattgaatgaaactaaaaaatattattgttatatttaa

SEQ ID NO: 117077 - DNA, 222 bp, Glycine max
  Clone ID: PAT_MRT3847_76731C.1
ccagagggcatcctgctaatctgtatgatgtcagaatttgttataatactagctagtactggtattttagcatgttcctgcaaaacagcgacagagattgcaaaattggtaattacaagtccaagccaattagtattcaaaagagtttggtatactcatttctaactaaaacatgattgtccttttaaagacagagagattagtcatattacatattacgtt

SEQ ID NO: 117078 - DNA, 600 bp, Glycine max
  Clone ID: PAT_MRT3847_76732C.1
tggatcatcacccccacctagctggtaaattctaaagatcgagcaacaaaagattcaacatggatgcaattcaattgtgggtttcaaagcacaagctagccacagttgggggtctgtgggcctctggaattggggcatcgcttgtggcttattcacgtacaaggtctccaatgaagcctagtcttagacttatccatgccagattgcatgcccaagcgttaacactggcagtgttgtctggtgccgcggcttatcgctactacgagaatcgtgctgattagcccaaaccacaggcccagcttcttcaatgggagatcctcagtccttactaaggatattaattaaatattataaaaaaaaataatgcagatttaggaatttatatttcacatagatgatgaggagagggtcctctatgatatcatctactttgttgtaatcttttatttttctttaatattatcagaggggggaaacagagaggtttccctaccgatcaacttggttgattgaattgtataaagcccatataaaagggaaattatctttatttgcttttaattgttttttgggttttatcaagggttgtttttcattatg

SEQ ID NO: 117079 - DNA, 609 bp, Glycine max
  Clone ID: PAT_MRT3847_76733C.1
gcaaaatttcacaaagcacaagaaaccctcaccgccggcgcaaccatctgaaaccggcgtttgcaactggaagcaccggtgctgttaatttttaggttcagctcatcactagcataatttgtgaattataaggtttagaattgtggcatcatgggaagcgaggatgcgaaagatccgttcaaaggggtggattggaaggccgttggtggcgagatgcagcaaaatccgagtgctaaaccagcattgaagaaacgattaccaaagaaagttagggaaattcctgaattctatttccttccacgatggccgctacccaaagccattttattctgcagcgcatgcattggtggtggtgtagctgctggaatgcttttagagacctggattgaaaagaaagttaaaggtatttcgttttcctttgtcattaaactctcaatttaggtttggacatttagattttgttgaaagtggtgcaccaaattggtacccgtcaatttaattgttgaaattacaaaaatttcatttcggtcagtcttgttagccctgatttttgtaattttaaaatgatggaaggccttactttttgggagcgatttctgattttctaat

SEQ ID NO: 117080 - DNA, 359 bp, Glycine max
  Clone ID: PAT_MRT3847_76734C.1
ccactttgtagtgtggcaatccacaattgttttctttaattttacgattccaatccctcccgaaaaaaaaaaaaaaaaaaaaaaaaaaaaaaaaaaaaaaaaaaaaaaaaaaaaaaaaaaaaaaaaaaaaaaaaaaaaaaaaaaaaaaaaaaaaaaaaaaaaaaaaaaaaaaaaaaaaaaaaaaaataaaaaaagtcccccccttttaaagtctccaaccttctaaccccatcaatccaattacaaacctcttaaaaatatcccccaaaataaaattcatatcccttttttaaaaaccatattccctttaaaaccctttaatttcccaatttaaatcccttttaaaaaaaatccttttt

SEQ ID NO: 117081 - DNA, 407 bp, Glycine max
  Clone ID: PAT_MRT3847_76735C.1
acttcataacttttgatagtatagtatatatatcaaattccttgttgccaggataagtttaaaataataggtcagcattcttgtgcagcaatgctagcacgaatcctttaattacttaaccaatctagagttcaataaacatgggggaagcaaagaattgcatacaatttcaatgcataaatcaatcaaaatacaaaattaaaataattgcatcctaaccctcgagcagtttttccatgagtccaccagtgtccagtattgaagacaagaatatcagccttcttccaacgaccggatgtcttgtcaatccgatctattgacaatgtaggatttgatctcccttgtccattaagacgaactccttccctcacaaggaaatgagatctcacaaatagcactgtgcaatt

SEQ ID NO: 117082 - DNA, 404 bp, Glycine max
  Clone ID: PAT_MRT3847_76736C.1
ggctcgagcttgattgcaaaattaacatttgcttgcttttttgagaatccacgctttcgcccaagtatggaacaagtgcataacgagtttgtgatgccaaaatcatcttctttggatccactccccatgatcacacttggtcaactatctaaataatcgaaacttgttttctggggtgctatgtgtttattagttttttggtgtacagagtgattaagccttttgggatattaatgttcttctcttgcatattctgcatgtttctaattgagtggagtgctttgtatgttctgttccgttaaagacttggaaaataattgtatgttgtcttatgtctttgtgcagatcaaataaataaagtgtgattttgaagggaaaaaattaaaaattaataatactatttg

SEQ ID NO: 117083 - DNA, 1584 bp, Glycine max
  Clone ID: PAT_MRT3847_76737C.1
ctcgcgcgtggcttcacaattcacaatcaatcacatttcaaaggcatgttttttcaacaaagttcattctacccacgagtcgattcaacaaacccagacgctaattctcccttctctatccccgcaccatcttcttcttcttcttccatttatccctcagtggaaacaacagagaatctcatttgggaagagccaaacacgactacagaagaagccatggaaaacgttctggtcacggtcccgggtgcgattctgcatctgatagaaaaggattccagcgtgcaccttgcttcgggcgacctcaccatatcgaccctcggagaaggcgacaaagtggtggcggttctggcatgcgtcggcgatcaggttcagtggccgttggcgaaagacgtgtcggcggtgaagctggatgagtcgcactacttcttcacggtccaggtcccacaggagcacggggaggagaagggattcgaggtgttgaattacggtttaacggtggcggcgaagggacaagagagggtgctgagggaactggacgaggttctggacaagtacagctttctgtcgaaggagaaactgaagggggttggaggttgggaagttttggatggttcagtttcgacggagacatcgccggaggagttacaaggatcggaagagaggaaggaagtggtggaggagcgttctggggcatactggacgacgttggcgccaaacgtggaggattacagtgggagtttcgcgagatggattgcagcagggtcggggcaagtggttagggggattctgtgggctggggatgtgactgtggacaggttgaagtgggggaatgatttcttgaagaagaggttggagcctggttcacactcccaggttagtcctcaggcactggagagcatcaaaagggttaagaagttgaccaagatgtctgagaaggttgccactggtgtcctctctggggttgtcaaggtgtctggattcttcacaagttctgtagtcaactccaaagctggaaagaagttctttagccttcttccaggggaaattgtccttgctaccatggatggattcaataaggttttggatgctgcagaagtagctggaaggaatgtcatgtccacttcatcagttgtgaccaccggcctagtttcgcataaatatggagaggaagcagcacatgttacaaatgaaggccttgacgcagcagggcatgcgattgggacagcttgggctgtgttcaaacttgggaaggcactcaaccccaagagcgcaatcaagccaacaacactagctaaagctgctgctgaagcaacttcagctagactgaaggctaagaaataaggcacggcaacaaaagaatcaggatccccccagcactctccatatagaattctagtttgtctgtttattgatataatcaatcttcctagtgattaggatttatagttaatgttgacgtttcttttcatctagagttctgtttttattcaagtcctacgccgaatttgcgatattgaattccatttatttttttcccctttcttctctaccgatataaattgcataatcatggttggaagtggg

SEQ ID NO: 117084 - DNA, 105 bp, Glycine max
  Clone ID: PAT_MRT3847_76738C.1
ccacgcgtccggtttgcaagaatgtggacagatatatccattccactatcagaacaggacaggctaagcagaggaatggatatatctgtttgcaagaatgtggac

SEQ ID NO: 117085 - DNA, 171 bp, Glycine max
  unsure (1)..(171): unsure at all n locations
  Clone ID: PAT_MRT3847_76739C.1
ccacgcgtccgcaaattttcagtttcttcctcgcttttctgcaaaatcatctaaatccgcgagtgtcttgtagctttttatcctgtgccaattacccgcaactgtccaatgggntagcggaatatgacttctaccaggttgatctggatatgaattacttactcttttatt

SEQ ID NO: 117086 - DNA, 302 bp, Glycine max
  Clone ID: PAT_MRT3847_7673C.1
ggggcccaaaaccttcgtttataatttttgacttttgggactggacccttcaaccaacatgacccattttttgcaacaaatacttttgtggaatgaaaaataacaattttaacaaactcccaaaccccgaaagcttaaccagtcatgccttaaaattaaaacccaaccctaactttgccaggtgaaataaactcaagagggcccaaacggtttaatttagggacccaatccggcaacttttaagtttgaaaatttcccaagatttgggcgggaaaaacattaaccacctaaccttgttaaat

SEQ ID NO: 117087 - DNA, 1306 bp, Glycine max
  Clone ID: PAT_MRT3847_76740C.1
caagtacatacatacgagatatgtatacacacccacgacttaagattttataatagattattgaattttggaaagcgtagattctacacttcaaaacataatcaaagaaaatctatccatataactagttctttttcaaaagcaaatcattacacaactcacgacaatttgagtattttaagcaccagcagctcaaaacacagaagctaggaaacaacatcaaagcttcagggaacttttcaatggcgaaacttcaaccccatgccttgcaatgatgtacatttgtacacactcagaccacagaaaaggcaaaggaagtgcttctaaaaacaccattaatagacttagaagaaagacacaatgctgaacatggctgggctaacgctcttactgctgataccagttttcaccaaaacaaaggtgaactgacaaaggaaaaggaaaaatgcacgtgcctcaccagcaatgctaatagatgccatgaagagcatcaacgcctcaagttcaaggccatcatttttgtactcacaagtttcaagcacctctagatggcctaatcgaaacaactctgtatggtttggatttcgtgccccatgccagcaaaggggatttccaaggcttgttgagaccaaatatgagctagacaaaagtcttcaacaacggacaagtactgaaccaacgaccacaacgtactatttcacacccttttagttaccatgacttacaaaagggggttggaacgttaaaccctatgggtccatttcccatgcagtagccaaaatcactcttagttgagttgactccttcaaacagtagatttagatatggaggagatgtggatgagaaatcgtgattgtaacagccacaagcgggagtagtcactcgggaaaggaacaggcacaaaatgatgaagttgataatcaaggtaatgatgatgaagagctagacttggagcttcgactttgatctcgatagaatgtagatgatcacttcctttccgttttattgaacaatgacctcttctttaacaaccttcaatgccctctttgccctactgcatcgtacaccacatcaaacttctttggcaaatactcaaaattattcttcgagtaaccaataggtaggtctgctaccaagttcctcaacaattccagttttccagtactagcagcagctgctaccttggattccctaaatttcttcacttgatttccactcttagtgccacaccaacaatatgctaccttggtgcagtcttttcaagtttgacacacaaaaagttcaacaacacgagcggacgcgtggg

SEQ ID NO: 117088 - DNA, 362 bp, Glycine max
  Clone ID: PAT_MRT3847_76741C.1
aaaaggatcaagccggggactccttaacattcccccccaagggggggggcccctcccccccaggggggaaattccgcccctaggggaggcgcccccccccgggccagcgtttcatttccccatcccaaatttgggggaccggacccccttggcgggacatattggccccgctcccgggggacactttcgggaccccctacccccccctaaggagatattttggcctctcccccccgggggggcagggggagtgcccttcccccccccagggggggaagaggaatagccccccccacctgggaaaggggcttcgggttttccccccttccttcaacccctctcctctccttaggggttctccg

SEQ ID NO: 117089 - DNA, 465 bp, Glycine max
  Clone ID: PAT_MRT3847_76742C.1
cgtcgactttcctcgagcgtcccgcctacctcccgggcgtcacttactttggacagggcttgggcctcgtgccatccttctattatcgcttcgcaacttcccgttaatcctcctacgagaagtcacatattcccgtgatggccgagaaggatctgtactcggtcggcgtgggtggccatgagtcgcccacccacgatgctcgcgacatcaaggatattgtcaactccaagggcaatgcggttggcgaagccgccgatatctacggcgatgttcagactgcggaagagctgggctacgttcacagagggctgaaatcccgtcacattcagtttatcgctcttggtaaaatgccattctcttgcgtgactcagttaccttcggtgtactgaccttctatctacaggcgggaccatcggtactggtctcttcctcggtattggcaaggctttcgctacctccggtccc

SEQ ID NO: 117090 - DNA, 295 bp, Glycine max
  Clone ID: PAT_MRT3847_76743C.1
ggaaggacgatgagctgctccgacggcctacaccatgatgtccaacgcggcgccaccgccacaggatcctccggtggcgatggtgatccataatattccgggaactctgatccacggtggtatgttcatccgataccacatattcagcaacatattcgaattcaccaccacagacaagccacccatcatgcccatcggaaaaagctcatacggcatcatttgctcggctttaaactcggagacgaatgagcacattgccatcaagaacatcgctaatgcatttgacacaagattg

SEQ ID NO: 117091 - DNA, 518 bp, Glycine max
  Clone ID: PAT_MRT3847_76744C.1
gttgaaagcagctagcatgcatgcccactaaagacaacgcaacttttgatctgttctccaaaaattttatccaacaaaagataagatgaacaagaaatgatcctcgtagtaaccttgaaaaaaggagggaccaacaacacacaacatcaaatgccaacaaaggacgatagatagatatataactggccaaatcagtgaaaagaagaaaacactgccaccaagtaatcagaaagaaatacataacaatgctaggtaggtaaaattcgagattcagaaaccagaatgaagcacagttcagccaatcaatcaagcttgggaaacaaggctcaataattgattatacgtactctatacagaatcctctaaattataatttgcaagaataccatatatcaccaagtgtaaaagatcaaagaacttgtatatcactcaagccacaccctttggatattttttttatcatattaggttaaattattcatttattctttattctttatgattgtccctaagtttta

SEQ ID NO: 117092 - DNA, 424 bp, Glycine max
  Clone ID: PAT_MRT3847_76745C.1
agaaacaaagcagaagaaaggaaaagcgaaaaagaagaaccacaacgcccccaaaacgaaagcaaggacccaaaaggcagaaacggacaacgaagactcaaaagaagaaaacaagaaccctaccggcacaaaagggacaccagccgaccaacgacaaaacgctgcacacccggagaaaaagaccaaagggaaaaaagcaaccccgcgaggaacgggacaccgatcagctcggaaaagcaaagaaacacaggactctgggaagaaggaaaaaaccgaacaaacgacaaagagcatgtacgaaaccagaagacacaaaaagaccagaaccactgaaaaaaaaagaaggaaccaaacacgcaacaaacaagagaacaaccaccaggaaactcggaaccaagtcaaagaaaagaaggaaaaggggggg

SEQ ID NO: 117093 - DNA, 808 bp, Glycine max
  Clone ID: PAT_MRT3847_76746C.1
tttcggacatcgagaaattatagggattcctcgcaaacttgaaaacattctctgcgatagattccccagccttgaattcctcaagcataagcatgttgctgaatcaggaactgcatgaggctcgagacaccgactttagtttgccaagagtaaagattccagagtggtttgagtgccagagtcggggaccaccaatttgtttctggttccgtaacgaattcccagccataactgtttgcattgttcagccacatttgaatatgtccaaaagcctctcggtgatcattaataataaaccggaatatgtacatatacatggacgtattgattttcgccgttccaacataaaactttatacatttgtttttcgtcttcaaatgaaagataatttagatgaagaactattaaagaatgaatggaaccgtgcagagattgtatgtaaggatttgtgggatgaatgcggaatccatgtatggaaagagcaaagtagcatggaggatattcgattcagtgatccttgtagaaaaagaaaaatttgtagttcagaggttgcggttggggaaaaagcaaagattagtagccagtgaagttgttgagccccaatatgtagagcagcaccaacatatgggttttttctcacacgtgtggatgaaagaggaatcaagttgaggagttccatggtatcaacgctgataaaagacagccctgtaagtagccttactgattcttgttgtctagtcaagtttggttttagatattgtattttgctttggattcaatgaaaatagatccagcatttcaatctctt

SEQ ID NO: 117094 - DNA, 355 bp, Glycine max
  Clone ID: PAT_MRT3847_76747C.1
ttggcttctcgcccggaaagacgaacggactgaggaagggtcgattgttacattgccactcactactccacatcatagtctagagacttatcctgggacaaaccattcccaaacccaccatcttatgcgacaaagcatgccaagaatcctcacaagagaatgaacaaaggactgagctcgctactagatggcctcacataaggcggagcctaaggttgaagccgaggggggagctgacagcactgtgggcaacacaaccggcaacgcacccgccaatgcaatggtcatgccgatgatcaacaggttggatgacacatttggtaaggcagatgtgaaaactgacagtaaaactgtc

SEQ ID NO: 117095 - DNA, 372 bp, Glycine max
  unsure (1)..(372): unsure at all n locations
  Clone ID: PAT_MRT3847_76748C.1
gagcgnnagccgtgcacttgtttgtgagggtgtatcaatccgacacgacggaataccaggggactgttactgaacttagcgccacaccatcatccgtttacagagcgacggagtatatagacacccccgacaagaaatccaaagtaaacaaacaccgccaaggcttaatcgaagacattggaaggcctataatgctaggtgaaggcacgtccggagctaacacaaattctaaagtcgaccattacaaggctctacatgaaattggaggcaaagagcgacatatcaccgaacctgaagtgaacacagcgtatgtgagaagggggacgactgatggatgtgtgtgtgagagaaaaagggacgacgaccaggagg

SEQ ID NO: 117096 - DNA, 205 bp, Glycine max
  Clone ID: PAT_MRT3847_76749C.1
tactgctgcgggaagactacagaagggggagccagcccccacaatgcggcttcgtataacggggacttggttaagcgcgtgttgagtggtagtggaacacccttgaagcccaatgagtcactctacatgtagcttttcgtgcttttcaatgagaaccagtaatcgtgccccacatgggtggggaactacggtttgttttattcaa

SEQ ID NO: 117097 - DNA, 1015 bp, Glycine max
  unsure (1)..(1015): unsure at all n locations
  Clone ID: PAT_MRT3847_7674C.1
ggttacaaaatcaaatatttaaagttaggagatatggagaagaagactgttaattttgctgatacttacggtttgaatatcattggatctgttgagtcttggttccagacgagaaagttgtcgaagcctgagcctgtgatctggcaggaaaatgggagattttctgcccaattgaatgttttggggaaagtgatctcaacttctggccactggaataagaaggatgccaagaatcagttgtattctgatgcttatgattacatctgttctatagatgtaaatctcaaacgtaacattggatcgtccgtttctagagacagaatccaattggttaagcccgaccctgaacctgaaagtctcagtcgtagcctcaacaatttgaccgttacgggtgtaaaccgtccagttgatcggctggaacagcttgagaaacgcttcgataccgtagcctctcgtacccaggatgtgataactgctactaatgccaacattgatgcttcggctaaaatgttggaaagaatgagtctcttggagcgcaaggtaggaaatttgaccgagcgcattgagaaactcgaatcacagaatgggtcgatgatgactttctttaatgatttaacccgtgaagtaggcactattcgtgctcgctctcgtatagatacgccggttgttcaagtgttgcaaagcactaaggtggcggttatggatttctgtacgagttctttgcatatgccgattgacctggttcccacggtttttcggtttatcgagccgaatgatgttgaggcttacaagagacagcgcggtctgcacgcgccggttcagaacttaaattggtaaagccatacgaaacaaacctatccaaatagacttttaagttacgcttcctaagggagtattcttacgagctatgttgaattgtggtaccctttatagagcatactcactgaatgttcgaacganggtgagggcaaggagactagtgaggngaaaaaagaaaaaaaaaaaaaaaggccct

SEQ ID NO: 117098 - DNA, 472 bp, Glycine max
  Clone ID: PAT_MRT3847_76750C.1
atgcggttattgttgcttatgattgaaaacaattgatatggttttattaccacacacaccacacactcaaagaggagcatcatgcatgtgtcatcaagttgatctttttggtgtaattataaatattttatgtatggagagagagtggaagaagcgtgacgttcaaaccattccaatttcttgcatacggtccttttcgtctgaaactatcgtccatcggaaaaaaagagaaaaaaacttgcccttttaaattcttcaaatttcagttaactttaccggctttttgtatttttgtttccttctttctttttaccctcctgcgttggtgttttcatcactatgccatactagtactagtactactacacagtacattttttataggatatcatcaataaactaatcttatatttttataaatttattctttcttggtggaaaattaaatggtggtgtaatagtgtgtttgaat

SEQ ID NO: 117099 - DNA, 351 bp, Glycine max
  Clone ID: PAT_MRT3847_76751C.1
gggggtcgaggcatgacacgcggctgatgctgggagtttgtttgaagggatgaagagggcgggagagagggctgacagtggtacgggggggtgggattctgtcaagcctgcacacatatggggatggagagaaacgggtttttgcatttacaatgaaaggttgatgatgacttgattgagcctcagattgagcatgatggatgcatggtggataagttgggaagagctgggcttataaaccaagctgaggatatcgggaggaagaagcctatggaaccagatggggatatttgggcaatactgattggggcctgaagatgtacaagaatgtggaaatggcggaactggcac

SEQ ID NO: 117100 - DNA, 213 bp, Glycine max
  Clone ID: PAT_MRT3847_76752C.1
aaattggacgatgaggtggtcctgctagatttatggcaaagtccatttgggatgagggtcaggattgaacttgctgaaaagggtatcaaatatgagtacaaagaagaggacttgaggaacaagagtcctcttctcctcaaaatgaacccggttcacaagaagattccggttctcatcaacaatggaaaaccatttgtgaatccatcattgctg

SEQ ID NO: 117101 - DNA, 360 bp, Glycine max
  Clone ID: PAT_MRT3847_76753C.1
gaatctattgaatcaacaatcatgtcggacgaagagcaccatttcgagtccaaggccgacgccggagcctccaaaacctaccctcagcaagccggtaccatccgcaagaacggttacatcgtcatcaaaggccgcccctgcaggttggggaaggttcaacttccaaaactggaaagcacggcacgctaagggttacttggtggaatgattttttcacttgccagaaacttggagagattgggccttttctaccactgcgaaggtcctcaagtgaattgggccgattaccagctcattgatattgcggaggatggagttttgagactgctgtatgaaaatggtgacactcaggaggacctc

SEQ ID NO: 117102 - DNA, 488 bp, Glycine max
  Clone ID: PAT_MRT3847_76754C.1
tttgaagacttaatttgttcgactaatcatcagcatcaggaggactgggagcaagcacaatatgcagcagcttttgagtgggaaggtttcaggaaattaaagccttcgtcactataccctccaacaacactctcgcgcgccgccgtagctagcctcgaacaagcttctcgcgcgccgccatagctagcctcgaacaagcctctcgcgcgccgccgtagctagcctcgaacaacacctctgaagaccttcctcagttactgaggtctcccttcctgagttcgcatcatcactcagctcccaccgtacgcggcggtgcacccgtagcctgtcgtgactcaccactctctcgcgcgaccaaattaggctgcaagtaggagaaatgaagtgatgcagaggtaaatactgggtggtagtgctaattccatgggaactgttttctgctgaagataacctttacaatgaaataggggtagtgaacatgtcccagt

SEQ ID NO: 117103 - DNA, 245 bp, Glycine max
  Clone ID: PAT_MRT3847_76755C.1
tactgagcgtgagagcacatgccgggagctgctctttcgaaacgcagacgctttggctgtgaacgcgtccacgcgggaagaactttgtgagcgcttgaatcttcctgctgaatggattagcgaggcactggcggtgagggctatcgtaaagcaggagcgccacgaagaaattgcgcactgggtagctgctcggcactatgaagaagctcatacgtgcttgatttcgcatgtagcgatgcgctgct

SEQ ID NO: 117104 - DNA, 470 bp, Glycine max
  unsure (1)..(470): unsure at all n locations
  Clone ID: PAT_MRT3847_76756C.1
ctgagcatcgtctagctatctcgatcgaactgtccaaggtcctgtcaccttctcaccttaaccataataggtagttcaacggtgctagtaaatatgctggcaatgggcaagggtgaggctcaaccatcgcgtaatcgaactcgcgatcaaggctaagcggcacatgtggggcgtatggggcgcatggcaatacntgatcgtaagatgggtagggtcgacngtgcaggttagccagtgtcggcgcattaggttgggggcggtagggggggggaggaatcgcatggtgggccgcaatgtgtttggaggaggttagccgccggcggtgacgggttcacgtagagagaaaggaaggtcgtgtcaagaattccggggaaatagtcgccagcgaagtggtgtgaactgatttgacntgattgcgtggtgcaaacccaaatgttaaagcgaatcagattgaaacggcccattgaaat

SEQ ID NO: 117105 - DNA, 480 bp, Glycine max
  Clone ID: PAT_MRT3847_76757C.1
tgctgatcaactaatctttgaacaggtacgtgggttgctcaaggagtgtataaaagatatagaaggagcaacagttgagaacaacaaattttgtgtgtctgtgcattaccgcaatgtagatgaggaggtattaacttcttttctgatgcttattaatctttagcataagaatagggagtttttctgcataagatgacttcctctttttaccaacttatttcatattttaccataaactaatgtatctggtgctagaagacttctcgccttgcaaaggtttgggagagagtcagtgtatgcacccttaactttgcatatgcaaagaaagctgtttcttgattcgaatccataaccaacccgtcaccaaggcgcaactttactgttgtgccacagtttgccctcaatttcatattttatcataatttgtttcatttaatgtacagcccttctgttgtcttctcgcaccgctcgagccgaatt

SEQ ID NO: 117106 - DNA, 433 bp, Glycine max
  unsure (1)..(433): unsure at all n locations
  Clone ID: PAT_MRT3847_76758C.1
ttattaagttatgtccaagtaacgagttcctaaaagcacatgttaaagaagcaagtaattgaaaatattcaatgaatgtgcagcattaacattaaaaacttaaaaacatgactttccattcaatactttctatgtttaatccttaacaagttttgccattaattttctggggtgggagctttgtggcttatgccctctttctattatttataaagattgccacattatgatttatgaccatatgagaggataactacttgaaaaccttcagttactccatctagcatagtgacacttgtctcaactccaattttctggctggtgctttattccatttgtggtttctttggtatgccaattgaccatgtttgcttcttgnttatgctatgccagtttcaatccagattatatagctatatctcttgctgcttgg

SEQ ID NO: 117107 - DNA, 547 bp, Glycine max
  Clone ID: PAT_MRT3847_76759C.1
gtgtaccatacatttcactctttgtattgattaaaatagataaaagatacattaacagtaggtagtgctcttttagagagagaaagagcttattttgaacaagccaatattactcttaacaacatatttataatgtttttgggtccaccaacatatttataatgtttttttttccaatatctagagctttatgcgaccgttttggatcatccacttcatgctccattcattgaacctacacttgtaggaccaatatgcccatccaaaagttgcacgagaatacacacctagctgtgcttgggcatacctttggtagtcttccttagtcgcaccttttacagcccactcaccagtccactcccctacaaaactcagagcatttgtggaagagacgccaccaagattagagacacgttcatttcttatgaagtcaatattttcttgaacagtcatgctgtcgaaaccgttccaaaaaagattggagtaatgcacatcaatgactactctgtcaaagtctttgacaaatgagagaagcactttagaatct

SEQ ID NO: 117108 - DNA, 603 bp, Glycine max
  Clone ID: PAT_MRT3847_7675C.1
gcacctgatttgggaagacttggtgtttagattgtgtgtaggcctgtagggtagatggatggaagcttcattgtttggtgactgttgtgaattgtgaatttgtgatagttcagtggtttaacttggggacagcaatggaggaggttataggatcagtacggagaaggaaagtggaaaaaaaaggaaaggataagaagatatgtggaaacagacctattttaattaattttaggtgagtcagtcattttatgtaacttaccttcattaaaacatgcaaatactcatcctgcttgaacaagtgtgcagtgagcacaatgatgtcaaaacacttaaatttatgaaacgaagagtacatgtgccaactaacagagggtattgtttgcaatattttttaaacttggggaagtttgcaaggttgtcaaaaattgaggtcctaagttagatttgaagagggagaaaaagaaaacaatcataacatggatcactatatcgtacttgaaacgcacaattatattcaaacaaatatatatacacataaaataacataaatagacaaagtagcctaaaactgtaactaacatttagtttagtcaatcttcaatt

SEQ ID NO: 117109 - DNA, 257 bp, Glycine max
  Clone ID: PAT_MRT3847_76760C.1
ccagaggtcagagattttggagatcacctatttagtgacttaagacgcccctcaaaggcaggctggcgtacagcagcaatcatccatgcacgagagaagaactagagaaatagaaaatgaagatacctaccgctctgagcaggcaaacttgcatagtatacaggaactacttggtaaattgcatgcaactgcatctagtagttcaagaactagagcgttcaattcacttcttgaagaactgcgtgaggagagacaaa

SEQ ID NO: 117110 - DNA, 436 bp, Glycine max
  Clone ID: PAT_MRT3847_76761C.1
aatccaaaacaagacgttgctgctttattcaacgaacctttggttaataacaagaacaagtttacattatctgtttacatgttacatatgtacaattgcaagcaattcgcacagcttgagagtcatacatatttcaactactggattcttttacagcattatatgatatgctttccaacaaatcaacactatgtaatatgcacgacattattgttttccgttctatatttgcactgtgacatgatgtgatgacgaccactatagtaataacgaacgcctattaccagctatgatacctatgaccgcatctagcccatagcatgtttaatcatgaatcacttgcacccaccaggaccaaacacaattttcccagctggaacatcatgcacaggctctattggactctgttgtacgttcccatatatagtaacttcag

SEQ ID NO: 117111 - DNA, 568 bp, Glycine max
  Clone ID: PAT_MRT3847_76762C.1
aggatatcaagacaaatgctaccattgctattgatgttcgggtgaaacaccttagtcctaaaggcaaccttaggaggcttgaaaggataatccggagggaagtgaatattgaaatggattgcatctatgaaaacttttgtgggtttgcttttcacttcctgttttctgggtaagattatgtttctgttatgaggggctagggaagggaggtgtcttaatttgataaaaaaaaataactatgttcaacaaccactgtgatgtttttatcatgatgcgaacgcatgaacaagatgttatttgtgtcaaaaaaaaaaaaaaaaaaaaaaaaaaaaaaaaaaaaaaaaaaaaaaaaaaaaaaaaaaaaaaaaaaaaaaaaaaaaaaaaaaaaaaaaaaaaaaaaaaaaaaaaaaaaaaaaaaaaaaaaaaaaaaaaaaaaaaaaaaaaaaaaataaaggggggggcccttttaagagaaccaagttttattacccctgtttggcaatttaaaattttttttatggggacacaaaatttaatttaagggcccgggttttaaaaactggggatg

SEQ ID NO: 117112 - DNA, 360 bp, Glycine max
  Clone ID: PAT_MRT3847_76763C.1
ttcctccttgccccttctcatatctccgattccgttaactcccaaaactcgaacgctagccctaaccctaaccataaccctaaccccaactattacaattaccatcctatataagcaatcatttcgactctctttctcagctccacggctgctattctgcctatgcttaatgaaccacatctttcgctaaaacttcaccctctttacaaccttaacaacttagtcaacaccttctagccacagatcttcactaatcttccatagataaagagttctcatgaaaatcatgactttgatcaacattaaaggcaacttcctgcaactcttatatcaaatgtctattattacctaactgaactt

SEQ ID NO: 117113 - DNA, 2569 bp, Glycine max
  Clone ID: PAT_MRT3847_76764C.1
ggctcgaggagcatgctttaaatcaaacaatttctcatacagagctgtggaaaacattatcaccattggaggagtttgtgcgaaaatatttacagctaactaaaggtggcgctgacaattatcatggttcctggtggaaaagacatggtgttgttcttgatggtgagatagcagctgtggcttttaagcatggacattttgatcaagctgcaaagtcatatgagaaggtttgtgcactgtatgctggtgaaggatggcaggatttgttggctgaggtccttcccaatttagctgagtgtcagaagagtcttaatgatcaagctggctacttattatcttgtgtgaggttactttctcttgatgaaggattatttttgaccaaggagcgtcaggcctttcagtcagaagttgttcgtcttgctcatagcgaaatgaaggaccctgtacctcttgatgtatcatcattaattacattttctggaaatcctgggcctccattggagttatgtgatagggatcctggtatcctttctgtaactgtatggagtggttttccagatgatataactctcgattcaatgagtcttacattaaacgcaacatataataccgatgaaggtgtaaaggcgttgaagagttctacagccattgtgttacaccctggtcggaatactattaccttggatctaccacctcagaaaccaggatcttatgttcttggagttcttactgggcagattgggcagttgaggttcagatctcatagtttttcaaaagttggtcctgaagatagtgatgattttatgagttatgaaaagccagctaaacccattctgaaggttttcaaacctagagcccttgttgatcttgatgctgctgtttcatctgctttgttgataaatgaagaccaatgggttggtattttagttcgaccaaaaaattactccctcaaagctgctgtcttgcatattgatactggccaagggttggagagtaaggagttgcacgtaattgagatggaaaccgatgctgatgtgcagaatgatggtgctcagataagaactctaaattctgataaaaaatttgaacgtttgactcttcatgatggtaaaatcaaatttccaaattgggcaagtgacactccttctattctttgggttctggtttgtgccatcagtgacacacccatcagaggatcttcttcagccacaacaaggagagaaagtattgtagatggaatgagaacaatagctctgaaacttgtatttggagcattccacaatcagatattcgaaaggacactagcagtgcattttacatatcctttctatgtgaggacacgtgttactgataaatgcaatgatggtaccctgcttctgcaggtaatacttcactctgaagttaaggctacactggccatttatgatgcctggcttgatcttcaagatggatttgttcatactggacaaactgagggtagacctaattcaagtttcttcccactaatcatatctcccacttccaaagcaggaatattgtttagtatctgcctagacaagtcaaatgcagaagaagctaggaagcaacccgaaagcatagtgaatatcaaatatggaatttctggcgatagaacaattggagcccaccctcctgtcatgaatgaatctactggagttgatggtgccagacaggagttaatcttcaggagtgcaattactttgcaaaggcctgtgcttgatccatgcctagctgttggttttcttcctctcccttcagatggactaagagttggacaactagttaagatgcaatggagagtggaaaggttaaaggatttgaatgaggaaggagtttctaaacaaaattatgaggtgctatatgaggtaaatgcaaattctggaaattggatgatagccgggaggaaaagaggatatgcatctctgtccacaaaacaaggcgcaagaatagttatctcggtattatgcatgccactggtggctggttatgttcaccctcccgtgcttggactgccagatgttgaagaggcaaatataagctgcaaacctgctgggccacatttggtttgtgttttgccaccgcctctcagctcctccttttgcattccagttaattcatgagttttcactgtgtcttccccgaagcttgattgagtttgtgttccattggatgtgtgagaaattttttggtttaagtaggaaagtgtaactttctgcctgttaatttcattgcatgaaagatctctgtagttggatttgtgttgcttgtaaccttcatgcagtgttcaaagtatcagctgcagcaaaccctggcgcatgtacagtgggaattttgtgctcttccttgtacgatagacagatacccggaccctaacattcttttgtctcataaaattacaaaagttggtaggaaccaccatatacaatatcatcattttgctctcaaacaatcgaattagatttagagataccaatcgttgtgaacaaattcgaatctactgtggtaaattatatttgggatgctgcattcaatttgatcacagctttgggcg

SEQ ID NO: 117114 - DNA, 661 bp, Glycine max
  Clone ID: PAT_MRT3847_76765C.1
agatgcaatggagagtggaaaggttaaaggatttagatgaggaaggagtttctaaacagaatgatgagatgctatacgaggtaaatgcaaattctggaaattggatgatagccgggaggaaaagaggatatgcatctctgtccacaaaacaaggggcaagaatagttatctcggtactatgcatgccactggtggctggttatgttcaccctcccgtacttgggctgccagatgttgatgaggcaaatataagctgcaaacctgctgggccacatctggtttgtgttttgccaccgcctctcagctcctccttctgcattccagttaattcatgagttttcactgtgactgtgtcttcacccaatcttgattgagtttgtgttccataggctattaagatgtttgagaatttttttggtttaagtaggaaagtgtaacgttgtgccttttaatttctttgcattaaaaatctccgtagttggatttgtgtcgcttgtagttgtagccttcatgcattgctcaaagtatcagcagcaggaaccttggcgcatgtacagtggaattttgtgctcttccttgtacattagacagatacacggaccataacattcttttgtctcaaaattacaaaagttggtaggaaccacccatatacaatttc

SEQ ID NO: 117115 - DNA, 438 bp, Glycine max
  Clone ID: PAT_MRT3847_76766C.1
cttggggggggggggggggggggggggggggggggggggggggggggggggggggggggggggggggggggggggggggggggggggggggaattaagttttaatggttaaagggcctaaagggattccccagaaccccccttaaaaaacccgcccggaaaatatttaagggtaaaccttcccccctttaatgccctataaggccggggggtttttaaagccccttttttaagtaaaaacaaataacctcccccggggaaaaatggaattttttttttgcggggggccccccctaaaaaaccaggttttaagggcctgaagtgggcccatacccctgtaaacaaggggggggttttcccccaaaaaaaaatttttttggaagggggaattttaagggataagaaatttaacttggttttgggggatggcccccccctt

SEQ ID NO: 117116 - DNA, 353 bp, Glycine max
  unsure (1)..(353): unsure at all n locations
  Clone ID: PAT_MRT3847_76767C.1
agcgcccacgcgcccggcgacgcgnacgaccacgcgagcgagcacgcgcccgcacacgcgcccgaagggggggagaagaccacagaaggggcgggccggagacgcaccggcanagccaagggcccaancacgccgcggaagagagaagaaggagacagccggggacgaagggcaaacgccgagggagccancacaggancccacanggcgaaggnaaaggcngcgaccccacccncggaaaagacaacggaaggcnaangggacagccnananaagaanagaagagccacgcggggccccaaaaaaaaaaaaaaaaaaaaaaaaaaaaaagcggccgcgccagaggacccaag

SEQ ID NO: 117117 - DNA, 198 bp, Glycine max
  unsure (1)..(198): unsure at all n locations
  Clone ID: PAT_MRT3847_76768C.1
cacncncngangcctngtcagctcggnattcggctcgcgcngcnacnngngggnaganggcnntngtgnatgnnntgctntcaacngnttgtanattgntagannttgatcgntccnatngtnnncntncgttgcatttcgcngctcgtcagggtctgtggaantttnngaagtcttgctnngtaaagctcccacagt

SEQ ID NO: 117118 - DNA, 1003 bp, Glycine max
  Clone ID: PAT_MRT3847_76769C.1
aattcggctcgagcggaaacagttttcgtcgttcattcatcagctgttctcttcgtttttctgcctacaatggatgagaattcagcaacaaatggaacccatgaggtggttttagatgtaaacagggacgtctctagaacaactcaagcttcacgctcttgtgtcaatgtttctttcttgcagaagttggtagctgaggtggtaggcacgtatttcttgatatttgcagggagtgcttctgtggtggtgaacaagaacaacaacaacgttgtaacacttcctgggatatcaattgtttggggactggttgtgatggtgctggtttactctgttggtcacatctctggtgcccatttcaatcctgctgtcaccattgcttttgcctccaccaaaaggtttcccttgatgcaggttccagtttatgtggtggctcaagttgttggatccacacttgcaagtgggactctcagactattatttatggggaagcatgaccagttttcaggaacactcccaaatgggtctaacctgcaagcttttgtgtttgaattcttaatcacatttctccttatgtttgtcgtatccggggttgccaccgataacagagcggttggtgagttggctgggattgcaattgggtctacaatactgcttaatgtgattattggagggccagtgacaggagcatcaatgaacccagttagaagcctaggacctgctattgtacacggcgaatacagaggaatatggatatatttgttggcaccggttgtgggggccatagctggagcattggtatacaacaccattaggtacacggacaagccattgcgagaaatcaccaagagtgcctctttcctcaaaggccgtggtggctccacataatttaagcaaatgcaaatccactaatgctagggaaaaagttacatcagcactcttaacacctaaaggaagaaaaactatataagaataatagagtttatcatgtgattaaaaaaaatag

SEQ ID NO: 117119 - DNA, 501 bp, Glycine max
  Clone ID: PAT_MRT3847_7676C.1
attgagactacactgagcatcgtctagctatctcgatcgaactgtccaaggtcctgtcacggtgtattgggcggaggtttagatggtggtggccattagtgcatgccgggcagccagcagccacggaactggatgggatgggtggtcgccagcatgtgggggcgcagagggctgccaaccaaaggtatttactttagtaaccagcatagtccgcataacgtgcggggtagcggtaaggtgtggttgcgcatcacacaaacttgcgtggcacaaaggacaatagtaaaaaaggtacaaggaacagccagcgtgggaatgccacgcccaaaaggggcaaaccattagtgtatgtgtgcgcagtaaggagtttacgaaaaccaaagaggggtagttttgttttgacaaaggaaacagcagattatacggatgaaattatgggtttagcgtggttggcagtgtgctaaaacggatatgatagccgtgagatgagatatagagagg

SEQ ID NO: 117120 - DNA, 406 bp, Glycine max
  Clone ID: PAT_MRT3847_76770C.1
gggttgtcatagctgcccccctattcaaaccttgacgtctcaactctgaacaattgtgcattgccaccattattgcttagctagctccttttcctacacccacttgcatcaagcttcaactaatactattattgttattattattattattattattattatattggactgtggaactgagtcagagtatagaccatatgtctggggatgaatgatgttaatgttaggaatgtattcctttccttcatattctaccaacagatttgctacggtctttgcccttcataattaattacgttacgtacaagtgaagtgatgctaccacttatcttatttagatgtacttgtgcttctccgtaataattcattgagaatgactttactcaattggtgtggactcatttgg

SEQ ID NO: 117121 - DNA, 2741 bp, Glycine max
  Clone ID: PAT_MRT3847_76771C.1
gggactcctatatctcaacttccttcttatcaccaaattgctacaaaattctaaaaacgtgtttaattaatacttttacaccaaattataccccgctctaattttcttattatatttgatcatatacgaacgtggctgaaaactcgttgcttagaatttcatcaggcgtaccaaagcgtgtagatcacgttctcttcccttcattatcccatcatttttttttctggatggataagctacattcatttctcaattcatgtccttgattcactgtaatgtatacacatccaaaggctccaacaattcagctaacaaaataactcatttaaaacttaaatgacaaaactcactgcacttaaggttggcatacatgaatggggacatatgttccaaaactcattatatgtggtaattgtcatccacctttacaaagagataacagtgcaaagaatgcaaattttcattaactactaaaccaaaaatatactacaataaatacaataggcaaacaaactaaaagaataagggagctaatttataaccatcaatgtctatgccgagagaagcttgaggctccggtattgtaggtacctctgtggtttctgctaggagaatccattgagttcctgaagggagagtaggcagatttggctggttctggcacagagtccaaaggaaaagattccgcaaagcatgctgtgttaatgcgtgtcctctcaagctctgattgaaggaactcggagctgtactgctgtgcaagagaaatgagctcatcaggtgacacagttgttccttgttgcttatcatctgcaagtgcatcttcactaccacgagttggccgacgattgtgtcctggattgtcaacagcatcagtcacactctccgtggctttttccaaaagtaatccttgcaaagacttcaaggaatctcttgcatcagaagtaaaatatggatttaatatggtctcgaagtactcaagctcaagcatgagctgacagaatccatttgtatcaagtgcactaagatctgtagcttcattttcatgaaaaatgctgataaatgtgtcaatcaagccttccacaagaatgccaagcgttttatccaagagaggcttagcaccagcaaaaacctctgcaggaacagcaacaaatagtatatgagtcaaatgaccatagaattaactttctgagcacaaatattccctgctccccactgaatgccagaatgcagcagataattcatggcagcagatctgatcaagtttgcctttgcaaaagtatattgttcaaggaccttcgcttcaagcgctgagaaactattcacaagatattctacatcactgtttccttcatccttccccctggaatgctgccagatgtgtctgtatttgtcatacaactcataagaaagttcatctttgcaatatccgatattgcttagaacaatcaataactgttgatggggatcaataacacctccatgaagaccagaaggtgcattttccaattcatgtgtatatccatttggtaactgggagccctcttcatctgttctatgttggccaagttcgaaccccgcttctgtcgtaatctagcagcaaatccaggaagcaatttaaaaatgcaagtctgacagattcttgaatttcttgaagttgcataaacatatcctctgactttgttgcctcattccttaaggaccaaagcatcgaattgatttgatccattgctgaggctacaactgaacggaatgttaaaggcaagaatgagattgcatatggggatttgttcctttcaagaattgaaacaataacccatgtcacatcctttgaaacctcttcaactgatgctcgcatccaagagcaaagcctcagtacgtaaatccttataatctctgattgcaatgttcggatagcagcaacagcaatcggaggagcagcttccttcaattccaaagctgtgcatgccttagatatatcttctatggcctcactcatgtaggacctgaggacatttgattcctctagatcatgaaaaatattagtaaccttgactccgtacagtgatattgtgctgcatatcattgcagcaacttcatcaagagaatgacttgagtatttcccatctccagctttttcttcaattttatttgcagagcagtgaatatttgaatcagtagtaacttgggaagacttagcaaattttccactgaaaacagagagtgcaaccttccagaaagcttgtatgtaatggatgattacagcagttaatctgcggatataccttcctcttaaaccatcaacctctctgacaggtagattcgatggatgagagtggaccgcaggataggtattaccaataggagagttgttgatatctgactactgattcatccatatcttcttgaatctgcctccatctgacatcagaaagagccctttcacgcaactcattatgcaaattttccattctagccgcatgatctaaagtacacttctcaagcagaccacgaattctctgattctgtatattcaaataatgccatactggatctgactccggctccgaatccaacagtaatctcacagtattctcaaggtttgtcagatctatttgtggatcttccatagacttgaaaagcatagtcttgaagtcattcatcactttctcaacctcttcaagaacacgttttaggatacctacatcaatatgggagggcagagcaatcgatttggcattctt

SEQ ID NO: 117122 - DNA, 522 bp, Glycine max
  Clone ID: PAT_MRT3847_76772C.1
cagatatccatgagaatatcataaactgtgactgttggcgattgtcttaacgaaactctactatttttaaattgctggtaatgctcttatgccatctttacatgctccaccagctacgtgccaaatcttctgataatgcggaatcctctgaatgatctggagtttatgttctcttgcccttgttcgttcgaggaattcaataagggaaattgggcatgaccctgttggcgagtatgctatgcctatcagaaaatatgcacacctattttaattgtcgtcaagacgtgtgaacggtccgttcttttgtacttcatttccaacgttccaaaagggcggccacccgactatgtgagcatcctctacctcttaataaattccggaccaactacctaaccgcgtacacaggttcccctatactgatttggatcagaaactggcacaatcatcaggatagctgggacacggggcaaattggtatcacgttacagtccatacaacatatcatggcgcctgcatactccc

SEQ ID NO: 117123 - DNA, 215 bp, Glycine max
  Clone ID: PAT_MRT3847_76773C.1
agcgcctcttgatagggtctcccattttcaattgcttctcagtttccttttctctgaaaaaagatgttgagggttgcagctaggaggctctcttctcctcgtctctctccgtgcgccaatacgcgctccgtttctcctgaacgacgcgcgtcgatgacaagacgttctctccatccttctcttcgagttgtatgacctgacaccatgaaagatat

SEQ ID NO: 117124 - DNA, 455 bp, Glycine max
  Clone ID: PAT_MRT3847_76774C.1
agactgtttggattgtaataaggaaactaaatgcctgaagtttgattttccttattgacaatcccaacagtctcacgtgctgtattacgagcttacgacctctctcctgcttagacccaacctgatatgcccctctctcataacaagatgacatgatagatgtgggccgtgtatcttctgataaggttcgacaccatgaaaaacagacatgcacatggcctttaatacaagacacccgtgctcacatctctatagttcacgaattcctgagcttgttaaaaagccatccataactcacagatcatatctaactacacttaattactttcaccagagacgattgcctacatttcacttgcaaaaaatctctcagtgcgctacgatcgtgatgtaagatcatctcggaccatgaagaaacagtcgtcatcctggcctacaaatagataaataatccc

SEQ ID NO: 117125 - DNA, 333 bp, Glycine max
  Clone ID: PAT_MRT3847_76775C.1
ggctcgagctcaaggggagccagttgttgatcctgtggctgctatgcacaaagacatgctttggatggccactggtcgtattgtgccccccagatcgccatgcgtggatcgactacaatcactgagagaaatgacatgatcgctgtgattgctccagaggcccgctgcgggtattcatccacccaggatccagggtacactaacaaacttgagggtcagtggcatactgcataaagcccatgctatgcgcctggtgttcgctggatgcgataaagatcatgcagataggaggagtgactcctgatgctactgccgaaaaatactggatcgagt

SEQ ID NO: 117126 - DNA, 645 bp, Glycine max
  Clone ID: PAT_MRT3847_76776C.1
cacgcgtccgttccattccactcgctagccacaaaccagttccatttcatccattccaactttccaacccattcggctcgaacacactgtgtgtttgtaaaaatggccatcacaggcaaccttaacttcaacctcaacctagtacttcctgtggcacgccatatggcgtgccctccacgcgtcccgtcgtttctcttcactcgcggtcgaggcgcgtggtccccctcgcttctggtcacgcgcgccatcgacgctaacgagtttctgggggatttcggggcgcgggaccctttccccgccgagcttgaaagctcgttcggggacaaagtgctgggatacggcaacactgagcacaagattcttattcccaccattactgctctcggtctctcgcagcaggagtgtgctcccgtttcttctgcgcagccccccatctcgctggatgacgcccagactctcattagaaaggttgtgggttggagacttgtgaatgaggaaaatggacttaaaattcaatgcttgtggaaattgagagattttaaatgtgggggtgaactcattaacaggatctctaaggttgtagaggctgaaggcccatttcccaaatatctacttggagcaaccaaatcaagtgagagcagaact

SEQ ID NO: 117127 - DNA, 391 bp, Glycine max
  Clone ID: PAT_MRT3847_76777C.1
tccgtaaaaaattaccaaacaccacttttaaaacccaacaggttagaacaatgcatgagcattctacaatagctgagatttaataatgagcgagttccgcgggtttcgaaaactgagccacgccgcagaagcgtgtggctatgaagatcacggagattctccacatggcaaacctccacacagacgatctaagagtgcttctgaaaggaacttggcaaatgcaagaggtggagcctcgcatccactcgagaaagaccacaatgaatgccttgtttcaacaccttcagtgggtgcttgtaggttacagagtccgtcttatgacaatctcacttgtgtaaacaagaatacctcttcaagtcatagagcatccttagaaaaagatgttgagcaa

SEQ ID NO: 117128 - DNA, 375 bp, Glycine max
  Clone ID: PAT_MRT3847_76778C.1
gggggtgtttttttttttattttttttttttttttttttttttttccccccaaaaagtaaaaatttttttttttgggggaaaagtttcaaggtgccccctccgggaaccaaaacaccccctttggaattgcatttttagtccttgccaaaagacccggcttagattttaaaagccggttcccttggcccccttttacaaatttggggcatgggcaactaggattcctctttaggggggccaaattggggttccttttaaaggggccggagtccttgccttttgcccggttggcaaaaaaggccaatttttttagtgggcaaataggcgaaaatttttttttggaaccttgggagggggcaaacaagcccctcccc

SEQ ID NO: 117129 - DNA, 351 bp, Glycine max
  Clone ID: PAT_MRT3847_76779C.1
aatcaagttgatgagaatctgctaagataatctgaccaccctagagaactgcaatctgcatttagctcctgggacagaggttgaaattatttggagataataaatgggccaaaaaggctctcaatgattataatcagctattatggataggaactactggcatttggcctccgtatatatccgggattcgactttcctctatctgttctagcaatgtggatttcagcttattgttctgcacgactactatctttttcttgtgattcctatcaatgtaagggtaaatcattttccagagtttgataaacatattgatgagcttgcacagtaaagggtcttccccaatctttc

SEQ ID NO: 117130 - DNA, 252 bp, Glycine max
  Clone ID: PAT_MRT3847_7677C.1
ctgaaccagttatgtgtgttgcatgagaaaacgccagtaagtgacagagtcaccaaatgctgcacagaatccttggtgaacaggcgaccatgcttttcagctctggaagtcgatgaaacatacgttcccaaagagtttaatgctgaaacattcaccttccatgcagatatatgcacgctttctgagaaggagagacgaatcaagaaacaaactgcacttgttgagcttgtgaacacaagcccaaggcaacaa

SEQ ID NO: 117131 - DNA, 206 bp, Glycine max
  Clone ID: PAT_MRT3847_76780C.1
gcggaatgcggctcgagggcgttctatatatcattgaactgacaatgaggcctgctctttcgttgctgcctcttcgagttgctgtcttgttagctgccactactgaatcaagacaagatccacgggaatagtggaaaatgatcatgaaagatcaggaaatgccagaatgacgtcaaggtcttgtgtcattgcaatccgaaaataac

SEQ ID NO: 117132 - DNA, 571 bp, Glycine max
  Clone ID: PAT_MRT3847_76781C.1
ctctcttgtctaccttagcaagcatccttgcattaaagcaatggggtgttgctggatgacaaatgtctctcggtcacttcactcctctctgctgcacttcttcaacttcagactatgaagcacggacactccagctccttgccgtgtccggtgtccgacacgacaccgacacccatgtccgggttgagtttgatgtgtttgacaggtgtttacgtgtccgtgtcgtgtccggtgtccgtgtcagtgtcggtgcttcatatcagagcaattcagatgggaggagagcatatctagcatatgtttaagaaggaatgctggaatcacaagactggaaatcaatcatgaaatatcaaagaaagaatggatatttgtttaattcacctgctacaacagcagctgtttttcagcgccttaagaatgctgaatgtcttggttacctccgatctgtattagaaaagtttgagaatgcatgtatgtttccagcattatgtttctcttaatttaattttactgactattttttgtagattaattggccttttttgtttttgaaaataaaatcagttctgat

SEQ ID NO: 117133 - DNA, 173 bp, Glycine max
  Clone ID: PAT_MRT3847_76782C.1
aaatggtcctatcaactacgactacataaatctggcgttgggctaagacaacataacacatctcttgctacaagactttagattgaaccatttttgacttgactactcattgtgtcggcactgagaatatacagacaacaacggttgcaaaaacacgacctaatgattctgat

SEQ ID NO: 117134 - DNA, 424 bp, Glycine max
  Clone ID: PAT_MRT3847_76783C.1
gaagaaaactaagattgattcttctacattattgtcagagaatatcttggagctgacaatagagcatgtgctcaactgtttagaaaaactatttggagctggtggcatcatgaaaaatcatgatggggattcatgtaatttgcagcctaccaatagaacaaatcaaaatcaaaattccagacaaaggccgagactatctcctacagatgcatgtcgccctagtaaccgtggatctacatacagtgaagccttacaagtatattgtgtggtaaagatgctttctgctgttctcaagttcctggctgatgcaactgctatgtgttttgctcctcacaaccacggattatttttaaattacacatcaaaatgtgcgcaacatatcatatcgtcgttggactggctacatcataaccaaattcaattt

SEQ ID NO: 117135 - DNA, 311 bp, Glycine max
  Clone ID: PAT_MRT3847_76784C.1
tttcttccacgcgtgcgcgaacgcgtgggcaggcgcgagttttttatgcatatcgattattaatgccccagaacaaatgataacatggatctactagtgagcattgatttgctgggtttacaaggagcaggtaaagctgtaccagaacaagattgtgtgtgatgacacgctagtgttggctaacacacaagaattctttgatggaaatttgccagaggctcctcggttaccaattggtgtgaatggcatatatcctgctagtcaattaccttcagaagctgtcgctgaaaatgatacatgtggtagtggac

SEQ ID NO: 117136 - DNA, 641 bp, Glycine max
  Clone ID: PAT_MRT3847_76785C.1
ccacgccgtccgaaaaaaaaaaaaaaaaaaaaaaaaaaaaaaaaaaaaaaaaaaaaaaaaaaaaaaaaaaaaaaaaaaaaaaaaaaaaaaaaaaaaaaaaaaaaaaaaaaaaaaaaaaaaaaaaaaaaaaaaaaaaaaaaaaaaaaaaaaaaactaaaaaaaaaaaaaaaaaaaaaaaagggggcgccctttttagggacccaatttttattcccgggccctggcaatatattgttttttttttgggggcccctaaatttactttcctgggcgggtttttaacacgtccggtttgggaaaacccggggtttccccaattttatccccttggggacctttccctttttccccggtggggaaaaaaaaaaagggccccccccggttccccttcccaaaaagtggcgcaccttgaggggaaatggacccccccctttttcctttctttaacccggggggggggggggtttccccccttgggtccctttttctttggcaagccccttttcccccgtttttttgtttttttcccttttttttttggccccttagggggtttttcccggaaagttttaaaaggggggccccttttgggggcccgattaaatggtttcccggcccctggccccaaaaattttttttgg

SEQ ID NO: 117137 - DNA, 775 bp, Glycine max
  unsure (1)..(775): unsure at all n locations
  Clone ID: PAT_MRT3847_76786C.1
gaagctcggaattcggctcgagatcctatttgcttcggctttgtggtgtgcgtgcgaacaagcagcaagcttccttcttccgatgcacttgacgttttgctgaattgcacccactctcttacctgagctgacctgagctcccatgcctttgtttgagataacaaatgcgcaactatccttccgatattctctgactctgaggagcccaatcccaatgccatatcatgctaaaggaggaccttcttggatttcattccacacccttaaaattagaaacttgaatgtcattaaggctgttgcagccactttggatgcaaaaccgcacttggatgttcctcaccctcccggttttctgctcgaattctccgagcctcctgatgatagggagaagttgagaagaatgcggatttccaaagctaataaaggaaacatcccttggaacaaaggaagaaagcacactcccgagactttgcagaaaatcaaagaaagaacaaggctcgcaatgcagaatcctaaggtcaaaatgaagctcgttaatcttgggcatgcacaaacttcagaaacaagaaagaagattggcgctggagtgagaagacgatgggaaaagaggcgtggaaagaagatggtgcaaggaatcttgctgctttgagtgggcagaatttaattgcagaaaccttcttaggcaaggnttttgttnggtcaaggaaagagctgcagtnggaaattctttattgaagacaattgggatgnaaccagcttgnaagcaaggacttgg

SEQ ID NO: 117138 - DNA, 411 bp, Glycine max
  Clone ID: PAT_MRT3847_76787C.1
aaaaaaaacgcaatcgctgaacaatgttttttaacaaaagggtcgcccccaaataaaaacaacccaactccaattttttttaccacgtccagaaaaatacattcaaaagctttctaaaaatttgaggaacccacaggggcgccttaaaaaccctgacccttgaatttttgaaaaaaattttttgggccccgggcctttccaaaaatcccaaaaacgttggttaggcttcaaaaaacccaagctcaaaaagcttttggggagccccaccgtaatcagcgaaaaaggcatttttttccaatgcattttttttaacaagaggggggaacacaggggcaaacaaaattgccctgtcaaaaggtaactgaaggaaggctttttttttaccactcaaaaactccttgaaggatgagg

SEQ ID NO: 117139 - DNA, 801 bp, Glycine max
  Clone ID: PAT_MRT3847_76788C.1
agctcggattcggctctctcttctctaatttgctttttggaaaggaattgaaatgggtgcacttaactacatcatctccaacttttgcacagttcccagcaaaaagatcaaaacaatgcagacagttgagatcaaagtcaaaatggactgtgatggctgtgaacgaaaagtcagaaatgcagtggctacaatcaaaggagtgaaatctgtggagataaacagaaagcaaagcagggtgacagtgaatggttgcgttgatccaaacaaggtgttgaatagggtaaagagaaccgggaagaaaaaagctgaattttggccttatgttccacagcatgtggtcacatatcctcatgcctccggcgtctatgacaaaagggcacccggcggctatgttcgaaacgtccaaacatttgcagcatcagctgatacagaagagaaatttatgtcccttttcagtgaagacaacgtaaatgcatgctccatcatgtaagcaactactgagaatcgataaattatcacatgatctgatatcaccatgtctcgatcaatctatactatacgtgacacgatgacacacacaaaaaatgtgttagatagagattgttcgagatctatatgatcctacatcatgtaatatactataatgtaagcaactactgagaatcgataaattatcacatgatttgatatcactaggtctcgatacataatacaatgatatacacaaaaatgtgttagatagaaattgttcgagatctatataattctacatcatgtaatgatatttctcatcatcaaaag

SEQ ID NO: 117140 - DNA, 443 bp, Glycine max
  Clone ID: PAT_MRT3847_76789C.1
gaattgagagttgggatgttgtttaaactacagaggaagtcatagcataatcctccaacaagctttgtcagtttttggatcaacaaaacattttttttttagccactatcatgttttcaacaactaagcaagcatatcctacgagggggtactaatttcccataatccctttttaaattttagcagcatgcatactttttttggagagtttaccctagtagctcaattttgggaaggggtccattaagttttcaatccaacatcaattggttcccgcaccccgctttaaaaatcaaaatgcagcagcttttccagcttttttgggatcatcacgggcttttttcctttgaaagcctctttgggtaatattctgggattttatgaaaaagtccaatgccccgcaaattacgggctccaataaccatgggatattagctttgatt

SEQ ID NO: 117141 - DNA, 382 bp, Glycine max
  unsure (1)..(382): unsure at all n locations
  Clone ID: PAT_MRT3847_7678C.1
ttcacctcacgcgggcgnccacgcgnncgcccacgcgttctttgacgcgtgggcccatttctcccctcncgaggaagaattggctcagaggccctcgaagaacgcgatgcttgccactccgaaaaacaagaggaaaaaagcggaagtgctcaaggaggttagaacagaaacggatagttacaagaggagggataaaccgatggactcggaaggaacacgggaacgcgctgaaaggggcacctaacgagaccttgagccggccctgactaaaggaggagcgatctggtgcggcaggacacaaataagaggcccctggagctgcctacaccctcaagaggaccatgcacaatgatctcggacttgcaaatgtggctgtttacca

SEQ ID NO: 117142 - DNA, 287 bp, Glycine max
  Clone ID: PAT_MRT3847_76790C.1
ggagtcctgagtctttcagtttccatagattatcgttcgtgagagagagagaatggttcgggaagtatccgtgagttgcgttgatagcttgttgacagggatggtcgcgtgctagtgctatcgattctatcctatcagacctgaactcgccgcacgcaagatcgacgccactggttatcaggtcagtcttaagctctctgatgagtatcccatcgatcggcctcgtgttcacggttcatcacgaggccatttagttaatctgcgacgatttttggtccgagctcttc

SEQ ID NO: 117143 - DNA, 413 bp, Glycine max
  Clone ID: PAT_MRT3847_76791C.1
aaaaaaccttcatatacttgaaataatattttatccttgtgtcttatattggacttacattgccatttgacatatctgcctgaaatttgcccattgtgaagcactttaattttatccatttttaaatcgtagttgtttcaactaacaagttatgttgttcaaggtttctgttatattctgttgtttctgacgtgtgtaatgggttgtacatttcttatgtgtttttcttttcttttttcttattcttgtgtcatttaactgtaatcttttgtgaagtttgagctgcatgcagtaaatatgtttacaggccctttacccttattttagattcccattccattaaaataatatttaattttatttgcttttttatttgatgatcctctgaagttgacctgttacattgggtcaag

SEQ ID NO: 117144 - DNA, 1973 bp, Glycine max
  Clone ID: PAT_MRT3847_76792C.1
cggctcgatagattgttctactcaacaatatctacgctaaattcatcatcgtgtgtgatgtttctgtttcttctgaaaaaagtagcttacataaatctagacaagtgttgactcattctgatctgtaactacaatcactctctgtccttgacagacagctgttccaaacccaacaccattcacctgctaccaccattccatttcctctttctttctcccacctctctcatatcttcagatccatcactctctttgcagaaaaaaaagactttgatatttggaaatgtctgaagtgagaaacaaagtggatttcatccagttgcttggacctgacatgtcaatcaagattctcacccatttggatgacccttgtgatcttattcgggtttcttctgtttccagttcttggcaccgatttgttattgaacatggcctctgcaagcaactttgcttgaaaatgtttcctgaaataatctggtgttgctcatataattgagcttgacaacattattgaaccactaagcaacactcttggcagttatgtaagttgggagtctcataagagaaatcatagagtctatgcatttttggcttctggtcttactcctatgaggaaaaattgcatctcaaaagccattagtgcatccagcactgataactaccctgaagaaagcattctacatacgttggagcctggggatagaactgaatatagagcatcatactggtcaagcaaaggggaaagcgatccttctgttcctgagactttagtttatgagctagcttcaaaattatgtcttgttacggagatttatgtccatccattccaagcatattttcagcatggcttccctatatattctgctaaggctgtccgattcagaatgggccattcgaaacacccaatggaattagagagtcctgtggacaacatggctgctaatcacgtcttgggcaataatcaattcatatggacatatacatcacctgaatttccaatgcttcaagaataccgcttgcaaaaattcaagctacctgaacctgttctgtgcattggaggtgtactgctagttgagctgttgggtagagttcaaaaacaagaaatggatgaattattctacatatgcatctcccatgttcaagccatgggacgatcaatttcgccagaatttgacgtcaaaattcatcatccgtcagggaagtgtaccttgaaatactgccctcaaatagattgttatgtgtcttcttcaacatcatcacagagaagtgactcaagcaatccgtcgcgcttgcgaacaataacctcaaacataatgcagaggggtgtgagacgttgggagcaatttctcttgagtgcgctgcttggtactgctactgatcctgttgtagttgataatgatgatcaatgaaaaataaatgtaagtaattaagtacctcaattctcaaatgaaagacattggtccaaaaatctgtatagcatggaatatgttgagcacaataataagtagggggcagaggcaaagtttcatctttatttgtttctttctgttacataagtcttgtcttcatggctagttattaaggataggttgtacacaaattttctggcggctcgaattgataacgaaatttgtattgatgataagaaggatgatggagtacttctaccacgtattctacataatcacgtgttccaacctggtggcaactgatacagacaatcctcttgtttgaacctttaaaatatgccattcagattgggtccctatgatgaaatatgtgcatatgcaaaataattgtaagtatcatcatcatgttgttcctgtctttggtcatattggtagggattggttacttagaatttaatcttataatcatttaatgctatgtaaccaattggaggtctataaatctctctcctttgtaactgattggctttcccatacgttataatatattctattttgttgacc

SEQ ID NO: 117145 - DNA, 966 bp, Glycine max
  unsure (1)..(966): unsure at all n locations
  Clone ID: PAT_MRT3847_76793C.1
atctacgctaaattcatcatcgcgatgacgtttctgtttcttctgaaaaaggtatcacacataaatctagaaacgggttaaccgatacctcatctgcaactacaaacactctctgtccttgacagacagctgttccaaacccaacatcattcacctgctcccaccattccatttcctctttctttctcccacctctctcatatcttcagatccatcactctctttgcagaaaaaaaaggttaccccttttccatattttacctttcaaactctctctctctgtatgtatatataaagactctttctcatgtttccttacttgggtgtagctttatttggtcatcaatttaattgcctgaccaaagtaaccatctcgttcccttttctgctttgttgaaatgccatgacagttcagatttgtaggaagcttattggaagaaaaatagctttgatatttggaaatgtctgaagtgagaaacaaagtggatttcatccagttgcttggacctgacatgtcaatcaagattctcacccatttggatgacccttgtgatcttattcgggtttcttctgtttccagttcttggcaccgatttgttattgaacatggcctctgcaagcaactttgcttgaaaatgtttcctgaaatatctggtgttgctcatataattgagcttgacaacattattgaaccactaagcaacactcttggcagttatgtaagttgggagtctcataagagaaatcatagagtctatgcattcttggcttctggtcttactcctatgaggaaaaattgcatctcaaaatctattagtgcatctagcactgataactacccagaagaaagcattctacatacattggagcctggggatagaactcaatatagagcatcatactggtcaagcaaaggggaaagtcatccttctgttcctgagactntagtttataagcttgcttcaa

SEQ ID NO: 117146 - DNA, 512 bp, Glycine max
  Clone ID: PAT_MRT3847_76794C.1
ggctcgaggctaccttaagtggtttgcctagccaaagagagccatatctgcagcacgttgaggtaaagacgaaaaaaatgctgaggactctgctgcattgacggctggatatgtggacggtgccaacactggcacatgatgtactgaaatgcccctgaatagtagtggctgatgatgactgtgtcgattcaggattgatgcctgcaacagagtacaggtccctatctatgagcacggccttgatgatgtggtgaaacagagtcgtgccaagaacctatgctctagaactgatgctgagacacatgtctatgaggcccacatacggtttggatgcgtcaccaccgggacaagtactcacggtcttggagccagaagggctgcacactatgactgactgggagagtgcatcacgcatgaatgctgatgtctacaagagcgacaagattgagatggataaatccactgtacctgacaagactgatgcagacatatagatgatattgactcacagt

SEQ ID NO: 117147 - DNA, 171 bp, Glycine max
  unsure (1)..(171): unsure at all n locations
  Clone ID: PAT_MRT3847_76795C.1
tganacattgacaagagtggangacanaactggnagagcccaccanactgttnatgtagcanaggttatacggcgatggacccatgcctngnagcgtatccacggacgatcacttcatttggcanaagngantgatnnagagggtcctnatatattgcgcagnncacanga

SEQ ID NO: 117148 - DNA, 299 bp, Glycine max
  unsure (1)..(299): unsure at all n locations
  Clone ID: PAT_MRT3847_76796C.1
gtcactggttgcctctgtggattcagtaagtatcatatttaaatgcttgcaattgcaaattatcatctgttttagactgaaattcaaaatggagttagcaaaatcttcataaatgttaaagatatgtcttaaattaaagaaagttgttcacatgcacacccactcacagaactatcctcatttgtatgggtttaggcaaactcaaggtccccgccctctgaatatgattgattttcttagacttgaaaggcatgattattgtcatttaaatattatgatngaatttcatgtagaaagca

SEQ ID NO: 117149 - DNA, 743 bp, Glycine max
  Clone ID: PAT_MRT3847_76797C.1
ctactttatagctctccaataatttttcttcctgaaattacatcctcctttagcttcaggtgacccaattggttttacatatttactgattagttccatgactctgcattttttcattgagtgtttgatgtggagcaacaggaccgcaaaaagcacatgggttgctggaaagaaaaacgttgtctgaaaagagcatagtaaattattttactattctacattggttttctaaataaattagctactcgagcttatcattcttagacttagtatatatatataactataataagtaatggttatgatattcaatacaaaaacttcaactgtatgtcccaactctggtgatagttacttttagaacattttgactattttgccccattatgcctcactgttagcaagttgatggctgtgtttttacctattatagctttctatttttactctttacaatttacaataagatgatagaagtgtgtctcgactaaaccagaaaggtgccaagaggtgctgcccccagagcccaggcccttctggcacatggcctctgtgccttggatgcacaactattggttaccttgattactttgggtagaattcaattatgttattctatttggtttaaatatcagtgtttaagcaataattatccattttttaattttaatgactgctgatccatataaaagctttttcccgttggattatatgtgtacataaatagggtcgtttttggtttg

SEQ ID NO: 117150 - DNA, 839 bp, Glycine max
  unsure (1)..(839): unsure at all n locations
  Clone ID: PAT_MRT3847_76798C.1
gttttggggaaggatcaaaccagtggaggcaaatacagtgagtgaagagtgaagagtgaagagcgaagagcgaaggggaaagagaaaagaaaaaatgaaacggtttttcaaagtggtggagaaagattcagatgggtctgtgaagaagccaagagagaatgattcggaggctgaagaaagtaatgagaagaaggagccgttgaagtttatgacttggaatgccaacagctttctccttcgagtcaaaaacaactggcccgacttcaccaacctcatcaccacttttgatcctgatctcattgccatacaggaagtgcggatgcctgctgctggtgccaagggcgcgtctaaaattcagggagaaataaaagacgatacaagcgcggccagggaagaaaagaagattttgacacgtgcactttctgctccaccttttgggaactatcacgtttggtggtctcttgcagattcaaagtatgcagggacagcactactggtgaaaaaatgcttcaagccaaaaagtgttgttttcaatcttgataaattagcttcaaagcatgaaccagatggtcgagtaatcctagttgaatttgaaacacttcgtttattgaatacatatgtaccaaataatggatggaaagaggaggcaaactcatttcaaaggagaagaaaatgggacanaaaggatactggaatttgttacacaaagttcagacaagcctttaatatggtgtgggngaatctgatggtcaggtggctaatctccattttttttttgggtttggggatatcattnagttctgtctcctttgtttggtaacatactttatctcttgcat

SEQ ID NO: 117151 - DNA, 157 bp, Glycine max
  Clone ID: PAT_MRT3847_76799C.1
actactacccatcctttcacatcatcctcacattatcactccttacaccctaaccaacgatctgtcttattacctttacaccactgtcccctctcaaactctcttcctctttaaccatatcctccctatccacacacaaattcacaaccacctcact

SEQ ID NO: 117152 - DNA, 450 bp, Glycine max
  Clone ID: PAT_MRT3847_7679C.1
ttttttttttttgagttgcacgcgtgctatttcagcggagcaaatgaaaatgatgctgctgctacaaacagctcaatgggtgaacatgaaaactgaatacaaggtctttgtctggcactctgaccaaaaaccctgttcatcaagggccatccttatttggcgaaagttcaaaacgtactggtttacggatggcctaacttttgcggaaacctttgtgcaagggagatgggaacaagttcttttcatcttgcaaggaaaactaaccttcatgttcatgaaaatacatccgattttccaatgggagacctcacgaacttccttctaaaaatgtatacagagccaaccgtatgctctgcagggccccagaggaaaattatattcagtagcccacatctgatgagggggaaagattattaatgcttgttcaaatcttcagaaaattcatggacc

SEQ ID NO: 117153 - DNA, 565 bp, Glycine max
  Clone ID: PAT_MRT3847_767C.1
agcttctatcggtgtcatggttgcagcgcctttggccaatcaaacttttaggttattaggatgccaatttttgttcattttatttttacttgcacacaacttaatttctaatacatatataattgatatatatttatgatttatattctacagtctacaatctacaattcaatacaaatttgattatctatcaattcatattctaagatcaatctcaaatgactttgtgtatgattttcaaatgaatctatgtaattttgtatcattgatatgaatcacaagattccacaatttatttatttttcccacttttttacttttgtttaatctattttcatgaaacaaattgaagtgtcatataagcttaaattcttaaatagaaaagtattgaaaggggatttttgaacttatctttgattattttgctactttatttgttgctcactcattcattgcatggactctatttggctattttgttacttcatttctgttcttcaaaaataaaggcttcacaactttgatttatctaataattttgccttataagattaatggtcaagtt

SEQ ID NO: 117154 - DNA, 659 bp, Glycine max
  Clone ID: PAT_MRT3847_76800C.1
cggacgcgtgggcggacgcgtgggttcagatagagaatacatttcagtatctcagaccagtgaatgaatagacagttgtgaattttgcaggaagaaatggatgttattcttctgctatcccatgtttgcatacccactttttcttcaattaatacttttatggttactgagacctacgtaatttgacagggacataatcgcatggggtggttttgttttgtatttgtagtttgctgtctggataccttactgtcatcagtcatctctatatgtggttaaacctcaattggtcctaattcttttaagtttaggaaagtatgaaaccctgcatcctcaagtactacatattctgatacaaaaccctagaattggaaaatttggaagccaatttttgttttcaaaagatatttaccataaagaaaattccttctgatgaaataaaatatcagaattttattttataattccttataactaccttcataacaacaacacatttcattttagtctaaaaacaatgttatccttgaaacatttattatataagtttatgaagtgtggaagcagtacttattttataattttagcgctcttttttcttctgttttccccatttggatgcatttatgctccatttgctaaaatttcaaaccttagaa

SEQ ID NO: 117155 - DNA, 2188 bp, Glycine max
  Clone ID: PAT_MRT3847_76801C.1
cccacgcgtccgcccacgcgtccgcttagatcaagcttcgtctggatatttttttccaccagaaaattacaaaaacataattttcagttttcaccaaaaagataacaataaataaagagctatcggcgctcgcaacaagccatctcaaattgaacagctttcagtcaccaaacaaatatttttccatgaaccttgcatctaccattattattctatcacatccatggccacagttgtgaagctccacgttttcccagaaagtttgaaccaacacaaaacgaggttgctcaggagaggctttggctcatgcccttcacctggggtgcttggttttggccataaaaattatgatcagttctctgtgaaagtgtgcagggcttttaggactgaggatggtggggatgtgaaggagaaaaagtttcgaaatttgaagaaaaatgaagagaaaaccaaaagggaaagtgggttttggagttccctcaagtctatcttgctgaggaatttcatggtgggttcaaaatcagatgatgagtatcgccaagctgtggtcaaggtggagggtctcctatcctcgattgccattcaaattggaaggtatattgtgactatgatgagcactggggtcatcctttcaattggatttcagatgtcaggtggagacagtcagatggatgcattaatatggtatagttggctaggaggagtaatcattgggacaatgataggtgctaacatggtgttggaggaacattgtcgcgcaggtccacgtaatgttgtcataacggggagtacaaggggattgggcaaagccttagctcgggagtttcttctttctggggatcgtgtgattgttacctctcgcagccccgagtctgtgcaagacactatcaaagagcttgaggaaaatctaaaggaaggcattgccaatgcagttggctcttctctgacaaagctttctcaagcaaaagttataggcatttcttgtgatgtttgtgagcctcatgatgtgcagagactggctaacttcgctgtcaaagaacttggtcatattgacatttggataaacaacgccggaacaaataaaggttttagaccattgcttcagtttagtgatgaagatattaaacagattgtctcaacaaatttggttggatctatcctctgcacacgagaagctgtgcgtattatgagaaaccaagccattgcaggtcacatatttaatatggatggtgcgggttctggaggctctagcacacctttaactgctgtatatggttctacaaagtgtggccttaggcaacttcaaggatcactattaaaggagtgcaagcgatccaaagtaggtgtccatactgcatctcctggcatggttcttacagatctgcttttaagtggctcaacggtccaaaacaggcagatgtttaacatcatctgtgagcttcccgaaactgttgctagaacactagttccacggatgcgggttgttaagggaacaggcaaagctatcaattacttgacccctcccagaatcttacttgctttgatcactgcttggttacggcaaggtcgctggtttgatgatcagggaagagcattatatgcagctgaagcagaccgacttcgtaattgggccgaagatcgagcccggttttctttcactgatgcaatggaaatgtacacagagaacacctggttatcagtcttctcactttcagttgtctgtgccttcataattctttccagcacaggcagcaatttgcctggaacatgacgatgtattgctgccaatgcaaaaatgcatttgcttttgtggacaggtaattggtgcctgaaatcatcaagacaatagaatgaatctaaagtctaagttataaacaaagtggatctgtttttttcccaccatgtccacctaaacaattatcatttgacacccttagctcagacatttggctccccatgtactatgtatataggctgccctgcaatcagcattcttcattaagatgcttatagtcatagtatgttactatgtatagccttcattgaattgtagactagtgaaatttcatattttctacccaatatatttatttgaatgtatatttatcagtgtgctaaaatctgaaatttatattggacattggacaacacttttggataatgttatatacagttttttgttactgca

SEQ ID NO: 117156 - DNA, 343 bp, Glycine max
  Clone ID: PAT_MRT3847_76802C.1
aaagcgttacaactgcatcttttattccactttgaattggacccatactggattgactggtctaaaaggctaacatcactattctttacaatgcgagcgtacgcttcgatcgatcacaggattccggatcgaggactcttagcggaccgtttttcactcccgagagacgtattataaccaggcgtatacttggtactagatgataaccgtgtgagaatgtggtccgcttactacctacatacatatgagctactggtctaaagtgtaagccctgctgtgcctgcatgatggttcaacacagactaaaggccgtgggctcactgctcactttagcggccctaaa

SEQ ID NO: 117157 - DNA, 215 bp, Glycine max
  Clone ID: PAT_MRT3847_76803C.1
aaaacccggatacttaccctaaattcatccatcaattttaatcttaaaatctctaatccaaatttcaactcatacactaactcatcaaacactatacttttatctcaatagacacaaaataccccttctcttatttcctaccacactctaaccccacaaaaccctacaaccacctaaacaacaatcataaccttcactccaaacactaccaactc

SEQ ID NO: 117158 - DNA, 769 bp, Glycine max
  Clone ID: PAT_MRT3847_76804C.1
agcttcccgaaactgttgctagaacactagttccacgcatgcgggttgttaagggaacaggcaaagctatcaattacttgacccctcccagaatcttacttgctttggtcactgcttggttacggcgaggtcgctggtttgatgatcagggaagagcattatatgcagctgaagcagaccgacttcgtaattgggctgaagatcgagcccgattttctttcaccgatgcaatggaaatgtacacagagaacacctggttatctgtcttctcactttcagttgtctgtgccttcataattctttccagcacaggcagcaatttgcctggaacatgatgtcttgctgccaatgcaaaagtgcatttgcttttgtggacaaataattggtgcctgaaatcatcatcaagacaatagaatgaatctaaagtctaaaaaaattataaacaaagtggatctgtttttttcccaccatgtccacctaaacaattatcatttgacacacttagttgtctgtgacctttagctcagacatttggctcccgatgtactatataggcagccctgcaatcagcattcttcattgagatgcttatagtcatagtatgttactatgtatagcctttcattaaattgtagactagtgaaatctcatattttctacccaatatatttatttgaatgtatatttatcagtgtgctaaaatctgaaatttatattggtcattggacaacacttttggataatgttatatacagttttttgttactgc

SEQ ID NO: 117159 - DNA, 459 bp, Glycine max
  Clone ID: PAT_MRT3847_76805C.1
accgattagagagaaaccagttagatctgttcagtgctgccttccaagctgggcttcttgtcgtagcttcagcgagaggaaaaggaagacaagtcctgcaatagcagctaatggaaaagcatgactcagatgagcaatgtaccttcttagacataatcatgatggaagttaaagatctatgaattgaatatgataatgtacatctttacagggataactttaaagatgtacattatcatattcaaagttatccctgtaaagagccaagtagtaatatgaatttgaaagcatgtacacaaaacggaagagacggttttatgtcaataagcaatgagtttttggtttcataatcattctcaaggggataacatcatctaaattggctctatacttaggttaagtactgttattgtatgtgagatacataaacatgatccaactaagtagggtagttatcat

SEQ ID NO: 117160 - DNA, 374 bp, Glycine max
  Clone ID: PAT_MRT3847_76806C.1
ggacccctacgtcacttattactaagaaaaagctcgttatgattcctagatattacaacaagatggcaaccattaattttaatcgagcattaatcttcgcataaaggcataaattagtgaaattatataaccacttaaagaaatagctcataatcatacaccaacaaattgcatatctttaaataatcaaaggagctgtccatgtaacttaggagaaactgactgaaggggggtaaaaagaaatgaaaaaactctgaagaatatgatctctccttgatatgccatatggatcaacacaaagcttgtgttcccatcccacatgtttatgcgtatcttggattatcatacaccacctctgaacggatcctacttga

SEQ ID NO: 117161 - DNA, 260 bp, Glycine max
  Clone ID: PAT_MRT3847_76807C.1
atttgttttaatttgtctaaattaatggcatcatgaaattggggatagtgcgttacgggtatagtgttaacctgatcatgatgacatattatgacctaataaaaagcacttctttaaaagctcaaaacagagggcagaataaaaaggacagaacgtgtgtgatcattacttttttgggctcttcaggaacattataatctaactccttacggattatttatgcaaggctattaaaaatcattgaaatggatcatgcttgc

SEQ ID NO: 117162 - DNA, 604 bp, Glycine max
  Clone ID: PAT_MRT3847_76808C.1
gagtacttaaaacgtcgctgcccaacacccaatcccgatccaaaagctgttctgtattctaggaacgaccttaaaacgcccatgatcattggcaacaactactacaagaacatcttgcaacacaagggtcttctaattgtggatgaagagcttgccactgacccaataactgcaccttatgtccaaaagatggccaacgacaatgattatttcaaccaacaattctcaagggccattcttttgttgtcagagaccaatcctttaacaggagatgaaggtgaaatcagaaaggattgtcgctacctcaatgccaattaaatatataacataaggttgccctttgtgcatgataatatgtataattagcatagattataatgcacgagtgcgccaaaataaacgggtgggacgtactgggcctaggttaccatattcagtgcaatacgccattgggcctagccttatgtatacgcttatgtttgggcttttacttcctgcacgctccctatttgcgggaagtaattcccttctgtttgctttgttcatagacatgtcatatgttactactacagctaacaaagcccaacatcttaaaggtttatgg

SEQ ID NO: 117163 - DNA, 1090 bp, Glycine max
  Clone ID: PAT_MRT3847_76809C.1
gttcaagtcctctaattcaacacaggctttcaaagtatccggtctcaccctttgtctacacatgtccttgaagaaatgcacagcttcctcaccctttgttcatggaatagcctgaaatgattaaactccaaacaaaattatacttctccttcttggagtcaaagactttcctgcaagaactgacatccccatgtttgttttacaagtcaaccagagcattgcccaccacaacatcaacttcagcaccaaacttagatgcaagcccatgaatttgctttaactctttcaatgaagaacagcacttgagtaagctaacaaaggtacaatcatcaggtttcaagccttccactccccacatttcagaaaacaacctatgaaccatgctaaagtcaccaacacgagcaaacccagaaatcataacattccatgcaacaaggtctctcggacgcgtgggatgaaaggcgcaacatgcatccccaagattactaccactgttaaagtacatatacacaatagagctcccagaaaacttgttcctctcaagcccagaccgaaccagcaggccatgaatctgcaaacccacattccacaatgaaggagtggcacaagctcgaagcagaacagagaaggtgtactcattgggtctctcattcaatgcacaaatgtgattaaacatctcaaaggcttttggaagtgacccggttcggaaatgcgaggaaattaaggttgtccaggtgaaaacgttcctctgaggcatttggtcgaacaggaggtgggcatggcgaaagtggccaaatttggcgtacaggctcaagaggttgttggttaagtgggtttgtgaaatgcattgggaggctatgagcttagcgtggatttggttgcagtgtctcagagttacgaggtttgaagtctttgccagtgacagcaaaaatggttcaatcacagtaccgcacactttgcttgccacttctgggtcaaacgctgcgtgccgccggatcattccaattacaccgtcatcaagtttgaatgcgtgatttggttgtgtacgcgtgtgtgttttagtaattttttttgttgagcttaattattt

SEQ ID NO: 117164 - DNA, 545 bp, Glycine max
  Clone ID: PAT_MRT3847_7680C.1
caccttccccctctttaacaataccttctagagatcttcatactcacacccatctagaaagtttgagaaaaaaataggtgattacatgacctagtggcctcaccgtccctcttagcatagtgttttccttcactctccgagatctcgctcctctcccccctctcatcgcagtcgatctactttgcggcacatgctttttcggttttgtggaaacatgtatgttgtatattgcttttacattcaattctgatctttgtcttcattctacttttgataactcattctactatctataactcactctcctatcgatgactctttctttacagattcaacttatgtttttgaattattatgtgtatgttcttatattcgtaaatgttattaattccaatattgtttttcatttcaccacaaaaattaattactttcattcgagtattataccagaacccacttacttgttttatacttaaaattaaaattgttataattgtgaaatcctaaaaacaagcatttcatcaaattgaaaatcaataaattat

SEQ ID NO: 117165 - DNA, 330 bp, Glycine max
  Clone ID: PAT_MRT3847_76810C.1
tacctacagctcggaactcagatttagactcgaggcttttaccttatctattacaacaagctaaacaaggtttaggttattacgccacacgggaaccctcatcttctgaacttgcatgtctctctgagagatgtggatatgaacgagggagctctttttctgccacacttcaattcaaaggccatagcgatactagtgattaatgaaagagaagcaaacattgaacttgttggcattaaagaacaacaacagattcagcagcaagaagagcaacctttgtaaatgcggaaatatacagctgaattgtctgaacaagatatatgtgtaatc

SEQ ID NO: 117166 - DNA, 697 bp, Glycine max
  unsure (1)..(697): unsure at all n locations
  Clone ID: PAT_MRT3847_76811C.1
atgactaaaacgaaaaaaaaaattacagaaaaaatattaaggttggcctttgcatgctcacatggagctgactgcagggcaattcaacccggtggcagttgcttcaaccctaacaccattcaaaaccatgcttcttatgcctttgacagctactatcagacccatgccaaaaaccctgctgcatgcaattttggtggcacagccaccattgccgttactaatcccacaccaaagctggttcctttattgttattactaaccataataacaacaacgaagaatgtgttgggtcaaggaggaacagcgagctggtgtgtagcgaggagtgacgccagcagcgacgcactgcaaacggcgttggactatgcttgtggggccggtggggattgtcttcctcttcaaccagatggactctgttttctccctaacaccattcaagctcacgcttcttatgccttcaacagctactaccagcgcaggaccagagctcctggttcatgtgattttgctgccactgccaccattgccactagtgatcccagtattataactaacttttctcttcatttccattttctttctttttttattggatcagtgtgaagcatggcaaacatggtttattcaggaaagagcagagctaggttgtagcaaggcctttactgatgtgattcttgttaggctcaaannnnnntca

SEQ ID NO: 117167 - DNA, 269 bp, Glycine max
  Clone ID: PAT_MRT3847_76812C.1
gctacccgtgccttcatgctaaagacatacaggggaatatattaaatggctgggggctttcaactggtgaaacagggccctagcccagattggatatgtccacacacaaacctgaggcatcttgacagcatgtttaagcatccggatacatatcaagtggcaccgctcatggtcagatgcactcccatccatcagatagagctctcctaactgatccattcttacaagctatcattcgatgcatggatccagcatgctcttcttaccaa

SEQ ID NO: 117168 - DNA, 508 bp, Glycine max
  Clone ID: PAT_MRT3847_76813C.1
tgaaattcaaattcgtgggagtgtatcaataaaattgaaatttgtgtgctactctgtggaccataacagagttaattcctaatttgttgattgcatgttcagctgctggaaatcatgctgagctagtttaattttcttgatgattttggattttaattaatcgatctattgattatggcatcgtagtggatagaataattttataacaacaaaaacaacgaagcctcttattctactagggaatagaataattatgttttaatcctcatacttgttgtatatgcttgaggtgacaattaagctagtcatctgctcattgtgtgactttatgctgatcttaatggaaagaatttgaagtttcatgatatttgtacttttttaatccaggtaacatccaaggtagtgattatttagcttggtttttattcctcgaatcatcacatctcagtatttagcttcattctcacattcaatcagttccattgtcgaggtgcacaaattcgtggtg

SEQ ID NO: 117169 - DNA, 368 bp, Glycine max
  Clone ID: PAT_MRT3847_76814C.1
cggttccaggcggaatattcatatgactttattctatagcaatactgtgcacaggtgggccggcgaattagggggagcgtgcccacgacttaggcttgctgtctaagcatacaacatctttggctttgttaccattcctcgaaaacgtcgattggatgtcggaacatatacatacacagaaatcattctaggtcaaacttcaaatcagataaccaacaagcttacttttatgccatacacctcgaagtacatcccaaggacacatttgtcttcaggatatatggcaccgtactctttaatattccatactacaaaaaacatggatattgggtggagatatttaactcaccttttatgatgaatgggtt

SEQ ID NO: 117170 - DNA, 470 bp, Glycine max
  Clone ID: PAT_MRT3847_76815C.1
aagataggaagctgcttctaacagaggatttgagggaaaaagctcacattgttgtggccaaagatggcagtgggaaatataaaaaaatttctgatgcacttaaacatgtccctaataatagtaacaagaggactgtgatctatgtgaagagaggggtttactatgaaaatgtgagggtagagaagaccaaatggaatgtgatgatcattggtgatggtatgacttctactattgtatctggcagccgtaactttgtggatggaacaccaacattttcaacagcaacatttgctgtatttggaaggaatttcatagctagagatatgggttttcgcaacacagctggtccacagaagcatcaagcagtggcactaatgactagtgcagatcaagcaggttactatagatgtcacattgatgcatatcaagacactctttatgctcattccaacccgcaattttacagagaa

SEQ ID NO: 117171 - DNA, 666 bp, Glycine max
  unsure (1)..(666): unsure at all n locations
  Clone ID: PAT_MRT3847_76816C.1
gaattcgagctcggtacccggggatcctctagagtcgacctgcagtgattgttgcattaagggtggaacccatgtgaaatgagtcccgaagtactagtaccatgagagacactaccagaatgggtattgtgtatagcattattgacctgtcatgagaaaatatataaaaatgtcattgtcatcactcatcatgatttgttacattctagtttaaattttggcttaaatattgtttatagttaaagtaatatatacttgttttatggttttagttgctataaattttttctaataattttaatccaatagaatttcattttatcattttaatccgggttactgttcacccataatgtggcaactatctattgaaaaaatagactttgatttttcttaaataatagatattaaaatgaatatcttctttttttaattaaaattaaaatttatatctcctaatgagggactaaaatcaaaagtttacagatttataagcactaaaaaatatcattaaaaactaaaactataaaataaaattttataaaaatcaaaagtgcaatttttttataagaactaaaaccaaaaaataaatntattataagaactaaaaatatatttaaggtgttaaaatgtttttgtttttgttgcactaatatgatggaattt

SEQ ID NO: 117172 - DNA, 307 bp, Glycine max
  Clone ID: PAT_MRT3847_76817C.1
aggggaacatataggtgtcgtatcgatgattaacgagtcattgttgcaactagagcaggaagcattgcacatttaattaagcaatcgtgtgcacgaaattgctattccagagttatgagcgttaatggctatcagcataatacaatatttgcgatgagggacattaaatagtgggaagagcttacctatgatgacaggattttctcaattgatgaacgacgtccttgttactgtggcttcccaaagtgcctaagtatactaaatgatactgacgcagaagaacgagctgctaccctatatgcaccac

SEQ ID NO: 117173 - DNA, 172 bp, Glycine max
  unsure (1)..(172): unsure at all n locations
  Clone ID: PAT_MRT3847_76818C.1
ggatacatgnggattttagtcaaagtgtggcaacactgtggtcacaatacaggcggaaagatcaaaagggtaaaggtggtggttgcttcaaatgtggttctacagatcatattgctaaggattgtacgggagaggctacnatgaaacaaccacagcaaatacatcttaagga

SEQ ID NO: 117174 - DNA, 272 bp, Glycine max
  Clone ID: PAT_MRT3847_76819C.1
aggaacaagcttacgcaaccgcaggcccatatttctctgcagcagcggggaaaacaaattaagggaatgaaaggatttactggtttgggcatgatgaccatttgcaataaggaagaggatggtgcctctggtggcattctatttataagcagcatagctcttgccgttttcctatgcgtaggggagataattgatatatatacataattgcttcttctcccctcgaaatgtggagagatctttattgtggtattaataaatgggcccggaaa

SEQ ID NO: 117175 - DNA, 594 bp, Glycine max
  unsure (1)..(594): unsure at all n locations
  Clone ID: PAT_MRT3847_7681C.1
gttgaaattgcaggtattgtttgtctgtgaatgtaatcgcatttgtatacgctgcgtttcaagcgtgtgatctggcgtatcaggtagtaacgggaagacgcataatcaatcaccacctgcgttaccactttgatttcttcatggatcaggttttggcgtatcttttggtatcggctgcatcatctgctgctacacgcgttgatgactggcaatcgaattggggaaaagatgatttcacagagatggcgagtgcttcaattgcgttgacctttcttgcttttgttgcctttgctattagctcgttaatctctggctacaacctctgcactctgttctcatagcaacattttaacctcgtataagctgtctttccattgtacacacaactacacactttttttttcttctttctattcctctattcttactgctgtggaggaatgcattcatgagtgttggtgccagtgatttttttttactgtacagatagacttgtatacgtacaattgagggaatactgttcgtcttaaatccgaaggatggagaanggaatntttgtgttcaccttaaatacaattaaatgattgtatttta

SEQ ID NO: 117176 - DNA, 973 bp, Glycine max
  unsure (1)..(973): unsure at all n locations
  Clone ID: PAT_MRT3847_76820C.1
accggtccgnattcccggtcgacccacgctccgcgatctgaagccactctctctccgttcgctccctcccaactctctccctccctactctccagtagcctctgctctcttcctggcaaccagctcacgggcccaatggaccgcctcctagcccgcctcgaccaggtcaagtatttggacctaagcctaaacaagttcacgggcccaatcccgggccatatcttttcctttccgctgacaaatctgcagctagaaaggaaccagttctcgggcccggtccagcccgtggatcaggtttccatcccgaccgttgatctcagttacaaccggttgtatggtcagatatcaccgatgctggcgacagtgcagaatctttacctgaacaacaaccggttcacgggtcgggttccggctagcttcgtggagcggttgctggacgcgagcattcagatactttacttgcagcataactatctgacggggattgagataagcccaacggcggtgattccagaaagaagctcgctgtgtctgcagtataactgcatggtccctcccgtagagacgccctgccccttgagggctggcaaggagaaaaccaggcctactacgcagtgcaaccagctgaaggatttgaaggactgatcctgatcccgatcaaaatcatatatatacctttccttctctttcttgccctttttgattcattattatttaattttgtgataactatgggggaatgaataagatgatgattgtgaatatttttggattagatttagaaaccctggctactattttgatccaagagcttctctcaagtctgatgctcgctctacatattattattattattatgattatgatcatgatcatggttattatctatattactaatgtaatatgattagtccattaggaaatcaaagcaaaaggttattggtcattataatgatgctatctctatcagatc

SEQ ID NO: 117177 - DNA, 359 bp, Glycine max
  Clone ID: PAT_MRT3847_76821C.1
gtccaattcaagagcaaggacatttggcgcgccaaaaaaacaaagagacctgagcctttcccgcataaaaccccgggaaaaacctgccccacactaattggttatccttacaaaaaatcccttgcaattggattatggaaggataccccatttaaaacaacgtgccagtttattaaaaaggtgaaatgttcgttggctaatccactggcaatcatggggcaccgtaacatgacttgaatgatcattaccgggaattaaaaccaaccgggcatgggtggccctgtgccggctaacccttggacccaaaaaaacaattactttaggttaattttttaaaaaaaaaagggaaaggggggggg

SEQ ID NO: 117178 - DNA, 368 bp, Glycine max
  Clone ID: PAT_MRT3847_76822C.1
cagtttttgtgttattttgaatatcacaaaatcaattcccctgggctggttccctgctctaacagcatcatcacacaataaggatttctactaaatcccttttctacccttaagcataatctcaaaggtaagttggcctcatgattcttcttttgggcttttcctcaatctgcaccttggtatgatctgcttgcacctctgctgaatattctatttgtacccctgctctgtggtctgtggattacctatcatctctctgcccttgggaaatcaccttgtcctcaaagtgatagtcattgcaaagaatagaccaattctcccaaaatgtatcatttttggatataccatgccattgaaccaaaactttc

SEQ ID NO: 117179 - DNA, 1410 bp, Glycine max
  Clone ID: PAT_MRT3847_76823C.1
acttcccaaaaaatatacagcactatggaacaccaaaaagaggagcaactagaaccagtgagtcctgtgggacaatacttcaacagctctgtgctatgcatatacatcattggagttttagaattcgaagttccaatagatgacttgcaaacatatgctcttcttaaagatgttttccttcccatcaatccacgcttctcctccatcatggttccctctctttgcttcccttattatattcgttaatttatttttatatgcttatgatgtctatgaacattagaatattatacatacataatatatatgacaagatgacaatgttagatatggcacttattaatttcacaaggctatttatgttaattaattaatttctatagatagttttgcattataagtattttttgtttttttggctgcatatcactctttcaaaatatcttggttcagcttcagtaaaataggttggtttttatgtttgacagaaaatgtctacaacactgagtctcagattattccaaactgccatccttccttgcccttattgactattgtctccatttaaattaattgatcgtgctgcttctgctttgaatatggtatccaagcaccaatataccgacgcaaacaagactgcaaaatgaggatagctactcttctttcggtggatattctctggctccaaatatggcagttccaatcctaacatttgtacttcccatctcaatagcttgttcaaagtctccagtcatgcccatggacagctcacactgcgtttctgatattccaagagctttacaaacttcacttctgcaattggatagtgtctcaaaattttctggggtggatgaataatcaagcatgccaattgtcattaggccagagaactcaaggtttgggcagtttgtaatatgttttacaagatccacacacagagctggttcaacaccaaatttggatgtttctccgcttgtattcacttgaacaaaaacctttaacggtttcctgccaacatttgctacagcacgatcaagaaaatttgctatcttcttatcatccacagtttccacacaagcaaggttgggcacagcagcgataagaggcttgactttgttgctctgcaaatttccgatgagatgccactggatatcgtcgggaagctgtggtgccttttgaaggagttcttgaacgtagttctcgccgaagcatctaaggccggcgtcgtatacctcacggagagcagaaactggcttcgtcttgctcgcagccactacacgaatctcttgcacattacggccagagcgttcggcggctgcttggacgcggtcctgcaccgccttcagcggcggcgatggtgacgatgctgccatttgcctccccttctgtcgtcttctcgcagccgtacga

SEQ ID NO: 117180 - DNA, 1151 bp, Glycine max
  Clone ID: PAT_MRT3847_76824C.1
gtgctgtatatcactctttcaaaatatcttggttcagcttcagtaaaataggttggtttttatgtttgacagaaaatgtctacaacactgagtctcagattattccaaatacacagctttcccagagcttattgactaccaccatcattcatgctcatgaatatacttatttccagcttaaataatttgatcgtgctgctctgactttgatatgtgaatccaagcaccaatataccgacgcaaacaagactgcaaaatgaggataactactcttctttcggtggatattctcgggctccaaatatggcagttccaatcctaacatttgtacttcccatctcaatcttcaaaattagagttagctggttaaaaaatattatgacaaatcacaatacttattccttcagtgtacgccaactattttccatgggaaaaaattattccttacagcttgctcaaagtctccagtcatgcccataggcagctcacattgtgtttctaataatccaagtgctttacaaacttcacttctgcaattggagaacgtctggggagtacaaaagaatgtttagtttggggaactatctagaagactaaataggaagtcccgaaaagagcaataaattatgtccaaaatgtatagtcgccaccttaaagttttctggggtggatgaataatccagcatgccaattgtcattaggccacaaaactcaaggtttgggcagtttgtaatatgttttacaagatccacccactgagctggttcaacgccaaatttggatgtttctccgcttgtattcacttgaacaaaaaccttcaatgatttcctgccaacattttctacagcacgatcaagaagatttgctatcttctcatcatccacggtttgtacacaagcaaggttgggaacagcagcgataagaggcttgactttgttgctctgcaaattgccgattagattaaatgccattcgatgtcgtcgggaagctgtggtgctttatgaaggatttcctgaacgtagttctcgccgaagcatctgaggctggcgtcgtatacctcacggtgagctcgccgccactacacgaatctcttccacattccgctccagcaccgccttcagtggcggcgattgtgacgatgctgccattgg

SEQ ID NO: 117181 - DNA, 120 bp, Glycine max
  Clone ID: PAT_MRT3847_76825C.1
gcgcctcctacacccgggcgatgtgcgtgtactgagaggtgatgagctaggttaacaactgtcggagcatgagacccttagagctcatgtacatgctgcggaagcactggtgctacaggt

SEQ ID NO: 117182 - DNA, 107 bp, Glycine max
  unsure (1)..(107): unsure at all n locations
  Clone ID: PAT_MRT3847_76826C.1
naagaaaggaggctcagaanagcgggacgtcacgccagccagaaccacagatcggaaaggggtatatcgccttcaaatactgtcgtccacggcggtgaaactcgcct

SEQ ID NO: 117183 - DNA, 479 bp, Glycine max
  Clone ID: PAT_MRT3847_76827C.1
ggcagcagcatccaaaggcttctagggttttttttttttctctatcaatctttattagtgttttcaggtcctcctcttcatatctaagtagttcagcgtttttttgtttgtcctttttaattcaattgcgtttagttgcgaagtgcctatgatggtgttaaatatactccgagatttatttctatgacatcaacttcgttctgaggcactagcttatccttccttattttcgattggaagcacatgaaagtgctgtgagggttttgctatactgtgtagtggccaattgactttttttatgaatgttttcatgattcaattgtaattgcaatgtcatggttctaatttgctgattgcacttgtgtcatttatgctctagttttaatctttgttctgtcgttttgttttaacattgttaaagcagtatttatgcgcagatgacgacaacatagacagggacatcagcactccaaaggaga

SEQ ID NO: 117184 - DNA, 240 bp, Glycine max
  Clone ID: PAT_MRT3847_76828C.1
tagaattcaggggtttagtaaatatgaaccttgaattgaatccgtagtgaagagcattatttgtgtgtgcaagagagcgagggttcttagatatcataaaattatgcctttgtacaatcctaactcatttggtgttaggatttattgattacaactatgaaaggatcttccgggatattcaaaatctattaccatttggatgtttaagtattggaattttagttaattgctgttcatttg

SEQ ID NO: 117185 - DNA, 326 bp, Glycine max
  Clone ID: PAT_MRT3847_76829C.1
aaaaaaaggactagcttcctttcacaggtgtcattgaatataatctgtggaggcccttgctgcctgggaatcttgaaccaaaaagggcttggtttttttaaaactcaccaggaatctgggggtccctatggtaaactttttttttacaaaaaaggaaggaccaaattggaattaaggggtccaaattcgggccttttgtcaaaaaaactggaaaaacttgtgcccaaaggagttaaacctgtttcgttgccgggggaggataaaactcaccgttttttaagcttttatgaatttttccaaccttttggcaaaaaatgaattttttt

SEQ ID NO: 117186 - DNA, 387 bp, Glycine max
  Clone ID: PAT_MRT3847_7682C.1
tgaatttgtccatggatggggtcttgattttgcttttagaaaatgtgttgagcctgcccatgagaagatgggagttgttgatactcagtggattgtgcaccaaggtattccctcactagggaatcagggagaaacacaaacaactggaaaacctgcatggcgagcggtgaaggagaggtgtggcatggagtggaggatgttccagggtaggttgactaacgcggaaaagggttattacaagtccaagggaattgatttttctaatttgctcgttcataattaggggacagctccaaattcttacacatacatcgatcaccaccgttgtttttgttttcgagattattattttgatatacgattgttttaatcttgtaagatcaagtt

SEQ ID NO: 117187 - DNA, 1577 bp, Glycine max
  Clone ID: PAT_MRT3847_76830C.1
aattcgctggctccccttcttattcgtcgttcagttcaatttctcgcgagtttttcttccatatgctaccaatcgttgccgttgatccacgcgccggcgaatttcagttttgattctccgccaccgttttggctgttgttactttggttcttccgagagaagggagccatatatagaaagtattttatggtgcgccgatgagcagaactgatgttattggcagtagaaggaggaggattcttctctgcttcggcttcagggtatactaagggcctgagccttctcctcttgggtcagaggaatgaggataaacccatgagagtagcgccgtggaaccagtatcagttggtagaccaagaatctgaccctgagctccagctggcttccacaaagaatcgcctctcccgcggctgtgcctcctttgtttgctttggtcgcacttccgcaggacttgatactccgtctcctcttaaagtgggccctgctcaacaacatgatgtctcaccagggccactggtttccaacaagggaaaggatccttctgcacatgtagatgatgaaagtgataacagaaaggctacactaaaaagtagcataaagaagccacaaaatagaaaatccgttcctgttgaggttgctaatgaacatgaagcatcaagtggacaggggatttgtactcctggaggtcaacccgaaagaaggaaagtgcagtggacagataattgtggtagtgagcttgtggaaattcgagaatttgagcccagtgaagtggatggatcagatgatgaatttgatagtggaaatgacagaacttgttcctgtgcgattatgtaaattggagtttcattaagttgataggttcatcgggtcattcactgctaacatccatcactcgatttgagacaaaagaggcaaaggtttcagttctgtggagatatatacacaaacatcttgcctgagtgatgtgtctgttattgcttgctgcggctttaaattttgctcctctgcccctcatcaatttgtataattcttgtcatgtgtgaattctttgcctttgattcatcatttttatgctactttatgttcttatttttataaggattaacaaagttttctttctatgatctggcattatcttgaaaaaaggtaatacaagtgtaagattttgtaaaaaaatcagtgtgccaacctggtaacaaacttgtgatgagactaggatttgttaaggcttatctgttgaaagtataaagaaaggctcatgctcgtgtaattgctacagtaaactcactccttcttcttcgatctgcgatttgccgttttgtttcccgaacaagtgagcgaagaccgacacttcgaaatctcgctttgcgttatttgatttgagtgtgatttcactgtgttcagggctcggcgtttctgattttcttttctcatgcatttgcaagtaactcagaggctttggtttaattgtctctcctattgatgggtgtgcaatgtattctgttttctcggagtttaaattgtgtttgaaaaattgcttgctaactcgagtattcggagtggttgcattgaaacag

SEQ ID NO: 117188 - DNA, 432 bp, Glycine max
  Clone ID: PAT_MRT3847_76831C.1
ggaaggctgcaaatatatatatatcattaatagggaaaccagtaccagaggtaccaaagagcaaaattacaaggcaccaaagggctaccctccaaaacaacacacaaactttactaattaattcaaacccaaacccatttaataaacaaaagtagatatattaaaaaaccagggatggaaattaaggctaaaatctttatcataagcctttaaccatgaccaagctaagtaaatagcatgatccatgactttacagggatcaaaaggttttccttggaaaaacaattgattcctatgctgccatataaaaatggttaaggctatccaccacccacattttgaactataattcacattcgatccaaacccctcacagaattggtaaaaatgatgaattgggttaatggaaaggggaccaactacccggaccca

SEQ ID NO: 117189 - DNA, 218 bp, Glycine max
  Clone ID: PAT_MRT3847_76832C.1
aaaaaaaaagctggcttttttttttaaatagctataggagagccctgcctcactcatcagttcccccccataagagaaacccccttgcaaaagaacccctaaaacactaaacttgctagcttatattttcacgacacaaggacatgaccctttgacctaagtgctacctataccttttttataccctttcctttccaaaaaccctaaaaccctggctt

SEQ ID NO: 117190 - DNA, 540 bp, Glycine max
  Clone ID: PAT_MRT3847_76833C.1
cccgcgtccgcgtcgttctgttcaattcctcgccgagtttttcgtccagatgctacgaaccgttgccgttgatccacgcgccggcgaccttccgttttgattcaccggcaccgttttggctgttactttgaggataaacccatgagagtagcgccctggttcttcagagagaagggagccatttatagaaattattttatggtgcgccgatgagcagaactgatgttattggcagtagaaggagggggattcttctctgcttcggcttcagggtatactaagggcctgagccttctcctcttgggtcagaggaatggaaccagtaccagttggtagaccaagaatctgaccccgagctccagctggcttccacaaagaatcgcctctcccgcggctgtgcctcctttgtttgctttggtcgcacttccgcagggcttgatactccatctccccttagagtgggccctgcccaacaacatgatgtctcacctgggacactgagttccaataaaggaaaggatccttcagcacatggagatg

SEQ ID NO: 117191 - DNA, 761 bp, Glycine max
  unsure (1)..(761): unsure at all n locations
  Clone ID: PAT_MRT3847_76834C.1
tacgaattcgagctcggtacccggggatcctctagagtcgacctgcagtgaagtggatggatcggatgatgaatttgatagtggaaatgacagaacttgttcctgtgcgattatgtaaattggagtttcattaagttgataggttcatcgggtcattcactgctaacccaatccatcacccggtttgaggcaaaagaggcaaaggtttcagttctgtggagatatatacaccaacaacttgcctgagtgatgtgtctgttattgctttgctgcggctttaaattttggtcctctgcccctcatcaatttgtataattgttgtcatatgtgaattctttgtctttgattcatcatttttatgctactttatgttctattttttatatggattaacaaagttttctttcgatgatctggcgttatcttgaaaaaaggtaatagaaatgtaagattttgtanaacatcagtgtggcaacctggtaacaaacttgtgatgagactaggatttgttaagatttatctattgaaagtatgaaggcacatgctcgtgcaattgctttttaggttgttgaatattgttcgggtctttgtcgggtaaagttaacgttcgtccatgatgtctaaaagatgaaccagttttcttgcattcagggttggatntggaattccgtttgtcctattttcttgacccgtntgttactttntggnttttttaagtaaaattgttaaggacaatgtttgggggtggttttttatttcgt

SEQ ID NO: 117192 - DNA, 367 bp, Glycine max
  Clone ID: PAT_MRT3847_76835C.1
ggcttcaaagcgcatcctcaaggagctcaaggacttgctgaaagacccaccaacttcttgcatcgctggtccagtagctgaggacatgttccattgacaatcgacaataatgggtcctgctgatagtccttatgctggaggtgtattcctagtcactattcacttgcctcctgatgatcctttcaagcctctctaggttgcctttatgactatggtgtgtcacccgatcttcaatagcattagtagtcattgtctttatctcctgaatgagcatagaatctctgctctcaccatctctcacgtactgattactatctgctctttgctgacgtggccacattctgaggatccactcgttctggatatc

SEQ ID NO: 117193 - DNA, 1036 bp, Glycine max
  Clone ID: PAT_MRT3847_76836C.1
ccctcgcctccttgaatcccccaaaccgccatttcctttgggtttatggagtgagcgtggaagaggaaagagcaagcagcaacagctcgtggcggttccgattatttattaagatcaatgttgcatgcagtatctgcccctagcttttgtttaagctatcccgggaaccttcattatcctccttcttcagttcaaaaaacatgtttttctgttcgttgttcggtttcacagacaaaaaatggagctaaagtggaatatactccttggctcattattggcttgggcaatcctggtaacaaataccatggcacaaggcacaatgttggatttgaaataattgatagcctttctcgagcagaagggattcagatgaacacaatacagtcaaaggccctcattggaataggttctattggtgaagtaccgattttgctggcaaagccccaaacatacatgaatttcagtggggaatcggttgggccacttgctgcatattatcaagtacccttgcgtcatattctactagtttttgatgagacaagccttccaaatggtgttttaaggcttcaacctaaaggcggacatggacatcacaatggattgaaaaatgtaatgggccatttggatggttgcagtgcttttcctcgacttgcagtcggaattggaaatcctcctggaactatggatttaagagcttatcttctacaaaaattcagtgtagaggaacgaaagcagattgacgcttcattggagcaagcagttgcagcagtaaggaccgtagtactcaatggttttgaccagcatgtcaatagattcaatttaggacaaaaatacaagtaccataaagtttaaaatgaaccgccaagatgaaattggtggttacattgttgtgtatgttagcagatagcagttatacctcacaaacttgtcatgactagtgcatttttttgtaaagcacaccagtggtcatattctagctctggcagatagttgtttcattgtgagaaaaaaaagttgttgaattgttgcttggacc

SEQ ID NO: 117194 - DNA, 263 bp, Glycine max
  Clone ID: PAT_MRT3847_76837C.1
ctagagagctgtggtttctctgctaccattggaatggatgttctcaaagataagtgtctgatatctactttggaaggtaaaattgagatgcatgatttaatacaagaaatgggacaagaaattcttcgtcaagaatgttgccataatccaggaaaatgcagtcgattgtggaaggttgaggaaattcatcaagttttaaaagataacaaggggacagatgcagtacagtgtatgtttctagacacaaggaaagtcaatgaagt

SEQ ID NO: 117195 - DNA, 1626 bp, Glycine max
  Clone ID: PAT_MRT3847_76838C.1
cgtggttttagtgaaaaaattgggtttcctgacacctcttatatgccctttgaattttttcgacagatcaatgttgcatgcagtatctgcccctagcttttgtttaagctatcccgggaaccttcattatcctccttcttcagttcaaaaaacatgtttttctgttcgttgttcggtttcacagacaaaaaatggagctaaagtggaatatactccttggctcattattggcttgggcaatcctggtaacaaataccatggcacaaggcacaatgttggatttgaaataattgatagcctttctcgagcagaagggattcagatgaacacaatacagtcaaaggccctcattggaatcggtccgattcccgtcgacccacgcgtccggtgaagtaccgattttgctggcaaagccccaaacatacatgaatttcagtggggaatcggttgggccacttgctgcatattatcaagtacccttgcgtcatattctactagtttttgatgagacaagccttccaaatggtgttttaaggcttcaacctaaaggcggacatggacatcacaatggattgaaaaatgtaatgggccatttggatggttgcagtgcttttcctcgacttgcagtcggttagttccttttcttctttcactttataaattgacatgatctcttcaattgtttctacagtactatatttcaaatttgtgtttataggaattggaaatcctcctggaactatggatttaagagcttatcttctacaaaaattcagtgtagaggaacgaaagcaggttacagctagtcctataccaagcgtgaattggtttagttcttttataatagcataccacttttctgcttatactaatcgcaaaatacattacagtcttgtgttgtgactggaacttacttgtaggtaatagatggatcgaaacaaatttgacaaaaattacataattggagaataaaagagcaatttagttcctttaccgcactgcacttttataccaatactggtctgtgaaatactgtcttatgacttgtgatagtccattagatttcgttaggggtgtaaaagcaatttatatttactttttgattgtggaaggaggttagtatatgaacttgtaactaattcaataataattacataatcagaaaaaaaatatgaaaggacttgaacaggtaatgctaatattggacagttagcgtaacctacaaaagcaattggaagagtaattttataatacaaattaagtgcattttttttcctaatatgaaatttgattatggtttcctgttttcaataacagattgacgcttcattggagcaagcagttgcagcagtaaggaccgtagtactcaatggttttgaccagcatgtcaatagattcaatttaggacaaaaatacaagtaccataaagtttaaaatgaaccgccaagatgaaattggtggttacattgttgtgtatgttagcagatagcagttatacctcacaaacttgtcatgactagtgcatttttttgtaaagcacaccagtggtcatattctagctctggcagatagttgtttcattgtgagaaatactagttgttgaattgttgcttggaccagtccacg

SEQ ID NO: 117196 - DNA, 552 bp, Glycine max
  Clone ID: PAT_MRT3847_76839C.1
gtctgatccaaacaaacactatccctggcagtaccaatccatctctttcctctctacggctgcgagaagacgacagaaggggggcccatgacgacgtcgtccggttccgtgaagaacgcgatgcccccaggcctccaagaacccaacatcaatgccgaaccctcttcctccgccgacgattgctccaactccaacacgaagcccatcgtgttggtcaccaacagtggcggcattgagtctccgggcctcgttcacctcgtcgaagccctcgtgctccagggcctctgcgacgtccatgtctgcgttcctcaatcggacaaatcggcttcggcccactctgtcactcgcggagtaaccgttgaagctttttcggcacaaattaatggcgccaccgcctttgaagtttcaggaactcctgtggattgtgtttcactagcgttatctggggccttgttttcatggtcaaaacctatgctggttattagtggaattaaccggggatcaagctgtggtcatcacatgttctactcaggtgttgttgctggagcaaga

SEQ ID NO: 117197 - DNA, 347 bp, Glycine max
  unsure (1)..(347): unsure at all n locations
  Clone ID: PAT_MRT3847_7683C.1
gctcttaggtttggtattccttttttttttttttttttttttttagccatggatctaaaatcattatacaaatttagaaattcccaaaaagaaaaaaaaaaaaaattggttttggaattcaaaattcttgattctcatgattatcgaataaaccctttttttctgggggggggggnatggcaaggggggtagcttttttattttactttnaagagcactgcgttttacaagagttttttgggggaaatattcgaggggccccaagaaaaaataaaaaaaaaaaacttcttttacgggggggaacaatttgtgtcccaccggaagggggattttttaatgctttttgg

SEQ ID NO: 117198 - DNA, 615 bp, Glycine max
  unsure (1)..(615): unsure at all n locations
  Clone ID: PAT_MRT3847_76840C.1
ccacgcgtccgcattactttccacgttccacctcgtgcgatcccttcactgttcttcacttcacttcaccaaaaccctaaaccctcaaaatcctcaacaatacaatcacaacttcaattcaactcttcccttcattcactctctgctctgttctgcaatgcaaaatccgtgaatgaatgatctgatccgagggaaaatggtgaacatggccttgttactgagttttctggtgacggcgacggtactggcgtcgtcgtctcacgctgcttctagtggtcctcacattgccgacgttaacatactcttgccgccgaaaatgaccttccctgtcgattataggctccaaggaagtgacggttgcttccaatggtcatgggatcatcatgatattctgtctgttgagccagagtataattcaagcagcaagtgctcgactagtgcaaggataagatccattgccccttatagtggtcggaaggaaactgctgtttatgctgcggatttgcagactggaattgtgattcgctgcaaagtcttcattgacaacatatcangaatacagatatttcataattctattaaacttgatttagaggggcttgccacactacgtgt

SEQ ID NO: 117199 - DNA, 395 bp, Glycine max
  Clone ID: PAT_MRT3847_76841C.1
caaaaacggggggggaaggacccaaagcatttccatacttggttacatttaaaggggaaccagccaaaattaaacttattaccccgggaaaaatagcccggggtaaatcaaaaaacaattggagtttgcaaaaaggtcaactaaataaaaaccacctgaacccatttactggaaaaaaagcactcctccaacccaatttccgatttaacaatatgaacaggtggaaaaacagtcctcccctcttttttatttatttaaccccagggcaggtaattatatttaacagggtcaaccttgggagcggggaaaaaaagataaaaacccttttttccccaaacgatgccggggggggactccaaaaactggttgaagaggggggggcacttttggggggg

SEQ ID NO: 117200 - DNA, 709 bp, Glycine max
  unsure (1)..(709): unsure at all n locations
  Clone ID: PAT_MRT3847_76842C.1
aaaacttgtaaatttcttattttgatacaaagattgtcttgtcctgacgaccgtctttgtatggttggtgctggctttaaacctcgctctcactcgcatccctccttattagctttaatttaaacctctcgtgcggtgttgtcgtctcgcgtccccaaatctctcctcatctcgttcctcattctacttctctcatcgttccacccacattcctctctcctccagaggaatcacaaaaaaccctaacccccaaaaaacccaaaccccccaccgcctaggcttctttgtggtcgccattgacgtcgacgtcggggatttggacgtggtcatggatttggacgaggtgggggacgtggatttggacgtggttgtgggtttagtcgcgactcttccaatgacgagaactcattccctaccagcggagatccttataatcaggtttcttttaagggagatgctgggaagtcttttgaaaggcgtggttatggtggaccacgaggtccttaccgtggtggtggtggtcatcgtggaggttttcagcatggtgaaattggtgaagctgaagaaagacaacctcagagagcatttgatcgttgtaatgggattggacanatgaattcaaacgtgaaggttcaggacgtggtaatttggggaaccccaactgatgaacttgctcaggtaactgataagggtgcaaatgaaactgaaa

SEQ ID NO: 117201 - DNA, 1040 bp, Glycine max
  Clone ID: PAT_MRT3847_76843C.1
aagaagttctcgtttaagacatccccatatcctggacagaactctttgcaacgtgttatcatatttggtgacatgggaaagaccaactcataaaggatttggactattacgacattgttttccacatagaagatatgccttatgcaaatggatacacctcacagggagaccaattcacagctcaagtgcaagaaatttcgtcaacagtaccatacataatcgcaagtggaaatcatgaacgtgactggccaaacacaggatcactttttgatactccagattcaggtggagaatgtggagtttttgcagaaacgaaaaacaatattaattagtcagtataactaatttggtcactggcatcagaatagagtcataaaggctaagtttcaagatttaatattatagtatgaattattgaaacaatactagaaagtagaaaccctactgattattgagttctggctagtaaatcttaattcttgtgcactattttccaaaatccaagaaatttttctcaaactcaatacaatcatatttagttgaaaaaatatatataaccccatttgccacatatgaggatttttgtaggcttttaaggtgatacatggttgtttaattatggtcaagaatcgccagttgcagtttcacatgaaaatatttgttgaggcagatgtcattgtgtcaccaacaacaggtgtgactgcatactcgatacaagatgatgcattgaagactggtgaacttgactacgtaaatggagctacagttgttcggtattccatatcaggaaacttcctaggacttcctgttgtgactgtaccagtgaacctgcaagaactgttggctagcgtgaccctagttttatacacacaagtttcctaaaagaactttggccaaatttgaggtacacttacaagttatagcatatgctgtctaacggttagcgtgtggagtaagaagttctcgtttaagacatccccatatcctggacagaactctttgcaacgtgttatcatatttggtgacatgggaaagaccaa

SEQ ID NO: 117202 - DNA, 441 bp, Glycine max
  Clone ID: PAT_MRT3847_76844C.1
acgttacatgcaatccacccttacctaagcttggaattcggctcgaggccattgctattgagaaaggaaaagatcattcacgcacattgcctacgcagtatgctcaatattctcgatgtgtatatgaggcttctgtgaatgcacagaaggcaaggcatactctacctgaggggctagaaaatgatatggcgtcaaagccactactactaaggaatatggcgaccttacgctgtaagctcgttgacaaaccttgtcccagaacacttgctggaatcatgcgtcggctactggatatggcctagctcactatgtgctagcgatgcatgtacagctgaccgagaggaacgatgaactatgaaagctggaagcaatagattgtgggatgcacgctcatgaatcactgagagacctggatgagcttgtcggatggtttaactacta

SEQ ID NO: 117203 - DNA, 472 bp, Glycine max
  Clone ID: PAT_MRT3847_76845C.1
cgatatggatgctccattcactggtctcacatccgtggactgtttccccaccacgaagacccactctgtcattacctccattgatagcaacggagaaagagagcaacgcatgcaaatctgttcaccaaatggcaacaaaaaatctgagactcttaactacctgccataccattattattcgcacttgatactatgaataaaataccttcttaagaattgatgaattccttggtcgcaatacacaggatactacgaattctcgctccgatatggcaacaggtcaccagcatactacaaagaacgctactgcaccgtgtagaagctgcctatgatcgcttgcactaatgcttctcatgtgaatacatagctacaagactctaagactgcatactgctactgcttcgtccatatcatctcattccacaacgatcccctagtgcatagcattagcttcatcgcctacaaaccccca

SEQ ID NO: 117204 - DNA, 456 bp, Glycine max
  Clone ID: PAT_MRT3847_76846C.1
ctgcgagggcgagaagacgacagaagggcgacatgatacttaattggaatatttatatttgtacgtacaaaacaaggtgccatggactgtagttacatcatcattttctgtccgttgtttaactagttggaggatacacttgactgtttaagagactgctcattctagagacttggttcgtgctattaaccccatttctttgatggtgggttgcagctgtagcaaaggggtacttagcttgattgtccaaatggtcatcctcaacattcttgtgtctgacaacgataacttactctcttctttgatgtacaaatatataatggtggcaacaagacttaaatcttgtgtatattacccaacctcctaccactccactctctagtttgtagtttgctatcttttttcctaccatccaataaagcaagacctaaaaagagtttttcgagtggcagaaac

SEQ ID NO: 117205 - DNA, 300 bp, Glycine max
  Clone ID: PAT_MRT3847_76847C.1
ataaaaaaaaaattaataaaaacagactttgctcccaaaactacaacaatatatattattctcttttttaccactcccaatctaaacacttaacaaacgatacatacttccgcaaactcaaacaagaacaaactctactacattgaacattctctctagttacacaatatcaaacgccactctcttgataaaccacacctacatatgattccacaactttcacaccagctgatcatttctaacaaccagctaatgtaacttacaataacttcaaaccatatttagacaactctctttttt

SEQ ID NO: 117206 - DNA, 310 bp, Glycine max
  Clone ID: PAT_MRT3847_76848C.1
tcgccctttcgaccgcccacgcgtccgagcaaagaatgctattctcatgaatatgccaaatgctgatctatcaatgtggagatattatgctggagatctcgcctttgaagttactaagatgactcattcctacattaaatgtacagcctctttcttcatagcatttggaaatttggctgatgacaccataaaatttgaggcttttccccacaagctggtgcagtttggagagattcatgaaaaagttgtattgatattttcacaagaggaatttcctacaagcttggtcaacatatgagcgacctgcaac

SEQ ID NO: 117207 - DNA, 332 bp, Glycine max
  Clone ID: PAT_MRT3847_76849C.1
tctttaaatggggttgggagtgaaaggaacagataacatattttggcgctcatgcaagcctgattaccatgccaaagatagtaccctcctagactgacgcataacaagcttaagaagctcctttccgtatagtaatcgcagactactcccttgtgggggaagacccacgctgtttttttagacttaggaagacttgccctttgagggacgttgccaagagtagacttcctattgactccggaattgtgatggagagagctcccggcaagaattcattatagacttttgcaaactttgccgcccatagttgaggtgggcacttgcacggtcca

SEQ ID NO: 117208 - DNA, 469 bp, Glycine max
  Clone ID: PAT_MRT3847_7684C.1
caaatgccataatttacattcactgatgacagtatcagacattgactctccaatgtttgaattattagaggggaatgacaaagtgcacattatttgcttacaaagcaccaatgaataaaccccttaaccaaaaaaggcaagtctttcaaaacatcaaaacccccaacattcttcttccaacttgacatgaatattcacatttactaatcctaaattcgccatcttaccacttactaatttattaaagaaatctgcacatgactttttttttctagcacaattaatgcctggtggaggggtctctacaaataaagggacaattagctagtgtctcacatctgataacatgaaacataccccaccccaaatagaccaccttccttgccacaaacaattggatgcaactagaacgagcaccatgtgggtgctgctgacaaacaaacgcaaaaccacaggaaaaaatgtcaaa

SEQ ID NO: 117209 - DNA, 259 bp, Glycine max
  Clone ID: PAT_MRT3847_76850C.1
cgcttcgtgcggaatcgaaggaatctataccacaacatagacaaatccatcctaaaaatgtacccgctcatcgaagcgctgcatgtatcatagtatcatactcttgagagaggagcatctctttttaatcattctctttcttgagaatgcagtaaacgacgagttatgagactcatagaaaaaatgtgagaaggatgtgatacatataatatacatagcggtatcacatgcgaactaaataaatactggtgtgaccgat

SEQ ID NO: 117210 - DNA, 304 bp, Glycine max
  Clone ID: PAT_MRT3847_76851C.1
ttgggggggggggggggggaagtgggggggggtggtgaagtgagaaagaagatcgaacaaaccccataacgaaaccagaataaaacaacaggtttaatgataaactcaacccacaatacaattaactactatagtaaatcaaattctaaaggctaaatgcggagaaaattagagttggtgcacgatagttaagccaacagctttgaatccaatattcaaatcaataaagtattctggacataactaacctaaattaacacgtagcattccgatgaatgcaataaatctccttttagatgagcca

SEQ ID NO: 117211 - DNA, 701 bp, Glycine max
  Clone ID: PAT_MRT3847_76852C.1
ggctcggcaaagataacttatatataaataatcaagtaccagaggtacagtgaatacatgaagataagcttccaggcagatggttccaaaatcagactataaacagtctcgacaggaaccaaaagctgggaaaatacattgagaggatatttgagggggtaatatgctaatctttgaggctttcctcatctcttttatctatcaaccacccatatctctcctgtacaacaacaaccaccaagcttaattccattaattggagtcagctgtatgaaataaaaatcgccaccaggcttttatgaagaccaaatttccgctaaatacatttagagcaaagctttctaactggagccttcatcgatgatatcttaaatgaccaaatcaccttaggcaagttttttatatcatctactcaatagactcttatctctcccataaaaagcttttattctgtttgatcctgtcttttcttgagatcttcactttggcaaaagtctcttcctatcttacttgactacttatactcaaatcaagaaaggcgaatgaagactttttccaatgtgtaaactagtaactcctttttccaattttaaactcatttatagccaggtttggaggttgtgtcattttaacaattcccaacgtaatgatggaatgcaattttctcatcaaaaaattccctaggagcagcctttaatatt

SEQ ID NO: 117212 - DNA, 799 bp, Glycine max
  Clone ID: PAT_MRT3847_76853C.1
aatatatggaatatttaataataatttatttaattcattttttatatagaaaaagtaaagtacagaggcaaatccgagcggaagaaattgcctttgatgacattaactcaataatttgtgacatcccaacttctttgcatgtatggaggcaaatccgctaccaactcaagctcttcaactagtgaaagatcacaactggaagctgattgcacattctgcagtgcttgagatatattaggcaagaccatttgcttgcaatgaagatgtaaacgaggatgattctcagagatgctccctttattcaaattaaggccaaaggggagtttttcttcattgagaagttcttcacgtgagtcctccacattaggcaaatcaaaatgtccccacttcctgtgagcttgccatccatacttgtagtctcctactattggtgtacctaacacctcagcacagtggactcgaagctggtgtacccttacagcgcagttagactggtaatatgaggaggcatatgaaatgaatgatgaaatcactcggtactacgtaattgctctttgtgatgacattaatgtagaattgtcaacgatagttattcgatcagatctcccattgtcaaccaccaccttacccagtgaagcagtgaccaacccctttggacgtctaggacatccaaggaccagtgcccagtaccttctttgtagtattctcttctctttgccaatatcatctgacgccctggaagttttctcgcggaagatggaatgcaggactgttgtactggtgtgtgtccttccctggt

SEQ ID NO: 117213 - DNA, 532 bp, Glycine max
  unsure (1)..(532): unsure at all n locations
  Clone ID: PAT_MRT3847_76854C.1
gaaagattgtgaaaattaccttttctttcctttcattttgtcctttcttgagacattctccttttaaaaggacgtttttcaagcctgatttttacagaactatagtacacacttagttacactctactctctcccacactttttctataaaccgtggatcattattatcaagtcgccactgataaaattccacccacatcaaattgctggagatacagatacccgagtctaagcctattccaacctccatctcctatttaccttcccgacctgacccgacgcatttgaaaaaccaggcaagctattttgccagccttggcatgagcttccacgtggcacaatctcttactatgttggatgccaagcatttgtcttacaccaatgcaatctgcttcagctattcatctggtcacttgcgcaaccaacagccacaggaatgcattgtgatgaacaaatacaagggaagccatttcatttgagatttctgtagtttctacaagacacggngcagtcacacaagttaactggaaac

SEQ ID NO: 117214 - DNA, 375 bp, Glycine max
  Clone ID: PAT_MRT3847_76855C.1
ttgttttttttttttttttttttttttttttttttttttttttttttttttttttaaacaaaaaaaggaggtgttatccggagctaaaacaggggacaaacgattttatgattcaccattagcccacaacatgtattttcctatatgggggctttataaaggacctttcattttgggatgaggatatctttgggaaacccatataaattgggctcaccaacccaccctgggaaaattttttgggggctacaggacccccattaaaagaccccccattgaaaaagttacaagggttacaaatttccacttgagcccccgctagcactaaaagggggcccattataaacatggggcccctaaaaatggcaatagaaa

SEQ ID NO: 117215 - DNA, 330 bp, Glycine max
  Clone ID: PAT_MRT3847_76856C.1
tacggctgcgagaagacgacagaaggggagagtagataatggaaggtgagggtggggggaggaaaaaaaatgcacttatatgctacttctacactaaatatagatcttctttgaatattccataaactttttaacatatattttttgattccttctatcaatcttactactactctcatccattatataatattttcatcaatcatcactacttctccttatatactatttttttattcttacttttttttttaacaattctatctttttcatttacgttttacttctttttcctttctttattattactacaactatttctttctaata

SEQ ID NO: 117216 - DNA, 423 bp, Glycine max
  Clone ID: PAT_MRT3847_76857C.1
agggtatgtagctccagaagtatggaatagaaattttggcggaatttcgcagaaatctgatgtttacagctatggaatgatgctactagaaatggtgggagtgaagaagaatattaatggaaaagccagtcagacaagtgagtacttcccagattggatatacaacaggctagagcagggcatagatttgacaactgatggggtgatagccacacaagaaaaagagatagcaaggagaatgactatagtgggtttatggtgtgttcaaacaattccacaagatagaccaacaatgagcaaagtaatagatatgctagaaggcaacatggattccctagaaatgcccccaaaacctgttctttcttctccagctagatcgcttccagaatttaccactagttcattgcaatctgggtagatctt

SEQ ID NO: 117217 - DNA, 1399 bp, Glycine max
  Clone ID: PAT_MRT3847_76858C.1
ccacgcgtccgcgtggtttaacatctatagaatggaaaaataaacaagaaagcaactaagtgtactagtttaagcagtagaagtggaaagtggttgcagagtagaagtcgagatggccaaccttccaaattcaaagctttatgggaaagagaagatgaaaggagagcaagaattagaagatgaagaaagcttctcgcgtgctatgctgctttgcagctccgttgtggtttccatggcgctgcaatcggcaacggagctgggcgtatttgacgtgttgcaagaagcgggggctaagctctctgcgaaagagatagcatccaagctttcctgcgacaacaaccctgaagcagactcaatgctggatcgccttctagcccttctagcctctcactccattcttaactgttctctcattctcgaccaccaaaacctggggacctttcagaggctctacaccatcactcccgtcgccagattctttgctcgcaattctgatggggtttccttgggacccttgatggccttgcttcaagacaagatcttcctacatagctggtcggagctgaaagattcaattcgggaagggggtattccattcaacagggtttatggcactcatgcttttgagtatccaaggttggacgcaaggttcaatcaagtttttaacacagcaatgatcaatcacaccactatagtgatgaagaaggttctggagtgctacaaaggttttgagaacataaaaatgcttgtggatgttggtggtggtcttgggatcaacatcaacttgatcacttccaaataccctcatatccagggtatcaattttgacttgcctcatgtcctagaacatgctccttcctatcctggagtggaacacgttggcggagatatgtttgaaaatgtgcctaaaggagacgccatctttatgaagtggatacttcatgattggagtgatgaatactgtctgaagttgttgaagaactgctatgacgcaattcctgatgatggaaaggtgatagttgtggaggcagttcttccaattataccagagacgtcaaatgctgcttggaaggccgtttcccaaacggatgttctgatgatgactcaaaacccgggaggcaaagagcgatctgatcaagaattcatggatttggcaactgcagctggatttagtggcatcagatatgaatgctatgttcgaaccttttggatcatggagttcttcaagtaaacaaccatatactactctgcatgcccctttatgcttttcgtcatttttaattaacaaaacacgctcaggtgtgtattatcataagtttgtttttttttaaataattatctgatgaaatctaattcagtttataaaaattaaactcactttttactaaaaaaaaaaaaa

SEQ ID NO: 117218 - DNA, 487 bp, Glycine max
  Clone ID: PAT_MRT3847_76859C.1
ggaaggcataatgtataatatattattgaggtaaacaaaaacagtgcaagtggtactgaatgaaaagataatacaaagcacctctggtgctgcctcccaaagataaaacccaagctaacccatcaaaaagttcatatccacatagattaaccaaagtgatcctttatattagaggaccagtgattaaagctagtgttgaatcccttctccctagcttttagccaagaccaagctgaaaacatagcctcttccatgactttcgaggagtcaaattgatttccttgaaagatgaggttattcctatgttgccaaatagtagtagttagagccacccaccacccataccatctgctatgatttacattagctctgaatccttcacaaaattgtgctaaatgacttgctgggacaattgggagaggtcctacagcctgtaaccatgtcatggattcccaccataggggcagtgtcctttggcaattaaaga

SEQ ID NO: 117219 - DNA, 790 bp, Glycine max
  Clone ID: PAT_MRT3847_7685C.1
gtgaaagttttcggttttgtgtgccatgtgtaaattttgattttttcgagtattttttttttttttttttatgtttgcgttgaagctagctagtgtgaatgtgtttggtttttaaaatctgtatgaattgttttcagtggttaattatcaattggtttgattcgtgtgacaattcatggcttgcttactggcattttaatgtggtttgaggaagaggctttgaaactaccatagtggctgtgtgtgtggtttatgagttttgtatgatttgtgctttgtaagcaattttcacgtgtttcttcctttcagtgtgcttaactcgggtttgcttagcacataatgtggggggttttgtgatatttttgtccgtttcttttatttcctgattattaggctttgtttgtttactgttttcaaaaacagttttgtgttttataaaatttggttttgtctcctgagcacatttgaaagtttttgtccctccttgagcacatttctgttttctaaacgttttcccctgagcatttgaagaaaatagaagaggatgagaaaacaacttccaactgtttttggtttttaaaacactggttttggaaacaacttttgaaacttattacatattggatgagaaatagattgttgagtactgtgaaattgttttaaaaatcagtttttataagaaaaattgagaagaaaatctaacaggcccttaatatctatattcattttcaacgcttgaatgcgacattcagccttctgtatttggttatcttttacaatttatatgcta

SEQ ID NO: 117220 - DNA, 437 bp, Glycine max
  Clone ID: PAT_MRT3847_76860C.1
aaacaaaccccccaaactaaatttctttacagggggaaatttaaaagctttccaataaactttttagctgggacaatcacaatcttatccttttttgggggcctttaccaccaaaaccggaaaaattccccggttcatcaaactatttttttaaacacccttaaaatactttacaaaaaaaccggcctttatttggctggggaaaacatctacaaaaaaatttttcatttaggactaaagaaacctttggcctttttattagggccaccccaatggcggggcctttaaaagtagaaggagggccattttttagaggggcccaaaaagttaaggggttcccaaggttgggacctcaacaagcttgttaaaaaactataaagtgggcggctgaccctaatagggaagggtcccctgctttggggctaccccaagctaaa

SEQ ID NO: 117221 - DNA, 1241 bp, Glycine max
  Clone ID: PAT_MRT3847_76861C.1
gtttattaaattttttgaggccttgaaaaatcatcaatgcttccagatgtaacgtagcaacgggggagagaagatctgtttcacttttcacaccaaaccccgatctgagatcttctcttgccctcccacaacaatgacatccccgacggcgctgaaggccgtgacgctgacgcacgtgcgctaccagaggggcgaccgcgtcggccacttcctggcctggatatcccttgtccccgtcttcatctccctgggcggcttcgtctctcacttcatcttccgccgcgaactccagggcatattcttcgccctcggcctcatcgtctcccaattcatcaacgaagtcatcaagacctccgtccagcaggcccgccccgccacctgcgccctccttgagatgtgcgactcccacggctggccctccagccactgccagtacatgttcttcttcgcctcctacctcaccctcctctccctcagaggcggcctctctttctggcacgtgcgcgacaacccccccctccacctcctcacgtggtccctcgcgctgctcaccatgtattcccgcgtctacttggggtaccatacgctggctcaggttttcgctgggaccgcgcttggggttttcctcggcgcggtttggttctgggttgtgaactccgttttgcatccgtactttccggttattgaagagagcgcgtttgggaggtggttctacgtgaaggacacttctcatatacctaatgtgttgaagtttgagtacgatatggccagggctgagagacggaaggtggcgtcgaattctaagtcggattgagtggcctcgttgcccaagtcggattgtttggcacattgcttcgaatttttcttctaggatttgtattcacaagtatttatggcagtattactatagctttattttgtggagctttccactatagaagccaactggctgagccactcaggtataaatggcatctatgaagagagcagcagagcacactgacatggtactacggacctatgatgcctgtgaaatagaactgatgtatgaatagatggctacctgatgttatagatagacatgaatattttatcttgttttcttacatgggttttagacaacatacattgacacaaatacaaccaagggattgttcaaatcattgataaatttataaatttataaatttctggtttgcacctaaaatatattgggcaagctctacaaaaaaaaaaaaaaa

SEQ ID NO: 117222 - DNA, 326 bp, Glycine max
  Clone ID: PAT_MRT3847_76862C.1
ccttccgggacccctgggccgaccccttggccgaccccttggttgccccttggcttggtcaattggccggactttgggccaaatgggattcaggggaaggcctgaaaagtcctttggaattccaaactaagggatggctttggcttcctcttttttcctcaatcccctttggggcctggcaatcaataaggattaactttatgctacctttttccttctaactaggagaaatcggggtaaaatcgcctcaataaggtggaatataataatggtggaactggctcctaaaaaaaaaaaaaaaaaaaaggccggccgttttaaaggat

SEQ ID NO: 117223 - DNA, 339 bp, Glycine max
  Clone ID: PAT_MRT3847_76863C.1
cctttggtatcaatggtattagctcagcatttattggtcatattggttcaagggaacgtgctgcttatgctcttgggttcactgttctcatacgctctgccaatggaattctgttaggaatggcgagtgcgctgtcaacactctgcggacaagcatacggtgcaaaacaatatgtcatgatgggagtgcatcatcaaagatcatggatagatatgggcataacttcactctttgttcttgcggtgttcatcttcacgaggccgattttcctgccacacgtgatatattctaatcgtcggcctaagagcatgagaatccgacggagaaacaaacactatt

SEQ ID NO: 117224 - DNA, 452 bp, Glycine max
  Clone ID: PAT_MRT3847_76864C.1
tggaaagacatggagaatttgaggaatcattggaacatgaattgtgcaattgatgccatcatttcggcccctttggcgttactgtgtatattggtactgctagttcacgtttccttcacgtttcaagttgtgttgcccctttttcccttagttccattacattggctggcttataatggaaaagaaaaagtagccctcatgtacctttttatttattatttttttttttaatttgatttttctctaacatgttccgtgtacaatgatgttaggaatccttaaaggattaacaatgacacaatcttatattctttggcttttcacctcgaattgatgatgtcaggttcaatgttcttatattcttttgtctttgtgtctagagttatctagtagtacattagaactgttgacatttgttattctgttgttgcttcaatagaaatatagaatct

SEQ ID NO: 117225 - DNA, 193 bp, Glycine max
  Clone ID: PAT_MRT3847_76865C.1
ggtgaagatagctcttggtaccttggatgactcttttaacggtggctctcttaagggttatttcgcaaaggtccacgccactctgaatttcgtggtcgctggtgttggatcaaccatcggttaccacgagcctaccaaagatgccgccttggatccaacggggctggtggcaatagctgtggcacattccttt

SEQ ID NO: 117226 - DNA, 653 bp, Glycine max
  Clone ID: PAT_MRT3847_76866C.1
atgcaacaatccaaacaaacttggttttaattggtataggcttgccaaggtcttgttgattgagcgttaagtgctttaactaatcaatcccaagaccttggtttaccttgccacacaaaaaaatatataaaaaggcaaaataataataaaaaaaagagaaggcttggagccaagaaaataaacacaaagcacaagtcatggaaagaataatggttggaagtgcaacaaaggttgctttcaacctcttggtcactttcgccattgtcattccatgccttgaggctggcattgctgagtttgatgactttctcaaagcccaagctgatgaagcacaaaaaattgctcttgaggcctatgtcccagtgccagaagatgtcaccgacgaactcaatttccatgttcatttgtcattagaaaactccacaaggagggaactaaggcaaaggaagggtagatcaggaaaaaaatgtgttgccagcaaccctattgacacttgctggagatgcaacaaaaactgggccaatgaccggtacaggttagccaagtgcggcaaagggttcggaagacgggccaccggtggtctcggtggccccatctaatgtcgtcaccgataattccgatgacgacatggtgaaccctaagccaggaaccat

SEQ ID NO: 117227 - DNA, 124 bp, Glycine max
  Clone ID: PAT_MRT3847_76867C.1
gcgtcctattccttcccagcctgtatttttgtatcaacatcaacttgttcctggtatgatgccaggtgcagctccctttccaaatttgtgtgtgccaatggttcaacaaggacaacactgacag

SEQ ID NO: 117228 - DNA, 122 bp, Glycine max
  unsure (1)..(122): unsure at all n locations
  Clone ID: PAT_MRT3847_76868C.1
gaacaaatccatcttccatgtttttgggttataacggacaggtacnataaagtctagcataagaaatccaatcaagtctcacttttttcttaattacgaactaacacccgcatgaattaata

SEQ ID NO: 117229 - DNA, 564 bp, Glycine max
  Clone ID: PAT_MRT3847_76869C.1
tcgcggatttcaaggtcctttgtttgcgggtgtctgacaactgatagcgcgcatggggtatctagatattctcacacgcagcaccacagccacacctcacgctaggggtgccttcaccacctcaatttctcgctattgctgctgcaaaattctctccctcgatctgctaccatcaggtgcgaaggggttagtacattgatagcgaatcataggctaggtgactgttttggcaacaaatccacactcgtctgtaggggaaaaatctcccactgacaggatgcagatgctttactcgtaacatatatatgctgctcaaggacctcctctcctgactattctggttggattgtttggcctgtttgatgattgtaggagcatatggtccatgatgacaagtttgataagattaatactgaatcgtacctgctcactaaatgaattttgttggaacggacgcctgtgtttcacgacactgcactacaaccgtgagcatctaggtcgtaggactctttgtatgcatttggacgtgatagcacaaactgaataagaaagaggccccaagat

SEQ ID NO: 117230 - DNA, 238 bp, Glycine max
  unsure (1)..(238): unsure at all n locations
  Clone ID: PAT_MRT3847_7686C.1
tccccaatatcagaagcgccttcaaaaggttcaaaaactcgaaacattaataagtcgcggtcgcacgatcaccgcaagaaggttcctcagatcccttcttncaccaaaaccgctttcntntnacncancgaacancacgcanacgacancanttccatcatttcggacaaatcatanngcacngtccgncancaaaaancngagaagccaccgactgtactccaccatgcgaaaagag

SEQ ID NO: 117231 - DNA, 228 bp, Glycine max
  Clone ID: PAT_MRT3847_76870C.1
tccgaaggtggcagcccctacgacctactctgctacgcttgcggtggctcttcccattaacatggtaatgtggtattagccattagcattacatcctacaccttcaaaaggtctatttattatctggttccagtgacttatgtatccctctatagctgtattcctgctaagtttggcttatgatatctggatcctttggtcgatttttatcgggttaagacaatgatt

SEQ ID NO: 117232 - DNA, 344 bp, Glycine max
  Clone ID: PAT_MRT3847_76871C.1
ggggggagaaaaatgaaatcttatttttaaggataattaaagcccggcgtttattcataccatcaacgcccttgttttgaaacatttgttttttctgggtcccccccattaacaaagaaaaccggcgtttttcctggctttttttttaaaaataaccttttttttttttttcaattctccccattaaaaaaaaaatcccccacctttttaatgtccaactaaataatggtaataataggggggggtgaaatgaacaaaagccttaattatttccaggcaaaaagcatttttgggtgggcttggaataatggctgggcccctaaaaaaaaaaaaagcgatatttt

SEQ ID NO: 117233 - DNA, 496 bp, Glycine max
  Clone ID: PAT_MRT3847_76872C.1
ggtccggattcccgggtcgacccacgcgtccgcgaaacgcaatatttgtccccgtgcggtgcccttgccgatcctaccattttgaagttactcttaacctccttttgcctcttgttttcactcataacttttttttctgcgttttttggtttccgaagtaggttttagctcggttgggaatatccataaaggatttcaggaatcgctctgattctatctgtgttcgttccgtttgaagaaaggaaggatcccaacaaagaatcgatctttcttttcttttagttgttgaatctctctttgattgatcaatgtgtgatatttcgaatcctcattcctatttttgggtttcgaattcaatcccgactcgttaagaataattcaggttttattcgtgcttggagctgaagctgtgcattatatgttagcatgggatttgacaatgagtgcatagtgaacattcaatctcttgctggagaggacttctgtcctgtctgtc

SEQ ID NO: 117234 - DNA, 252 bp, Glycine max
  Clone ID: PAT_MRT3847_76873C.1
aaaaatatgataagaagaagaagtttcagtgtcctcaaaactcaccacttctttaaacctctctcatttgttttttcaccctttctttagttttccctcaacactctctctatgatgatctcttgtttgttaaagagtactcagaaaaataaattcgatctccaaccttgtagcttgtggcaaaggtgcatgctgagcaagatggagaagcaggtgtgagttagtccttcatgtgccccccttccccatcat

SEQ ID NO: 117235 - DNA, 542 bp, Glycine max
  Clone ID: PAT_MRT3847_76874C.1
catgttcttttttcttctctgagcatccactccggctcgatacccctgccttttattttcaatatcagtactgcctaagcagttctgttccaaatctctcttctacatgtttccaaatttctttattgctatcaaaagggttcatcttgacctttcgaaggaaaaggaagaatagcatatgttgacgaacccaataatgtggatgactcatgaaggccattaacaccgctgatcgccatggcagctttcatatcaaacatcaaccgtgctgtcaagtgcaacagtcccagaattcatggctgtgcttggcgggctttgggggctgacacataataaaaatatcgtgaaatgattggaaggagccatagataactgcctggatttgattcaatgagagcttctctccccacttgtgccaaaacagaaagccaagaaaaaagatcttggattctttataccccttaactctgaacaccttgacatctcgtatctctcgccaagcgaagcaatatgtacttttcttgctacaatggaccttctct

SEQ ID NO: 117236 - DNA, 482 bp, Glycine max
  Clone ID: PAT_MRT3847_76875C.1
aattcggcaccaggatttttgatagaatgaggaaaaaccagagacattgaatggccagtggttcctggctgttgcagtaactgctatattacggaatgatcctttcattaacataatgaatattcaatccatcaaaactatgttttagctataacaattgatataagccaaaagcttttgtaaaagaaatgcaatagcacagatgaaaacaaatgcagtaaatttatcaagttttcctcagatatcaaactcaattcatgatacacgccagtaagaattttagctaaattaagaaaggttatgatttaatctgtatgcatataattgcttttcattttctcatcatcattgtttaagttcttatacaatgaagtataaggactaaattggagataagtgctttcaaagaaaggtttatataagaatgaaaaaagttatagttcattccatttggtttattattcaaatgatggaatgagagt

SEQ ID NO: 117237 - DNA, 908 bp, Glycine max
  Clone ID: PAT_MRT3847_76876C.1
ccacgccttcagaaagccgcttccatgagcgcgagcaacaaatggagagcaatgtcgcaccaccagcatcagcctctgtgcacgcgcacgcaccagatcggcgccctcctcctcgtggcgaccaccttcttcttcacgagaatgctttccacctccacgctctccaccagcgtcgtccacgtgtcgcaaccccggttccagtgggggcagtcccagctatccctcaagatctacgtctaccaagaagacgaaatcgacggtttgaaggagctcttgcgcggaagggacgctaagatcacagacgaagcttgcctcaaaggccagtggggcagtcaggtgaaaatacacaagttacttctgcaatcgaaacaacggacatggaagaaggaggaagcggatttgtttttcgtcccatcttatgtgaaatgtgcgcgaatgatgggtggccttaacgacaaagaaattaacagcacctatgtcaaagtcataagtcaaatgccgtattttcgattatctggaggccgcaaccatatatttgttttccccagtggagctggtgctcatttgttcaagtcatgggcaacgtatataaaccgttccattattcttacgccagagggggatcggactgacaagagagatacaagtgcctttaatacatggaaagatataatcattccaggtaatattgatgatggtatgactaaaactggggataccacggtccagcctttgcctctgtcaaagcggaagtacttagctaattatttagggcgtgcacaaggaaaagcaggtcgtcttaagcttatagagctttcaaagcagtttcctgagaaggtatgtcatcttctgtgttgggttggatctccaagtgaaaatttgccatcataattcatcataatactgtc

SEQ ID NO: 117238 - DNA, 364 bp, Glycine max
  Clone ID: PAT_MRT3847_76877C.1
ccttcacccacgcctcccccgtcttccacaacttcgccctcaactacgccgtcaagaggatcgacctcggcggcaaggccctcaccaactacctcaaggagctcgtctccttccgctccgttaatgtcatggaagagaccttcatcatcgacgacgtcaaggagaaactctgctttgtctcactcgacgtcaaccgcgacctcaccatcgccaggaagagtgggaaagagaatctgttcaggtgcacctacgtgcttccggatggtgtcacgtacacaaaggggtttgttaagtattcaatcaggcgcagcgatatcttgcattgagggagggtggccttcattcttcatcaccagtgcaagcg

SEQ ID NO: 117239 - DNA, 320 bp, Glycine max
  Clone ID: PAT_MRT3847_76878C.1
aatccactcacttgctacgatgtccccttctgccaacactaacggaacttctgccaccaatggctcgtcgaagcctcgtcctactttcgctgtcaaggctggactcgctcaaatgctcaagggagggggaatcatggatgttgtcaacgttgaacaagccaagatcgctgaagctgctggagcttgcgctgtcatggccctgcaacgtatcccctctgatatccgaaaggacggaggtgtcgctcgtatgagtgatccccacatgatcaaggagatcatggaagccgtttccattcccggcatggccaagtcccgtatcg

SEQ ID NO: 117240 - DNA, 319 bp, Glycine max
  Clone ID: PAT_MRT3847_76879C.1
ggaggaaaaaatttcccagcttttttttaaaatttaaaccggccccccgaaaattggccccccaaatttttttttttttttataaaaacaacgggggtaaactaccaaggggttttcctcactataaaccccaaaaattgaatccctccccccggggggcccgccgatgagccccaatcctttttggacgggggggttcaccctgccttactttgcatttatttcgcaacctttttggggtgggggaagcccaaaaaattttttttttttgttttttttttggagaaggtgccccaaccccccaacccacatttttttg

SEQ ID NO: 117241 - DNA, 894 bp, Glycine max
  Clone ID: PAT_MRT3847_7687C.1
tgtcaaatgatcctagatttgagcacattgacattaacgagaaacagaaggtcataaataaatgtgttgaagctgagaagtggtttaatgagaagcagcagcagcagcagcagagctcacttccaaaatatgccaaccctgtactcttgtcagctgaaatgagaaagaaagctgaagatgtcgataggttctgcaagccgattatgacaacacagaagccaacaaaggcagttactccagcaggaccagcaaccccatcttctcagagtgatgagcaacagcaaccccagggggattctgatgtcaacagtaatgagaatgctgggaatagcagtagtcaggctgcaccagcatctaccgaaccaatggagactgaaaagtctgagaacacaggctctgcctaatttttttgttgttggtttgctctcaagtctctactatttgtataagcaaaaagagaattttgctgggttgacagtgagtgtggctccttggatatttggtgtaagtagaaccctctcggttggttggtaacctaagttttaattaatattatggtggttctttggaatcctgatttttttcacgaaagagtttagaagaaaaaacgacaatgtggttggaattggccagagttactttctctaggtttatatatagattatttgtataagatttttagacgatgaatgaattataatgttcatttcccgtttaataattgcgtttattttttttacgtggcattataacccctgctataccattattggtttcatgttcgagacaagacagtcctgaaacggttcgccgatcaactaagtaatataaccggtttgatctggttgttagattggaaacgttataaaagtgtgactcggtcagttttttttc

SEQ ID NO: 117242 - DNA, 475 bp, Glycine max
  Clone ID: PAT_MRT3847_76880C.1
tcgactacgcgtccgacaggtcgaagttaatcgaggcttttgcatttaacaccattggcaactctcaaaaaaacggggaccattataaacacgaacacatgaatagagagcacattacgattcagccaaactcaatacataagttccagtttcagatatgtctcaatacctgattacattagaaagcgctagcagaggtgattcgatccttcatgcaagcaaaaacaacagtgactatctgatataattttcgagaggttatcaaatttcatgctgaagatcctttgcggaatgagagcataagataatgcatttctggccagaatatgttgcaagcaatacggcaagagagttactagcaattagctacttaagcattgctagtattatttcaggttatccacttgacactcttcgcattagattacagaactcgaataatgcctctgacttcacaattcttaaacaaatggag

SEQ ID NO: 117243 - DNA, 649 bp, Glycine max
  Clone ID: PAT_MRT3847_76881C.1
tcatcgattagctgttgatatctcaaagatccgaaggtctgtctctgccacatggcatgccaagttggtagtggaattgcaggtttagacgaagtcacctttctttacaggcttacccccggtgcttgccccaagagctatggtgttaatgttgctcgaatagctggccttccaacttctgtgcttcagaaggctgctgccaaatccagagaatttgaggccacttatggtaaatgcagaaaggtatctactgtaacaaactctcccaataaaaattgggttgatgagatagcagcaatcattcaaatattgaacaacgcggcaacacaggaaaccatttgcgttggttccctaagtgaacttcaggataaagcaagagaactaatgcaaggatgttaaattatttcaagacagatattattagcaatcctcttaatagtggttattcattattttgaatttatggccatattctacgttgatatcaatcctgataagatatggccgagtcttgattgtatgttggctgtccaacatatcagtcttgttggaagtgtgcttgacgacccattgtacatgttttgcaggttatctagtagatttttttttaaaagttgttaatacaaatgccaactcggttgttccttct

SEQ ID NO: 117244 - DNA, 287 bp, Glycine max
  Clone ID: PAT_MRT3847_76882C.1
tgcgattctcctctgttcttccttctccgatacacatggtccacaacatcacactcttcctctcaagctcttagctttatccgaaaccaacccaccccatcttcctcttcttccttctcttccaccaccatgcctcttcttctcgcacgcaccccaccatcctcactctctccattccctcttcaaaacgcacgcgcgcctctaatcactgcctctcagaagcgcttccctcttgccgcaactcgaatagttcttttcacttcccggcgcagcattctagcatcccc

SEQ ID NO: 117245 - DNA, 394 bp, Glycine max
  Clone ID: PAT_MRT3847_76883C.1
tgggcaaaaagcaattcggagtgtatggggacatcgcaggcttcgtgaaagaaaagagacatggcattctgggaatgaaggagaacactcgtacaattgatgaagagacttctatgaaacatgaaaactcagattggccagtaccactgaaaatcatttaatggaaccattcattgcagcagaaatgggaacaacctgctggaaactttctatcttgcttagaaatgctgggaatgggggagttattgatggcaatgctgctacagtattcacatcactgagcgggattgaggctcaaagtggaaagatcagcaaatctgaagtgtgccaatgcagatgtcggaatgggccaataaagctgagaacaaggggtgaagggcaaatacatttcgaa

SEQ ID NO: 117246 - DNA, 333 bp, Glycine max
  Clone ID: PAT_MRT3847_76884C.1
aaaaaaaataggggaacattttaccctttccccccataaactttttatttaaaaattaaccacctttttgggtttttttgaccgcccaaattttaattttaacatgcttttttttcggaaaaaacatggtcatttttcacattgaataattttgggggggggtttttttggaacaaaaaaaacaaccttttcctttttttaccggttggggacggaaattggtttgggcccccccttttttataaataaattttgcttgaaaagggttcgttaacaaaaatctcagcccatttttattggttccaccctttttttccacggaactgtttgcca

SEQ ID NO: 117247 - DNA, 464 bp, Glycine max
  Clone ID: PAT_MRT3847_76885C.1
tcctctagagtggccgccctgggttatgttttttatctattagaactctaagacagattctttatgctgaaaaccaaacacatacgagaatttatctgaatcctaaggaaactttttaaatagaataacaatatcttgcattcttatgttctaaaaacatcaaatttcactcaccaaaggtggtacagaagaaatatagagtctaatcgactagagacttaaaaaagagaaataagccaatagatcatcacctagcaaacgctgcctgtatttctttagatcggcataaatattcacataccataaagggcactacgtatattagcaaggtagcatgtcactgtgcacctatcgatcaggtatattattcaggtgaagaatcgaaaacgaggagaatattagatgtgttggcgtggaagctgttctgacgccactaggtccaaagtcccgattacgcctgtgtg

SEQ ID NO: 117248 - DNA, 468 bp, Glycine max
  unsure (1)..(468): unsure at all n locations
  Clone ID: PAT_MRT3847_76886C.1
nnnnnnnnnnnnnnnnnnnnnnnnnnnnnnnnnnnnnnnnnnnnnnnagaactcaaaggggttaccaatttaccatccaccaaagttttaactgtttttataaacctaaaaataaaaagtttagactaaaattggtgaaatataaaatgctaaaacaaacaggatttttttacttttcccaaaaatgaggggtttttatgaaaaaagttttttacacaatcaatcccagcacaactggtaatgggtttgggtcaaagtttaagcaaaaaaaaaaaagggggagagcctttggtaaaaataataactcatatgcggccacattaacagttttgcgggggggtaagtagcattactagcgattcctttaagtagcacacatattttcgggccactactaaacttttttttggccaacattcggggcgacccagagaacccgaaaccactgccttgggaaaatccgaccgg

SEQ ID NO: 117249 - DNA, 176 bp, Glycine max
  Clone ID: PAT_MRT3847_76887C.1
cccacgcgtccgcccacgcgtccgcccacgcgtccgcatgtatatggcatgccatatcaatgttcaatatatcaccttcttccaacacggcctcatcactggctagtggcacacacagttgcaagagaaagagagcgagattccgatggcgactctggattccgacgtgcctatgg

SEQ ID NO: 117250 - DNA, 264 bp, Glycine max
  Clone ID: PAT_MRT3847_76888C.1
gttacacgtccattttaacatactcttttacacatttttaaaaaagatctatatacgaactattgtgcagaccacgtggtcgcaatttcctcaaactaaattgcaaacactcatataaggctcgtaagccagcaaactgttttttattaaaccatatactgtttaccagtttagaacaacctttttattttgtgaaatagagcatacactaatcgaagtctctctaacagaacttgttcaaaatacttaactcatcatcttaca

SEQ ID NO: 117251 - DNA, 850 bp, Glycine max
  Clone ID: PAT_MRT3847_76889C.1
acgaggtttgaagtctccgtcaacagttgtcattgaaacaccacacagtatcctcaaccaacaagattccaactttgattcccaatccgcaatttcaacaacacccagaaacgtttccacttgaatccctcgaaattcacacccacccacctcagaatttttggtttcacctccttccaagccatgaattttaggagcctggaagatttctgggccttctacatgaaccagcactccaaggcttccacaaggcgctggcacttcgcaggaacactcttcagcattctctttttcttttgttccctcttgttcagttggtggttcttgctccttgtccctttctctgggtatggatgtgccttctatagccacttgtttgtagagaggaatttccctgagactttgagacaccccttttggtccctcatgtgtgacttcaagatgttcgggttcatgctcactggcaacatggatagggagatcaaaaggcttgggaagagacctgtgctgcaagtgttttgatttttgtataagcttttggtgattattattgttattattattattttgaataaacattgaaactggattttttaatgtatttttttagaattttttttaattgctttaataagttatttgggtgtgtgtggatgattttgctgtatattgtggctgaatggacccaatatgtgtgtgatgatgctgcaacttgatggagtgtggtgagacagattttgttgagacattatagcttaataggtaagtggagctaaagggaatcggatgaatatggtttaacttgtgcgttgctgtttatagttgttgaagatgtgttgattattccaac

SEQ ID NO: 117252 - DNA, 275 bp, Glycine max
  Clone ID: PAT_MRT3847_7688C.1
agaaggaaaaggttaacttggaatagattaaattgtagagaaaaatgaaaaaatagaagctaatgaaattaaacaactaaagccaaaaaataaaaaaaaacataaccccatttttttaaccaaaaataaacccatttctaaatccccatatggagacccccttggcaaaggggaaaggctttttcccccggtaatggaaaagccaaaactcaacgggcagaccggaacgctaagcaaaacggaaaatccaaaaccggggggtgaacccgaaaaac

SEQ ID NO: 117253 - DNA, 359 bp, Glycine max
  Clone ID: PAT_MRT3847_76890C.1
ctgatactgaatcctagattattcaatctgatggtcttgctgcagctctgttctccgctgttgaaggtttcgcttagtgcttgggctaaggaataagccctgcgcttagctcgactcgatcagcagtggattaggtggagaagatagcagtgagcgactccgctcttgttgaagaagctggtctttcatcccagtgctatcaatgagtcaatgtggctccaggatagagaaaagataggctcttccttctgttgtcacaagtcttgttgactcagccaggagtggatgatgattcgacgttctctagagtcagtatccgtagcggggacaggtagcatgcttagaggaagaagcgatgc

SEQ ID NO: 117254 - DNA, 672 bp, Glycine max
  Clone ID: PAT_MRT3847_76891C.1
accagtactaaaaacataatccatcacataaaagaagcttgatgtgaatcaacattttccctcatggatcaatctgcaacaaccacaaattacaaattacaaccttttgagcaggacaaagctgatgatgaagacggttcagatgaatgatgtaaatatatcatatattctcgtagaagtatttcttaaagagttgcatatgtgctatttggaagtgcatggacacaatcacggatccatccccatgaggacttagaataatcactgccctatcatgtgcagacacatatgccaaaccaaaatacataggctttccccaaccaaaatctgcttcatacagtggcatgctgatccagcttgtgatttgaagattcggattccctgcaaatggtgcattcctacgttctccttgtcccgagaataaagcctttatgcaatccaattgctccttcacctaatacaatgtctagctgtgaccttatgtactcattcgtaagcatttcaattgcttctcttactttttttgccgcatacctcaatggttttgatgaggtttctccaacataagatccgggtgtcactgtcgctgccaatgcattcccaaagtaagtcctagggagaggtggaattagtctgctgcgaatgtcaccgttgaaccgaactagggttggc

SEQ ID NO: 117255 - DNA, 246 bp, Glycine max
  Clone ID: PAT_MRT3847_76892C.1
cttggcgggacgccacgtatagcaacaaccaaaccctctctactccaacttcgtatcttcgctaaggttatagcttctacctcatcacttcgtacttctggactctacaatgagcaacgacaacgacaccttcccgtcgctgatcacacttccgatctcaacgaggaccgtagagccgacctcgtgaatgctctccagagcaagatacagcagtctggctggacaacattctgatatactagagtc

SEQ ID NO: 117256 - DNA, 603 bp, Glycine max
  unsure (1)..(603): unsure at all n locations
  Clone ID: PAT_MRT3847_76893C.1
ggctcgagcaaaaacagtgccaaaacatcctttttacaacgtacacactctctgtcacgaaacctggaggctcattcccctttctattttctatataaacttgaacagtttcactccaaccatgtacaccatttaaaacataaattgaagagatttagagagctcaagaaacaaaaggggttcttagattacatagtttttgtgagcgggagtgactaattaatagttgagtatggttgaggggtggaagggggagctgacaaagctcagagagaaagttgttatggcccgaaagagcctcttctccaaaggcaaagaggggtcagaagaagaacaagttgtgaagaaggaggctcacaaggttatgatggctgttcagagagacactcatgaaaccatgtcagaggcaacagtgtgcttgcttatggatagatttgtgccatgctgatgtacgtgcatgtgtgttaggtgctcagaatgtgttgtttattcatcttgtgtatgatttagttgacaagagtacgaagtttgtaatggaagttgtgaaaattaagaattggttggtctagttgctggttttttgaggcnnnannaananaaaaa

SEQ ID NO: 117257 - DNA, 486 bp, Glycine max
  Clone ID: PAT_MRT3847_76894C.1
taaattcatgtttgtttcacccaatttcaaaatcagttttttttcctttccctcctcaattactagaatattaattactgttcaaagtctggaggtcttccactgtcaattccgttttttcagcgtttatttgggatcgttcttacttttcgactgtaacggatttattggatcatctcccacgcccttttcaattattttttggggaatttcatttcgttttatttgtctcgcctgtgatttgaggcaaaagggttgtgttcacgagtgaacggtgttgatttgtatttgctgatgcaattggtggttaggttggtttaagaagctaagaactgttgctactacttcacaatgggcgctgcttgttgtgttgctgccagagacaaaaccatacaaagtggatcaaccagtgacaatttgcatcggaatgttcgatgttcttcaacatggagctttcgttgggatcatcgagggcgtgtagcttgt

SEQ ID NO: 117258 - DNA, 872 bp, Glycine max
  Clone ID: PAT_MRT3847_76895C.1
cccacgcgtcctctcaatctcattcacctcaaccacttctcatcatctctatcaccccattttctcaaacacctacacaaaatgtgcttcctcaacacaaagtccctggctcacttcatgttgctaacaacaattgtagttggcattgcaatgggagattcatcaaaggacaaagaggaatgcactgagcaattggcaggcctagcaacatgtctgccctatgttgggggtcaagcacaagctccaaccccagattgttgtagtggtctcaagcaagtgctcaagaacaacaaaaagtgtttgtgtgttattatcaaagatcgcaatgatcctgatctgggtggtttacagattaatgttacgttggctttgaacctgcccacagcttgcaattcccctgtcaatgtctccaagtgtccagaactgctgcacatggatccaaaatcagcagaggctcaagttttttatcaattggagaaaggacccagcaaaaatggcacaggccctgcaccaagtccttctgctgcagttggagcaagtccttcaagtaaccagaaagccaataccccacagaagaatgatgcattctgcaaagagaagagattatttgggttagagattttggctatagggctccaaatttgggcttcagttgggcttctttgctaaaatgattttacttgcacatcaatgtgaataggagtggtttcttccaattctctccctatatgtgccacttatgttattactccctataaaaatattctcagtatggtgtaatttttttctctccaaattatagtgaaagatgtgaggaaaagtatggaaaatatccaattcatgttaatgagaataaagtttttttttggaat

SEQ ID NO: 117259 - DNA, 994 bp, Glycine max
  Clone ID: PAT_MRT3847_76896C.1
gcgggcgtgggaggcactcggtcctccggattttaagggccgccgggggcgcaccggacaccacgcgacgtgcggtgctcttccagccgctggaccctacctccggctgagccgtttccatgggaggcagacagatgttattagagcaagcaaaagttttgagagatgcactgagttctaagaaagaagaggcggttgatgagaaaactaatcaacaaaatgccaatggttccatcaaggctaatggcagtccttcactaagcaacattgagaagaaggagaaaccctggagtaaagaagagattgatctattgaggaaaggaatgcagaaatatcccaaaggaacctcacggagatgggaggttatttcagaatacattggtactggaagatctgttgaagaaattatgaaggcaactaaaactgtactccttcagaaacctgattcgtcaaaagcttttgacacatttcttgagaaaaggaaacctggtgcacaatcaattgagtctccattgacaaccagagaagaattaggagtgccagctcctgcctcctctacaaataatgcagaagactctcagaacaaaggtactgatgatcagaactcccctgctaatggagtttcttccagttcagaacaggatgtgtggtctgcggtgcaggaacgagcactagttcaagctttaaaagcctttccaaaggaaacaagccagagatgggagcgtgttgcaacagctgtacctgggaagactgtgaatcagtgtaagaaaaaatttgcattgatgaaggagagtttcaggaacaagaaaactgcagtctaatgttctgttgtgatattttagattatattaaatttttctcatgagtgtataggctagtttcgaatatccatatactagtttatgagccaaaatttctagttttcttatcgtattgattgcttttgataccgtactttgaacttggaattaatacatttacttttattgcttgt

SEQ ID NO: 117260 - DNA, 311 bp, Glycine max
  unsure (1)..(311): unsure at all n locations
  Clone ID: PAT_MRT3847_76897C.1
gaattggaccacgggtggagggggagggcgngcgnggnggagggaatctaatactggtacgactacttggggaaaancaaaggggtcgatgtggggcgcggggngngggaggagctgaaggggntggagaatgctttgccgagggttttggggggggccaccatggctganttgggtgggaaactgggcgnggtttgggagtgccaatgcaatgggaaggagatggagaattggggcgccggagattggggtgaaagaaaaaattcggatgggggaaatttgtgggggcaaaccttgggtttggttttggg

SEQ ID NO: 117261 - DNA, 2362 bp, Glycine max
  Clone ID: PAT_MRT3847_76898C.1
tacggctgcgagaagacgacagaagggggtgtattaggtttttttgcttcttctcatttgctaatagagagggacatgaagaagtaagatagggcatggggtgttggtggcacatataaaacggccaaaagcaatgcttaatttctcttatgctcttcagagtcggcttcattctgtgattcctccctccttttctcttcgcttggttcaagttgttacagtgttaaatttgaggggagtcatatttcttggttctgaaggccaccgttatggctgtacatacagaattccctcttattacttactcacaagagattgtagatggacagcctatttttgtctcttcaaactgtcttcctatcaaggctttgaaatttgaacctgcaggtcattctttccattctgctgcacttaaacttcttggtgttcaggaagataacaatgatgctgatgataaaaaagtggttgatgataaggaacaaacatatctcccatctgattcttatagcagcaagagcaaaaagaaaactggcactggagacatgcaacaagatcactatgcattattgggtctgggtcatctaaggtatcttgctacggaggatcaaattcgtaaaagctatcgtgaaactgccttgaggtttcatcctgacaaacaggctgctcttcttcttgctgaggaaactgaagctgcaaaacaagcaaaaaaggatgaaatagaaagtcactttaaggcaatccaagaagcatatgaagtgttgattgatcctgtgaagagaagaatctatgattccacagatgagtttgatgatgagattcccactgattgtgctccacaagacttcttcaaggtgtttggtcctgcttttatgaggaatgggcggtggtcagttaatcaaccaattccatcactaggtgatgataatactccgttaaaagaagttgataatttctacaatttttggtactcctttaaaagttggagggagtttcctcatgctgatgagtttgatcttgagcaagctgaatctcgagaccacaagagatggatggaaaggcagaatgcaaaattgacagaaaaagctaggaaggaagactatgcacggatacgcactcttgttgataatgcttataagagagatcccagaagattgagaagaaaggaagaagaaaaagctgagaaacaaaggaaaaaggaggctaagttcctagcaaagaaggtgcaggaagaagaagcagccagaattgcagaagaggagaggcaacgaaaagaggaggaagagagacaagctgcaaaagctgctttacaacagaagaaggtgaaagagaaagagaaaaaactcttgcggaaggagcgagcacgtcttcggactctttcaggacctattttatcacagcatttacttgatatttctgatgatgatgtagaaaggctttgcatgtcacttgatattgagcagctgaggagtctctgtgagaacatggaaggcagacagatgttattagaacaagcaaaagttttgagatatgcactgagttctaagaaagaagaggtggttgatgagaaaactaatcaacaaaatgccaatggttccatcaaggctaatgggatttcttccctaagcaacattgagaagaaggagaaaccatggagtaaagaagagattgatctattgaggaaaggaatgcagaaatatcccaaaggaacctcgcggagatgggaggttatttcagaatacattggtactggaagatctgttgaagaaatcatgaaggcaactaaaactgtactccttcagaaacctgattcgtcaaaagcttttgacacatttcttgagaaaaggaaacctggtgcacaatcaattgagtctccattgacaaccagagaagaattaggagtgccagctcctgcctcaacaaataacgtagaagactctcagaataaaagtacagataatcagaactcccctgctaatggagtttcttccagttcagaacaggatgtgtggtctgcagtgcaggaacgagcgctggttcaagctttaaaagtctttccaaaggaaacaagccagagatgggagcgtgttgcaactgctgtacctgggaagactgtgaatcagtgtaagaaaaaatttgcattgatgaaggagagtttcaggaacaagaaaagtgcagtctaatgttctgttgtgatattttagatttcactactaattttttcttaagagtataggctagagtcgaatatccatacatttctagttttcttatcgcattgattgcttttgataccgtactttgaacttggaattaatacatttacttttattgcttgaaatagcaaatatcattattattgatt

SEQ ID NO: 117262 - DNA, 1192 bp, Glycine max
  Clone ID: PAT_MRT3847_76899C.1
gcagttggagcaagggatgggtttgcaaagcaatgttcaagtgcatcaattacagatcctgcacccctacaccacctccttttgcatctaatcagtataatttaccatctgttaaaacttctgcctcccaaccttctatgtataatcagacaagtattggggccactgaactttcccaggcctccatttcatcttcaggagccagattgtcatcttacccaaatcccccaatgatgtctgcgggttttagtaggtcagcttccatgccattgactatgttcggtaactccccaaatcagcaacagactgagaaccagccaagcatcttacaaagtatctctgttcctccagcttcctttcagtcaatgcatccagttactcagttgcagcccctccagccaccccagcttccacgcccaccacaacctcctcagctccttaggccgcctgtccacgctttacagcagttggagcaagggatggctgtgcaaagcaatgttcaagtgcatcatcaattacagatgctgcaacagcctcaggttccttcaatgcagacgtattaccaaacccagcagcaacagttttcacatgagcagcagcaagttgaatatactcaacagccagggaattctctatcacagcagcaacaagatgcagcaatgtcgttacatgagtatttcaagtctccagaggcaattcagtctttattgagtgatcgggacaaactttgccaacttttggagcagcatccgaaattaatgcagatgcttcaggaaaaattgggccaactgtagccgcatgatgatgaccaagtagaactgtttcatgtctgtaaatgtccattcattatccaaatgatgagttgcgctgatgcttatgcctcagggcattgaaattttgttaatatgtactttctgggttcatttttttatttttatttttaaatttcaatgagcacaatattgatgcccaatatattaatggttggagagtggcttctgatgagagcttaagtgggatatttacattgaagtcactggggcagtggttcaactgttaataactggtgcaatcattttgccgtttgttgtattaaatgttgtacaggtattgctcctggacggggctaggttggttaaaattgaaactcagtgaataatgactaatgtgtgtttggttgttgtttcctgcc

SEQ ID NO: 117263 - DNA, 2031 bp, Glycine max
  Clone ID: PAT_MRT3847_7689C.1
catcacacaagagcgagcgcaacattattcgagtacgtagcttaacaatattttaagcaattgctgctacaatgatagcgcggtttcctttgttgccgttgctgttgctgggaattgtttttctagcatcagtttctgtctcattacaggtgaagccgccgagtcaccacgagtgcctccagagttgcgagagtgaaacggatccatacaagcggaaagcatgcaagcttagttgcaagttcgttcctgagcacggggagcaacaacatgaagaagaagaaagagaaagagaacatccacaaccacacccaccacacgaggagagaggacgtagagaaagaggacgccaggaaggtgagaaggaggaaaaggaacaagacgagcgtgaattacaaccacgtccatttccacgaccagaggagcatgaaggagaacagtggaaaggaaggcatcgtcatgaagacccggaagagagggcgagaatgagactgagggaagcagaaagaatagagagggaaagggaggaacagagggtgagggaggaggaagagaaactccggcgacgtgagaagaaggaacaacgggaagagaaagaagaagaaggtcaaggttcggaagactcacactcaaaaagacagaacaacccttttcacttcagctctaacaggttccaaacgctcttcaagaaccaacatggtcaccttcgcgtcctccagagattcgaccaacgctccccacaacttgagaaccttcgagactaccgtgttgtagagctcatggctaaacccaacaccctctttctcccccaccacgctgacgctgattttctcctccttgtccttagcgggagagccttaattaacttggtgaaacccgacgacagagacccctactaccttgaccgtggttatgcacaaagaatccctgcaggaaccactgtctatttggttaacccggacaagaagaaagatctcagagtgattaaactcgccatacccgttaacaaacctggcaattttgaggatttcttcctatctagcactcaagaccagcaatcctacttgcaaggcttcagcgagaatattctggaggcttccttcaataccaaattcgaggagataaacagggttttgtttggtggagaggggaggcggcaccagcaagagggagtgattttggaactatcaaaggaacagattcgggaactgagcaagcgtgccaaatctagttcaaggagtactaattccttcgattatgaaccattctacttgagaggctcccaaatctcttccaacaactttggaaagttctatgagatcacccctgagaagaacccccagcttcgggactttgatatcctcctcaatactgtggatatcaacgagggaggtcttcttctgccacactacaattcaaaggccatagtgatactaatggttactgaaggagaagcaaacattgaactcgttggcctaaaagaacagcaacagggagaggaaacaagggaagtgcgaaagtatagagccgagttgtctgaagacgatatatttgtaatcccagcagcttatccatttgtggtcaacgctacctcaaacctcaatttcgttgcttttggtatcaatgctgagaacaaccagaggaacttccttgcaggttcgaaagacaatgtgataagacagatacaaaaacaggtgaaggagcttgcgttccctgctgggtctgcacaagatatcgagaatctaataaagaaccagagggaatcctattttgctgatgctcagcctttgcaaaaggaggaagggaagaaagggtcctttgtcttttgaatatgtatgcttaggagactaggagttcacagcgagcgaggaaagtatagggatatgtaactagaataacttgagatccacctttctactactagtaaataaaataaataaatcgagcaagatggttttgtttactaaaaaaaaaaaaaaaaaaaaaaaaaataaaaaaaaaaaaatatatgacgttaaactataaaaaatttaa

SEQ ID NO: 117264 - DNA, 266 bp, Glycine max
  Clone ID: PAT_MRT3847_768C.1
acacgagcgaatcgagctgaagtgcatccagatgtagtactacaactagggactcagactgcaaagaccaaggtaatcaatagctgcttgaatcctgtatgcaatgtagagctgcatgtcactctgacagaaccattgggcgttctgaatctggaagtgtctgacaaagatctggtgtaggctgatgacaagatgggagatgctttctagaacctccaaccaatagtctcggcagccagattcagagacatcttaagagtgtcctc

SEQ ID NO: 117265 - DNA, 412 bp, Glycine max
  Clone ID: PAT_MRT3847_76900C.1
gcagttggagcaagggatgggtttgcaaagcaatgttcaagtgcatcaattacagatgctgcagcagtctcaggttccttcaatgcagactaattaccaaacccagcagcagcaagttgaatatactcaacagccagggaattgtcaatcacagcagcaacaagatgcagcaatgtcattacacgagtatttcaagtctccagaggccattcagtctttattgagtgatcgggacaaactttgccaacttttggagcagcatccgaaattaatgcagatgcttcaggaaagattgggccaactgtagccgcataatgatgaccaagtagactgtagaagcatgactttgccgaatttatatgtctgaaatgggcattcattatccaaatgatgaagtgcgctgatgcttatg

SEQ ID NO: 117266 - DNA, 938 bp, Glycine max
  Clone ID: PAT_MRT3847_76901C.1
cgggccggaattcccggctcgacccacgccgtccgcaataatatttcacacttttctttccacaagtatcttcttctctctctctctctctttattgccagctctgcaaccttgtcctccccataccttgtttcttcttatctctctctccctctctctctcacacacacactcacaaaccaaaccaaaccatcatcacgcattgagatctcagtgtcttggctgctgatctgcgttggtcccatattgtggtgttagctgaaaagacagtattttagaaggaattttcagccatgtctagtgctacaaaagtgttggatccagcattccagggagttggtcaaaaagtagggactgaaatatggaggattgaggattttcagccagttccattgcccagacctgattatgggaaattctacatgggagattcttacatcatcttgcagacaacacaaggcaaaggaggtgcttatttgtatgatattcacttctggattggaaaggatacaagtcaggatgaggctggaacagcagccattaaaactgttgaactcgatgcgtctcttggaggacgtgcagtgcaacacagggaaattcaagggcatgaatccgacaagtttttgtcatactttaagccatgtataataccattagagggaggtgttgcatcgggatttaaaaaacctgaagaagaggagtttgaaacacgtttgtatgtatgcagaggaaaaagagttgtcagaataaaacaggttccttttgcacggtcttcactgaatcatgatgatgtattcatcctagacactcagaataagatttatcaattcaatggtgcaaactccaatatccaggaaagagccaaggctctggaagttattcagttgctgaaggaaaagtatcatgacggaatatgcgacgttgcaattgttgatgat

SEQ ID NO: 117267 - DNA, 739 bp, Glycine max
  Clone ID: PAT_MRT3847_76902C.1
agaagacgacagaagggggggataaattaagacattcaagtttgtgacaaaacccgaaaaacgcgtaattgtcccttaaattgcatatcccgaatcctaatcgcatgcgatccattcttacaaacaaagccgtagtttagttggaaagggtctttttctttcctacttggaaggtttcttcttcgtatttctcgtaaaactctcaacctcaaaggaaaaaagaaaaggcatttagttatatggataacaaatcaccaagcaaggagtccaaggaggagacacgtgagtcgcttatcgctatctctaactctttacctgataaaactctggaatcaaagtctgccttggagagcaagaaatcagatggggttgcgatgcaaaaccgtgatcaagatgacaagtttaggtctgaactgatttcaatttcttatgctgaatcccctgatgaaaaaatttgatcagtttcaatggtaaactagttcatgtgtaactcctggattatcgtttggttgatctttctctatgtcaatgttgtgacttgactgtttatatactgtctcagctatcgtgcaactctatgtaaatactttcaccggctacatgcttgggtcatatgttgtaacgaccgtgacaactgacaagtgtgttgtctaagtactatgttaattcatgtgagatacttgaaagttcaaagcgtagtacattttcatatgttaaataacgcagtgttttggcctcc

SEQ ID NO: 117268 - DNA, 561 bp, Glycine max
  unsure (1)..(561): unsure at all n locations
  Clone ID: PAT_MRT3847_76903C.1
ccaagtttgagattatacgacttattttctgcctccaacatgtcaagctgtcttgacgtcttcaaactgacggacgatgacgcaatgaaatttttggtgtgcgaatcgcacatcggcaccaaaaagatggactaccaaatggagcattatgtgtggaagcgtcgatcagacggcattcacatcatcaacattcgcaaaacgtgggagaaactgttgttcgccgcccgtgccatcgcggccattgaaaatccgtccgatgttgtggtcgtctctgctcagccgtacgcccaacgcgctgtgctcaagttcgccgctcacatcggtgccactccaatcgttggccgttttacgcccggctctttgaccaaccaaattcaaaagaatttcaaggaaccgcgtctgctcgtggtgtccgacccacagttggaccaccaggcggtccgtgaggcgtnctacgtgaacacaccggtgattgcggntgccaacacggactcngccgtgaaatttggtgacattgccatcccggcaacaacaagcaaagcacttcgtcgactgattggt

SEQ ID NO: 117269 - DNA, 1204 bp, Glycine max
  Clone ID: PAT_MRT3847_76904C.1
gtattattaaatgctttgtaggttcagaagaaggtacaccagattcagccaatccatccgttgtagatgatgatgaagaagaaggacttccatcacctcccttggatgaaggggctttctttgtcactcaggctggttcaatggagctgtcacagttctttgatggcatggacgacgatggaaatcctcgaccaactggaccattcagcaagaaccatgagaatggcagaaagccagcttttgacagccatgttttagagatgaggaagttgcagccttcccatgacacagtcgtcattaatagagatgttaagagtcagcaacaagcaaaggaaaacaaggctgctgtcatgcctgtgaggccaaataaacctgtaacagctgattccgggcctggcagacccccaaaatcaaatgtgcagcgaaaaagtaatatggagccaaagatgcagcaaaaaatggagaacaattcaatcactaggaggcctccaactgctcagttagataaatccaagcgttcagatgacgatgcagtccaagtaaagctagaagccaccaagagaaaacttcaggagagctatcaacaagctgaaaaagccaagaggcagagaacaatacaagttatggaaataaacgatcttcccaagcaaggtttgcaccgaaatacacatttcaaacctggatatcacagtaggcattgggctaatggtcgaagataaagctattattctatggtggaccttcagatttaacagtatttccaagctgtttgttccaaatgggttgaagattggtccccttgattgtagaaaataacaaaatccattcaccatttggacttgcatagaattattccaattgagagggaagtaaacctttaaacactgtttattttcccagtttataggagttaaagtaaataggaattttgtttcattctagatcggatttttagaagaggatcctaacttggggcacctctacttttgacttgcttccataatgattgtctatagaaatctcaattgtttctagacatttttcttgtcacatgacatactagggtctcatatataagttagtatatataccctttggaagtgctttgtcacaacctcaatgggctttaaacttgtagatgtgattatgttagcaggtgtatgagaattttaatatgaaataacattaaatcattttttaagcc

SEQ ID NO: 117270 - DNA, 366 bp, Glycine max
  Clone ID: PAT_MRT3847_76905C.1
ttttgtgtttttttttttattttttcttttttttttcttttttttttcttttttcttttttttttttttttttggggcaaagcttaaaaactttttttctatttttcccgaaaagcaaaaaatatcaactttaaacattcaaattccctcgggaaaaaaacattacattggttacaaataaacatgggttcccgcccgagcttttattgggcccccaaaaaacagggctaacaaatgggaaaaaggtaaataatttccttaaaattaaaaatgcattaaacctttaattcccccttcccaaggggttgaatgtttaacccctaattaactttataaccttttaaaattttcccctgggaccccccc

SEQ ID NO: 117271 - DNA, 269 bp, Glycine max
  Clone ID: PAT_MRT3847_76906C.1
cctgaaactgcagataatatcttgctgccaatgtgcactgtttccgcattcaccattcacttattcattccacattcagtgttgaattgaaaaaaaaaaagcattttggaattaccaacccatttggtaaaagaccccatctttgattgaaagaatgggaagtagcaaacccaaatcctccattctcatgtttgttgtgttcctttgtgtttttgcaacagcacaacgacagcaacctataaaaaccgttgttgttttgggcatggaga

SEQ ID NO: 117272 - DNA, 674 bp, Glycine max
  Clone ID: PAT_MRT3847_76907C.1
gttgcttatttcagggatcaaattgaacttcaacttttatctggaaagaatgttatgattcagccccatgggaattcattgagatccattatcatgtaccttgataaattaacttcccaagaggtcattagtttggaactgtcaactggaattcccatgctttacattttcaaagagggaagattcattaggagggggagtcccataggaccttccgaagctggagtttatgcctatactaggcgtttggctctttacaagcagaagttggacaacatttccaatgatatgttatttaggatatacattcacatttaataagaaatgttacagttaaatcacaaaggtggaagatgttttcagtgacactgtgttaggtacatagaatatgtgcacttgtcctaaagctaggttgttttctatgtgcgagtacagtgttgaatcagtatatctagagatgaattcccattttttatgtatatttatcttatccggtgagcgagcgactatttccaagaacctgttgatgcatcttataaatgtggaaacactgtagcacttgcagttcaggtccattattataattgtaaatgatcagttctattgtggatttttctggatattctgaaagttttattatagaaattccctacagtcctacttaaccttgactg

SEQ ID NO: 117273 - DNA, 180 bp, Glycine max
  Clone ID: PAT_MRT3847_76908C.1
gaccgctgcgagaagacgacagaagggggatagaaagaaatgggcgcaggttatggctgttgcctatgccattttaggccacatacacccaatgctcctacttccacagatccttgactcaaaggggatatgcataagcatcattcacacaagttgaaactcttccaacccttcaaacta

SEQ ID NO: 117274 - DNA, 557 bp, Glycine max
  Clone ID: PAT_MRT3847_76909C.1
attaaataaaagaaaaataaattaaagacaattaccatagttaaattatttttttattaaaaatacctaacaaaatttcaaatttggttattacaagaatgaggggaaggagttattaacttattatatttaatttattaatttaaaaacgtgaaattatcatccttattcattagaataataagagtatctcaggaaatttctggaaggatttcttaagtgaaaaaattatttttttactatttttttttcattagaacaaatctatgtgacatgaagagtttcttaaaatgagatttgtattttcttcaagaaactgcaagaaattatttcttagcaataaaaaataatatttaacttacatataacaataccataattaaatcataattaagtgaaaataaaaaatatataaaaatataaatttcttaaaattttctagagtttcttgtcatttaaataaaattatggatgaatttctatactgatatgacaatgtgtgaccacaaaaaatattatgagaatcacaaaaattagtttaaaaaaccacttaaaaa

SEQ ID NO: 117275 - DNA, 342 bp, Glycine max
  Clone ID: PAT_MRT3847_7690C.1
atttgttaaccttaattgttcaattaggaaatccatacaggtgttctgtggattgtcagaatgggttgtaattaaggggataaaaaacctccaactataaatttttgatacaaatttttggggaacaatgggccaatgggcataaaagaggacttatttttttcgagcagtccgctttatgaattggggaaaaccttcttttcaaaagatggttcttaaattttgccaatgttgtgcatgacccaattaccaatatttggcatgtactgtacaaaatatttgacagggtgcacaggctgatttgagattcaagggtactttaatccgtgagttgctgcatta

SEQ ID NO: 117276 - DNA, 170 bp, Glycine max
  Clone ID: PAT_MRT3847_76910C.1
aaattaaaacacccccattggacaaaggaaggggctttttttaagggaaaaaaattttacatactagttcacaaaggcaaaagggccctcatcaaccaaatttttgagactcttacagttctaaaaaagccgcgtcagcataggggtaggggggttaaaactcaacttgg

SEQ ID NO: 117277 - DNA, 325 bp, Glycine max
  unsure (1)..(325): unsure at all n locations
  Clone ID: PAT_MRT3847_76911C.1
tcctctagacggccgctttggggggtttttttttttttttttttttggccncgggggcgtctcttcatctgttccttatacttccctaaatttttcctgccccataactacccctccttttcaattctgcctgtcctacccctccccccttttttttgctttccattcgattcctggggggtggggcttcatttttttgcccactccggatgccgttcatcgcgtgggcggtccgggtttcccacgctaggctttcgcccctttcggcccttctcctggtggcctgtcacgccggccccccggcttcgctgtctgcctgcttccc

SEQ ID NO: 117278 - DNA, 351 bp, Glycine max
  Clone ID: PAT_MRT3847_76912C.1
gcctttgttgatgacctgattctttttgcagagacatctggggagaatattttaaatattttttgcaggacttctaggcaaaaaattagcctagaaaaatctcggtttttcttttaaaaaattgtggcggtttgttcaaaggaatcaacttagtcaagaaatgggaatccaagggactcaggatttggggaagtatttgggagtccctatatttcacaaaagggcctctaggagcgctttccaatttattttggattaggttgatcagcgtcttaacacatggaaagcaaaaactttatcctttgcagcgtctcatctcgtgttcgaagacaactccagcgtccccttggt

SEQ ID NO: 117279 - DNA, 704 bp, Glycine max
  Clone ID: PAT_MRT3847_76913C.1
acaaaacgtacatccaagccaaccgagtttgccttttctacggtctcgtccttcttcttaaactacgagttgcattcaacaacctcttccacgaatttcttttctctcgacgagggtaaactcgtaatgttcgtttcgattttttccaaaagcgcctgcgtttcttcccgagcgaaatcttcttttcttccacgaaccttggattcatttcagtagcatctttcagggtttatattccattgaattttacaactttttattttggtaattccattattgagaagccgaggcattggggtaaaggggagaactggttttcaactgtgaactgattgaattaccttgtacggcagtttcaagaatggtctgtccgggttcaacgaaattgtctcatgacgttaggttctacagtaatactggattctgtagtttccatcataaccggatgtttttttttcgattacatttggtcaccttaaatctttcaccatgtagtttgaagcaagactcttcagcactccatcttttaagtagaccacatgccccaataaggcatgtgccttccagatgtaatgttttcatttgtcagtctgtcctaataccaggtggaggaagtggaactccactgatgaaatctgctagtgttattttaacaaggtcatatgatgctctacaaggaaaccctacttttcttcaattgatcc

SEQ ID NO: 117280 - DNA, 238 bp, Glycine max
  unsure (1)..(238): unsure at all n locations
  Clone ID: PAT_MRT3847_76914C.1
cccgtnnggaggggccttcggnctacgagcctccatatggggagcctccatacccggaggaccctccacntgaggactacgccatttctgagggatgccactgggggcttggagtctgtgcgatattctacgggcgcctgatgaaggtatagatgacaaatgtattgnttnggttgctcttagcttgttcattttatggttttgtttacactctgcgganntatgggatagatacgag

SEQ ID NO: 117281 - DNA, 283 bp, Glycine max
  Clone ID: PAT_MRT3847_76915C.1
attcaatggaattacggatggggtttccttcgaaatcaatcttcgcctgtttatctcaacagggatagaaccaggcttaggttcgattgtctacattatgcttcttgatgcgtgagatgtaaattccactagaagctcttgttggagttaaggacgttgccctgacctagcaattcaataacctatattggatttttttttatccactagaagctcttgttcgagttaagagccatttattattcaatgagtaattttttttataattttgtagttttcatta

SEQ ID NO: 117282 - DNA, 891 bp, Glycine max
  unsure (1)..(891): unsure at all n locations
  Clone ID: PAT_MRT3847_76916C.1
cacgcgtccgctctgctttcctaaagttgaaatctccagcgcgaaccaagcctttcgcttcagttcgttaccgccctctctctctctttcgctctctctccctccccctccgttcaaccaaacccttaacactctccaatctcacttctctgtctcgaatctctttgagtgcagagctcactgctcttccccaatctcagatctgttactccaaaactctattcatggctcctggagcgcgtctttcgattttcttttaattctagggattggatgctaatcggatttgagtttttattggatttttaattggtgttgtggttttgaggctttgatttgacacgaatcttgtgtggaagttcaagtctgttcgagtttcttcgtgaatgctgtgcggcagtggtgtttatctggtagttaccacgtttggattcccaggggctctgttctttgattttgatgggagaaaaagtggtttgtgtgcatgcattagaagaaggaaagcaggagaacaatgaggagtcaaggacggaactgaagcgtgactacgaccaatgcgttgctgatactgaacctcacctgtctcctaataagaaacaagcgaaagaagtttccaatgatgaagtgcgctctgaggtttctaaccccaacgtttctgcagcagagcttgcgcaaacttttcaagatatcagtagccaaccaactgaatccgaaaatgtcaaccatgcnnagtgtggggaactgacgtctacttgtttggagatntcaagttctgatgagaccttgagtgatgaagccggtgaacagaataataataataataataataatacttttcagagtgataaggacacaagtagtgctgcaatgcatcccgtgtagtgatggaaa

SEQ ID NO: 117283 - DNA, 452 bp, Glycine max
  Clone ID: PAT_MRT3847_76917C.1
aaaaagaaaccgatgggtttttacaaactattaagtgacgaagtaactcacaatggcgtgcaagattctcttgcgcagcgcagcgagtcaatgcgagatacacatgctaaaaaaccgagcactaaaacacgacaacttttacttgactcgacttgcttggcgcaactgacgtcgcctgaaatccgcagtttacatatatatcacccataaaacaaatcacatcaattccaccataaacggtactcggtttttttatttccatgtccgatctgaaacgtgtgatcagatcaaaacttacatcaaactcatctccggctgcccgtgatggcagggcatactgtggactaatggtcaaccacgcactcgcgtcctgtaaaccatgtgcgaccagtaatatctaccctaacaaggtggctactgaattatgataataaaataagcaacggccgaga

SEQ ID NO: 117284 - DNA, 171 bp, Glycine max
  Clone ID: PAT_MRT3847_76918C.1
ccgggccgacaccacgcgtcctcccacacatccttccacacgttttttgatttaagctagttatatcaatatattgcaacttgtctacactgggatgttctcccaaatgcttctgattctcacactcgtcttcaaaaccccacttataaaactcatcattttttccctcta

SEQ ID NO: 117285 - DNA, 520 bp, Glycine max
  Clone ID: PAT_MRT3847_76919C.1
acgcgtacgtatgcttggatcctctagtgcggccgcttttttttttttttttttttttttttttttggaaaccacaaaaaaaaaaaaaacaaaggacatcagtctgttagttttcggtttgacctgtaaaaattgaaccaaacaaaaccgaactacattcattagtttaagtttaattattaatttattacatgactcattaattcaaaacttgtatacaacatgtaattgtaagggtttaggaaataaaaataaaacacctaatttcacacactcagtctctactctctcactctttggagtctcgtctaacacgtaaaattggaactggaaccttaaacgtggggacaacctctacctcgcatgtctctgtgtttgtggcgataacctcttcgacaaacgtgtgggctccttttcatccctgcgtgcaaattctcttcaacgtgtcccccctctacggattaacgttgtttatgttggcaatcatgactctctgcatctctgcctctctatctatctc

SEQ ID NO: 117286 - DNA, 327 bp, Glycine max
  unsure (1)..(327): unsure at all n locations
  Clone ID: PAT_MRT3847_7691C.1
tcgcangcacgcgtacgtaagctcgggaattcggctcgaggnnncatgggtntgnggcnntgctccnctantgatntngttcanctagctcngcaacagtggctngnnataagagatcaatnataaagtggngnngtcnatggcncctaatggaangactcttntagactnagnctctatcggnnntncatntcaactatgcgcancaaaanttgngtatcctgatactncaaagatnnngatngatgatcccaagcatatccntggggctggnncncatgcatangatgnaatnctgatngcnanaccacctgctnangtatnntt

SEQ ID NO: 117287 - DNA, 625 bp, Glycine max
  Clone ID: PAT_MRT3847_76920C.1
aattcggctcgaggtgagagagagagagagagagaaaatagaaggtgaagtgttagtgttatctacaaccatcttatatggtttatacgggcttttggttttatcttcaaagaaatgaaatcaaacgaacgagaaaccagatcatcaccaccagttggaagctcatgtgctttgcattagtatattagtttctttttcaggctttaaatatatttttggttcgattcaagtttttcaatttatggctttttcttgtcttttggcagaacgatatatataaagccatccactctctttataaagaattcgggtaccctccaaaagaatttatgttcgcttcttggcttttgctaccccaaaaccattgttttcttccttgtactgtctgaaacctttgaaacttcgctgttttcttctgctcacactgcttagctttatatcctttccaatatagtagcctaaatctccacttttccccccctttttttttttctaatatgcaaatgatgcccggtgaccccttttccttatccacttccatcggaggcttcactcaagatcagcaaaacacaaaccctaaccctaaacctaatgctcctcccaagaagaagagaaaccttccggg

SEQ ID NO: 117288 - DNA, 464 bp, Glycine max
  Clone ID: PAT_MRT3847_76921C.1
atttggaaacagggttggtggtcgagataattttttccactgcaagaagtgtggtatgcattttcaccaaggcagccaccattgtagtttatttattgttgctttggcatttcccctccctccccccacccaattttggtgatgtttcaaaatgactatttgcagattaatagaagactaaagtcttttctgggcttgtcaatgctttatttattttcagaagtacataagttgatgatactagatagatctaactcatttaagtaataataattgatataggctaaagttgacacctttggctagtcaatatcaaggaacacatttctaatccagcccttgatatatatcatttaaattttttgtgattattcagttttagttgctctgtaaagttaaatttccttttggttctgtgattgtgaacctcttgttcttactgctcattcgtttcatgagattag

SEQ ID NO: 117289 - DNA, 301 bp, Glycine max
  Clone ID: PAT_MRT3847_76922C.1
ggctggctcacgcacgcggtctgtctggtggacaggctcatctagcatggcgctttcctaggtaatgtgccactacatggagaatcctgatagctacacaaaagggatgcctattatcttccaagagatatgggtctttcaatatcgaggaattgggaataggttttggacttgcatgagcggaggctaccgttgcacctgccatgtgggttttttgtaaaatatgagagagtggagcgactggaatcaagagatggggaggtcaccctgcttgatgaacagaatgcgtgaccagattggt

SEQ ID NO: 117290 - DNA, 189 bp, Glycine max
  Clone ID: PAT_MRT3847_76923C.1
tgaattcggatggaggttacagcttgtcagtggatgggaccccaataggagggttcaagaacatggaatcaccaggggttgcattcccgaaggagcagccggtgaggatatagtcgactctatggacatgctgatgactgggcaacaagacgtggacttgtgaagacaggttggtcacaagcacgattc

SEQ ID NO: 117291 - DNA, 387 bp, Glycine max
  Clone ID: PAT_MRT3847_76924C.1
gaatgggaacaccaaaccaattccccatagctagagactaaggttaaaaaaacaataacttgaaggggtttcacttctacaactaatgtgagcgacttgacggactaataagctttgataaaatgggttctccctattagcatcaaagatggacaatgcttatacagctcaaaagatgtagattagaaaatccatctgcatgaaattacaaattgacccaaacgacacgtgcatcttccacctttaaatacacgccctgcaggacgagtggcattgatgctgagagaggacaacaacatttatatcagggaagaaaccacttgcaccaatacatccagccacagagccttagtacctgcaaaatatagcacgtgctgaaaaccagtt

SEQ ID NO: 117292 - DNA, 519 bp, Glycine max
  Clone ID: PAT_MRT3847_76925C.1
taggtggagcagcaagttgtgagctctaaagatgctgtccctccattaatttagaagaatctgctagtctggttttatgttgtgggcggctgaaggtgtgttacagaataagaggtatgttttggttgcgaggctttcaggtcattgaagtgagtttgctgttttagtctcaaagcaacctgaatatttgttagatatatggatgtacctgttcagttttagaaagtgaaagtgaacaaaaaaattatatatgtattcatctcaatcatcatatgttttaatttagaagttcactttttattcatcacttcatgcaataataaccaaagtaaaaggagggcttttgctttggaagtgaggtataaatatgaatccgaaaaatgaaaaccattattccataccaagactaacacactcagttggcctaaaaaactagtcctgcaattccctagctcaaagaaaaatccaccttctcatttccagtttatacattacaaatggagagataaatcaagcttt

SEQ ID NO: 117293 - DNA, 141 bp, Glycine max
  Clone ID: PAT_MRT3847_76926C.1
aaggaaatcacgtagggccaccaccagcagtgtagcctgcgccttaatttgactggacacgtggaaacttactaggaccagacatagtactgattgacagactgacagctctatgttgattctatggccggtggtgtatgt

SEQ ID NO: 117294 - DNA, 292 bp, Glycine max
  Clone ID: PAT_MRT3847_76927C.1
tgaaataatgttaccttcctctctctaacctcactttaggtgctgcgattattctttcttttctaaaacctcaaaccgcaacacaacacaacacatcacaatacaagtttcgtattcgtaacgtaacttgtttctcccttcttcctctcctctctacgttttccgaattctgccctcactttacccaattccaattcctcacacccccagctaggggaattagggtttttgccgtcccatttatcgatgcgtcaccaccaccgattctagggattgctgcgatggcggaatt

SEQ ID NO: 117295 - DNA, 535 bp, Glycine max
  unsure (1)..(535): unsure at all n locations
  Clone ID: PAT_MRT3847_76928C.1
tatgacgatcgcactgcacgncnngtacgtaagncttgngatcttctctagagcggcccgccctttttttttttttttttttttttttttttttttttttttttttttttttttttttttttttttttttttttttttttttttaaaaccaccccccaaaacaaaaaactctggggaaaaaaaaaaaaaaaagggagggcccttttggggcggaaaacttcgggggggcccaaaacatacttttttagtgaggaatctctaatggggggaccctaaaaacatcaaaaccccagaaaaaacccaaggggaaaaaacgggggagcaaaccacatgggtgcctttcaaaaaacagaaataaaacggcgggacattaaaggacatcgggtttcccgagttatcccccctcctatggtaaacaaaccctgggcaaagggccctcccaaaggggggttagattcaattcatactaaagggggggcatctttgggacaggggcaagcttggagaaccgcccccgaccattggaaaaaaacat

SEQ ID NO: 117296 - DNA, 4538 bp, Glycine max
  Clone ID: PAT_MRT3847_76929C.1
caaagccactccttttatcttaaatactagagatgccttgctatatctgaattcattaccttttcctcttttgatatcataatggcttctatttcttgtatgagtgctattttaagctttcttctcatctctatctttctttctgtttacaatattaaagtgtgtgaggcacaagccaggcctcctacagcgaaggggctatcatacaccttctacgacaaaagctgtcctaagcttaaatctatcgttagatcagagctcaaaaaggtcttcaataaggacattgctcaagctgctggcttgcttcgccttcacttccatgactgctttgttcagggttgtgatggatcagtattattggatggatcagcaagtgggccgggtgagaaagaagcaccaccaaacttgactttgagacctgaggcctttaagataatcgaaaaccttcgtggtcttttagagaagagctgtggaagagtggtctcctgctccgacatcactgccctcactgcacgagatgctgttttcctttcaggaggaccagactatgagattcctttgggaaggagagacgggctaacctttgccacaagacaagtgacattggacaaccttccaccaccttcaagcaacgcctcaaccatcctaagctccctcgccaccaaaaacctcgacccaaccgatgtcgtagccctctcaggtggccacaccataggcatcagccactgcggttccttcaccaacaggctctaccccacccaagaccccgtcatggacaagaccttcggcaacaacctcagacgcacgtgccccgccgccaacaccgacaacaccaccgttcttgacatccgatcccccaacaccttcgacaacaagtactacgttgacctcatgaaccgccagggcctcttcacctccgaccaagacctttacactaatacgaggactaagggcattgtcaccgactttgccgttaaccagagcctcttctttgacaagtttgtgttcgctatgctcaagatgggtcagcttaatgtgctcacggggaatcaaggggagattcgtgccaattgctccgttagaaatgccaataacaagtccctcttgacttctgtggtgcaagacgtggtcgaaactttgatagaaatgtaatgtacgtaactgggtcgatagtgtatgtgtgttgtatatgttgtggtcatgaataattgataagcccttgtttcttgttcctagaggtcttttttggtgataaggaaccattgtgtaatggccctagctagttgtacttctgcagtaatggaaaaatatgaatgagagcttctcatttgcaactatactgttttcaaaaagtcactgtctcatacctatgatagaacatcttcatccgcttcgttttctcctgttatgccttcgacgtcttcttgaaccgtactccatctttgcgttcttttctacattgttttctcgttttcatctttgttgctcttttcaagatttttgtttctgcgtctatgtctatggttcggggtgggaatacagttgaatatagcttaaacatgatttgctgttgtagggagagagttatcaacgatgtagagctgaaaatgttctacatcaagaatcttgatttagtatttgtaaattaaggcctggtcattgtagaatggcacaactactaggtctttcaaaatgggcttgagtatgggatctgaagggctgagatcaattggggaattgcttgggttgggagtatctggggctgtgttcccagaagatcttaaagtgtcagaaaagaagatatttgatctctcaagacaagtttctgttcttatggaataaacttttttgttatctcattcattttggccgtctctatagatccactatttttttatctccctgtcattaatgattcattacattgtcatggcattgacctaaggttggaaacaatagttacaaccttaaggacaattggttgatgctttctatcttctacacatggctctccaagcttcgtactgcttatattgctccatcttctcgtgtctttgggcgtggtgagcttgtgatagattcagcacagatagccacacgatccttgcagcggtctttcatcattgatttcctgaccagaccttcgatacccaaccttaggggcacgagccccgtcgacaacacagacagcaccaacgttcttgccacaaggtcccccaactccttcgatatcatgcatcacgttgaccccatgtaccgccgggtcctcctatcgtctgaagaagtccattacacaaatgcggtgtttaaggaacattctcacccagtgggccgttaatcttagcctcttcactggctagctagtgttcgctatgctcactatgggtcctctttatgtgctcaacggaatgtctaagggaggttgaagcctttcgctgacattaggaatactaaaaatttgttacattttagttacgaggacatagaaggtgatagtgactggaatagaacaggtgaggatattaattgaaggagctctgcagatggtgatccttcgttttttgattatggaatttttaggcaagtcttgtcttctggcatcatttcatctaagaagttcatctccaaatactgttactgtttatggtgggggctccagaatttgagtacacttggccagggacttcaaactagcacctatcctggggaggttatcttttcaatagcactagctataagtggcctcatcctttttgcccttctgattggcaacatgcagacatatcttcagtctctcaccattaggcttgaggaaatgagagtcaaaaggcgtgattcagaacagtggatgcaccatcgcttactcccacaagatcttagagagcgtgtgagacgatatgatcaatataagtggttggcaacacgtggtgtagatgaagaaagtttagttcagagtttaccaaaggatcttcgaagagacattaagcgtcatctttgtctggccttagtgaggagggttccactatttgagagtatggatgagagattgcttgatgctatatgtgagagactgaaaccgtgtttatttacggagaatacttacattgttcgggaaggagatcctgttgatgagatgctgttcatcatacgtggtcgccttgagagtgttaccacagatggtgggaggagtggatttttcaaccgcggttttctaaaagaggctgacttctgtggggaggagcttttaacctgggccctggatcccaaatctggttctaatctcccatcttctactagaacagttaaggcattaatggaggttgaggcttttgccttaactgctgatgagttaaaatttgttgctagtcagtttaggcgccttcacagtagacaggttcaacacactttccgtttttactcccaacaatggaggacctgggctgcatgctttattcaagcagcatggcgtcggtattccaaaaagaaaattatgaagcttcgtcaaaaggaagatgagtcagacggagctcatgaaaatgttggtggcagttcctacagctttggtgctgccttgttagcctcaaagtttgctgcgcacaccctacgtggtgtacatcgcaatcgacttgccaagactgccagggagttagtgaaactacagaaaccccctgagcctgacttctctgcagatgatgctaactaaaatttccatgtgttctcttaaaatgcttgttttggttgactattatgattgaatttgtgaagaaaggtcgaaagcaatgtattatacaattatcctggttacagttgtaagggtttcaagacttgtaatgactcttcatctgtgtccttgtaaattatagtattatacattaagccaacttggctgtgggctaccgagcatgtaaacttatgtactattctcaagtttattattgaagttatataattactggttgacagaatcaaggtctgtcttatttgccatccacgagagttaaagtttgttgccagtcagtttaggcgcctgctcagtagacaggttcagcacacctttcgcttttactcccaacagtggaggacttgggctgcatgctttattcaagcagcctggcgtcgctattccaaaaggaaaactatggagcttagtcagaaggacgaacctgaggagtcagaaggaactcgtggcaatgccagtggcagttcgtacagccttggtgccaccttcttggcctccagatttgctgcaaatgctcttcgtggtgtacatcggaatcgggaagccaagagtgccagggagttggtgaaactacagaaacctccagagcctgacttcactgctgatgatgcagactaaattttcatatataaactacacttgttttcaacttctcatttactattttgaatataactttctattaacggttaaaggtaaaacattatacaatttgttagaaaatatgagaaatatctgatatcttttgatataaaatatatttagtcacatccgttggtatcttttctttgcaacgtaa

SEQ ID NO: 117297 - DNA, 344 bp, Glycine max
  Clone ID: PAT_MRT3847_7692C.1
tatttcttcttttttatttttttatttttttccattaattgttttttacacgggggggggttactctgttgttcttgtcaagagtatgattgccaaagggagaggggaaaccccccttgttttttggaaaccgagagccgaccactcctatgggggggaaggacacgagataagggccccatacacaacatgaggttttgaatttgccaaaaaccaaatactcttaagggaccccccaccctttttaaataataataaaagcccggggggaaattcttgtagagaaagaccctctcttcacttaaaaaagggccaaaggggttttggatgcaaacggcccaaca

SEQ ID NO: 117298 - DNA, 893 bp, Glycine max
  unsure (1)..(893): unsure at all n locations
  Clone ID: PAT_MRT3847_76930C.1
ctggcttctatttcttgtcgcatcgctattttcagctttcttctcatctgcatctttctttctgtttacaatatcaaagtgtgtgaggcacaagccaagcctcccacagcgaaggggctatcatataacttctacgacaaaagctgtcctaagcttaaatctatcgttagatcagagctcaaaaaggtcttcaacaaggacattgctcaagctgctggcttgcttcgccttcacttccatgactgctttgttcagggttgtgatgggtcagtgttattggatggatcagcaagtgggccgggtgagaaagaagcaccaccaaacttgactttgagacctgaggcctttaagataatcgaaaaccttcgtggtcttttagagaagagctgtggaagagtggtctcctgctccgacatcactgccctcactgcacgagatgctgttttccttgtaagtacaaataattatttggttataggttaaaattttgtagaaactttttgacagtgaattgattcagttatggttataaggaacttgtgaagtatcttacataattaaaaacaattaaagaatttgataaaaacagtcaggaggaccagactatgagattcctttgggaaggagagacgggctaacctttgccacaagacaagtgacattggacaaccttccaccaccttcaagcaacgcctcaaccatcctaagctccctcgtcaccaaaaacctcgacccaaccgatgtcgtagccctctcaggtggccacaccatatgcatcagccactgcggttccttcaccaacaggctctaccccacccaagaccccgtcatggacaagaccttcggcaacaacctcagacgcacgtgccccgncgncaacaccgacaacacca

SEQ ID NO: 117299 - DNA, 712 bp, Glycine max
  Clone ID: PAT_MRT3847_76931C.1
aaagcaattagtaaatcactaaatccagaagggggaaaaaaagagagaaaagatttaaggggtgactttctctctctcccttgcttattcctcccaaaagaaaaagacggtttccgttggaaggaagaaagaaagaaattgagtttgagatctgattgtgcggcgacgatggagaacaacgacagcatcatatcgcgggagaagatcgaccaggcagcggtgtggctcggctccgccgtctcttccgctttcttttcctcattggaacgcttttcctgcgtcaacgtcgccacctctgaccccgacaacgacgatgacgacgacgattattactccaccaccaccgccactcccacctccgcatccaccaccaccaccaccgccctcgccaccactcctccctccgttcaggtcaacgggcaaaaaaacaaacgacgacgtctccaacctccccgtttgaggcaatataacgacgacgacgaggtcgttgctgcgctgtgtatagacctttttcccttttcctcctttcgtgtgtgtgttatgtaaggattctcgattttcgttgcttcatacttttgaagtcgtgaaaaagaaaaaacaagatgtgatgcaattttatgcctgtctatttaattaactaattacatgcttatatatttttattagattgtattattagtttatctcgctgttgtgttatgtcattgtcgtt

SEQ ID NO: 117300 - DNA, 346 bp, Glycine max
  Clone ID: PAT_MRT3847_76932C.1
accctgcgcccgcagtcttaacgggaagatctcagaactatcaacccacgcgatgggatcaccgcaccattggataacgtggccacgcaagccaacaccatgggtatgctgaatgcagcggtccacattagctcccttttgcaccgaccaacgatcgctagggtgatagcgagcgagattttttttatcaccaggcccccgacactagacaccaacaacggaaagagcagacccacgtcattccaactgcacaagtagttcgtcaagatgataatacggacagagacgaatatcaacggtcaaccgttgcaaagacgtttatgccgagtcgtattgtgatcccagc

SEQ ID NO: 117301 - DNA, 114 bp, Glycine max
  Clone ID: PAT_MRT3847_76933C.1
atgcctgctgctttgtttctatttctgatgtttagcttcaatgtgatatgtgtttttcaaggggaagcacttatcagcgaaggagttgtggcttctgggagttctgctactatt

SEQ ID NO: 117302 - DNA, 389 bp, Glycine max
  Clone ID: PAT_MRT3847_76934C.1
tgaacgtcaccacaaaagtaatgtttttcattgttttgacaacacagcaacccctaggaatgtacagaaaaccactgcacctgtaaaaaaaatgaagggccgcctaatcctacggctacccaaaacacaccaaaaaagatacgagcttaggcccccgtcacttaggaacaaagtgttgggcacccacttttcaaaataccgggggatacatcaaacccctgttcgaaaacacatgacctgaagctcgtgacaccacctttcagattgcaaaccagactcgactgaaacgggaacaccctgatgaaccctgccgctcaattgacatcatatccagatcaaaaccagaaggccatggacccagcgcctctagtatgaataacgacaagtat

SEQ ID NO: 117303 - DNA, 435 bp, Glycine max
  Clone ID: PAT_MRT3847_76935C.1
aaaggaacagattctccttcaccaagcacatgcaaaatggtgcactgggcaatgtgcaccgagccataaagccattaagcaatcgggctatttaccaagcacatactacaattacctgtacaccaatagtatagaactataagggggcagtagaagaagaactcgggcaaaattatgggttaacagagtcttattgcgtacagcaaaaaagtgaagagacaaacctaggaccagattttgctgggtcttaacttgaccaagttaaaagcatcctacaaggagacctagacatatgccaggcttccaggtggtcagcagcccttagaaaagactgcaacctccaaggcctcgcgggagggggctttttatatattagcgtgccaatccccttagttgcagccaccacaacaccagcaaccagaacatgccagtcac

SEQ ID NO: 117304 - DNA, 455 bp, Glycine max
  Clone ID: PAT_MRT3847_76936C.1
tacggctgcgagaagacgacagaagggggagtaagttaaagcaaggagtatattgctctataatcaaattaagatgaaggccatcactcttgtttttattgttctgttggctctttccattggaattgaaaatgaaggaccattgaagttgatagaagcaagacagtgcgaagaaacactgtataagtttagctgtgcaagtaacaaatgtggcactgattgtcgtaataaacatggaaagtttgcaagtggtacatgcaatgccattgaagattgcatatgtcgctatccatgttaataaatgtttgacctttttccaacgttgtccctatagaaaatgttgtttatatatgtaactggcaatgatggaattaaagaaaataaagttactcattttgtaccacaaaaaaaaaaaaaaaaaaaaaaaaaaaaaagcggccgctctagaggatcca

SEQ ID NO: 117305 - DNA, 190 bp, Glycine max
  Clone ID: PAT_MRT3847_76937C.1
gtccaaatgtgtatttctttatggtatgggttcctctattgtcattatcattttgctgcagagacgggctttctttgctgtttttctattatagaccactgaatgaatgaaatgaaatgcttattcttaaccaactgaccctcctctggaaggagctctccgaccacttatactacctagagcaagacct

SEQ ID NO: 117306 - DNA, 434 bp, Glycine max
  Clone ID: PAT_MRT3847_76938C.1
gaaaatataaaatcacacatttaatcatataaaaaatacaaattatctacaactgatgatataatgattaacaattgaacattggcaatgcattagcttggcactaatgtattgtttatacatatattacaagagtaaatgaggttgcaccatcatattcaaatcagacttcaccggaattcaagactgggtcaacgccccttcgactttcgtctattagagcccaacttaacatttcagtgcagaactgatcatctggtttcagccacaaggctttgtgataatatgaaattgctgtggtgaaatcatctgtaagtggtaagtatatgcaagaccagcataagtgcttcacacttctggttgataatgcaagtgctttctcataatatgaaattgcatcttggtacatcgtcaactttctgtatgcatgtgca

SEQ ID NO: 117307 - DNA, 417 bp, Glycine max
  Clone ID: PAT_MRT3847_76939C.1
ggcaccgcttgggcagacttaacatcagcacagagcgggttactgtctgttcaagctaccatctgtctctctctttcttagtgcctccttgccagatgttaaaacggcccaagaaactttcctattcacatctgaatcagtgaacgaggggcaccctgacaagctctgtgaccagatctccgatgctgagctcgacgcatgcttggagcaggaccctgacagcaaggttgcctgtgaaacctgtaccaagaccaacatggtgatggttttctgagagatcacaaccgaagccgacgtggactatgagaagattgtgcgcgacacatgcaagaacattggctatgactctgatgatgatggtcatgatgctgacaactgcgaggtcactggcaacattgagcatcagagacctgatat

SEQ ID NO: 117308 - DNA, 569 bp, Glycine max
  Clone ID: PAT_MRT3847_7693C.1
tgtattatttaccatttcccctctgaaaaagcacaggggattctctagcatttcgggggctcccaacctcgcaacagaggctttgctctgtaaaagctgacaccaaccactccccttcacgccattcacgccactctcctctgtgttcccacattttcttctttcttatcccctaattgcaagtgcagcaatcaccaggatgttgttgtcttatttattggcattaccccatacacctgaccttcatactctgagcatcctcatcaattgtttctggcatctatagctcacatcacttttgctttttctgaattggccaacattctcgagagggtttatcacccagatgcaataaccctcaccacactgcactttttcacgacgagggggtagctcaagggttccagctgaacaaatgaattgtgtaaaacagcagtgtgcatataatctttctcttccttttttgtcaacaaggtcagcgcttcaccaagaagtccgagtccattgatcataagagtgtatatctggacatttaatggtaatcttatgccgagagaactttcagcatc

SEQ ID NO: 117309 - DNA, 510 bp, Glycine max
  Clone ID: PAT_MRT3847_76940C.1
cttaagtacctattgcataccagatcaagcaataaaggcctaagaccgttggcggcatgcccagacagacccccaataccggaacaactactagccttgatcggattgtaaccgattgcttgacacctaatatccatgttctaagacctgataacttatcacatgatatactctactctataggaccacatcaataacgtgagcatccacacttccactgctagaacctagaaatactctcaatcaatcgtatgcaaacaaatcacagttctacatttatctatatgccctaggcatccctgttgaatgtacttcaagaatatctctaatgcgagaaacctacactgtattcatggacgcgagtaatatatacacttaacttgataaggggtgctcgcgttgtattagatgatgggaaaacatctgaaagggcgtaaggaaagtccacatagtcgggtattaaagacaacagtgagcattgatcatcacaacgactctgtgcatacgggt

SEQ ID NO: 117310 - DNA, 364 bp, Glycine max
  Clone ID: PAT_MRT3847_76941C.1
ggcccatgaaacttgcctattcacatctgaatcagtgaacgaggggctccctgacaagctctgtgaccagatctgcgatgctgtgctcgatgcatgcttggagcaggaccctgacagcaaggttgcctgtgaaacctgctccaagaccaacgtggtgatggttttcggagagatcacaaccaaggccaacgaggactatgacaagattgtgcgggacacatgcaggaacattggttttgtgtctgaagatgttggtctcgatgctgactactgcgaggtcctcgtcaacattgagcgacagagttctgattttgctcaaggtgtgcacggcctcctaacaaagatgtctgaggagattggtgct

SEQ ID NO: 117311 - DNA, 1358 bp, Glycine max
  unsure (1)..(1358): unsure at all n locations
  Clone ID: PAT_MRT3847_76942C.1
atcaattttattcccccgaatttctcccactcttaatcctaatcctaattatttatcatcatcagtacgtcccacccctctctctctttctctcactggcaggaaggttttcatcttcacccgtttcagccatggataaggaagacgcagcggcggcggagcaagaatacgcacttcactccaccttactccaggaattcaccgccatttccgccatcgacaaggcatggctcttcaaatcccacactcacaccgcctcggcttcttcttcgcatgcaatgttctgcgttagtcaacccaacctcttggtcaacaagaggaagaaatccatcgtctccgccaccattctcacacaaaacgacgcctcctccgtcacgtttcagtgggctccgtttccgatccaagtttccggagtctccgcaatggttccgtctccttctggatccaagcttctaatcgttcgaaatcccgagagcgatggcccttgccgcttcgaaatctggagctcctctcaactccaaaaggagttccatatccctccatctaagcatggttctgtctacactgatggatggtttgagggaatttcttggaattcggatgaaacttgtatagcgtatgtagctgaagagccggcccctacaaagcccacattcaatgatctgggtggctacaagaaagctggttcttcagaaaaggattgtggtacctggaaaggccaaggggagtgggaggaggactggggagagacatatgcagggaagaggcagcctgcgccttttgtcatcaacatcaacagtggagaagtacaagcagtcaaaggaattgacaagtctttgagtgtcggacaagttgtgtgggctccatcaactgaaggctctgcgcaacatctggtttttgttggatggacatttgagacaagaaagcttggtattaagtactgctataacaggccatgtgcattatatgttgttaaagcaccacaccatgagtcaaaagctaatgaaactgagattcactcaactgaagatgttcaggctgttaacctaactcaaaccataagtagcgctttctttccacggttcagcccagatggaaagtttcttgtatttgtatctgcaagaagctcggttgattctggagtccattctgctactgattcacttcatagaattgattggcctgaagattcaaagctttataaatcagctaaaattcatgaagtgattccagttgtgttgtttgctgaggatggtggcttccctgggctttactgntcactatncttagtgatccatggctttctgatggctacacttttgttatagcatctatctggcacagcagtcaagttttac

SEQ ID NO: 117312 - DNA, 1529 bp, Glycine max
  Clone ID: PAT_MRT3847_76943C.1
gcgtaaatccgctctcactgctctaaccccttctctctctctctctctgctcgtttctccgctctccttcttcctttacactcctcaccttcgtttccgtcgcagctttttacacactctaccgctgcttccccttcacctccgatttcgtaccactaatcagagatcaaaatgtctcgaagatatgacagccgtacaacaatcttctccccggaaggacgtctttaccaagtggaatatgcaatggaggctattgggaatgctggtaccgcaatagggatcttatcaaaagatggggtagtgctggttggtgaaaagaaggtcacatccaagctgctccaaacctcaacttccaccgagaaaatgtacaagattgatgatcatgttgcatgcgctgtggctgggataatgtctgatgccaacatcctaatcaatacccgcaagggtccaagcccaacgctacacatacgcctatcaagagcccatgccagttgagcagttagttcagtctctctgcgataccaagcaaggttacacccaattcggttggtcttctggtccatttggacgtttcgttcctatttgcaggatgggacaaaaactttggctttcagctttacatgagcgaccctagtggaaattatggtggctggaaagctggagccattggggcaaataaccaggcagcacaatcaatactgaaacaggactacaaggatgatatcacaagagaagaagcagtacaacttgcattgaaggtgttaagtaaaaccatggacagcacaagtctaacctcagaaaagcttgaacttgcagaggttttcctttcaccctctgggaaagtcaagtatgaagtttgctccccagaggccctgactaagatgttggtgaagtctggtgttacccaacctgcaacagacactgcctagtttgctattccatgcctggtgcactttaattatccctatcttatttatttgtggtgcttttggcattagaagacagatattggctcaaacatttttcaagcttaaacattttgcatgttggtaatgctaatggctttgtattgggtacatcttgattttaaagagagattgatggtatgcgttctatttgattaaccatcaagtttagaagttagaatggcccaagaaactttcctattcacatctgaatcagtgaacgaggggcaccctgacaagctctgtgaccagatctccgatgctgtgctcgatgcatgcttggagcaggaccctgacagcaaggttgcctgtgaaacctgcaccaagaccaacatggtgatggttgtcggagagatcacaaccaacgccaacgtggactatgagaagattgtgcgtgacacatgcaggaacattggtgttgtctctgatgatgttggtcttcatgctgacaactgccaggtcctcgtgaacattgagcaacagagtcctgatattgctgagagtgtgcacggccagcgtacatatacgcgtgacgagatcgtagctgggatacgagtgcatgtg

SEQ ID NO: 117313 - DNA, 351 bp, Glycine max
  Clone ID: PAT_MRT3847_76944C.1
gcacaaagcggggtactggacgcacaagctgccagcggtctctatctaacttagtgcctacacgccagaaggtaaaatgggccaagaaactatcctattcacatgtgaatcagggaacgaggggcaccctgacaagctctgagaccagatctccgatgctgagctcgatgcatgcttggagcacgaccctgacagcaagggtggctgcgaaacctgtaccaagaccaacatggagatggttttcggagagatcacaaccaaggccaacgtggactatgagaagattgtgcgtgacacatgcaggaacattgcctatggctctgatgatgttggtcatgatgctgacaactg

SEQ ID NO: 117314 - DNA, 299 bp, Glycine max
  Clone ID: PAT_MRT3847_76945C.1
catgagtcaaaacctaatgaaccagtggtccagtcaactgaagaatttcatgcactgaaccttactcaaactataagcagtgccttctttccacgattcagtccagatgggaagtttctagtatttttatctgcaagaagtgctgtggactctgagtgcacaatgctacaaattcacttcacagaattgattggccaacagatggaaagctgttccaatcttccaaaatttatgatatcattcctgttgtgatgtgtgctgaggatggctgcttccctgggctttattgtactactatc

SEQ ID NO: 117315 - DNA, 389 bp, Glycine max
  Clone ID: PAT_MRT3847_76946C.1
gttaacaacagcacagagcggtttactgactgatcaagctaccatctctctttctctttcttagtgccttcttgccaaaagggaaaatggcccaagacacttggctattcacatctgaatcagcgaacgaggggcaccctgacaagctatgtgaccagatcttctatgctgagctagatgcatgcttggagcatgaccctgactgcaaggctggctgtgaaacctgcaccaagaccaacatggagacggttttcggagagatcacaaccaaggccaacgtggactatgagaagattgtgcgcgacacatgcaggaacattgattttgactctgatgatgtgtggcttgatgctgacaactgcaaggtccttgtcaacattgagcaacag

SEQ ID NO: 117316 - DNA, 655 bp, Glycine max
  unsure (1)..(655): unsure at all n locations
  Clone ID: PAT_MRT3847_76947C.1
acggctgcgagaagacgacagaaggggacaaacagaaaaaacagttcattcattttcactttgtgtcagaaatgaaaatctgcaccaccttttgtgtgtcactggccacggttttggtgatgatgagcaacatcatcatggcagtggctgagactcacattcccaccaccctggatggcccatttgacccggtgacccgacggttcgacccgtcactgcgacggggcagtgatgacttgcctatgactcatccaaggctcagaaagaatgtcacttcaaacttccctgaacagattgctcttgcaatttcttcaccaacttccatgtgggtttcttgggttactggtactttaattatctcctctcctcagaatttccataaaatctttgttttttaaagagtaaatactaaatagtcttctttgtactgataatataaaaagaattttacattttcgtttgattacaaatcgtcgtgttttaagagtaagagaatgtttgattttcagttgcaaagattacgtttgaggcaaaagtagttttgccaaaagatcagaacccttacttctgcgtttattttacttntatttgttggatttgcattggaaccgatgccgcancattttcaactganaaccaaatatgcactaagtag

SEQ ID NO: 117317 - DNA, 501 bp, Glycine max
  Clone ID: PAT_MRT3847_76948C.1
tacatgagtgaccatagtgaaaatacggtgcttgaaaagctgaagccattggggcaaatatcaggcagcacaatcaatactaaaacaggattacaaggatgatatcacaagagaagaagcagtgcaacttgcattgaaggttttgagtaaaaccatggacagcacaagtctaacctcggaaaagcttgaacttgcagaggttttcctttcaccctctggaaaagtcaagtatgaagtttgctccccagaggccctgactaagatgttggtgaagtctggtgtaacccaacctgcaacagacactgcctagtttgctattccatgcttattgcactttgattatgcctatcttattcatttgtggtgcttttggcattagatggcagatattggctcaaacatttttcaagttaaaacacattgcatgttggtaatgctaatggctttgtattagagatattgatggtatgtgcgttccatttgattaaccaccgaatttcc

SEQ ID NO: 117318 - DNA, 2625 bp, Glycine max
  Clone ID: PAT_MRT3847_76949C.1
ggctcgagacttaacaacagcacaaagcgggttactgtctgttcaagctaccatctctctctctctttcttagtgcctccttgccaggtgctgccactctctctttctctctcttcatccttctgttgggttggttgtggagtgttgttttctgttgtgcacgtgttgtcattttttaccctcgccacagatctgaagtgttcaagtttggattttgtgcttctgggttggtttgttttgccttttcctcaactgggtcgaccgtgtttaactgaatttgtctctcggaaaccgtgtttttgtctgaattagaagcctgatctacaaattttggcattctagtttctccaattgtgctggaattccgtctggggttttagatctggagaaattgatgtgtagcttgtgacaatttgtggaagaatttttattttttttcttgatttgcggagatgtggtagtttccaagtaagggttctgggggttttgtgctagatttgaccaatgatcaaacttagaacttgaacttgaactttttttattggctaaggttaattgttagtttattgttaacgggattcagcagatcttagttgttaattgttagcttcttcttttttttttttggttagtgggagatttgatcccactatttcttcccatcctttcttccttcaccactttgaacttgaacttagttgggggacttggctgagttagactgttatgtttaaattgtagtcatggtggtgtttttggctgtgaatttgctcatatgtgctaattatgtgttcttgtttgatgttactctacagaagttaaaatggcccaagaaactttcctattcacatctgaatcagtgaacgaggggcaccctgacaagctctgtgaccagatctccgatgctgtgctcgatgcatgcttggagcaggaccctgacagcaaggttgcctgtgaaacctgcaccaagaccaacatggtgatggttttcggagagatcacaaccaaggccaacgtggactatgagaagattgtgcgtgacacatgcaggaacattggttttgtctctgatgatgttggtcttgatgctgacaactgcaaggtcctcgtcaacattgagcaacagagtcctgatattgctcaaggtgtgcacggccacctcacaaagaggcctgaggagattggtgctggtgaccaaggtcatatgttcggctatgccactgacgagactcccgagctcatgcccttgagccatgtccttgccacgaagctcggtgccaagctcaccgaggttcggaagaacgggacatgcccttggctgagacctgatggcaagacccaagtcactgttgagtactacaatgacaagggtgccatggttccaatccgcgtccacactgtgctcatctccacacagcatgatgagactgtcacaaatgatgagattgcagctgatcttaaagaacacgtgattaagcctgtgattcctgagaagtaccttgatgagaagaccattttccatttgaacccttctggcaggtttgtcattggagggccgcatggcgatgctggtctcaccggccgcaagatcatcatcgacacctatggaggatggggtgcacatggtggtggtgccttctctgggaaggatcctaccaaggttgataggagtggtgcctacattgtgaggcaagctgcaaagagcattgttgcaaatggacttgctaggagggcaattgtgcaagtttcctatgccattggtgtgcctgagcccttgtctgtgtttgttgacacttatggcactgggaagatccctgacaaggaaatcctcagcattgtgaaggagagttttgacttcaggcctggcatgatctccatcaaccttgatctcaagaggggtggaaatggcaggttcttgaagactgctgcatatggacactttggcagagatgaccctgacttcacatgggaagtggtgaagccactcaagggggagaaggtacctgcttaactaaaaggggttccaacactcttggcaagggacttttgcactactactggcttcttattatctgattgctaaaattttctctatgtttccttccctcttactcaattctgtttttttttttctgtatttttttatgaatttcccccttttttttgtgtacttgtatgtgttctttcagaacatatatattttatatgatgaaacaaaaaaaaatgttctctcaagatttatgctagaaatatgtaataatctcaaattatagagagtatacaattttactatgtgaattgcagtactttcacggaattcatttgtagtctaggtttactgggaaaactgggaaaacatgactagtatcattttgcgttgcaaaacaataaaatgcacactatatacagtaatctaactgaatttactatgtgaattgcagtacttctactgaattcacatagtaaattgtatactcccttcaaattgtgtaatctaggttttactaggaaaaaatgactatcatgcacactattatagagagtatacaattttaccaccatgaagattttacaatttaaaatctagctttttatagtgcattttacctcaaataacacccagac

SEQ ID NO: 117319 - DNA, 149 bp, Glycine max
  Clone ID: PAT_MRT3847_7694C.1
aggacacatcagtgcacctgaagtcaacagacacaagtggggctactcccaaagggttgttgcttcatttttcattctaaaacttgtactgagaaacagaaccatcaattttctctgccttctcattgtgcaataaaattcttaccttg

SEQ ID NO: 117320 - DNA, 3226 bp, Glycine max
  Clone ID: PAT_MRT3847_76950C.1
ggctcgaggcagacttaacaacagcacaaagcgggttactgtctgttcaagctaccatctctctctctctttcttagtgcctccttgccagaagttaaaatggcccaagaaactttcctattcacatctgaatcagtgaacgaggggcaccctgacaagctctgtgaccagatctccgatgctgtgctcgatgcatgcttggagcaggaccctgacagcaaggttgcctgtgaaacctgcaccaagaccaacatggtgatggttttcggagagatcacaaccaaggccaacgtggactatgagaagattgtgcgtgacacatgcaggaacattggttttgtctctgatgatgttggtcttgatgctgacaactgcaaggtcctcgtcaacattgagcaacagagtcctgatattgctcaaggtgtgcacggccacctcacaaagaggcctgaggagattggtgctggtgaccaaggtcatatgttcggctatgccactgacgagactcccgagctcatgcccttgagccatgtccttgccacgaagctcggtgccaagctcaccgaggttcggaagaacgggacatgcccttggctgagacctgatggcaagacccaagtcactgttgagtactacgatgacaagggtgccatggttccaatccgcgtccacactgtgctcatctccacacagcatgatgagactgtcacaaatgatgagattgcagctgatcttaaagaacacgtgattaagcctgtgattcctgagaagtaccttgatgagaagaccattttccatttgaacccttctggcaggtttgtcattggagggccgcatggcgatgctggtctcaccggccgcaagatcatcatcgacacctatggaggatggggtgcacatggtggtggtgccttctctgggaaggatcctaccaaggttgataggagtggtgcctacattgtgaggcaagctgcaaagagcattgttgcaaatggacttgctaggagggcaattgtgcaagtttcctatgccattggtgtgcctgagcccttgtctgtgtttgttgacacttatggcactgggaagatccctgacaaggaaatcctcagcattgtgaaggagagttttgacttcaggcctggcatgatctccatcaaccttgatctcaagaggggtggaaatggcaggttcttgaagactgctgcatatggacactttggcagagatgaccctgacttcacatgggaagtggtgaagccactcaagggggagaaggtacctgcttaactaaaaggggttccaacactcttggcaagggacttttgcactactactggcttcttattatctgattgctaaaattttctctatgtttccttccctcttactcaattctgttttttttttttctgtatttttttatgaatttcccccttttttttgtgtacttgtatgtgttctttcagaacatatatattttatatgatgaaacaaaaaaaaatgttctctcaagatttatgctagaaaattgtatactctctataatttgagattattacatatttctagcataaatcttgagagaacattttttttgtttcatcatataaaatatatatgttctgaaagaacacatacaagtacacaaaaaaaagggggaaattcataaaaaaatacagaaaaaaaaaaacagaattgagtaagagggaaggaaacatagagaaaattttagcaatcagataataagaagccagtagtagtgcaaaagtcccttgccaagagtgttggaaccccttttagttaagcaggtaccttctcccccttgagtggcttcaccacttcccatgtgaagtcagggtcatctctgccaaagtgtccatatgcagcagtcttcaagaacctgccatttccacccctcttgagatcaaggttgatggagatcatgccaggcctgaagtcaaaactctccttcacaatgctgaggatttccttgtcagggatcttcccagtgccataagtgtcaacaaacacagacaagggctcaggcacaccaatggcataggaaacttgcacaattgccctcctagcaagtccatttgcaacaatgctctttgcagcttgcctcacaatgtaggcaccactcctatcaaccttggtaggatccttcccagagaaggcaccaccaccatgtgcaccccatcctccataggtgtcgatgatgatcttgcggccggtgagaccagcatcgccatgcggccctccaatgacaaacctgccagaagggttcaaatggaaaatggtcttctcatcaaggtacttctcaggaatcacaggcttaatcacgtgttctttaagatcagctgcaatctcatcatttgtgacagtctcatcatgctgtgtggagatgagcacagtgtggacgcggattggaaccatggcacccttgtcattgtagtactcaacagtgacttgggtcttgccatcaggtctcagccaagggcatgtcccgttcttccgaacctcggtgagcttggcaccgagcttcgtggcaaggacatggctcaagggcatgagctcgggagtctcgtcagtggcatagccgaacatatgaccttggtcaccagcaccaatctcctcaggcctctttgtgaggtggccgtgcacaccttgagcaatatcaggactctgttgctcaatgttgacgaggaccttgcagttgtcagcatcaagaccaacatcatcagagacaaaaccaatgttcctgcatgtgtcacgcacaatcttctcatagtccacgttggccttggttgtgatctctccgaaaaccatcaccatgttggtcttggtgcaggtttcacaggcaaccttgctgtcagggtcctgctccaagcatgcatcgagcacagcatcggagatctggtcacagagcttgtcagggtgcccctcgttcactgattcagatgtgaataggaaagtttcttgggccattttaacttccagaagcacaaaatccaaacttgaacacttcagatctgtggcgagggtaaaaaatgacaacacgtgcacaacagaaaacaacactccacaaccaacccaacagaaggatgaagagagagaaagagagagtggcagcacctggcaaggaggcactaagaaagagagagagagatggtagcttgaacagacagtaacccgctttgtgctgttgttaagtctgcctcgagcc

SEQ ID NO: 117321 - DNA, 385 bp, Glycine max
  unsure (1)..(385): unsure at all n locations
  Clone ID: PAT_MRT3847_76951C.1
cttaaaattcgaatcgagctccagcccctctttattttctattttaccgactctcccaaanaattctacatggatattttcgaacgggcgatagcatttaaacttacacaatntttcaattatttcttcctcaaaaatttatacttttctatttatcccctcccttccacattcatattcataccatccaccattaataataaaaattcttacactaataaaccatccatttatacctatatacttcttcataaactactttaatcccttcacccaaaatttaattaacnttatattattaaaaatttttaaaattttaactacttacatatttcatctcataaacccataaaattttaaaattnatctcttttttttttactta

SEQ ID NO: 117322 - DNA, 302 bp, Glycine max
  Clone ID: PAT_MRT3847_76952C.1
acctggccatgtttttgaccagcttgtgtccattgggaaattaattactgattttcaggaggttgtggatgttcccaatgggagttccgcgatggatggtgaggaggggcttgatgatgatgttggtgttgctgttgagtttgaggagaatgaggatgatgatgaggagagtgatttggatattgtgcaggatgaggaggaagatgatgaggatgtcgcggagccaaatggttccggggctatgcagatgggtggtgttggaggaggaattggtggtggtggtggtgcttttgtaggcattt

SEQ ID NO: 117323 - DNA, 457 bp, Glycine max
  Clone ID: PAT_MRT3847_76953C.1
ggtggaagcaacaaactttattttacacaacgatatatcatatacaggggccatgagttaacctatatggggttcgaaatatgaaagcacctgctgaaacatctccagcattagctctctatttgtttgctggaaaaaataataaggttgatgttgaatatcagtgtcttttaccaacctgaagtattgaccaccaaacaccgtgtttttaacttgtgcgatagataaagccagacctcatttagtatttaaagaacattggctgcggtgtgatttaagaggaggctattcttacagaagtttatgagacgtcgcatgtgatattaattagcagttccaagcattgtaggccggtgttttcaggaaaaaaattggttgagtgttctatacaagtaacttataagagcccggcctgatctcatgttgcatgttttttattttgaacgtggcggatttt

SEQ ID NO: 117324 - DNA, 203 bp, Glycine max
  Clone ID: PAT_MRT3847_76954C.1
ctgagatgatgccccctgagcaagaaacaactattggaaccaacatttcaagcattacaacccgaccaggaacccggttggtccaacatggattaaaagggtcaaacacttaccaaatgaaaccaaggttaaaattggatgattatgggatttcttcggagaaacagacttaggcaacaacaccaccaccaccattaagaatt

SEQ ID NO: 117325 - DNA, 656 bp, Glycine max
  Clone ID: PAT_MRT3847_76955C.1
agagacgacagaagggttcccaaatcttgtgcaactgcatctgtacaactccaggttgactaatgatgtattgaaatcactaaacaattgccaaggttgttgttcctcgatttaagtagcaatgcttatgaaggtgaaactttgcattttcaatgtggagggtttcagaaactaaagcaactgtacctcggatctttggatcaattgaagtgaatccgtatcgacagaggagcactgtgttctgtggaaaaaattcttttacaaaacctctcctaactcaaaacagtaccctctggaattcaacacttggagaagcttaaagatctctatatcgaacatgccaactgaatttgagcagcgcatttgatctggattgtgcccatgtacgtagatgctactacatgccaactgaattggtgcagcgcattgctcctgatggaggagaagacccctggatcatccaagatgtgccccatgtacgtatttggagcaggggtgctgaagaaccttcgcatatattcggcagaagtcatcattaagatgggtccaaatttgaaaatagaaggggggtctttttcacatctataactttgtagaatgacattcgtggcctttttttttttttcaataaaaaatgcacccattatttaattcct

SEQ ID NO: 117326 - DNA, 233 bp, Glycine max
  Clone ID: PAT_MRT3847_76956C.1
gaatgggcgttccaccagtgagggcagatcagaaacgggctacttatcgcagcactctttgctgggcagcacaccagctctatcacctcaacctggactggagcatacatgcttcggttcaagcagtacttcacagaggctgtcgaggagcagcaggatgtcatgacacggcacggcgacaagattgatcatgacatcctcgcggagatggacgtcctctaccggtgcatcaa

SEQ ID NO: 117327 - DNA, 461 bp, Glycine max
  Clone ID: PAT_MRT3847_76957C.1
tccagttctctcttttccccatcacttcctatctgaggcaaaagaaagacactaaaaaaattatccacagcatcaaagttggaatctcccttgtattgatttcactcctgtacttcgtggatcctctctatgagcaagttggagataatgctatatgggctatcatgactgttgttgtcacttttgaattttctgcgggtatagagctacgctaggaaaaggtttaaatcgcggaatgggaaccatattaggaggtggactgggttgcatagccgcagttttggctcaaaacgttggcggaggaattggcaactcgattataattggtacttctgtatttatctttggaacaattgcgacatattgtcgcctattccctagtgtgaagaagagatacgattacggagtgatgatctttatcctcacttttaatttggttggggtgtctggtgtgcgcattc

SEQ ID NO: 117328 - DNA, 618 bp, Glycine max
  Clone ID: PAT_MRT3847_76958C.1
ctatcttctatttacgtactgctagtactatatcctgttttcatgttttttaagtagcagcattcaattggaacttcagtaaattacatcctcgattacaattatggcttatccttgttgtgtttaattagtataaaaggaacttgtgttactttattttttttcttccagattccaccttctttcagaatttgacaatgggaaacggagctgcaggaagagactggcagatcataatcgtcgcagaagaaaaactcagcagattgctcaagaaattcacaaatctcagcattctttggacaatgttgcaaggtccttacctgaatctggagctcaatcttcgtcgtcgtcggggaaggtggcagtacgtgtcaccccctgattatttccagcaacaaagaccaaaccaaaatagaggctcttcgtcatcaacaacatcgatatcagggtcattgtttttctcaggtggttagtgcatgtgggaccaatttgcatgcctaatagtaccccatgccattaattaatggaggagaataacaataatgtactgaatatctcttgtaacttccttctccatttaatttagaagctttaataatattcttgaatcactgattt

SEQ ID NO: 117329 - DNA, 502 bp, Glycine max
  Clone ID: PAT_MRT3847_76959C.1
ggataatagctttgggcctatctaatagcacacaataataaggaagatccccatgctccgatgataatggcctttagaaaggtccctggactcccgaagaagatcataaactagtccaacccattcaaaaacatggccctggaagtaggagagccctccctaagatagctggtctcaataaatgtggaataagatgtgggctaagggggactaactatttaaggcctgatatcaagaaggggaagttttttcaagaagaggagcaaacaatgttgcatctccattccatccttggaaacaaaagggcggcaatagcatcccaccttccatgcaggacagatcatgagatataaaatttctggaacactcccttcatgaaaaagctgatttcagatgggctttgattcaatgactcaccagcctacaactgaccttgtgtgcaccttgactcatttggtagctttgggcaacattacagacctcatgggccattttacattgg

SEQ ID NO: 117330 - DNA, 266 bp, Glycine max
  Clone ID: PAT_MRT3847_7695C.1
ctaaccttacaacgaattaccatgtatgagcctttcattttacatgagtgactaagaaagtagcaatcatttgagaaccagatctggctacaaaaggagtaatataaaaggtaaaaaaaaaacaatattaagaaaaccagaaccagaccaagaacttaaaaatatagacaaaggaaacaaaaaggaaaaccaggagaacacactagcggaatctaccaaaacgaaaatcgcaggacaatgtaagaccctgaaaccctaaccccaaa

SEQ ID NO: 117331 - DNA, 468 bp, Glycine max
  unsure (1)..(468): unsure at all n locations
  Clone ID: PAT_MRT3847_76960C.1
cnagccgttcattttgtttttgtttaccaactttcacacgcaaacccagaaaaaaggttctctctttattttgggaaaaaacaaccccatccccaagcatttgacacaagtgacagctttttaaaaaatgggctcttccacatgtaatataaaaataaccagggtccggctctatacttggaaaaacccggatgagcttacggcgcaaaattttctggagcaatctggtttattaaccccccatacttctttatagacacccgtatccctatgtaaagacagccccttttttactgacaatgaaagattccacacactaagaacgcttgcccacccttggtttctaaagatgctgggttcctgcggacttatttaacctcggcccctaaaaaagatttgcccctgagtgaaagatccacctgggtggaaatttgggacctccaagaattgaaaaccctggcacctttt

SEQ ID NO: 117332 - DNA, 249 bp, Glycine max
  Clone ID: PAT_MRT3847_76961C.1
agcggtaatgtgggagaatactgataggagcttgcaggaggcttttcaagacttgcatgctctcatgcacaaggctctagaggttgagaagctagcgcagataatgacgctaaaacctttgtgtggctcaattctcaaaggagtgcgactaatgatgaggagatgggttcgtaggcagatatgcgagattgggtagtcagtgatcgtattatgtcccctgttacgaaagagtctgcgggtgctttgtat

SEQ ID NO: 117333 - DNA, 134 bp, Glycine max
  Clone ID: PAT_MRT3847_76962C.1
cggctcgagcaaacatgggtgcatccagactcaatcaattgaagcatttcatcgaacagtgcagatccaacccttggctcctctccgatccttcactctccttgcttccgggactatctcggaagtctcggggg

SEQ ID NO: 117334 - DNA, 564 bp, Glycine max
  Clone ID: PAT_MRT3847_76963C.1
cccacgcgtccgtacggctgcgagaagacgacagaaggggccaaatttggagcaggcacgctataattttgttcatgtgtgttgcattggtttcatggctcttttgacaaatatcttaccatatatctatgactttattttttttggtatacttgttgtttagagggcctttttgcatcccaaaaaggtggacgcttgtgttatatgatgtaatgaattgcaggatttgttttatgcagcttctatagatgccaatttgatccagtacgtggaggggagatgactcagctggaacatcgcaactttttaaagccagaaccagaaacagccttgtaagacgcggatgagaagaaatccttagcgcttgcgtttctctgcttagttaggcttatgtaaatatgcatactgaagtaacactgaccccattattagtaactcaagggttcgaccatcgttgcttccattgtaaatatttgtgattatagtagttttctatttttttaatagtaaagtattgagagctttggtaaaatctgcacatctcctaaagaagagaaaaagagt

SEQ ID NO: 117335 - DNA, 204 bp, Glycine max
  Clone ID: PAT_MRT3847_76964C.1
ctgaagccaaatttgctagagcgattaaggagggccacgttctattaatagatgttgaatggggcgcgccagtgattgtatttacaccatgtagtctcaagactgagaattgggcaatcgcgcttgcacaaaaacgagcactatatcagtcaatactaacccctgtattggtgcaaacgatttggaatttatgcagcactctgg

SEQ ID NO: 117336 - DNA, 1110 bp, Glycine max
  Clone ID: PAT_MRT3847_76965C.1
aatccttactaatcctgaaaagtaaaaaaaacagtgataattttgctttgcgtgcttagcgggagagcgaagctgaagagaatattttcgttttcgaaatccaccgatctctctcattcttcaatggccaccctctccgcatgcgcttctcctccatggccaaaccctaattctcccaattcaaatccaaaccctaatttcctccccgaccaatctcaaaccctcgacttcgactccctcatgcctccgcaacccgaatccccaccgcccaaccatcaccactcccccgacgcctctccaccggaatcctccccgtcgccgccgcctccgtcgatcctctacctctccttcaaccaggaccaggcctgcttcgccgccgccgccgacaacggcttccgcatctacaactgcgaccccttccgcgagctcttccggcgcgagttcgacggcggcgggatcggccacgtggagatgctcttccgctgcaacatcttcgccctcgtcggcggcgggcctaaccctcagtacccgcccaacaaggtcatgatctgggacgaccaccagggccgctgcatcggcgagctctcattccgcgccgccgtgcgcggtgtccgcctccgccgcgaccgcatcatcgtcgtcgtcgaacagaagatcttcgtctacaacttcgcggacctcaagctcgtgcagcagattgagaccgttccaaaccctaaggggctctgcgcggtttcgcagctgtccgattctctcgttctcgcgtgccccggtttgcacaagggtcagattcgcgtggagcactacgcgcagaagaagaccaagttcatctcagcgcatgattccagaatcgcttgcttcgctctcacgcttgatggacagttaatcgccaccgccagcaccaagggtacgctgattcggatttttgacactgatcatggcacgcttcttcaggaagtgagaagaggtgcgaatgctgctgagatctatagtttggcattctcttctactgctcagtggctagcagtctcaagtgacaagggtactgtccatgtattcagcctcaagggtaattctagcatccccgagcaggaaaagtcacaaagttca

SEQ ID NO: 117337 - DNA, 1860 bp, Glycine max
  unsure (1)..(1860): unsure at all n locations
  Clone ID: PAT_MRT3847_76966C.1
gcttgttcatgtgtgttgcattggtttcatggctcttttgacaaatatcttaccatatatctatgactttattttttttggtagacttgttgtttagagggcctttttgcatcccaaaaggtggacgcttgtgttatatgatgttgtgaattgctgttgatttgttttatcaacagtgagtgatatttttgctttgcgtgcttagcgggagagggaagctgaagagaatattttcgttttcgaaatccaccgatctctctcattcttcaatggccaccctttccgcatgcgcttcccctccatggcccaaccctcattcacccaattctactccaggcccaaacctcctccctcccaattcaaatccccaccaccttcgcttccccatgcatcctcaaaccctatctctacccccccgcccgcctccctccaccccaacttccaccgcgcaaccatttcctcccccccgtcgcctgtccctcgtaaccctccccatccccgccgcccaagccggtcctgtacttcgcctacaaccaggcccgggccttcgtcgcgccctcctcccgctcgggcttctacggcgtcaacttccaccccgaccgagtcgtcttctgcctcgcctactacaccgtcgtctactacctcgccgagatggacgtcctgtaccacatccacccccttgcaagccctgggggtctctccaacccctcgcacgttacagccaccagcttgcacgtcgaccccggggttcgcaaaggcggacgccaaggctaccccctacgcctcgtcatcgaccaagatatctctgtctactgcttcgcggacctcaagctcgtgcaccagattgagaccgttccaaaccctcgtgggccatgttcagactcccagaagtccgatactgtcgtctcgcgggtgcgcacttgtccgattctctcgttctcgcgatgccccgggttgcacaagggacagattgccttgcagcactacgcgcagaagaagaccaagttcatctcagcgcatgaggccagattcgcttgctccgctctcacgcttgatggacagttaatcgccaccgccagcaccaagggtacgctgattcggattttcgacaccgatcacggcacgcttcttcaggaagtgagaaggggtgcgaatactgctgagatttgtagtttggcattctcttctactgctcagtggctagcggtctcaagtgacaagggtactgtccatgtattcagccttaaggttaattctagcatccccgagcaggaaaagtcacaaagttcatccaattcagatgctgccattaccccatctagctcttctcgctccttcattaaattgaaaggggtgttgcccaagtacttcaattctgagtggtcagttgctcagtttcacttacaagagggctctcattacacagttgcatttggtctccaaaagaatacagtcattattcttggtatggatggaagcttctatagatgccaatttgatccagtacatggaggggagatgactcagctggaatatcataactttttaaagccagaaccagaaacagccttgtgagacgcgatgagaagaaatcctgagcgcttgacatttcagcttagttaggttatgcagatatgtatactgaagtaacactgacctcattttattattattactaactcagggtcgacctcgttgcttcttccattgtaatatttgtaattatatagttttctaatttttttaataataaatattgagagctttgctaaaatctgcaatctcctaaaaannnnnnnnnnnnnnnnnnnnnnnnnnnnnnnnnnnnnnnnnnnnnnnnnnnnnnnnnnnnnnnnnnnn

SEQ ID NO: 117338 - DNA, 296 bp, Glycine max
  Clone ID: PAT_MRT3847_76967C.1
tcgtgggtaagccttttttaattttttttgacagaaaacagacattaactagatagcttccttcacctaacaaaccagccgttaatatagaatatataataatggaccgggcggggaatgacagaacggaagcaagccggacaaagaaggctttttttaatggggggggtaacaatactaacaactattcttccaaaaaaaaataaaacagaggggggtatagggagagcatcacacactacactgcgctgcgctactttacaattaggggggcgttcctaacctgactaaagaag

SEQ ID NO: 117339 - DNA, 248 bp, Glycine max
  Clone ID: PAT_MRT3847_76968C.1
gcggtaaagactaaagagagttgtggcgtggtggtggctgtcgctattgaaatggcagcgtcgtggtcagagaagcatgtgatggtgataggcatatacgactgtgagcagagcacgtacgcgttgaattgtgctgtggataactttattccgagcccaatttgtaagctcgttcttatgcactccaggcccacctccacctacactgtgagcttctcctgccctgagaggtttattctgttacgctc

SEQ ID NO: 117340 - DNA, 2114 bp, Glycine max
  Clone ID: PAT_MRT3847_76969C.1
tgcaattgcaatggcagttaagcaattaaatgaaagttttaaatctaagcatgtagagaacatgcaagcaagcaagcatgttactcaagcagatcaagcaaggccagataccccggttaccgagattgaagttctgccaaaagacatcatgcttgatcaaatatctgaatgttcatcatatgggataagtaggaggagagaaattcttgaggctgatgatcagatgcttgagttgtgggagacagcagataaggatgccgcaattggcaagcaagctgaaaagacacagaagatggttgctgaagctgctggcaatcatcaaagaggagcaaccatggaactcagaaataaatatccttcaacagattccttggtggaaaaagagttgagtgtggacaagttagaggtctcaagaagattgacactaccacgcgaagaagggaaccaaagcaagattttagaaagacttgattctgatgcacagaagttgacaaacctccaaatcaccatacaagatttgatgaagaaagtagagataaatgagaagagcacaaaaggaaaaagtgttgagtttggtgaggtgaaagggcagcttgaagcagctcaggagaacatcacaaagttgtttgacgccaaccgcaagttgatgatgaatatggaagaaggtaccttgtcttctgttgggaaggatgcagcagagtcaggtgaaagtggaagtgtcagcagaaggagagtttcagaacaggcacgtagagaatcagaaaaaataggacaactgcatttggaggtgcaaagactgcagtttttactgctgaaactaggtgatggaaaagaaatcaaagagaaaacaaaaatgactgatcgaagtccacgagtgcttttgcgagattatatctatggtgggatgagaaccaacaaccaaaagaagaagaaaaagctacccttttgtgcatgtgtgcgacctcccaccaagggagattgattgttaccatatagtttgaagtaagtgagacattagctttcttgtttgtaaaattttgtttctaaggatgcttcaagaccctacatattttgatcatgctatacatgttgtgcctcatttactcgtaagaagaggccaaggctaggatgaatttttgccatttttttcctgtaatatttagttctgaataatcaccttttttctatctggtttactggagtaatgacggcttagtgttttggaaccaaaagctgaagaatcatctacctttttgttctaaagcccaagcgcccacaaggggacattggttgttgccgtagaggtgaaagtgagccttccggttggtcagcttgtctgtcaaaaggtgctttgacacccgccgcaagttgatcaagctttacataatgcgtaacttgtagtccgttggtgacgcggaagaagaggttggggtttttgaaattatcagacaggatgagaggaacaaagcgaacattcataggaatgggtaaaaagaagaacaattttatttggggttgggaagaaggtactttttcttccggaaacaaggacaaagaaaagcaagcttgacgagcacgggaaagcgagaaagaaggtggcagatcgtactccgagatgagttagaaagaaggaagacaactaaagttaaacttgaaaagactgcactatggacagcttcatgagtgcgacctcgctccaggggaaaaagaaggttgccacttactttgaaggaaacggaacgtaaggatgacttgattgacaatttatgttgatacacacacgtcaagacccctcccaatcaccacacacgatccaaggagcgccccacaaattagtgagatgagaccaatgcctaggaggaaattgctttgccgacgggcaaggtcggcgtcctccagctcagggacacggccacgaagtcgtggggcgccaaacccgatttttggaaggttggggacgacggtgccgggtcccccgctgggcaagctgcctcacaagtcgctggagttggctgcgccccctcctcggagaggttcagccccggcacccaaaaataggtatccttcaacagattccttggtggaaaaagagttgagtgtggacaagttagagg

SEQ ID NO: 117341 - DNA, 513 bp, Glycine max
  unsure (1)..(513): unsure at all n locations
  Clone ID: PAT_MRT3847_7696C.1
ggaactaaagaatggaatatggggaccaacaggggggaaaaaaacaaattgggccaaaagaaaagtttttttaatcaaaagcatggaatttaacgggacccaggactcctttaaaattggaaaaaataaaggggccgggggagaccggcccaaagaaaaacaaacatcacaggatacccctaaaaagcccaaaaagggggcacatttttctagccctaggacaaaatttaaggaccccccaaaataaaataagactccaaacaaggggaaaaccctaattaaaacaaactactagccccccctaaaaaaaaaaattaacaggaaacgggagctctaaggggtcccatcactgaaaacgggggggaaaggacccgccagggggggggagggcattgggggggggggaaagaaacccaaaaaaggatgttggggttgggggggggggggccttccaaacatcagggggggggggaacaggttcatgttcgcttgcgggggnggctgggggggggg

SEQ ID NO: 117342 - DNA, 705 bp, Glycine max
  Clone ID: PAT_MRT3847_76970C.1
cggctcgagatcgacgtcgcgcaatcgctccatctcggcgcgttttgctgagtgcgactgcaagacatgtacaagcaagcgacgcagaagacgggcgaggtgctgtccatgccgtcgcagtggctgggcatgtactcggacttcatcaccaagaacagcagcgccgtgacgcagatagagtctgcgctgcggtcactgacatacatcatccccggccgcttccgagagtctgaagtcgcatccgaatctatacacagcggcgttcaagtgctctccctataccatgattcgctcctttcaaaagccatggcacagatgcccggaacgcgacggcagcccctcaccccacatcatcgctataccaagttctggacgcagaactcgcccacatacaagcgcatcgcgctggtgctccagatgatccaatatacagagctgctatgggagatggcggcgaagcgcaagggcgagaaggtgcgatggcgcgtcgtggtgttgttggagattgtcaaagcagtatgtatgttgctgctgcttcggttgaccaactcgcgcccactcctgtcgccggcactcccacaacgagagattgacccaagctcactcgaggagtcgtctgcatcggctgacgggatggacacaccaccgagcgagcgttcggtcgaggcatagaactgggccttgcctaggactgggctgtccatg

SEQ ID NO: 117343 - DNA, 316 bp, Glycine max
  Clone ID: PAT_MRT3847_76971C.1
aaccccagctacatcaatcactctgtcaggttatgtgctcgaacaaactgtgggggcctcattctctaccttacttatattgccctcaatggacactgctgtgagagagaggggctccatcgccgaaaagcctgaaagcagctcaaacctaaggatgggggcatgcttggaagcagttgcagctgccgcagccatatcaaacccggcagcgatggctttggtcgaagagagacgcaccactaaatgaactgaggtatcctttgagcgtagcaacaaccttcttggatggatcctgtgtggagagtatgagagcata

SEQ ID NO: 117344 - DNA, 224 bp, Glycine max
  Clone ID: PAT_MRT3847_76972C.1
ttaactctcatattcttcaggagtccactaggtacaagattaatgaaaaccccaaagcaagttgggatgctgctataaattcctcgtttcttcaatatacagttgaacaattcaagcgccttcttggagtgaaaccaacgcctaagaaggaactcttaagttcacctgctatatctaacccaaagacgttgcaaattgcacaagagaatttttgatggcgagga

SEQ ID NO: 117345 - DNA, 1011 bp, Glycine max
  Clone ID: PAT_MRT3847_76973C.1
cattccgagccgggataagaaaaacatgtctgagatatcgaactccaaagccaccgtggtggaagattgtcgtggcgttcttcatgtctataacgacggttccatagtacgttcttcacgtccaagcttcaacgtacctataaacgacgatggcaccgttttgtggaaagatgtcgtttttgacactgcacttgatcttcagcttcggctctataagccagccgacgactcagccggatccaagcttcccattttcatttatatccacggtggcggcttttgcatcggctcgcgcacttggcctaactgtcaaaactattgtttccagcttacttctcggcttcgagccgtagttgttgccccagattatcggcttgctccggagaatcgactccccgatgcgatcgaggatggctttgaggctcttaagtggcttcaaactcaagccgtgagtgatgagccagacccgtggctcagccacgtggctgattttagccatgtgtacatttcgggtgactcagctggagggaacatagctcatcacttagcggctcggcttgggtttgggtctcccgagttggatccggttcgggttaggggttatgttctattggcccctttctttggtggaactatccgaaccaagtcagaagctgaaggaccaaaagatgtttttctcaatttagaacttattgataggttttggaggctttctatacccattggggagactactgatcaccctcttgtgctgccttttgggccttagagccagcgccttgaagtaattgatttcgacccaattctagtggtggctggagggagttgacttgcttaaagatagggccagaaggattatgcaaaaaggcttaaggaattggggttaataaagatatagaattatgttataaatttgaaaggacaacaacatggtttccttccactatttatcccaactccagaaaccatccaaacaatttgaatgctgatcatccaaacaattccataaaa

SEQ ID NO: 117346 - DNA, 739 bp, Glycine max
  Clone ID: PAT_MRT3847_76974C.1
gaacaagaagaatatacttaaataaactaattgctaccaataaatgaaatagtgaataataatcatctacatgtcagcatcctattttttttttaaaagaattaaaataaaatagtataaatatataggctaaacaagttcactggtgtgcttcctgaaaggctatcttggaatatttcaaggtttgagataagttacaaccagttttctggtggaattccaagtggagtgtcatcatggactaatttggtagtgtttgatgcaagtaagaacaattttaatggaagtattccacgacagctaacagctcttcctaagttaacaaccttgttgcttgatcagaaccaactcactggggagcttccatcagatataatatcatggaaatccttagtagctctaaatttgagccaaaaccaactctatggacaaatccctcatgcaattggtcagttacctgcccttagtcaacttgatctatcagaaaatgaattctctggtcaagttccttctctaccccctagactcaccaatctcaatttgtcttctaaccatttgaccgggaggattccaagtgaatttgaaaattctgtgtttgctagtagctttttgggcaattctggtctttgtgctgataccccagcactgaaccttaccttatgtaattctggccttcaaagaaaaattaaaggctcatcttggtctgttggtttggttataagtttggtgatagtagcct

SEQ ID NO: 117347 - DNA, 1703 bp, Glycine max
  Clone ID: PAT_MRT3847_76975C.1
cgctgctagagaaatttggcgccgcaattgtcatgacccaaaattatatttttctatcgagtaacctttacaaccttgtgtcgtcaaccaccctccaccgcatcgtcgaacacccgtatgtcgtcgtcgtctcaccaccacagcgcctcgcattagagcaccgggccgtcggagcaggttttaaggttcaacccaaccaagtgtggtgtgaggaagaggtaaaaagtaacaaagaggtgaaagagaaaggaagagatgtctaggacgctagtgcagccaataggacagaagaggctaacaaatgtggcagtggtgcgtctgaagaaacatggcatgcgcttcgaaatcgcttgctaccctaacaccgtcctctcttggcgttctggcgtggaaaaggacccggatgaagtgctgcagtcccacactgtttataccaatgtttccaaaggggttcttgccaagtccaaggatttaatttcagcttttggcaccgatgaccactccaaaatttgcttagatattttaaagaaaggggagcttcaggtagctgggaaagagagggaatcattgttatcgagtcagttcagggatattgcgaccattgtgatgcacaagacttacaatcctgagactcagcgtccatacactatcagtatgattgaacgcctcatgcgggaaatccattttgctgttgatccacacagcacctccaagaagcaggctctggagttaattcaagagcttcagaagcacttccctataaaacggtgtccgttgagaatacgtgctactgctcctgatgaccaagtgcctgaacttttaggaaagctgaatgaatggaatgctattgttatttctaaagaaggatcttctgctcaggaatccgttatttttgaattggaacctggcctatataaggattgtcatgactttgttatgaataagatgcatggaagatttgaagttcttgcacactctctttatgtggagggggatacccaagtggagcaatacaatgattatgaggatatacctgaagccttgcccaaagaaccttatgattctgtgcttaaactgaatgagaaacttcaaaagcaaacaatttcatctactagtaggcctaccgagggacaacaaaagcaaaacaagtgcagcacatgtaatgtttcttttgatgacactaagctgtacagggaacatcacaagagtgaatggcacaaacacaatatcaagcgtaagacaaggcaactcccaccacttactgaggaagagtgcatggctgacatggaattgggtgattcaaaatctgatttgaaggattattcattttaagatgatgataagtgtgttggtgtaatcacattattgtagtcttgtgtgtatacttggtcaattttgtcagcataatctgggttatggtataaactattcacatggaaatcctcaagtatggtgtaatacaaattgcaaagactaatgcatttcgattttctttgtctgagtaatttaatgtaccaagtgcacctaaagatggttatatgcaggtttgcttcatcgagtggttgctgtttaaggaaatgaagcagattgtctactgtactgtttcttatcatggttggccggtctgatgctccttgctaatatttggcatgagtgatgaattgaatttttagcgcactaagtattcgcctacaggctaatct

SEQ ID NO: 117348 - DNA, 379 bp, Glycine max
  Clone ID: PAT_MRT3847_76976C.1
gtactccatgaacaaggacgcacttataactttgactggagggttcttaagaattattgctgttgaaaccataacagacgcgctggttacaattgttttttggggaagagaacttcccaattacacaaactgatctgcttctgctgcgctctacattcaaagagtatggaggcgcttgagggttacaaagatgatttccctgcagcttaagacatattgggagacccttgagaatgataatgaaggggagaccactgcaaaacggatttcattcaattcgaagagaccatatctgtgctttatcacccgtaacttgactcacccaaaaacggtccacagtgtagagactccattttatgaggctttgctttaaattcta

SEQ ID NO: 117349 - DNA, 538 bp, Glycine max
  Clone ID: PAT_MRT3847_76977C.1
gtgcttcaattgaataagaaacttcaaaagcaaacaatttcatctactagtaggcctaccgagggacaacaaaagcaaaacaagtgcagcacatgtaatgtttctttcgatgactctaagctgtacagggaacatcacaagagtgaatggcacaaacacaatatcaagcgtaagacaaggcaactcccaccacttactgaggaagagtgcatggcagacatggaattgggtgattcaaaatctgatttgaaggattattcattttaagatgatgataagtgagttggtgtaatcactttattgaagtcttgtgtgtatacttgggtcaattttgtcagcataatctgtgttatggtataaactattcacatggaaatccttaagtatggtgcaatacaaattgcaaagactaatgcatttcaattttctttgtctgagtaaaataatgtaccaagtaagtgcaactaaagatggttgtatgcaggaggtttgcttcatcgagcggttgctgtttaaggaaatgaagcagattgtctac

SEQ ID NO: 117350 - DNA, 409 bp, Glycine max
  Clone ID: PAT_MRT3847_76978C.1
gggcgccgcaattgtcatgacccaaaattatatggttctatcgagtaacctttacaaccttgtgtcgtcaaccaccctccaccgcatcgtcgaacacccgtatgtcgtcgtcgtctcaccaccacagcgcctcgcattagagcaccgggccgtcggagcaggttttaaggctcttaatcatgttgagatttattttctcgaggaagtcgcaccactttgctgttgcaattacattgcaatttccactgttgacaaaataaagtacccacaatcagctaaacaggaaaaactcaattttaacactacttgttgtatcttcaggttcaacccaaccaagtgtggtgtgaggaagaggtaaaaagtaacatagaggtgaaagagaaaggaagagatgtctaggacgctagtg

SEQ ID NO: 117351 - DNA, 2293 bp, Glycine max
  Clone ID: PAT_MRT3847_76979C.1
cttgtatatggctagagagacggtggattctgaaattccatgtgtgtccattgatgatgctcgtctttgcaaaccgggaacacttgatcctaccaaagtaaaaggaaaaatactatgtctgccttctgaggtaataaagttaacttcagctcagtgagggttaacggggtaaacttgctggctctgtggcagttctagtgcaaaatgatgacccaagtgataatttacttctggccgagcaccatgtattacacgctgcaagtataagtgcaacgggaagtcataattttaaaaactgtacaggcaacaatggcaataacaacgagattttaacttacttgaatgctgcagaaacaatatataggagtaaaaccagcttcaatcataagcaggattctcatccagtggtcccagttccgtgcaaccattgatacaaaagccagacataactgctcctggtgtgaacgtaattgctgcttttacacaaggagctggtaccgtttcaatattccatcggatagacgtcgatctcttttcaatgtggcaacagggaacttcgatgtcttgatttcatgtcgctggcattgcaggtcttctcaaaacatttcatcttacttggagtccatcagctatcaaatcagctattatgaccacagctacaacactagataacaccaatcaaccgattcgcaatgcatttcataaggtagcaactccattcgaatatggtgccggacacattcagcctaaccttgcaattgaccctggactcgtttacgatttacgcaccaccgattacttgaacttcttatgtgcttctggttacaaccaagctttactcaacttatttgccaaattgaaattcccatacacttgtcccaagtcttacagaattgaagatttcaactatccttcaattacggtgcgtcatcctgggtcaaagaccataagtgttactcgtacagttacaaatgttgggcctccaagcacgtatgttgtgaatactcacgggccgaaggggattaaggttcttgttcaaccaagttcgttgacttttaagagaaccggagaaaagaagaagtttcaggttatactgcagccaattggtgcccgtcgtgggttatttgggaatttgtcttggacagatggcaagcacagagtaaccagtcctatcacaattctgccttagaaattactctcgatcagcattcttatgttatcattgtcgtcttttgagtgtgtttgcatttgctgttttttaggctgtaatatgagcgtgtttcctactcctattgcattaagctcttttttttttttttatgtaaagctttgtcataaataaggtatttttagaatgctgatggaattggagctatcatcaaagaactagtaatgatcggaggaaaatcaagcaaatttaaaccttggcctcacagttttatttcttccaattgaaggatcagccaagctagtagaggccagaccaaaaggaattgaatcatcatcagctttaattgatttcaagtcttcaactactgaggattcttgtttcgaggtagacatagcttttttagcaagagaaactccattaaattgcacaccatttggacgcctctccaagtcaacagaaacatgctctaaagttgaagaagcagcaacttcccctatttgtgaggaagttaataagtactgtaaattaggccagtgatgcaggtgcttcctaaagtcaagcactacctgatcagcattttccgtgttattctcttcatgaaccgtgactgtatccatctgccttgtacttaacattgcctgtgatgtcttgtcttccttagacatgtgcagaagaggcctatattcatcacgctgctctggtaaaagaactgaggcaggaaaattctgtgctgaaaaattagaagaccaagaggcaactgtaggggaagcttgttcgcgaagcatcaaaacggaagtagaagaactcaagggaagagtgttccaagggtgatgagttcttggagggaacggtggagaagaacagaacatggtcctggagaattccataactgaggaggaacaataagaagaagaacagcatagtacgctaaagtggttgcagcagtgatcattgtgcagaggaaacggaagtggtgtttggttgccaccaccatggcggggtgggatattaagatagaaacggatagaatgggagaagaaggaacaaggctttcgtagagacgtagcctatttcggacctctgaatttctttcgtttttccgacactggattaggctcgtgc

SEQ ID NO: 117352 - DNA, 1193 bp, Glycine max
  Clone ID: PAT_MRT3847_7697C.1
ctcgagctcgggctcgagattttctgcattcccctagctgttaccgttgttctctcttccgctgttccgtttccttcctccgccgccgccaccgcagcattctctcgccaccgccgtctcgtcgcctccgcatcgccgatgaatccgtcgtcgcagtctcagtccccgcctcctccggtggcaaagaaggtggagcatgcgatggaaatgttcggcgacgtgagaatcgacaactactattggctccgtgacgattcccgcaccgatcccgaagtgctctcgtacctccgccaggaaaatgcctacaccgattccatcatgtccggaactaaggaatttgaagataagctttttgctgagataagaggaaggattaaggaggaggatgtctctgcacctttacgcaaagggccttattactattataagagaactttggaagggaaggagtatgttcaatattgcaggcgccttatatctgataaccaaaaggtgccatctgtgcatgacatcatgcccacaggacctgaagctcctccagagcatgttattttggatgtgaatgttaaggcacaacatcacctatactacagtatcggtgcttttaaggttagcccaaataacaagttggtagcatatgcagaagacaccaagggagatgaaatatatactatttatgtcattgatgttgagactcaagctactattggagagcctcttgttggtgtaacatcataccttgaatgggctggtgacaatgctttcgtttacatcacaatggatgagattctcaggcctgacaaggcatggtttcatgtgctgggaacagaacaatcaaaggatacttgtctttatgtggaaaaggatgatatgttttctcttgatcttcaagcttctgagagcaagaaatatttgtttgttgcatcagagagtaaaaatacaaggttcaatttttatctggatgtttctaagcctgaagagggtcttaaagttctgacaccacgtgttgatggtattgacacaactgtcagccatcgtggagatcatttctttattaagaggagaagtgatcagtttttcaattcagaggttgtagcttgtgctgtcaataacacctattcaactacagttcttattcctcacagggaaagtgttaaaattcaggagatacaacttcttagtgatcatctagt

SEQ ID NO: 117353 - DNA, 347 bp, Glycine max
  unsure (1)..(347): unsure at all n locations
  Clone ID: PAT_MRT3847_76980C.1
ttgtttatttgtcttgtttgtttggttttgttttgtcttttttttttgttttttnccccgggaaagagatgaagaccgtttttttttaccttccagggttttcaaaaggggtgctcaacaaaattttttattttcctacaataacatgtggccttttatataaaacctgccggcgtgcttttatttacaaaaaaaaaataaactgggtggcccaattccacaaagttggggaccttgcaggcgctgactcacccttaaaatatattttggggctttagtgggactccactttattactaggggggttttttccggggcccaaaacaggggggggggcactgtttttt

SEQ ID NO: 117354 - DNA, 1809 bp, Glycine max
  Clone ID: PAT_MRT3847_76981C.1
tgatcatgccattcatgatggtgttgatgtcatctctgcctctatcggttcgtctaatccctataccgaagctttgttaacagatgggatgtccataggggcattccatgcagttgccagaaacgtagtcgtagtttgctctgctggaaatgatggaccatcacctttaagtgtcacaaatgttgcaccctggtccttcaccgttgctgctagcacactagacagggattttctcagcgacatttctctcagcgacaatatgacagaagggggtgccagtctcaatcgaggcttgccaccatcgtccccgtcgaacaagttctatcccataattaattctgtcgaggctagacttcctcatgtgtctattaatgatgctcgtctttgcaaaccgggaacacttgatcctagaaaagtaaggggaaagatactaatatgccttcgaggtgataaattaacttcagttagtgagggccaacagggtgctcttgctggtgctgtggcagtttttgtgcaaaatgatgagcaaagtggaaatttacttctggccgagaatcatgttttacctgctgcaagtatcagtggaacagggaatgaaagtcaaggaggtgctttcaacatctgcagcaagggggtcttagcttacttgagtgcggcaaggacacatataggagtaaagcctgctccaatcatagcaggattctcatccaggggccccagttccgtgcaaccattaatactaaagccagacataactgctcctggtgtgaacgtaattgcagcttttacacaaggagcaggtccgtctaatattgcatcaaatagacgtcggtctccttttaatgtgcaacacggaacttctatgtcttgccctcatgtcgctggcctttgaggtcttcttaaagcatatcattctactttggagttccacagctatcaaatcagctattatgaccacagctaccacactagacaacacgaatcaacccattcgcaatgcatttgatgagggcgtacctccattcgaatatggtgccggacacattcaacctaaccttgcaattgaccctggactcgtttacgatttacgcacctccgattacttgaacttcttatgtgcttctggttacaccaagctttactcaacttatttgccaaattgaaatttccttacacttgtcccaagtcttacagaattgaagatttcaactatccttaattacggtgcgtcattctgggtcaaagaccataagtgttactcgtacagttacaaatgttgggcctccaagcacgtatgttgtgaatactcacgggccgaaggggattaaggttcttgttcaaccatgttcgttgacttttaagagaaccggagaaaagaagaagtttcaggttatactgcagccaattggtgcccgtcatgggttgcctttatttgggaatttgtcttggacagatggcaggcacagagtaaccagtcctgttgtagttctgtaatgtaaccttagaagttagaagttgctctcagcattgttatgttatccctgtcatttgagtgtgtttgcgtttgctgtttttaggctgtaatataagcgtgcttcctactcctgttgtgttaaactttgcgtccactagtaggtaggtttaaaatttcgaggtattgaactctgttgctttggagctatgtttgtaataggcacactctatcatgtatggaacccgtatctttgaaagtctaattaatagacaatgttgagagttgagaccctatctaaataatattgaacaattttaattaggctctaatccatc

SEQ ID NO: 117355 - DNA, 329 bp, Glycine max
  unsure (1)..(329): unsure at all n locations
  Clone ID: PAT_MRT3847_76982C.1
accggnccggaanncccggggcgacgcacgcgtccgcaacaacctttcaaaccctccaaccttagtttcaattctaaacttgttcaccctttattggctgctcttccaaacatgggcgatggcttcaataataaccttggtgacatccaccttgctctttctttctttcactttgtcatgtgctattgacaccttcaccatcaccaactacaccgacaatgaggtcatgaccatgtacgaggagtggttggtgaagcaccaaaaggtgtacaatgggttgagagagaaggacaagaagttccaagttttcaaagacaactttgggttca

SEQ ID NO: 117356 - DNA, 247 bp, Glycine max
  Clone ID: PAT_MRT3847_76983C.1
gccacttcccaggtatagaggaaattgtgaccttgatcctgacactaatagaagtctttgtactgtgaaaattattggaccacaacattgtgctctacctgaattagctgctgtggcattcaacccttcaattgattttcattcacctctagatggatatgggcctgggagtcatacaacctctatcgcagctggaagatatggaattcctgtgaggatgcatggacatcaatttgggaaaggcacg

SEQ ID NO: 117357 - DNA, 312 bp, Glycine max
  Clone ID: PAT_MRT3847_76984C.1
tttttaaataacctgtttgattttcagcaagagttcattttaattttatatactcagacagattcatgaagctagcaaagaacattaaagcagagaatcagagagccatgaaggacttaacacgagccatcatttccttggctctgctcttagatacctgagacttgctcaaaatctgaaacgcatgtccaacacctctgaacaccccatactcaacccttttccctgctctcaccaaagcatcgcagaactccaaattcctatccttcaatatgtccatctccgagatgcacaccaaggtacgcatgagct

SEQ ID NO: 117358 - DNA, 245 bp, Glycine max
  Clone ID: PAT_MRT3847_76985C.1
caaaagtggaaggatcttcaagagtctattactgcctacccgatcccatcaatccgtagaataacattctacatcggggggctagagcagaacatcaccttcatcagctacaagccctcaagcttgtaagggtgaaaaatgcacaaagcatttggagtcttcaccccacttactacataacaacttaaactacatacccatatattaatgcttattgtgaatccatcattctgtatagggaattc

SEQ ID NO: 117359 - DNA, 170 bp, Glycine max
  Clone ID: PAT_MRT3847_76986C.1
gatcactctagctgctgcacactgctactatataccaaaggctcttgcacacgtggagtgaccttgctgcgtcggcgggctagcctgggtcaacggctacgatgcccttgctaaagccttgccgatctacggcgacgttgccgaatcctacagctatgaacgacccggag

SEQ ID NO: 117360 - DNA, 268 bp, Glycine max
  unsure (1)..(268): unsure at all n locations
  Clone ID: PAT_MRT3847_76987C.1
ccagtcttttatgaaccagacttatcagttatccaatacacacnccacacacannttcntatatngagagagagaggggaggaatcaagttactccaagagtanctntaaaatgagttttcttttaattgttttaacgagtaattcatctttgaccattagattaaaagaaaatgagggtgctgataagtaactcttttaaagtnattcttagggtaacttatcccttcttttgaagtcaaatagctaacaaagtgaggtgtaagctt

SEQ ID NO: 117361 - DNA, 508 bp, Glycine max
  Clone ID: PAT_MRT3847_76988C.1
cttcatgctggtttagatccagcaacttcatctattgagttctgttgcacgacagctggtattatgcactgtattttacacctcaccaacaatttttaaattgattgatcagagaagctagttgaagaaggaagaacattcgatgcagttatggccttggaggtgattgaacacgtggcagatcctgctgagttctgcaaatctctgtcagcactaacagttccagatggagccactgtgatatccacaatcaatcgatccatgagagcctacacaactgccattgttgctgcagaatacattctccgctggcttccgagaggcacacatcaatggtccagttttctcactccagaggaactcgtcctcatcctccaacgtgctggtatcaatgtggaggagatggccggaatcatgtataacccagtgacaggagggtggtctttatcagacgatatcagcgtaaatttcatcgcgttcggtaccaaataaaacaacaccgaatatc

SEQ ID NO: 117362 - DNA, 482 bp, Glycine max
  Clone ID: PAT_MRT3847_76989C.1
tacggctgcgagaagacgacagaaggggacttgacttttagatttctgcaagttgcattatgtacatgcaattctcatcttttttttttatcatgtcttgaacaaataagtattatattgatattctaaactcataaattcattcttgataattttatttatcttacacattactactttaatttttgccaagataaattagagtcttttctcttcacaaattactcccagagtgttggaaaaggcaaaatgagtttggacacgataaagaaactcatcaaatccatacaaatatttactcattagatgaattttatctgctgatgagcgttgatctcttcatacttaactgtcctgtaaaaagatagttggacaaggaaaggtgtcagactactcaccatttcccataaggaaacaatttctttatttttctaataatattttttaataacaagtttacattaataaataattgattctaa

SEQ ID NO: 117363 - DNA, 716 bp, Glycine max
  unsure (1)..(716): unsure at all n locations
  Clone ID: PAT_MRT3847_7698C.1
caaagttggggtaattaggaataatgtgcatctatttcccttgtggttgatgcagcaccctgctcactatgaccttgggaaaagtagacttcacgacttcccaacggaggcagagaaaccagagggccagcacaagcatgccaaagttcagaattcanaacattttttctccccttcttcttcagccggaggattaaatccagaagaagagagcttcatgcttggagctataacaataggtgaagttccaaacttagcaaaaactgaagcaccccaagttgaataaaagcattatgattattgtcataaaagtcgcaaattttgcatgcccctgtgaatcagaaatgatcctattgcgtagcctgcccaccccccaccccaaaaattgaagctacccacagaacaccatcatccaaagccacttccaatgcaacacccgaacctccttgctctcataacacgctcgaatccaaccctaattgcgaacctgaagttcaaaccctagcttcccagatctcaccgaaacggagctaaacagtggaattagagggattgggggagagagacgagtgaagtgagagtgacattcatgtgggatttcagtggaagaggcggagaatgtgatgtgtgtgtgtgtgtgtgagagagagagagagagacagagaaatgggccgaggctgcggtaccacgcaacaacaataatgccggacgcgtgg

SEQ ID NO: 117364 - DNA, 297 bp, Glycine max
  Clone ID: PAT_MRT3847_76990C.1
ggataactattttcatatgaaaagaacagatgtgttttcggggacataggcattcgataagcgtgaataggttcaaaacggtacatatggtaatgtgtacagatcaagacaaaatgcctcttgtaaaatctgctctttgatcaaaacttgtatccacgatgacaactaaagtgtacatactaccactctacgttatgtttccattctacaaatgctgtcttgagatccatatgtcagaaaggtattggatgtcaaatatggacatatcaatgaacttttatcagaactatacttggt

SEQ ID NO: 117365 - DNA, 266 bp, Glycine max
  Clone ID: PAT_MRT3847_76991C.1
cacctcggcccgggcgttgatgtaggcataggtccactcatagtgagacgcgtaagagaaagaggatacaacggtaggaggtgatcacaggtaattgagtgcaaaaatttcaatgaaggacttgagacaaatgaagcatactcctacactgtaaaaaatggtgtatgcaaaaaaacaactgaaaatgttgaggttgaagtcaaagaaacaaactctatcatcttgaaagctgggaatgaataaaaacatgcagatgcttttattag

SEQ ID NO: 117366 - DNA, 480 bp, Glycine max
  Clone ID: PAT_MRT3847_76992C.1
tattcaaacttctcctgggagcaatcatgctttgcactctcctgttcccatacacacatgctcttagaaagacctacattgtatacttgggagagcattctcatggtccaagtccttcacttcgcgatcttgagtcagccacaaattcccattatgatttattggcctcagtcttaggaagccacgagaaagcaaaggaagcagtcatttactcgtacaataagcacatcaatggctttgctgcactactagaagaggaagaggcgtcagagattgaaaaaaaggcaagtgtaatttctgttttcatgagcaaagagtataaattgcacactaccagatcatgggactttcttgggctggaaaaatatggaggaattcctgcagaatccgcttggtggaacggaaactttggcgaaaatacaatcattgctaattttgattcaggcgtttggcccgaacacacaagtttcaacgacaatg

SEQ ID NO: 117367 - DNA, 234 bp, Glycine max
  Clone ID: PAT_MRT3847_76993C.1
caaaccaggattttttatccccaaggaccaaaaaaatttttgaaaaaaaaaatcgcatttttttaacaaacgacggtcttcactttcccttggaatacccatttaattcctgggtttattggtccaacagccgaatagcaagggatttccttgtcgcggccccttctctatttttaaaacccattcttacaacttccccccgtgagtgtttttaatccaacctgcaacttggtt

SEQ ID NO: 117368 - DNA, 621 bp, Glycine max
  Clone ID: PAT_MRT3847_76994C.1
acggctgcgagaaacgacagaaggggattcttaattgcattggttggtgaaatcattttcttcaattattattattttttcaatatctttattttcaaatcaatttttgtataattcaatctctctttctctttaattattattatgggagatgttactctgttttgtggcatctaagattttaatcactgtggtggctgttcccgtagatctagcgttcatgaaattcggctttgttatcttcatatcttgctgaggttgtggtagggtcagccgcatggcttgggcgaggtctgtcttgtgtctgtgtacaaagaagagatagtgatgcttctaacactttcgatttaaccctagcccaggaggaatgcttgcagaggatacagagacgtatagatgttccatatgatagttctataattgagcaccagggctttgtggaatgctgcatttcctgaagaagaacttcatggcttgatagcaaatgcgattcacgtgtcgtgactgaagctgctacccatagatagctatataattcagaatagagcagcacagatgcctcctgcgattaagctttgctgcattggctcgacatttttgaactcttattcttaactgaat

SEQ ID NO: 117369 - DNA, 270 bp, Glycine max
  Clone ID: PAT_MRT3847_76995C.1
gattgcttttatatgcgtccattaaacgaagggtgtgctttgcatagctcaatgtgcagctttatgtggtgataggaatgaggaatccttcattctcaactaagacttcattcgtgcgagggtgataatcaattttgaccataagctaacaaaagaaagtgtttctggttagaagcgagggaataattcatgattctcaatgaaggcttcattatttcagggctcaatatcaataatgaccaaatgctaagaatataaataattatattt

SEQ ID NO: 117370 - DNA, 161 bp, Glycine max
  Clone ID: PAT_MRT3847_76996C.1
gacggcagatcgagacgcggatcattattggcgaggtctgacaacaggtgtctgttgctctcaagaacctccccgagcattcttgtgcttgtataacggctgggaacccttgaacgaagagccaccgagctctgcgttggttgctaaatacaacatcaatt

SEQ ID NO: 117371 - DNA, 392 bp, Glycine max
  Clone ID: PAT_MRT3847_76997C.1
gacagcagtgcactcttcgcaacacggcacagctggacaacccagagagcgcgtcataataaacgctcttctctgaaaacccccatttcttttcatctttcttcttctctttcgcttcttcgatcttcgatcttcgtcgctgacactgagagattgcatttcaattcacatcggataggccgggattcacgttggaaacgcctgctgggagctttactgcctcgatcactgtattcagtctgatgggcaaatgccatgtgataagaccgttggtggacgtgatgatgctttcaacattctcttcagtgaaactggggcaagaaagcacgtgccatgtgcgatttttgtagatcctgagcctactgtgattgatgacgttacgactgggagat

SEQ ID NO: 117372 - DNA, 322 bp, Glycine max
  Clone ID: PAT_MRT3847_76998C.1
ataggcacaggagagggaagataaacaggtcacattatttaaaaccccgttttcatatactggagactcttgttggactgacactgtagaatgaccatccagtataagctttttttggctcatgatgaagagcttgtgaagtaaataataagctcaaagggccatattacaatgctttcccctctgtaaatgtcttagtccctccggaaataggccttaaaagcgttttataacacagacaactgagcctgggaatggtgctttgtagggttgaagctaacccactcatgctgctggggattcatgagcgagagaccgagct

SEQ ID NO: 117373 - DNA, 307 bp, Glycine max
  Clone ID: PAT_MRT3847_76999C.1
cgtacgttgctcgtaatttgagcgcagtgataatcctttcactaagtatgctgtactaatcaccccaatttctaatgctatcgatgaaaaatgactcgtgcacaaaagaaagccgatagcgattttggataaaacaaccattttggtcactaccgtgcttatgagcactattcatgccgtttttcggctatgttatggcattcattgccgcattctttaacgcgacaatctcattgttgctcccttgcatctgttacttgaagatgaacaaagctgctctgccatttgggttggagctgatcgtcat

SEQ ID NO: 117374 - DNA, 536 bp, Glycine max
  unsure (1)..(536): unsure at all n locations
  Clone ID: PAT_MRT3847_7699C.1
gtttcctactcttgggaacctaaagaaagtaaaagatgttcctgcggtgcttcaatgggagattccgattcacatgcccaacaattccttccccgaattccgtacagatgcggattcatatgccaactacaactgcagttacactaatgttacatctgcacaatcaaaatcgggttggagatgtacatgcaaatatggcttcaagggaaatccctaccttgaccaaggctgtaaattaggagtttcttcaagcctcggaaccgtcattttactccttnggtttgtggtggttgcataaagttataaggaaaagtatagcaacgaaacgcaaggaaaaattcttcaaacaaaatggagggtatgttgttaaaacaaagactctcttcaggtgaagttaatgttgacaaaattaaactgtttagcctaaaggacttacagaaggccaccgatcactttaatantaatagggtacttgggaagggaggcccaggtactgtttccaagggatgctagtagatggaaatatttgtgcagtg

SEQ ID NO: 117375 - DNA, 758 bp, Glycine max
  unsure (1)..(758): unsure at all n locations
  Clone ID: PAT_MRT3847_769C.1
cctgcagtaaaattttacctctttggtgggaatctatgtcttgggtgagcgtatctagtgtatttccacagcacccaaggcatcattttgccaacatatgactgccggggtggaaggaattcgggcaactagatggaggtcttggtgggcggctcttacatggttatatggcagctgaggaacaacattatattctcaagtgggactttcaacggaaacaaactgatggaggactccctatttctactttggacgtggctcagaaactatgagaaagattctatatctcactacaatcagtggtcatctaaccttagagaggcttttgtttttagacaaggaaagcagtcatagtgtattgataattgtataaccaagctgtctaatgtggttcccagcaagactgctgtcaagtgtctagtctggcttgggaaccatttatctggatttttgttgtaatcacggtacctctggtactcagattcatttctcatatatatatatatatatatatatatatatatatttatttatttatctttgctgaccaaaaaaaatagtaaaacactgttatatactcaaccaactagttccatgtaaataaagtacaaatcttgtgttttaaaatgtaataatctatctttacaggtactttgaccccaagccaagttttcattacttagatgattcagggggaatttcctgccacataacattgccttccaatgcaccaataaaccaaattntgggtacaccac

SEQ ID NO: 117376 - DNA, 412 bp, Glycine max
  Clone ID: PAT_MRT3847_76C.1
gagggggacaagtgagtttgttgatcgagataactagaaacagtgtgatgaaaatgaaggtccttgttttcttcgttgctacaattttggtagcatggaaatgccatgcgtacgatatgttccctttacgaatgaacactggctatggagcccgtactacggaggtgaaatgcgcaagttggaggcttgctgtggaagcacacaacatatttgggtttgagaccattcctgaagagtgcgttggaacaacaaagggatacattcctggcgaacacattagaactgactttcaaaacacagttaccacaaaggtacttttatgccagagacctctgagtgcattccaaggacacattttgtgcttagtatagaagggactgtactcttttaaatgccacactacaaaaaacat

SEQ ID NO: 117377 - DNA, 115 bp, Glycine max
  Clone ID: PAT_MRT3847_77000C.1
ccacgcgtccgtgcagatgttgttactgtcaattccactggatgggaacaatccttacctaaagggggttttggggcctaatttctctttattgtgggtcaaatgttggtccaaa

SEQ ID NO: 117378 - DNA, 416 bp, Glycine max
  unsure (1)..(416): unsure at all n locations
  Clone ID: PAT_MRT3847_77001C.1
nagtnttctgntgtgntngngtnnngatngagctgcgtgtgtatcggtctcncngtgntgctttctgntgnnngttntccgntcanttgntgtnntgccctgntgttatgnngtggngcgtcngngatcnccnntttgnncttgtgggttnngtggtnntctagngtnagtgtnctcccntnnanangcctggtnggnnntttgcnacggnggnngtgtggtgctccnanggtgttggtnggntgtctnnttngnagngttttgtntatngtggntccttgtgggtancgnngntttcgttgtgttgnnttnccngttggntncngnntgatntgntgtggtnngtgtgggntgnggngtgtttttgtggtgtngngttgtgntgtctccngnanttggngcgtcgtcgtnttgtt

SEQ ID NO: 117379 - DNA, 411 bp, Glycine max
  Clone ID: PAT_MRT3847_77002C.1
cagtcaggatcatctcacctttagggtgggaaacgagggcaagtgccgaaaaagacgtcagcgctgaggaaagaacgggcacctctggcttactgcatatctttcaagtcagagacagattgaaacataactctaaataaagctggagcagctcttgaaaagtacaagatgcatgcagtggctgcaaatgaactctcaactcgcaaggagcaagtggtgtgcgacacggggggctgagaagggtactgatcagcgtgaaaagagtccgactgataatgatgtagagaatacactgattaaacatcttccagagaaacatgccacggacatggaggatcctgggagatgaatctaaggaatggataaggctcctcggtgaagaacggacacaacaacaaatggcaggaaata

SEQ ID NO: 117380 - DNA, 177 bp, Glycine max
  unsure (1)..(177): unsure at all n locations
  Clone ID: PAT_MRT3847_77003C.1
gggcacttaagcaaaatattctacaacgaaaggaacctnactgggagtgtcttcatttcaactgggtgggacctaagcttactatcaatccatatcattttacactttttctcactcctgtcactggacttagacttatcctagagggcatcaaacatattatacttgctattcatt

SEQ ID NO: 117381 - DNA, 938 bp, Glycine max
  Clone ID: PAT_MRT3847_77004C.1
cggacccttgggcggacccgtgggcggctgcaaaccacgcacagaaggggacgtccgcccaccggtactactgatatgtacattaaaatctacgaataatggagcaagagcttccacgcagcagtgtccccgacgacgacgccgccaccaccacgagctccgttgacaagcccgccatccctcacgccggaggcacccgccacccgctctccggcggcgtccccgcgcgccgctggggcagatgggtctcacaccccctcttccgcggcgttcgcaagcgccgctggggcaaatgggtctccgaaatccgggagccgaggaaaaagtcacgcatatggctcggctccttcccggcgccggagatggcgggcaaggcctacgacgtcaccgcctactgcctcaagggccgcagggcgcagctcaacttccccgacgaggtccaccggcttccgccgctcccctcctcctgcaccgcccgggacatccaggccgccgcagccaaggccgcccacatgatgatggtccaggctgcctccgccgactcgccggagaaaagcagcagcattacctccgactgcgacggcagcggtggtgacgacttctggggcgaaattgagctgccagaactgctcaacggcaagtggtgggcctccgaccgccacgtaacgccgtggccggagactgagcttccgccccagctgcccttcaccacggcgtgcttgtagtagtttgtaataatcaataatgctcttcccatgctctcatgacttggttggtatattagttacatatattattgctcatataattaagtaactctctttgtgttcacttcacaataattaataattttaattgtgatgatcaatggtagtgctgttaatgataacactttcactaactatttttgctaccaatttatttagcagcacattaat

SEQ ID NO: 117382 - DNA, 275 bp, Glycine max
  Clone ID: PAT_MRT3847_77005C.1
tggtgtcttttgttgaattaaatatttttattattgtgtgttcttatttttggtggtctacttgtggtatggggtgaaagttttgatccgtggggctttataggagacccccgaaaaggtgcccgtacaaccttgttttcaccgcactcaacattccccctcggggggacgctacccccactttattaaaaaggaaagggggccaggggcatccccaaggggggttagcggatcaaaaaatgtcattcttagaataaacagaacacttcacaccg

SEQ ID NO: 117383 - DNA, 768 bp, Glycine max
  Clone ID: PAT_MRT3847_77006C.1
cccacgcgtccgcccacgcgttacattttttcttccaaccccaagaagggttcttcaattttgtagtttttttctttgtggtggccgggttaaacttcaattaataattatttggagtccaaaccttggcagctggcatcaataccggccaccaacaaagaaaaaaactaaacaatattatggcgaactgtcagcaatattattttcttttgctttctctggcaatttttattcctaccctgaatgccaattccttagagaaagatgagtattggcagagccatgtctatgagtttgatagttattggcaggaaagggcaaaagccgctaaagtggacagtcaggcagcttattttgaagacccatattcagtctccagcaacttcacttccagtgttagcgaactcacaattggcaagaaggatttacgaaggaacttgaagggaaaatatcgtggtgacggtccatgcatagccacaaaccccatcgacaggtgttggaggtgtgaccccaattgggccaacaatcgccagaagctcgcagattgcgtccaaggcttcggtagaaacaccgttggaggcaaaggtggaccattctacgtggtcaccgatccctccgacgatgatatggtgaaccctaaacccggcacgctccgccacgcggtcacgcgtgacggcccgttgtggatcatctttgctcgaagcatgttcatcacccttcaacaggagctcatcatgaacagcaacaagaccattgatggaagaggtg

SEQ ID NO: 117384 - DNA, 154 bp, Glycine max
  Clone ID: PAT_MRT3847_77007C.1
agagacttccgactggggcacatgtgagtctgctgctcctgataactagatgcagtgtgattacaatgaatgtccttgttttcttcgttgccacaggttttggagcatggcaatcccatgcgtgcaatatatgccctctccgagtaaggtactg

SEQ ID NO: 117385 - DNA, 350 bp, Glycine max
  unsure (1)..(350): unsure at all n locations
  Clone ID: PAT_MRT3847_77008C.1
tcggtgaattccaattccacattttcaagagatatggaggcanaaatgttcaggtatgaatcggaatctattgtcctcttattatgcctatcctgaagccaaaggaaatgagatcggtacttctcggagaattccaattccacattctcaagatataaggaggcatacatgttcatatatgaatgggaattacttgtatcattattaagcctatcctgaagccaaatgaaatgagatcggaattcctcggagaattccaattccacattctcaagaaataacgaggcagatatgttcatatatgaattggaattattagttaacttattaagcctatcctggaacccaaa

SEQ ID NO: 117386 - DNA, 424 bp, Glycine max
  Clone ID: PAT_MRT3847_77009C.1
ggaaaaagggcccgtttggggaaatttctgtataattgaaaaaaggtaccaaacccaaagtataaaccctgagaaaatttaaaaatgttttccctgaaaagaaaaattgaatctgttattggaacattattattgggggttcaaaaaaaataaaggccccttgggaaaccccccctccagtgtaacgggccgaagtttttgccctaaaaaaaaatccgctgtttattaaaggattgggtcctagccctggtaaaaaaacaatttggggacttaaaattttttttttaacccccaaaaattttgggttcggggggattaaaaaactttttttttggggggaaacccaaaacgggaagggggagacccattccgctgcattggcggggagaaaccccccccaaaaaaaaggttgggaaaatggaac

SEQ ID NO: 117387 - DNA, 555 bp, Glycine max
  Clone ID: PAT_MRT3847_7700C.1
gctgactggatataccataaaccttcgtcatagctcatttttattaatgataggactgtgtaggagtcatcaatgtgcactgctacataagaaagggctaggaacatatcatatagttgttttcttgtgaggattctccacgctattggaacaagagcatagcttctaggtttctagctaactggaatcgcctcatggttttattaggctctatgaacaacctaacaatgcctagaccacttgaccatcacaaggtaggggacctccccgtgtaaaatcgataaatattttatgcattgctggtatacactcatatgaactctttctaaagattattaccctaaatgcactgatgaatactcacttaccacgactattactgctcatactataactacctgtctcactactttgatggatactacttcctacatgactcaacaatatatatggtgaatgcaaactaatcccctacaagtggtctacatggttggctaagcggagacagaagcatgccttaatgaagacatataataacattattccttgatgata

SEQ ID NO: 117388 - DNA, 1062 bp, Glycine max
  Clone ID: PAT_MRT3847_77010C.1
gttagtgcaagtccgattcaaagtgaagttagtgcaacttcacttttagttctctctctccctggtcctttgagcttcaagaagttgttcctgtttgttgtagcagttcctgtccttaatttcttcaaccttctcaacacataaccaccttggtctgtgtttgtttgtgtgtgcttattacttggtctcttcatattgtacatataaaaattatggatgatgaatatgccaagcttattagaaggatgaacccaccaagggttgtgattgacaacaatgcctgtgaaaacgccactgttattcaggttgacagtgtcaacaaacatgggattctcctcgatgttgtccaagttatatcagatatgaaccttgtaataacaaaggcctacatctcctctgatgcggtgtggttcatggatgtgtttaatgtgattgatcataatggaaacaagatcagagataaggaagtcattgattatattcagaggagacttgaaaacaatcccagctttgcaccctcattgagagagtctgtaggggttgtaccaactgaagagcacaccgtaattgaactcactggcacagaccggccaggtttactatctgaaatctgtgcagttctcacagaccttcactgtaatgtggtgactgctgagatatggacacacaatactagagctgcagccgtagttcacgtgacggatgattccagtggctgtgccatcaaggatccatctcgcctctctacaataagggatttgctttctaatgtccttagggggagtaatgatccaaagacagcaaggacaacgctttcaccccctggtgttacaaatagggacagaagattgcatcagattatgtttgctgacagggactatgaaaggattgaaagagcaggacgagggggacttagagatagagataaacgccctctccctcatgtaactgttgtagattgtgttgagaaagattacactgtggttaccatgagagcacaagatcgaccaaagttgttgttcgatattgtttgcactttaactgacatgcagtatgtagttt

SEQ ID NO: 117389 - DNA, 565 bp, Glycine max
  unsure (1)..(565): unsure at all n locations
  Clone ID: PAT_MRT3847_77011C.1
atttttctcaagtgggaaaacttnagagagtttncagtggggataagaactggggtctaattccaataagtatcattcttttagggggtcttccaattgagtgagcaatccaaataatatatggggatatatatatagagagatctatctatatatatctaactaatataggagtcttanaaagagaattagtctattcataagaggagaggagagcatatgagaaatataaccgattctttcctttgtgtgggctactgggcatccggcgggagtgtcngggttaataccgagattggagcgacaaatctaataaatcttagtgtggggtgaggggtgattggtttttttggggaggggtgtgaagtgagttattanataatcnagaacagaaaatcttgagaactattcnaaactcanaagaattacggggaagggggcattnagcagcgtggaaaagcccaancccgcttaaggagaaggnaaacggaggcanatcgggttcnggggagtgggtattctgagagcgagcgagaaaaattgagtttaattaattcaatttata

SEQ ID NO: 117390 - DNA, 570 bp, Glycine max
  unsure (1)..(570): unsure at all n locations
  Clone ID: PAT_MRT3847_77012C.1
tacggctgcgagaagacgacagaagggtaggtagagatggttgccaaatctgtgatactgtttataatcaggtggagtatatattaaatatgattaaatatggcaccagcattgattccttatcaagatgggatctttcttttgcactgtttccggtgacagcttaagaaatactgcctagtccttacaccacttattttctgtggaaacacttataggaaaccaagtaaaaaaataaaataaattgagtttttttcacacaagctaattagctaaagtcaattcacatacttcaattttatagaaattcttttaatttaacttatatccgaaagttaaggtatataaattaattttagtttatgaaaaagcttaatctattttatcttcttcttttattatcttgtaaatatttatgaaaagtttatctaaaccctgngtcaacaaaacctattcctcggacctgaatttcttttccgacgttgtgacaaattattaacccttggaaagaaaaatgacagcatatttagtggtgtgaaatgatcttatttgttctcttgttgaaaacgt

SEQ ID NO: 117391 - DNA, 318 bp, Glycine max
  Clone ID: PAT_MRT3847_77013C.1
ggcaaccggacaaaagagatggctgacaatcgaggcacaacgcaatgtttgaacaactcacagtagcacgctgcgatctttacgtccgtgcgtgtgacccggcaagtaaaaggcaagagcagctttgcttcacctgcccagggatatcagattagaggagcctgtgaagttaaacctcataacaaatgacactctgttcacctcacgcccttagttgtatcgtgtgcaccgatggtggcattgtctctctttcaccgttatcatgagcgtcatggctggtattgttgacctgcccactgatggctagccactgatttc

SEQ ID NO: 117392 - DNA, 742 bp, Glycine max
  Clone ID: PAT_MRT3847_77014C.1
tccttgtggtctgtgtgccgcatgtaacagtgtatgtatttttgttttataaaaaaaactgtagtgagcttcttgcgaaaaataattctactttagtcaaattcatgtatgttttatctttttgaatatttaatataactacccattcaatatttaatcttgatatttttaattaaactcaaaaataatatgttaatttattgacaagttcaataattatgtatgaataatctataatgatagttttaatattgtatatttcttttgtcttaaatataaacaataaaaatttattaatttttatcttaaatatgaataaatcttacttaacttttttttatttaagagacaactttcaaaatatttttcacttaatagagtcaaagattttttttatcgatattaagttttaatgaagataatttatagaaaaaaatctaaaaataacacaatttaataaaattaactaatattcttaataaatatgaaatcattttatttttcttgtaattgagatcagaagaaatatgatataattagtatataattatattttttaaagtttctagtctgattatcatgaatgagaaatatgattgagatgaaagattaatttaagataattagttagatttttttacagaaattaatcaccaataagttagtgaatatttgatgttataacatggtaatttgaagattattttaattataattttatattaaaacaatatttacgatg

SEQ ID NO: 117393 - DNA, 295 bp, Glycine max
  unsure (1)..(295): unsure at all n locations
  Clone ID: PAT_MRT3847_77015C.1
ggaattcggcacgaggaagtgattgggttcgcctcgcttcatgttggggatgaggacggacagaggttgtaactgtaacggtgacggaatggggatagaatgaatgaggggtatagggagactgatacggagggtgagagttctattatctggcatccacatttggcaaattcggtcccgcccctcccccaattttattctgcaaatgcaactcctctattattgaaatcgttcccaccccccataacatttatgccgnaaaaaaaaaaaaaaaaaaaaaaaaaaaaaaaaaaaa

SEQ ID NO: 117394 - DNA, 478 bp, Glycine max
  Clone ID: PAT_MRT3847_77016C.1
aattcggctcgagcatcaagataagcaagtttttattttctggtgtcaaactgtgctaccgttgtaagatacctacaatcaatcaagagactgcaattgctgcacctgaaccaaatgaaactctcatgaaaactaggtctggagaactcataagaccaaatgataaaaataaaaaaaggatctactttggtcagaatatgacctggaactggatgggattttctgctgaagggagtggtaaaatcatcaaagtgggagattctgtttatgtgcttcagaaggtctcttcaactgctgaagcagctgcttgaactgtgtatgtggaatctatgtcgatgctatatcagaaataaaaggctactatgccataaactttctcaaacatagtacccaggcctatgaagtttgctttgtgcaagttatggcttgtgataataaggcttttgcaattaagaaaaaggttttatttttctatttc

SEQ ID NO: 117395 - DNA, 295 bp, Glycine max
  unsure (1)..(295): unsure at all n locations
  Clone ID: PAT_MRT3847_77017C.1
acggccacgccaaggggcaagcaaccaaaggnngcccccccaaacgaaaacgggatatgggaagcggtcttcggaggtaaaatgcgcaagatatagggttgctgtggaagcacacgaaattttttttttaaaaaccattcctgaagagtgaggtgaaccaacaaaggactacattaatggcgaacaattaagatcagactctaaaacagctaaccaacaaggttgcttatatgctagcgaacgcgaagaacgtcagaaaaacatatttatatccggaatatataacaccatactc

SEQ ID NO: 117396 - DNA, 290 bp, Glycine max
  Clone ID: PAT_MRT3847_77018C.1
attatgcgtgcgcccatgcgtccgtgctttgaatactcacacagtgagacacttgaacgtgagacctctgctgtgtaccgtccacggatgcttcagatcctgcactgatcgtcctttggctggtgtgctgtgcatgattgtggagttagaactgacgatattcactagtctcacagatgcattcttagagattcacaaggctcttgattacatgctgaaaggtgtgtctatcatatgcatcattcgcatggctgtgataatctctatgagaccagtgctgacatgacatg

SEQ ID NO: 117397 - DNA, 531 bp, Glycine max
  Clone ID: PAT_MRT3847_77019C.1
cccacgcgtccgcccacgcgtccgtgctcccccacaactgcaacaacggtaatggcagaagctgaagattatgggttcctcccagaggaaatggcggtgaatgaaaaccttggctaccctaaagctttcgctaaactctgccgtgaccgcggtttcggtccctacagccatggccctcccttttccttcatcccttatgctttgtcagaagatgaggctgagacagccaaagatttggatgagatatttccgattattgatccgaaagctaaggcgaccagcaagccgaaaatctttgtcagtgtcttgtggaagcagctccgccatcttgggaatgctggctttgaccctgcagtgattcgggtggatggttatggcaatgtgctctattatcatgctgactcagcctctcctctggcttgggatgttgatcactggtttccttgttcaaggggaggtttgactgttcttaacaatctaaagatattacagcggcaagcctgtaagaggaagaaaaacaagctggaattc

SEQ ID NO: 117398 - DNA, 617 bp, Glycine max
  Clone ID: PAT_MRT3847_7701C.1
actaggtcctgcacaaatgtttcaataacacattgatatgacagaaaaactcaatcaaaaccataagaacatacagatggtgttttgcaggcactatctacccattcagctaactcaagagtagctttatcttcggcagataatgaaaatcgatgaacagcttcttctcctatatcaaactttgctttctgcatgcaaaggttgagtagcttggagggagctgcacgtaacactgttagtgcctctttccatctccattggcgttcagataatggtagtagatgctgcaaaattgacaaacgccattcccattcttcaatgaaacgctttgagattgagattctccactcaagggcctgtctgctggttgtgcttacaccatcatctagtgtgttttctaattcaatcatagaggatggaatattatgacgcaatatatcaagtagcaaaccagttaaagatataaccattttattccccctttcacttccagttgaacaactatcttctgaagaccatgcattggataatttaaaattgcttcctggtaatccacaatgcatcaagttaacagagatattatccatatgccgcattgaaatgatgacgttcaccat

SEQ ID NO: 117399 - DNA, 411 bp, Glycine max
  Clone ID: PAT_MRT3847_77020C.1
cgttatacaggggaccgtcgcgaatactcgattacagctgtgtaatcactaaccttgaagacttacttaaactggttagcactctccttcatcttattgtggtggagctatctaccgttacatcatggaagatctttccataccactagcacaagcttgcttacacgtactgttttgaagatgacctttgtagaagggggataactgacactggacaattgcactagggggaagcataggcgctactaagctaaatgtatgtaacactcgagaggtcagttgacatatcaaacgggactttcttgcttatacctacaatgaacagcgccagaaagagaactctacctgtggtggtagatatgacaacaaacccagctctattgatagaaatagcaggcctgtttatggtat

SEQ ID NO: 117400 - DNA, 650 bp, Glycine max
  Clone ID: PAT_MRT3847_77021C.1
ttctggttaatggaaaatgaattgtggctgtagaaagtgtatagagactagaaactagataatgaaggatttacattctctaagatatttagatgatacaaaaattgcaatgtcggctctacctatgtttgcaccccacacatccttgaacaaaaataagttattgttgaaggtgtacattactctagactctattggcactggagtttagttgagaattgagaggggccttgcatgcatgttatatacaccgaaacagacaatttgacattacagaatatgtttaaggttttccttctgtgggcgttgatggagctgatgagctttcggaatgtgcaagctgcaggtcactgatcaaatcctattgcacggaaggttcactgtggctgggtgaaggcgcagtgcatcctaaaatgatgggcatggtcatggtcatgttttgttcagcgaagtctctcaatttatctagctctggcaatactagtttggcaaggtctggcctatcttttcgcctgagttccgcatacttgactgctatttttgcaaggcacaaggcttgttcaagaggccagtcagtaacagatgggtctagcatttgcacgaagctatccttctctatagactcttcagcatggtgagccaatcccgtt

SEQ ID NO: 117401 - DNA, 254 bp, Glycine max
  Clone ID: PAT_MRT3847_77022C.1
tctcgagccgaatcgctcgagaaaaaaatgactttggaattaaaaagttaggaatcgtgagtcacaatgagtaattaaacttattttttaaaacattaaaacataataaaaatagaagggggaaaaaggcttacctctaaaccaacccgtagcagtaagaagcctaaatggtggaaggattatatctcttcttagttataatttataattacttaggtaaaataattagttaatgagggaatgtaacgactgaa

SEQ ID NO: 117402 - DNA, 235 bp, Glycine max
  Clone ID: PAT_MRT3847_77023C.1
acccaacacatcaatagtatagcatgtgttttacaaaaaatctccccatcaacctagcattaacaaaatctcctccacggttttgtttctgtcaagactacctcctctaaaaatacatgcacctagcttgtgttgtttgctttgatcccccaataagactatgttgctagaaatgagcttgtggattttctggtagcactgtcgtgcgttgcagccaggaataacaatcaaacca

SEQ ID NO: 117403 - DNA, 340 bp, Glycine max
  Clone ID: PAT_MRT3847_77024C.1
gacccatattcgtttccctactcattccaccctttgattaataataatcatagccacacccacccacccaccctttgcccccacaaaatgtcacattcattctctttccccttaacaccccttgtgctcactttataaaccacaccatcatttagtcatcatctaaactaaaccactctctcttcattctctttctcttttcctttcacacagactcctcttatgatgggtcttgatcaagatgctagcagcaactctggacttcagcttattctacggttagctttgactgccaccatcaccaccactccatcatcaccaccatccatttccaacaagc

SEQ ID NO: 117404 - DNA, 238 bp, Glycine max
  Clone ID: PAT_MRT3847_77025C.1
ggagaaaggtttgatggaagacgaaaagtgtatgtgtcgagtggagaagaggaaggcaatgatgaaaatgaagtgcctcaacgacccggaggatgagagaatgcagagagagaaagcttggatggtgatgattatgattatccaaaaacagcagcagcagcagcatgaagtagaagtagaatacgaatatctggcaaggaaacgagatcatcttaaagaaggtacaattcagagttag

SEQ ID NO: 117405 - DNA, 238 bp, Glycine max
  Clone ID: PAT_MRT3847_77026C.1
tttatgagccaatgttgcaccctgcttgtttgcattttggtgacaccaacccatagcattctctattagagaaagatggcccctccttttgctctgtgagcagggacaagacagaaggacagggtagccgccgatgatatctttctccagtacgggataaaatatgttgaagcaagactgttattagctaagatcgaacatgtctccaaaagctggaggcaaaaagcatctctaactc

SEQ ID NO: 117406 - DNA, 319 bp, Glycine max
  Clone ID: PAT_MRT3847_77027C.1
gaaccaacacacgctgtttcaattattctatgcgcgcactccctgatgagtgaagagaatctctctcctttttataaacccataaatttagggcgcgctttttcccggcctcccctcgccaccgcatgtacatacatcttcgacacgtcgcctcctctctctctcgcttttcgaaaatatacttcttctctcgctcctagaaaggagcttctcaacatgcgcagagcttgcgcgttgattcgccgcaacatcggcgaaacctaattgcggccagtcaaacggcactttcacaacaagcctcaattttgtcactccaatc

SEQ ID NO: 117407 - DNA, 197 bp, Glycine max
  Clone ID: PAT_MRT3847_77028C.1
gcacgagaatatctatcatcgtgttttcttgtattgtatatatgtagatattagacatttaacttgagataattgaatattgcagcgattttatagtgatcaaacgatgttcccctttgctaggtccatgaattaaaaaaaaaaaaaaaaaaaaaaaaaaaaaaaaaaaaaaaaaaaaaaaaaaaaaaaaaaaaaaa

SEQ ID NO: 117408 - DNA, 240 bp, Glycine max
  Clone ID: PAT_MRT3847_77029C.1
cttgtctacgaaggaaacagatagaagctttgggctgagaaatctcaggtacattgagaccctcaaagaagctttgcacagggcatgccccggagttgtctcctgtgctgctatcctcgttctctctgccagagctggcattccgtcgctaagaggtccccatatccctcttaacccaggcataacggatggtagccggagcagagccgatgtggtccagcagttcctcccagaccacaa

SEQ ID NO: 117409 - DNA, 287 bp, Glycine max
  unsure (1)..(287): unsure at all n locations
  Clone ID: PAT_MRT3847_7702C.1
cttgaacccgaacgggtccggggccctaagggaatggttccaatattaacccggggcatccaaggggggtccggaagccccaaccgggcccgaaacaattttcggcgggggcctcaacaataaatggaccaaatcccttaaacatcctcttccaaattccaaatccatggttggtttttttttcaacccgctctcaacaatttttttctactacgcttggtggtatctncttccacacacgcccctaaactccctttcgagtcaacgatgttctccccgtctcccca

SEQ ID NO: 117410 - DNA, 1552 bp, Glycine max
  Clone ID: PAT_MRT3847_77030C.1
ccatatgctattggttggaatatagattgactttgtcaacaacataactccaccggagaatctagctaacgacctttacccaccaaccatgttcttttctatccagcttgaacccgagactttggttaaggaatctaggctcaattccactccattttctttcatttgaacttatggttatataccttagtgtataagtattcaaggtagctgatattcctggaacagtatcaaaaggggcaccagatttctgcacagtatatgttgttgctaaagggaagattcaatccatgcgatctgcttctcgagctgcccctgccttctcccctctacaaaaccagcttagtcatgccagtgctaggtcagaccattcagacccacgtgtgcctctggttaatggtgccaaaggacctgaaaggaggtcctttgaggcaccaccccatagatcacaggatgcaccccgtaaatcaaatgatggaacaacagattccttcaggtcaccattcactaggaatggtatgaatgacaagtcatatggtgaaatttcagtgccagattttgacataagctttgtaagcgatagaaggccaagcacagatccctcattacctttattgtctaacaactacacctgcggcagtgaggagacaggaatatccaacccccggctatcctatagctctgacactgatggaaataactatagctttgagtctatgcattttggaaggaggtctatggatatcagctccgacttctcatccttttcacaagagagtgagggcttgtcatcttctgcattacggggtgtggatgacgtggaggctgaaatgagaagactgaagttggagctcaagcaaacaatagaattgtataacaatgcctacaaagaagcactcacggctcaacaaaaggctgtggaactccagcgctggaaattagaggaagagaggagattggaggaggcaaggctcgccgaagaagctgcattggcagttgcagaaaaggagaaggcaagatcaaaagcagccatggagaatgctgaggttcagcagaggattgcagagttggaatcacagaagagaatcaatgcagaaaagaaagcatttatggaatcagaagaaaaaagaaaagcagtggatgctttatcaaacaattatgtgaggtatagaaagtacacaattgaggagattgaagctgcaacaaatttttttaccgagtcacagaagattggagaagggggttatggtccagtttataagtgccatctggaccatacacctgtggcagtgaaggttctacgtcctgacgcagcacaaggaaggtcacagtttcaaagagaggttgaggtattgagttgcattaggcatccaaacatggttctcctcctaggagcctgccctgagtacggctgtcttgtgtatgagcacatgtcaaacggaagcttagatgaccgcctcttctgacgaggaaacactctcccaattccatggcagctcacgttcagaattgcagctgaaattggcacatgcttgttgttccttcaccagac

SEQ ID NO: 117411 - DNA, 457 bp, Glycine max
  Clone ID: PAT_MRT3847_77031C.1
ggctcgaggtaatacattgccccttgtatctttttcagacaccgaactccaaaccattttttgctgctgaacatgaagctgattaataaaccatagcaactgcttgccctgttatgctgcattatgatcatattggaatacgctttcgttgctggcgaggaccctgatagattgttctactggaccattacctacggagacattaagtccattcggagttaaacatcagggtttttttatgaatggcaaatccccagggcctgaattctattccgtaaccaatgacagtgatgatcattaacgtgcacaatagcttgaccgaaccgtttcttctatgatggactggtgttcaacacaggagaaattcttaccaagatggagctaatggaaccacacgtaccattcgtgctgtgaagaacgtcacctacacacttcaagtcaaagatcaagtagggag

SEQ ID NO: 117412 - DNA, 447 bp, Glycine max
  Clone ID: PAT_MRT3847_77032C.1
gacactcaaaggacactagcactaagcaaagttcatccttgagttaaaaaatggtgtcagctcgtacctgggctatcaaatccaattcttggctgtcaggccaagaagcgtgtgcccagttagcctcactaggtgaggaatgctgatacatgaggaataccgtgaccaaccagggctcctaaggatgcccatggcacccgccacaccgagtcacttacttaggctcattatttgcccagccgcagacctatctagacaattagtacccaacacagtacggctgacacactgctgatctgtctacagagccacatacgttctcaacgaacctctatcttttagtgatgcactacaggtgcgccatgctcgtagactaaggctgcacttaccctgactagctgaccggtaacgagccgaatatcagtaaagccgtctagttaaggccag

SEQ ID NO: 117413 - DNA, 485 bp, Glycine max
  unsure (1)..(485): unsure at all n locations
  Clone ID: PAT_MRT3847_77033C.1
gcttcgggacccccccggaccaccccaccaaattaaaaagacaaacctttaaggttgtgggagctgggccgaaggccactgaaaatgtgcttcgggggtggaggcaacgataataacctcctttggcccacggaccttaagcccaacgcttaaggaaactactcattggcaggggtacaagctatttcttccttggaaaaccaagctcaagttttaacctttccttccgaaacctttgttggcttatacaacggacacgggggtcctgaaccttcccgtttaatnnnnnnnnnnnttttctccttccttcgaaaattcgcaaccgaggaaggtgatttgtcgaaggaagttataaaaaaggcgttcaaggcaaccgaggaggagtttttgcttgtatggaggaaatcatggattgcccggccacagatagcttaagagggttcgggttgtcttctggaaccaatttcaaagggagttctttatgt

SEQ ID NO: 117414 - DNA, 885 bp, Glycine max
  Clone ID: PAT_MRT3847_77034C.1
ctcgagccgaatcggctcgagacgacagaaggggactgattataatattaaattttgaaagtgaaataatgcgtgacttacactaatattttcataaactgtgcacaaacttttgatgtagacttgaattcttttatgtcaaactcgtatgcaatttcatcattactattatgaagtgctttctaatagggagtcagccagacgctcaagaaggagaaagcaggctcatttaactgagctggagacacaggtctcccaattacgaagtgaaaattcttcgttgttaaagcgattcacggatgtgagccagaaatacaataatgctgcagttgacaacagagtactgaaagctgatgttgaaacattaagaacaaaggtgaagatggctgaagagacagtgaaaagaattactgggttgaacccaatgcttcatgccataactgagatgtcatcaatggcaatgccatcgtttgatgaaagtccttctgagacatcagctgatgctgctgtttctgtgcaagaagacccaaatcatcaccgttgtcaacccacttctaataatgggttgggaggcatttcttcaattgaaactgtgcagcagaatgttgcagcagtggtaggtggcaacaaaacggggagaacaacttccctgcatagagtggctagcttggaacatcttcagaagaggattcgtggtggtgcagattcacgtggacctccttctaatggagaacaataacatagtagttaaatttacattatgctttttatgaggaaactattctaaaactcttgtttctgctagttgtaagtaagagcaaattcttattgatgtatgtgaatcttattgagcatattctgctggataatcctatttttcttttt

SEQ ID NO: 117415 - DNA, 1951 bp, Glycine max
  Clone ID: PAT_MRT3847_77035C.1
ccacgcatccgaaaaaatgactatgtttagcatcgaaaacataaatgcttctggtcttgaggagttgattgtactatcatgtgctgatatataaccaaatgtttggcctaccagataaactgattataatattaaattttgaaagtgaaataatgcgtgacttacactaatattttcataaactgtgcacaaacttttgatgtagacttgaattcttttatgtcaaactcgtatgcaatttcatcattactattatgaaggaaaggttgcacaagtattataatttttgtgttattggttgagctagctaaatgaatctggattttattgtttcttcctaaacagattctttctttattttcctttattagaaggcattcattttgttcagttcaggtactggtacaaattctgccttgtttaatttaaagcctaacaatttgtctttcaggatgctttctaatagggagtcagccagacgctcaagaaggagaaagcaggctcatttaactgagctggagacacaggtctcccaattacgaagtgaaaattcttcgttgttaaagcgattcacggatgtgagccagaaatacaataatgctgcagttgacaacagagtactgaaagctgatgttgaaacattaagaacaaaggtgaagatggctgaagagacagtgaaaagaattactgggttgaacccaatgcttcatgccataactgagatgtcatcaatggcaatgccatcgtttgatgaaagtccttctgagacatcagctgatgctgctgtttctgtgcaagaagacccaaatcatcaccgttgtcaacccacttctaataatgggttgggaggcatttcttcaattgaaactgtgcagcagaatgttgcagcagtggtaggtggcaacaaaacggggagaacaacttccctgcatagagtggctagcttggaacatcttcagaagaggattcgtggtggtgcagattcacgtggacctccttctaatggagaacaataacatagtagttaaatttacattatgctttttatgaggaaactattctaaaactcttgtttctgctagttgtaagtaagagcaaattcttattgatgtatgtgaatcttattgagcatattctgctggataatcctatttttcttttttttttttgtgtgtgtggactcctccaaatcttaattcatggctgatggggacaaaggagtgtaactagtgttggtagaggtcgccttatccaaattggatattgtttgcttcctccttactcgttttacatcagcagggtccgtgttgtcattcatagatgtctctccctcaatgtcctcatcatctgactgttctcttgatgatccacttgtagatggcctaattgcaacagcaggtttcttttgcatggcaggtatggaaggaatcccaactggtacattggtatctttatcttgtaacttagatggatcattttcagaaggaatagatcctttagaagtagtctgagattcaactagagaaggattagtcggctgtgatccaccttcagaaaaaggggacgggtcttgagatttagccaaagatcccctagtcatggcgacggcggcgcatgcgaggttgagcttgctcttgaggaaggcctggtattcgtcggagtcaagggggacgggaccaggggcattagggagaacggcgccgtttgacggagggggaggggcgggtttaggttgatcttcgatctcgacgaatacgacgtcggcggcggaggaagaagacggaggagagggtgcggaggcggaagcttcctggaggaagcgttggaaggcccactcggaggcgctgcggctcatctgggaggaagtttgggcggcggagacagggataggcggctgccagaagtgatcggagatatcgtccactgagaacaccctatccatatcgtatat

SEQ ID NO: 117416 - DNA, 1895 bp, Glycine max
  Clone ID: PAT_MRT3847_77036C.1
gagactgtgagcgagactcggtagtaatagtatagtctacaaggtttcgtattctactacttgaaacctaactcttccttcttcttctacattactcctatggctcccgatgcttccgacgcacttgcagtaaggcagaaagttcaattatttctgaacgcggctcgtactggttcaattgatctcttgaagaaattggcgttgcagctggacgagggcaaggatttggcgaaatcggtggaagcaataaaggacgccaacaagagaggagcactgcattttgccgcgcgagaaggccaaacctctgtttgcgagtacctcttaaccgatttgaagctctctgtcgattctcaagatgatgatggcgagactgcactcattcatgctgctcgtcagggacataccgccaccgctaaatatctgattgaccacggtgctgatcctactgtggctagcaatttaggggccacggcattacaccattctgcggggataggagatgctgagctgctcaagtacttgctgtccaggggagttaatcctgatctagaaagtgatgcgggaacacctttggtttgggctgctggtcatgcccaaccagctgctgtcagtgtactgttggaacatggtgcaaatccgcatgccgaaactgatgatggtattaccccactcctttcagctgtggcagccggttctctagcatgcttagagctgttaattcaggcaggtgctaaagcaaatataagtggtcaagctgagcatgctttagctgatgcaaagataatggaagtcttgaactatgattttgccaaaagcttgttatagggaatgggcagctctctgacgaggatggtgtcaagctgaagcagcaagttgctgcaaggggctatccaaaagctgttgagatattgttccccttgacgtccaaagtagatactattcctacttggactgttgatgggatacttgagtatatgcaatctgaaactagaaagcaacaggatgaatcgataaatgcaaaagaaactaatcagcccaaggaagctgattttccggagcaaaatgtccctgaggtggcacctgaagccaaaaagagagcagcagaagcaaagtcaagaggggatggggcttttaaaaggaatgaccatcatatggctatagatttttatacccaagcaattgatctgaaccccattgatgctactttgctatccaatagaagtctttgttggattaagttgggtcaagctgagcatgctttagctgatgcaaaggcttgtagagctttaagaccagattggccaaaagcttgttatagggaaggagcagctctgcgtttgttgcagaaatttgatgaagctgcaaatgctttttatgagggagtaaagcttgatcctgaaaataaggagcttgtaaatgcgttcagggaagctgtcgaggctgggaggaaatttcatggaacggctgaaaataaatcatagtttagccttttgttaataccatgtttcagagagaagagatcaaaatattgcgggtggtgcagccttattcacttgatccttttttccccaatgtgtgtgtgcgtgttttctttaactagttactgtcgtataggaagagtcagctagtaatctgtttcattaaattgttttagtaattataaaggttatgcttatttgacatgttccaaaattgttgcagaattagtacacattatgaaaatggcaatgcaggttcatgggtatttctcccatactgttgtaggattcatttgtttaaagttcagaattttttttatagaattaattttgaattgtcgaactcaattaagatgagtatttgaagatttgcattgaaacttatttttggttagcaagggttaatatgtttatggt

SEQ ID NO: 117417 - DNA, 1245 bp, Glycine max
  Clone ID: PAT_MRT3847_77037C.1
cgcgttccggctcgaggctcaagtacttgctgtccaggggagttaatcctgatctagagagtgactcgggaacacctttggtttgggctgctggccatgcccaaccagcttctgtcagtgtactattggaacatggtgcaaatccaaatgctgaaactgatgatggtattactccactcctttcagctgtggcagccagttctctggcatgcttagagctgttaattcaggcaggtgctaaagtaaatataagtgctggtggagcaactcctttgcacatcgcagctgataatggaagtcttgaactattaaattgcttattgaaagcgggagctgatcctaatgtctctgatgaggatggtgtcaagccaatacaagttggtgctgcaaggggctatctaaaagctgttgagatattgttccccttgacatccaaagtagatactattcctacttggactgctgatgggatactcgagtatatgcaatctgaaactagaaagcagctggatgaatcgattaatgaccaagaaactaatcatcccaaggaagctgattttccaaagcaaaatgttcccgaggtggcgcctgaagcccaaatgagagcatgcagaatcaaagtcaagaggggatgaggcttttaaaagatatgactatcatatggctatagattcttatacccaagcgattgatctgaaccccactgatgctactctgctatccaatagaagtctttgttggattaagttgggtcaagctgagcatgctttagctgatgcaaaggcttgtagagctttaagaccagattggccaaaagcttgttatagggaaggggcagctctgcgtttgttgcagaaatttgatgaagctgcaaatgctttttatgagggagtaaagcttgatcctgaaaataaggagcttgtaaatgcgttcagggaagctgtcgaggctgggaggaaatttcatggaactcgtgaaaatatgctattaatacctcgttcctaagcattgcgggaagtgcagccttattcacttgatccttttttcctcagtttgtgtttgtgcgtgttttctttcactaggtacagtcgtacaggaagagtcagccagtaatctaatcagtttcattaaattgttatagtaattagaaagcttatacttatttgaaatgttccaaaattgttgcagaattagtaaattatgaaaatgtttcatgggtatttctcccatactgttgtaggattc

SEQ ID NO: 117418 - DNA, 297 bp, Glycine max
  Clone ID: PAT_MRT3847_77038C.1
ggctataaaacgtataaaagaaaaaacaaaaatggcaccacggagaatataaagtagcaatcacttaaatacatatacaaacacaacctgttaaaaattcttacctcactaccacacatatgcccctcacgcccagacgaacagaactttgaacctaccacctacaataaagacttataaaccatctcttccagcaaacgaaccttgacacaaaccaaaaccactacatattctgattatgaagacaccaataaataaccaacttctactgtcaccaaacctatacttataaactat

SEQ ID NO: 117419 - DNA, 458 bp, Glycine max
  unsure (1)..(458): unsure at all n locations
  Clone ID: PAT_MRT3847_77039C.1
gccttgtaaggcttttgaacctaatgcaaatttagttgatctaaaaattgtttcttatactatatagtacaacttaacgaaggcatctctaacttattacacaccagaaaaagatcatactatataaaaaaacacngcttctagcagatccctccattaaggggtgggaanncccgcaaacaaacctgcgngctaaaaaacacccacgnaaggcgggcttttactacctcaaatttatcattgngacagtgacttggttcacagggcatgattcttcttgtttacttgaagaagaatcagtttccataggattccttcctaaacaaaatccaacgtctctgggctgcgacattgatgcaggggcactcctcaggattaagaccacagaagccatgggcgggctatttttcccacgctcttgcacgcataagagaccgacttgcttgcatctaacaact

SEQ ID NO: 117420 - DNA, 316 bp, Glycine max
  Clone ID: PAT_MRT3847_7703C.1
cccacgcgtccgcaacatcttaacccttttcaaatgacatgccatgcaagaagaaccttaacaaacttttaaaccatgcttcaaaatcaaacaacaacaacaacaacaactgttgtttgttttgccattggggggcttcctcttaagtttctccaacctccacactttttggcatgtggaattttttgccaccagaataaccatcctcatccttttaaccacctccttttccattgaaaccccgaagggggggttttcctattttttcaatttccccttacaaggctgggaaaataaaccctccttcacggggggg

SEQ ID NO: 117421 - DNA, 497 bp, Glycine max
  Clone ID: PAT_MRT3847_77040C.1
gagtcatctcccatcttccttcacttaacatttcagttcatagtaatataatacaccatgggattctacacacagaacctttttttcttctttcacctcagcttcatcatggttcgaggtgtacgctgccttctccacattcatgatgctcctcagaacagcattccatgacctcattccccagcaattccgatccctcattgtctcaaagctagagtccttcttcaccaaataccaacaaaataacgaaatccgtctcaaaatgaaccaattttgggacgaaaattcgggagaccgcaatgaacttttcgatgctgcccaggagtacctccccaccaggatttctcacacctacaagtcgctcaaagttgggaaactgcaagacgagaagcacattgagctcgcagtggatggaaggaagacgttgggacgaatttgaaggccccaattcacttggaagctggatgaaggtccaagaggactctaatattcacaca

SEQ ID NO: 117422 - DNA, 486 bp, Glycine max
  Clone ID: PAT_MRT3847_77041C.1
gttacagcctgtgagttcaaaacttgtgcgaaatcgcatatcatcctgtttccaattcagatcttcttgatgtgcatgtcttgagggttttatgcagaatgatgaacattctctaaccaacccattaatgatttatttctatttattttgcaaagggaactatttttgcaagtgaaacttgttcctttgaggattttgtttgatatacatgctgtgcttatggacggtcttgtactgattcgttatgtcatcagcacaaaacataaacctaagctacatctaatgttgccaccatgatttttttttgtgtcccaattcatatcggaataacacttccacattgtggcaaatattataattcctttctaatatctcaatctaaataaaaactttttcgattcccattcaaggcattttgaatatgaagagtttttggtgtcacatgatatttttttctttgacaaaaatgaagttatgggtatgctt

SEQ ID NO: 117423 - DNA, 328 bp, Glycine max
  unsure (1)..(328): unsure at all n locations
  Clone ID: PAT_MRT3847_77042C.1
aaggtnacaagggacaattttttttcatgaaggttaccaaatttctaatcaacatttacaagagaccctgcagcacttaaattccgggggggtgggggttttaaatggtggaaaatcctataaacccttatttctttctcttttttttttcccacaaacaatttgggattggaataacaccaccaaattttggctacccaggtttaggaaatccaatacggggattggcataataaaacactgggtgataaggccccaaaaaaagatcttcaaaaacccaaagggggcctttggggggtgggccatttagggggacaaaacccccctt

SEQ ID NO: 117424 - DNA, 307 bp, Glycine max
  Clone ID: PAT_MRT3847_77043C.1
tcccacgcgtccgcacagaacatgagggatatgatccttttcttggtggaattcaaaaatatgccactcccatgatgcccctagatgaagaaattctttctaaggttgcacaagatatggttgaggaatggtttgattgtgttgatgaggaggatttcttcgaggcagagtctttgagagcaattctctatggcactgtgggtttggactatatgcactgtactatctgatgtcgcgactgagggttatatctatgtgctgtctggctataatggagaaataggcttaaggagaagtgatgctgggg

SEQ ID NO: 117425 - DNA, 446 bp, Glycine max
  Clone ID: PAT_MRT3847_77044C.1
ggctcgagcggaatcggcaactgctcttactagtctggtgaggtttctactattccttctgatgatctcgcaatgccatcaagggaggagctcctacgctggttccgttcgctccatcggacacacctcccaaggtcaaacagatgacctgtacgccaacagcttccgtttatgaaggttctgctcacggatttggaatgctaccactggatctatttagcgcatatctgggctaaacagatctgccaaaacggatattttttatgaagagggccagatcagtgacgtgcgctcatgctctctactgttcatgtccaaagacaaggagcctataatggctgaaagacaggacaagagaacttgatgtacctttgttccccagaagacggccaagacatacaaggactgcagtatgagcgtggccagacatatggccccacatatga

SEQ ID NO: 117426 - DNA, 270 bp, Glycine max
  Clone ID: PAT_MRT3847_77045C.1
gtccgcgcttctatctccctttaatggcaacacataagcaaggtgtgtgcttttccttccagggcggggggggcacaccctccccttcttttaccactttgaaggttgacaatgatttgccatggttgccgctctcctcgatttctcacacccccaggacttttataaataaattacctcacttgagcatgcttcttgccgccattatcaacacctttctccctttttttaatcaccccattatactctattttaaaccacaccctcccc

SEQ ID NO: 117427 - DNA, 105 bp, Glycine max
  unsure (1)..(105): unsure at all n locations
  Clone ID: PAT_MRT3847_77046C.1
cgtattaagcgaccaaatgcttcngggagttgagggaaatttatatccggggatgcccgatataagtcaacctttcgaactgctgctgaatccacgggcaggctt

SEQ ID NO: 117428 - DNA, 1625 bp, Glycine max
  Clone ID: PAT_MRT3847_77047C.1
ggaagacttaggcccactgaatatcaaagaacttgagcatcttgaacggcaattggattcatctctaaagcaagtgaggtccacaaaggtaataatggataatttatacataaaaaatgtgttaagtttttggcaaattaatatatacattaagcttattaatgtagttcttgatcagtagttgcagcagcctagcgtaatttctctatttgatttaagcatctttccgtttttccgtacaatttgtttttgccaatactatggccgatgcaacattagaataggatttatcattcattaaagattttggatatttttatatgtgaagaaaatgtactgttaaggagtcatatgtaacatattcttctttttgtaatgaaaaaaaataatgcatgtggtaaatatatgatttattgtgtttgtatcctttaatttttcactactgtgtaattttcttaagaaaagcttattgtgactccttttggttacttggcactgtctgaaaaaccaatttgcagacacaattcatgctggaccagttatctgatcttcaaaccaaggagcagatgttagtagaagcaaacagatccttgacagtgaaggtaattttattccattatcctcgatgttcttcccctacctatcaagatcgattttgtaacacaaatatatatccagcttagataatttgatattctttttagttttaatcagtttgggagtgtactgtactaccctgcatctgtattttggcctatcagattggatacctgcaagttaaaattttcttcaaaatagtcctaacattgttttaaggtggtgaaacaaaaataaataaaaaccttaaggtggaaatattattctgcatattgtcgatataaataatcaatcttagtcattttacattaaggtcctctgctgatgacatgattcatgtctaactacttgttgtcaataggggaaataccaaagaactgagcatcttgggcaattggattcatcaaagcaagtgaggtaaagacacaattcatgctggacagttatctgatcttcaatctaaggagcagatgttagtagaagcaaacagatccttgacagtgaagctggaagaaatcaattcaagaaaccactacaggcaatcatgggaagctggtgatcaaagtatgccatatggtggtggtggtccagagaattctcactctcatcagggcttcttccaaccattggaatgcaaccctacactacatattggtcctgattacaggtacaatgctgtagcttcagatcagataactgccacaactcaacctcaacaagtgagtggctttattccagggtggatgctttgaactaattaggctcagtgcattcaggtggagacataaaaaagcaaacaccttacaaaagggcaaaagccaaaaatgcatcttggtgttggcaaggtgtaaatgcaaccctgcttctacagttattttggtgtataagaaactgatgttgtgacttgttcaaacttttgagactttttagccatagacatatatggcaatttataacattaggtatcttttaaaggatccctttttattattaaaatatccgagcgaccggtttcaatttttctatac

SEQ ID NO: 117429 - DNA, 157 bp, Glycine max
  Clone ID: PAT_MRT3847_77048C.1
aacacgcattcgtcgaagcaaactcttctttacgcatgttctagacttcaaccttgctacgatcatggtagcattacaaaggcacgcactcaatatgttcagattacatatgcacactagcaaacaaactcaggcttcctaggcaagacccacaagt

SEQ ID NO: 117430 - DNA, 2820 bp, Glycine max
  Clone ID: PAT_MRT3847_77049C.1
ccacgcgtccggtgcgtgtcctttgtgtgaaaacgaaagccacaatactcttttctctctcccttctctttctagaatctgcgtttccttttgttgctctgcttcgcgttcgtgttctacgtcgtcgtttttgagctggttaaagggattctattctagggtttcacgcaagaagaagaagaagaagatgacgacgacgatggagagcttgattgggctggtgaaccgaatccagagggcttgcacggtgctcggtgactatggcggcgctgataacaacaccttctcttctctctgggaagctcttccttctgttgctgttgttggtggccagagttcagggaagtcttcagttttggagagcattgttggtcgtgactttttgccaagaggatcagggattgtgactaggcgtccattggtgttgcagcttcataaactcgaaagtgggtcacaagagtatgccgagtttcttcacctgcccaggagaaagttcactgactttgctttggtccgccaagaaattcaggatgaaactgatagagtaacagggaagacaaaacaaatatctcctattccaattcatcttagcatctattcgccaaacgttgtcaacctaactttgattgatttaccgggtctgactaaagtggctatagagggacaacctgagaatattgttcaggaaattgaaactatggttcgttcttatgttgaaaagcctaattgcatcatactagcaatatctccagccaatcaagacatagcaacttctgatgctattaaacttgccaaggaagttgaccccacaggtgaaaggacatttggggtgttgacaaagctagatttgatggacaaaggaaccaatgctttggatgtccttgaaggaaggtcttatcgcctgcaacatccttgggttggtatagtaaatcgatcccaagcggacatcaatagaaatgttgatatgattgttgctagacgtaaggagcgtgagtattttgcaaccagttctgattatgggcacttggccaataagatgggttcagaataccttgcaaaacttctctcacagcatttggagtcagtaatcagggcaaggatacctagtataacatctttaataaacaaaagtatcgaagaacttgaatcggagatggatcatcttgggagacctattgctcttgatgctggggctcaattatacaccatcctagaactttgccgagcatttgaacggatattcaaggaacatttagatggagggcgtccaggaggagataggatatataatgtctttgacaatcagcttcctgctgctttacggaagcttccacttgaccggcatctttctctccagaatgtaagaaaagtggtgtcagaggctgatggttatcagcctcacttgattgccccagagcaaggttacaggcgcttgattgagggagctctcggttactttagaggcccagctgaagcttcagtagatgctgttaactttgttttgaaagaactcgtaaggaaatcaatagctgaaacaaaggaactgaagcgcttcccaacatttcaagccgaactagctgcagcagcaaatgaggctttagaaaggttccgtgaagagagtaagaagacaactgttcggcttgtagacatggaatcttcatatctcactgtggatttcttccggagacttcctcaagaagtggagaaatctggaactcctgctgccacaaatattgaccgatatgcagaggggcatttcaggagaattgcatcaaatgtgtcatcctatatagggttggtggcagacacgcttagaaacacaattccaaaggctgttgtctattgtcaggtcagacaagcaaaacagtcattgctaaaccatttctacacccaaatagggaagaaagagggtaaacagctatcgcaaatgttagatgaagaccctgcattgatggagaggagacaacagtgtgcaaaaaggcttgaactatataaagcagcaagggatgaaattgattctgtttcctgggtacgatgagcttggattctgttgccctcatcttgatgatagtgatcgatcatgggttggctggaccctgatgtaatttacatatttactatcatattttgttaatgttcttgattgtaggataacattggagttacgttgattgtctgaatgtatggtatacttccatacagaccttggtgatcccttctttggttgttactgtgatatgtagatagtagattaaatttgtgtaaatgtgtgtattctttgtgatctccttctttggttgtctatttgtgttttctttgtaatctcagccttgagtctcaaaacgactattttggtattccaatgtttatcttccttttcttgacactgaaaaaccaaaagtggccgagaagtcgtcagccccagaggaaagttgacatgagttgacgatgaatcatacccaaattgaagattgattaaacttcggcaaaatagagatacgcagaagagacaacaaattgagtaaaaaataactcatctaattactaaggcaggaagttttacaactgatcttgttcaagtggcaaggttgaaggttatacagaagatcgttgaaaagttccaaggtttgaaggaaattatggaaaagtgccaaagaaaattacatgtcgaagaggacgcctaattagttagcagattccaatgtcttctgtacaggattttttcttattattctatctgtagttgcaccgttttctagttggtcctggttaatgtatatattaacttttttagagctattttgttattgttttattatt

SEQ ID NO: 117431 - DNA, 121 bp, Glycine max
  Clone ID: PAT_MRT3847_7704C.1
agcaaaaggagaaattgatcatcataacaaaatataactttgaactaaccaattcgtacagggctacacacaaaattcaagcggtgcggcaggttctgacaatatctcaaatctactcttt

SEQ ID NO: 117432 - DNA, 269 bp, Glycine max
  unsure (1)..(269): unsure at all n locations
  Clone ID: PAT_MRT3847_77050C.1
attttatccaattganatnttaaaaatgactgggatanacttaaganttcaattattgaaattgaataagtanacaatttaattggantggncgaatggtatcaaaaaaatggagtactaactcccatntcttattattattgaattaaccgatcaacttgctttgttatcgaacatntctttttgatttcaaaaattttccggaaaanatttgaatctattttatatgcgntcnannctactacntctggtcctgaggttcngcgcct

SEQ ID NO: 117433 - DNA, 233 bp, Glycine max
  Clone ID: PAT_MRT3847_77051C.1
gactagacggtagaccttcactgttcagtgggaagggcagtgactaggttaccaaaatgtggatactgcttgatgtttatttaaagactaaggatttagatcatatatgtgttagctgcatactgaatcaagaatacccacaatgcccccttgtgagataataaaagatgattatgcatcatattgcctaatactaaacacacacttattgtggctggacaggaggtggtctc

SEQ ID NO: 117434 - DNA, 220 bp, Glycine max
  Clone ID: PAT_MRT3847_77052C.1
gtgattcacagaagcagttgcgccatgagaaacactatcggtccgtgagttctcatgatgtggcatattgggcgcgcagtttatgctggatttggagagagcctgcaaagatcattacaccaaaagatgctggagatttggtttgggcttggggttcagagttgtttctccttctcatggttttaggaagttgtcagttgcacatattgtttcaccatac

SEQ ID NO: 117435 - DNA, 573 bp, Glycine max
  unsure (1)..(573): unsure at all n locations
  Clone ID: PAT_MRT3847_77053C.1
attcccggnngtcgaccccacgnncgtccggggtgcgtcttggctctagttctgcttcctgtgctcatacgttgcgcctgtcatgtgttgccgagcgcgccgcgaggcttttcttacccgcatgccgaacccacattgaggacccctctccgccagagagagacagagggcgctagagaaccactgacctatgtcgcagaatagaccgccacttggcactctaccgtgcggactgagagtgttgatgggcccgcggtaggcaccccctggcccaacactcattcgaccatggagtgaccccggggctggcgggactgctcatccgtactttggggatcctgagagtaaggacacccagattgacaggccatcctcgagctcagtttccctggctaagttgtcttcagagcacgactattgtgtgcaggctcaacaatcatacggagggtcgcagcgcggtcggaggcctgagttcagggacaggactgatctggatgacactgtgggctcaaacgacgctggagtcccgaacagccactagttcgaagggggcaactatacttctcatgctga

SEQ ID NO: 117436 - DNA, 312 bp, Glycine max
  unsure (1)..(312): unsure at all n locations
  Clone ID: PAT_MRT3847_77054C.1
ccacacccctccctaatcaacccttactttacttctttttcctccctctacctcaccgccttatagtgccgccgaaggccgaccccaaccacatcgtnaaaatgctcttcacacaatgctcctccgctaaataagcccaaggcctggaatcaccccaaaaatcaatcccctccgtctctcccacaaaaaaatcatagaagatctcgccaacctaaccaacatacactttaaaggccttcaagtaaccttaccactcatcggacataaacgcaacgccaacgtcatcatgaacccattcatcaacgacctctt

SEQ ID NO: 117437 - DNA, 114 bp, Glycine max
  unsure (1)..(114): unsure at all n locations
  Clone ID: PAT_MRT3847_77055C.1
aaaacgcaaaaaganggaaggcagggaaggacanaaagaggnnccgaacgcaagcgcaacacgcgagaagaggcgccaagaganggggacaacgggacgccaggaaaggagaaa

SEQ ID NO: 117438 - DNA, 186 bp, Glycine max
  Clone ID: PAT_MRT3847_77056C.1
cttacgcgtacgaacatctgatttcgtttctgtcttccattgtctcaagggagggttacatcaatggattccgactgacttgacattcgttttaagctactattcttaattccaggttatgcacatgtactatttgacatcttcctatattcacttgattttccgtgtaattcgtaatgatttact

SEQ ID NO: 117439 - DNA, 476 bp, Glycine max
  Clone ID: PAT_MRT3847_77057C.1
aaacacaaccgccgttaaggagacggatttactaccacaagcaaagctcagaacaaaattttgttaacgctaacattgcggatttgatatccattgatcaataacgacagatataactacgacaactttgaaaacacactattagctaacgggtggggcctttacattttacataagactaatgactacctgggaacaaaagtggccgacccttcacatctcttgagccaaaaagagggacctacagttccaggcaatgaagggataaagggacaagtgacattttaactatcctatgcctatgaatccagaggttacgttggcaatttctggcttttatacggggaggcactgtatgatatgccttcttatgaggaggctggattggaggcccaaactcgccttccttgggaggcgcccggccccgtaggagtgcagcatatgccttcattggataaaatggaaactgaacatac

SEQ ID NO: 117440 - DNA, 339 bp, Glycine max
  Clone ID: PAT_MRT3847_77058C.1
actgattcaacgatggacgccaatggcaattgggaagaggatgatgacgaagagttcgagttatcacggaattattttcaggccaatgaactcgcctcctcatccgccaagacatcgaggcatcagctcatctagttctatgtcattgataaacatgaactgagggatgctgcgtctaaaattgaacccaatcatgaatacgagatccctctcttgttggatacgtacaacatcatgtaacctgaatggatttgtgctctaatgttctgttttgggcttctgatgtagtgatttggattactgatagctctgattgataattttgcttcacctgagctg

SEQ ID NO: 117441 - DNA, 416 bp, Glycine max
  Clone ID: PAT_MRT3847_77059C.1
ggtaattattatcccttgattcatatgctgtcaagagtatcctgtccctgtatgcttggatctgatcgcccaaaacacgttatgcaagaaattcaacgcactcaggacacactttagctcagaaatcctctgtaagcgggagtggttaaggcttgccccagagagccatggtctatgtgaggcagaaccactgacactatttacaattgacacaattgccgaacttaaggaatacccgtctgacaaagaggctcaggatcatgatgactccaaagaccttatgctagaaggagcttctgtgaataaaaactccaataacccagctagggcgaagagatcagcacaaccaatgaacaagtactgacaagcgattcaaaggaatgtgataggtaaaggcttggttgcatgatgaccta

SEQ ID NO: 117442 - DNA, 147 bp, Glycine max
  unsure (1)..(147): unsure at all n locations
  Clone ID: PAT_MRT3847_7705C.1
cncgttagtcgnttgtaacgcctntgnntgcggttnttgcacagnagaattaacacgtanatagcaagcatggcancccacactcgacgacctgagcttctncctctgggttgangaagctgatgagtaacttctccnacgcagcta

SEQ ID NO: 117443 - DNA, 674 bp, Glycine max
  Clone ID: PAT_MRT3847_77060C.1
tactcggacacgaaggggggccggctaggcgaggaggcagcgaagggacttccaaagggatatccttccaggccttgcatctttatcgaggcatgaagtaacagaagatctccaaacatttggaggactcatgaaagcaacaggtcatgcatggaattcaggattaaacaggagaagctcttctaggaatgggtgtggtaggggtaggcggcgatcacaggcacaggttaccccaactcctccccctcctcctgtggcaactgttgaaacaagcaccccacttattcagcagcttagtaacattgaagtggtgggattggaggatagaagcctagcaggttggggcaagacaaccagaaggccccgtaggcaaaggttcccggcaggtaatcctccgtcaatccggttaatctgatcactgtaagaggcttaaatttgtagatgagaatttatagagggtaagcacaaagtgggtccatttcaatattgatggaacacatgatgttgatctcaagcatggcgatttctcttgtaaattttttcaaacccgaatttgggtatatgtttgattttcagtcagtctttggtcgataccaacttaaataatgtcgcatgatttcttcttggttgactcttttaagaactgttgagaggagatatataccagtttgtgc

SEQ ID NO: 117444 - DNA, 2637 bp, Glycine max
  Clone ID: PAT_MRT3847_77061C.1
cacagattcgctgcgtgcgtctcgcagagcagcacatcagcatggacattacccagggtattcgggaagttttgctttcagaagccttgacactcccgcttcctcgttaccgtctcggccacgaaggcggccacccagctgagggaggctgcgagaagacttcaaaagggatatccttccaggccttgcatctttatcgaggcatgaagtaacagaagatctccaaacatttggaggactcatgaaagcaacaggtcatacatggaattcaggattaaacaggagaagtggatgtggtaggggtagacggcggtcacaggcacaggttaccccaactcctccccctcctcctgtggcaaatattgaaacaaacaccccacttattcagcagcttaataacattgaagtggtgggattggaagatagaagcctagcacgttggggcaagacaaccagaaggccccggagaagattctttcctgcaagtaatcctccatcaatccggttaatctgatcactgtaagaggcttaaatttgtagatgagaatttatagagggtaagtacaaagcaggtccatttcaatattgttggaacacatgatgttcatctcaagcatggcgatttctcttgtaaatatttcttcaaacccgaatttgggtatagatatgattttcagtcagtctttggtacacgtcaagcgaaataaacagatctcatctcgtagcacaacttatcttcttagaccaactttgtgagatttcaccgtaccttccaagaagctcgctggaaacccacgttccgtatgccattctccgttcagtatacagccaatactatgcagatactcagtccactccattggcaatactgaacgcatcaccccgtcattcacctgccgtgttactcgcacacgcttctcctgtcttaaggcatcatcgtggtggagactcaccacagtattatgggcacgaatcaggatacttcaaaggatcgtcatcacataaccaggagcacctctatgatgatattggcagcttaaggagcatggacaacaagcaaagaaacgttcgtcgttccgggcctttggattacagtgccagccgtagtagggtaaagtctgttgaaggctcaacttctggaagcactggccccagtccacttcctaggtttgcagtgtctagatctggtccattagcgtacaagtagttgtttgatataatacccaacagaagctggtaagttattcaccttctgctagtgatcagttctctataatgggtaaatcatccaaggtttgcacaaattttagcaaatgtatatcgcactaagcgtccttttgtaatcgcctgaatagtttaaatcaatgccatattaagttcctactgttttagcgagaattcaggaccggtttcttctctgcacttgtttgagaagccaaccgatcaacatacaggatcggccactgaatctgtatgcaattggtacattgaaaacataatcaaggatgtttcaggtgctgggattttgtttgttccaattcataaatgcttcaggagtacaaggccagttggtggatattttgcagaatcagtcactgatctcagggaattacaggcttttgtacgtatttttggtggttatggcgtagacaggttagacagaatgctaaaagaacacacggctgctcttttaaattgcattgacacttcactacgctcaaaccgagatgtgctagaagcagttgctaccagtctgcatgctggtgatagaattgaaagagaagcttctgtgaagcaaatagttgatctggaaactgtgattggtttttgtgttcaggctggccttgcactggcttttgatcggctactagctgaggcttctggtgctatacttgaaaaaaggtgctcccttgatacattcgttgctggatggggtgattaagcatcctacctgatggagtaccagaaaaggaagaaatcaggagaatgagaacagtggcaaatactgtaggtgttgttaatgatcatgattcagtttgggtaagatcaattttggaggaggttggtggtgcaagtgatggatcatggggcttgttaccatacttatttgccacattcatgacatctaatatttggtccaccacagcatttaatgttgacacagagggttttagtaacaatatccattgcttggcaaggtgcatttctgcagtgattgccggaagtgagtttgttagattggaacgggaacatcagcatcgacagtctttaacaaatggacatgctagtgagggaatggatcccgaattatcaagtcatatgtcagccgaagctagtatcaagtccacacttgcagtattttgtgaaactctttgcaaatatcatactggattcttggagcgaaacacacagatctcatctcgtagcacaacttatcttcttagaccaactttgtgagatttcaccgtaccttccaagaagctcgctggaaacccacgttccgtatgccattctccgttcagtatacagccaatactatgcagatactcagtccactccattggcaatactgaatgcatcaccccgtcattcacctgccgtgttactcgcacacgctttctctgtcttaaggcatca

SEQ ID NO: 117445 - DNA, 480 bp, Glycine max
  Clone ID: PAT_MRT3847_77062C.1
tcgcccacgcgtccggcgtttaactcggtgtcccctgattttccagttttctgtgttacattaaaattcttaaaacaacagatttttaggacattgagaaaagtcatcttaatctgcatggaattttaccacgtaatacgggtaccaattcattttgtcaaatgtacctaatacgggcaccaatacatgctgtttgtatgcagcttagtatgtatctaatgagactaggtgtggtttaaggtatagttaggtatgtcttacgtactaataagatcatcctgccccattccccaaattaaagattttaagatttagtgatcttttggctttttttctcaattttctcatgtttgtttctgtatttaatcaaaatccattcatccttgcttgtgagatgtgagatacaagtttgtcaatttcttttggtatagatgtttaaactataatctattaatatttcatattcttctatagaacacc

SEQ ID NO: 117446 - DNA, 318 bp, Glycine max
  Clone ID: PAT_MRT3847_77063C.1
caaactactttttttttaaaggggggaaaaatcacctcgaaaattcaaaccacatcgcaagattctcatacaaacccaatgaccaagggatcaaaaaataaaaataaacaaccttaaaaaaaactgccacttacaacacccaaacaaaaaacactgtatcccaattctaataagcccggggagacaaccaaaaccaccaattccaaaacatttcccccaccttaaaaaaaaactccacctcaactaagtaagaatattcgtgcactaaccttcacaaaaactcttgggaaaaagttgaatttaaaacctcccatgtaa

SEQ ID NO: 117447 - DNA, 436 bp, Glycine max
  Clone ID: PAT_MRT3847_77064C.1
ggctagagagcggccgccctttcttatgattaaggatcgatgagcccagggaactgcctggggacttgctgtgcgctctgcgcatgcgacgcctgcatgaccgtcgtatcgggaatcccccgacgctccgcacggatcgtctactgcggcctcttcgacttctctctcgctgtcctctgcatcctccgtgaggccgacgttcctctcatggattccttcgcttgggccgattacgactaacacacacctatccgagaatggatagagacgggggcctccactgaggttactaagtggaacaacgagccgatcactattctagctgtgctgacggttggagtgacaacccagagggattccattgatctctatgcaccatggaggttggatgatgacagatatctgccggtgccgactgagaatctctatgtgcatc

SEQ ID NO: 117448 - DNA, 1484 bp, Glycine max
  Clone ID: PAT_MRT3847_77065C.1
gtttagttttctgggattggatgaagaatgttgagaattgaattgtggaatatattataggctctagaattatttttttccatgtaaatgaatttctcgtcgtttttatgaaggagagttccactcattcatggcttattcctcttcttgttctgtgcgggtgttggcgttggtggtccacgctcgttgcgggcgaagaaggaaacctggttggtttgggattcagattcatacaatcaacactaccggctaccgggagaggagtccttaattcacttgctgaagtggctgataggttgatggtgcagtctctttggagcaatggtgattccaatagcagtgtcgctggtggtgattctcatagggttggcttataaggccgtaaagccgccacctcctaaaatatgtggatccgtaggtggtcctgaagtagcttcacccagagtgaagctcagtgatgggaggcatttggcctaccgagaatttggtgttccaaaggaagaagctaggtacaagatcattgtcattcatggttatgacagttccaaagacacaagtttaccggtttctcaagaacttgttgaagatctagggatatatttcctccactttgacagagcaggttatggcgaaagtgatccacattcgttacgttctgtgaagagtgaagcatatgatattcaagaactagctgataaattggagattggtcataagttttatataattggtatgtcaatgggaggttaccctgtttggagctgcctaaaatacattccacacagattatcaggagcagccttggtggctccatttataagctattggtggccttcttatcctgaaaatctactaagagaagcatttctgatgctacctcactcagaccaatggacttttcgagtttcacattatgccccttggttgttctattggtggatgactcaaaaatggttcccttcattgactttgacaaatttgttgtctcctgatgatatagagatcgtgaagagcttgtcagaactccaaaacactggccaggagaggataactcagcaaggtgaatatgaatcattacaccgagacataatgagtgcttttggaaagtgggaatttggaccaacagacataacaaatccgttccctgataataatggttcggttcacatatggcaaggctttgaagataggatcattccctacacgctgaaccgttacatctctcacaaattaccgtggattcgttatcatgagcttcctcatgcaggacatctatttctcttcaagaaaaatgaatgtgagtctattatcagagcacttgtactcacatgatatttcgtaatatgatgtagtgtgcggagtaaaccattggtcttgtgaatgcgatggcaacaaaactttgtaagcagttacgatatatatttttttaaatcttaagagttgttcttatttttacaatatattttaataattattgttttgta

SEQ ID NO: 117449 - DNA, 622 bp, Glycine max
  Clone ID: PAT_MRT3847_77066C.1
caaggaaagaatactttatttctgctaccagcatcattagacaaattgcaaccgtaatctaatacagtgtgatgtacttcatatcgtgaacaacaaaaattacattatatatgtttttataaacagacatacattcaagtttcaacagctaatacagtttcacaagccacttctggctgctgaatgcaaatccttaacactactccttccggccttgcttctcttatagctctttgtgggcgtcaaatagaacctcaacaagccagtgtcgggattattgggtgaatacctaacactccggttcctctgaaacataaactcctgtctcccattcaaagcactccctttgctctcagactcctctgtgaaaccatcggttctacatgggcttctacagctaacgctatagctacgcataagcttctgcccaacaggctcacttgcttgcacattaaccaccctcctcagcctctccaaagactctgcaagaggcttgtcaacctcaacctcaaccccagaatcacccttctcttcccccatcctatcctcctttctctcggttctctgtactaatcccaacttgttccagatgccgcgccatttctgcaacttcttcgaaccc

SEQ ID NO: 117450 - DNA, 369 bp, Glycine max
  Clone ID: PAT_MRT3847_77067C.1
gaaggaaacctggttggtttgggattcagattcatacaatcaacactaccggctaccgggagaggagtccttaattcacttgctgaaggagattttgtttgtgtatagttgctgcttcctagcttcggcaacaaggttgatggtgcagtctctttggagcaatggtgattccaatagcagtgtcgctggtggtgattctcatagggttggcttataaggccgtaaagccgccacctcctaaaatatgtggatccgtaggtggtcctgaagtagcttcacccagagtgaagctcagtgatgggaggcatttggcctaccgagaatttgtgttccaaaggaagaagctaggtacaagatcattgtcattca

SEQ ID NO: 117451 - DNA, 415 bp, Glycine max
  Clone ID: PAT_MRT3847_77068C.1
ctttcatatgtattgcaaatttcagaatgctttaggaatatatgtgactgttgtttaacttttttttaccatgtgcaatgtaaaatccctatgaagttatgttgttccacacaagattgatatggcttgactcaatatttttcatgctggtattttgtgtgcgttaaatttccattgccagagacgaattttatccaagtcatttattgactttctattggtcaaggtattattagttttaaatatttggcagagttattctaaagcttaacccccctctttgttagtccaatgggattaatgagtgaaatgttgaaagatcatgtaattcaatccctaactacctgaaaatgagtttcaattcttttgaagtgaaaatgagtttcaattcaatctctctttttcctttcttttt

SEQ ID NO: 117452 - DNA, 301 bp, Glycine max
  Clone ID: PAT_MRT3847_77069C.1
aaaaactcaacaaaagtgttcacatagtatcgtatgattcaaactctgaagatgtttattttacacggcttacagctgacatataattccttatataattccttcattaaggccatcaagttcatatttaccaaattcaaaagcagaaaagataggtggcgggctgctccagtaaattaatatgcacgccactgccgtttcgttcacgagaaagtccaaaacccacacaactcattagtccttggtagcccttataactggacactaggagggatcgtccccgccttattccaaaggactc

SEQ ID NO: 117453 - DNA, 853 bp, Glycine max
  Clone ID: PAT_MRT3847_7706C.1
cttcaatgcaccattgcaacaatttgaagtagcaaatatcaaaacaattgtagagcagaaagtacctgaaggagtcaactctattggtcttacctttccaggctttatttatgtccataatttgtttctaaagaaagggagaacagagacattatgggctgttctaagaaagtttgaatatgataatgatttaaaactccgggatgatttccttcctgttccatccaagcaggcttctgatcagagtgtggagctgacaagtgaagccgtagagtttctgaatggtatctttcgattgttagatacagataaagatcgatacctacgacctgctgaagttgataagctatttgatattgctccggaaagtccatggaacgatgctccatataaggatgcagcagagaagactgatatgggctatatctctctaaatggatttctgtctcagtgggccctcatgacattacttgatccaaaacgtagcttggccaatttgatttacattggatataatggcaatcctgctgaagcactccgtgtcactcgtagaagatcagtagatcgtaagaagcaaacaacagaaagaaatgtgttccaatgctatgtttttggttcgaaacatgctgggaaatctgctttgatgtattcattactgggaaggcctttctcaaataattatactccaacaacagttgagcagtatgcggcagatgtcatcgaactaaaaggggtaactacgagaattctcatattgcgtgagatacctgacgatggactatagcaatttttgtcaaatcacgattggttggctgcatgtgatgtagcttgctttgtgtatgaccgctcacat

SEQ ID NO: 117454 - DNA, 389 bp, Glycine max
  unsure (1)..(389): unsure at all n locations
  Clone ID: PAT_MRT3847_77070C.1
ggttnnnnaagcccgaactatctgatgtatcttgnanaccaatnnnggggttgaccagctcactcatcgacggccgccctttcttttattattttaactactattttttaaattttataaccccccaaccaggaagaggaatagaggtagcttttaagaataacgctctcataacccaatataataattaaactgtttttttaatttttcccaaattggaacctacactatttcacaatcttaatcgataatatttcttcaaaaccaatccaaactatgatatataaactacataattaaaaatgatctgtatggcaaaaataattgttactacaacatacacggtcaaaatggctgcacttaacggtattccctacaacacaatttaa

SEQ ID NO: 117455 - DNA, 470 bp, Glycine max
  Clone ID: PAT_MRT3847_77071C.1
tagaaaaaaggctgaaataattacttttaggtcctgaggttattgaaacaaataatgccgccgtttaacaatcttaacctcggttgtagaattgggtactatgcgagcacctgctgggccaccttttaatgctcgattgcaatgatccatgactatgggataaccctggaaagtaaaccattgataactactttgcacgagctgcagtacttttcttctaatgaagttgccacaagagtattccttgagcggaatccatttggaaacctggtgttacgaaccaagtttggctgtgcggccccaaatgcgtggcgttgaaatcaaaatccccaaatgcttggaccaagttctacaaacccaatggtgccgcccgatctggatcgcaaccgtgcgaaaaaacgctgcttcagaaaaaacccgaagatataacttgcttgttcaccgagaaaaattgtgaatgtggggggact

SEQ ID NO: 117456 - DNA, 2314 bp, Glycine max
  Clone ID: PAT_MRT3847_77072C.1
cctccacctttctcttccatgcgtccaatcgaaatcgttctctcctcactgagcactcactctatcacttcaactctgcatttgaaatctcaattggggtgttttgctgccatatatttcaatagaaaaaggggatttgcgtgcaaacttcgtcatggaggtattcaaaagggccataatacagcctgggccaccggaaagttttgctttgaggacggttcaagaagtaattaagcctcagaaacaaacaaaattggcccaagatgagaaccagttcctagaaaatattctacgtatgttgcttcaggagtttgtgtcagcagcggtacagtttggggagaaaatcatgcaatttggccaatcaattgattctagtgaaactacccagggccacattccccgccttcttgatattgtgctatatctttgtgagaaagaacacattgaaggtggtatgatttttcagctgttggaagacttgacagaaatgtctacaatgaaaaactgcaaagatatttttggttatatagagagtaagcaagatatattgggcaagcaagaactttttgctcgaggaaaacttgtgatgctgagaacctgcaatcagcttcttcgtcgactgtcaaaggcaaatgatgtggtcttttgtggaagaattctcatgtttctagctcatttctttccgttatcagagcgatcagccttaaatatcaaaggagtttttaacacatcaaacgaaacaaaatatgaaaaagaacccttggaaggcatatgtattgatttcaatttttatcagactttttggggtctacaggaatatttttctaaccctacttccataagtcatgctccggcaaagtggcagaaatttaccttgagtttgtcggttgtactgaatacatttgaagcacaacctttgagtgatgaagaaggagatgccaataatttggaggaagaggcagttaattttagtataaaatatcttacaagcagcaaactaatgggtctagagttaaaagatccaagttttcgacgccatgttcttgtacagtgtcttatattgtttgattacttgaaggcccctggaaaaggtgacaaggatttgccatctgaaaacatgaaagaagagattacatcatgggaggaacgtgttaaaaaacttcttgaactgacaccaccaaaagggacagaatttcttcacaaaattgagcatatattggaacgagaaaaaaattgggtgtggtggaaacgtgatggctgcctcccatatgaaaaacaacgtatagagaagaaagcagtaccagatgggcccaagaaacgtaggccaagatggagattgggtaataaagaactgtctcagttgtggaaatgggcagatcaaaatccgaatgctttaactgatcctcaacgtgttcaaacaccttcaattatggagtactggaaacccttggctgaagatatggatccctctgctggaatagaagccgattatcatcacaagaataacagggtttattgttggaaaggtcttaggctttcagcacgacaagacttggagggattttctaagtttactgatcatggcattgaaggggttgtccctctagaacttttgccacctgatgtccgatctaaataccaagctaaaccaaatgacagaagtaagcgtagtaaaaaggaagaaacaaaaggcactgcccatcaaattgaggaaaatcagattgctacaaatgcaactgagatcgatggtgatggcattagaacagataccacagcaacatctatggaatttgatgctgcaactgcccctggtacacaaggtgggaccacaacgcctgaagaacttcagaagctcagctcagacactgatggtggtcaggaagcaggccaattggaagctgatgccgaagttgaggccggaatgatagatggagagacagatgcagatgttgatttagatactgttggctgaggcgaggcaaggcaaggcaagttcgcgggtcaacatgccaaggatgatgaacttttagagtgaatatcggcatcatgttttttatgacagatatagctgcaacattcaccaggccaagttcaaggcacttgtttttttaattctctggtgcaggaaggaaattatatggacttttggtatgaatgtcatttgaaaaaggaatggaatatactaaatctgagtttttccataacgtgctttccatgcaatcaacacttgaaagttgaaactgattttattaatgtcaaaagcaaagttgtttgatgtgaaaaaaaaaaaaaaaaaaaaaatttaaggcggccg

SEQ ID NO: 117457 - DNA, 361 bp, Glycine max
  Clone ID: PAT_MRT3847_77073C.1
cccacgcgtccgctgggttggatcagtaaggttataaaataaagttaattcatttaatttaatgattttttttatatattacttagtatttaattagtttgctttaaaatgaattaaaaaaaaaaagaatctacctcctccaagaaaactcttttataatcatttcttatctttattatttattttcttaatattattataatcattagatattaaaaaaaatgaaaacaataaaaaataattttgtaagaattattctcgtagtaagagtatcttttctcgtaaaaaaaatatttggttcaaggccagaattttacctaatataatgccttcttaatatttggataagtttcaaaaatat

SEQ ID NO: 117458 - DNA, 399 bp, Glycine max
  Clone ID: PAT_MRT3847_77074C.1
agagaacaagttggtgagactaacaaggagagcaatggctcctcaggatcacttgccactgaaccactgtcaaccgtgccggggccggaatggccgatccattaactgctctctagtccatggctgtctgccccacctaaaacaccatcattgactttacctcctttgctagcaacgctggaagagcgcaatacatgcagatgtggccaccagttggctataaaaaatttgagactctttcctacctgccagaccttgatgatgcacatttgggaaaggacggagaatacctccttaggactggatggagccctcgctaggaattcgagttagaacacggtttcttgtgccgtgagcacaacagggcgcctgaatactatgatggacgctactggacca

SEQ ID NO: 117459 - DNA, 887 bp, Glycine max
  Clone ID: PAT_MRT3847_77075C.1
aatataaaaaattataaacttaatatctgtttttgatgaaaaatatatactagtttataattaacatttggtttttactataaaatacaactagcaaggggaaaaagaataagaactttctatctagaatcaacaagtttaaggtttagccttctgagccagatcgagtgaagtatcatatgcattagatcaaatggctttgctggtcgattaattgtaaaatgcctttgaactctcaagacattcatttgcagtttcaaatactttttcggtgaaacactttgtaatattgtcttgatttctggaattttttccactggaatctctactgaaaattggctccaattcaagacatcagtaaagggtggagagtaactactactaattaacacaggcacacaccctgcataaattgcttccaccactcttggacttgcaacttcataaccacttgggcacaagcaaaacttgctttgtcccattagtttggtatagactttgccttttggaagagattcatatatttggacatcattatctttgtccttccaatgattcaacaaggtctgttcgaattgcaccatgttctatcactagcaaggaaagctaaaatggtacggtcattggcgtgtggtcctcgattgggtgagcctagcgttcccctaggtaataaattcacttcaggtatataaacatctttgttaggtgtgaatccttccgaggtgttagcattgcatagtaccctgataaagttcttgaagagttaaggattggcatacgaaattgtgggaccccaatcatgacatgatagtaaaaaatggtctgccccttcagttctattccaataaggatagttatgtgcaataaccgtgatataatcttccacc

SEQ ID NO: 117460 - DNA, 299 bp, Glycine max
  Clone ID: PAT_MRT3847_77076C.1
acgcccatttttatggatggtgccatacaggtatgctatgacgcggaagattagtatactatcgatgcgctgacggatgttacctgtcgagtgaccaaaaccctatttgtcctttcaaaaggctggaagctcacgggctgccacatatgacgcacgcatgcccatcaatgagggacagcttctgaaagctgtgttgtgacacttcgcctaaaaaccccgcatctgtttgataggcactgcatatcttttctaattgtgggcaaacttgaaaaatcccacttggattactgtaggtgctc

SEQ ID NO: 117461 - DNA, 359 bp, Glycine max
  Clone ID: PAT_MRT3847_77077C.1
attttttttatcatctgaacatcaaaaaaaacaatacacaaaatacaaagtctaaaacaaaattatttcgctaaaaccataaaaaaaataaaattattgaattaaaataaaaaaatttactttacacactttcaggtcggcctttctatagtattcaacattacgaactcgtaatttcaagtttttttgttttttatgggctcaaaatacttaattccctgaactttaaacttttggtatgtaactgtaaataaatatttgtaaccatatttatttcaattatacaatattgtattttgtgatttgtaatgtaactttaacaattaaaaacaataaactttattaatttatttcttaac

SEQ ID NO: 117462 - DNA, 1265 bp, Glycine max
  unsure (1)..(1265): unsure at all n locations
  Clone ID: PAT_MRT3847_77078C.1
gcggacgtgaagaccgggatgggcgccaggcgacgagcgcgacaagaagcggcggcgttacccaaaccttgggcttcaagccgtaccgtccacctgaaaactctaaccggccatgaaaacgcggtgtcgtgcgtgaacgttcacgaacgatggaacccgccttagcgataggcccccctgcacaaacctctaatcatatgtccccccatgaccagcacattctcgccgcgactcgcgagcacatccgttaagatatggaactatgggagtgggaagtgtttaaaaatttattctgggcatgtgaatagagtatactgcataacttccacattttctgtgactaatgggaaatatattgttggcggttctgaagatcactgtgtttatatatgggatcttcagcagaaattggttcagaaacttgaaggccatacagacactgtaatatctgttacttgtcacccaacagagaacaaaattgcttctgctggtctcgctggtgatagaactgtgagggtttgggtacaggattcctgaataatatcgaaactgtatggggatgttgtctttcttctagatttcaactacatgcctatgcatgtctgatttcaatattagacactattaaacatacaagttgatctcatgttggcactagttccgtttttggtattatttgtaaatatagtttttcatcacttattatagtcgaactcatcccatttatagacattctgattcttacacaaagactaatgtgtgagatgtaaagtatgagttttgtgttacctatctaaattactccacttagacattcttttctgtattgtttgtgcctgtttagatggtcgaaagtttctcatccactattttctgtgactaatgagatatatattgtgagcggttctgaagatcgctgtgtttatatatgggatcttcaggcgaaaaatatgattcagaaacttgaaggccatacagatactgtaatatcggttacttgtcacccaaccgagaacaaaattgcctctgctggtctcgctggtgatagaactgtgagggtttgggtgcaggattcctgaataatattgaaactgtacgggggtgttgtcttacttcaaaatttcaactgcacgcctatgcgtctgatctcaatattagacactactacacatacaagttgatctcatgttggcactatttccgtcttttgtatcatttgcaaagtataatatggataaatagtcatattcgttcatgaaaannna

SEQ ID NO: 117463 - DNA, 360 bp, Glycine max
  Clone ID: PAT_MRT3847_77079C.1
atttcttaactcatttcacagcaaactgtctggggggaaatgtcaacagggagaacaccatagaattttgattctagcaagcagagcttttgtcaattatctattgaccttatcggacgaggaattttagtgcacaaaactggagattgcatcacacttatacaaaactctccaataagtaacttgctgacagtcgctcgctactaagaaagagttgcttaatggtcaacattgtgatgtctgataatgcagcagataaaaggagtgagtgttcctcattggtacaagtgtgtataacaaacatctacagtacagagcatggtgaggcatgtaagtggacaaattcagaaccacattcct

SEQ ID NO: 117464 - DNA, 333 bp, Glycine max
  Clone ID: PAT_MRT3847_7707C.1
gtgcaacaagtggaggcttgaatcaacaaagaactggagtaaatctctggactcttgagattattttagtcaaacaaggaattgttcatctcgaggtgcctgttcaaaagcaccagaattcattttcaacttactttcatgtaccaaatattaacgcgcatgcatctcactataagttgatcgacatttgggataaatacttattatcatgagttgtttaaattgccttgtaaatgcacacaacatgcgagtggggttgtgacatacctttttcagtgtgatttttcaggtttcaagaatcaaaactatgcactcttcttctaaaaaaaaaaa

SEQ ID NO: 117465 - DNA, 399 bp, Glycine max
  Clone ID: PAT_MRT3847_77080C.1
ccttaatttatgacataactgatgctgtttcacattattaaggagatattgctgaaagggaagatgaataagaacccggaaagattgatgccatattgggacgaaccattgatccttagtacaacgagggtcacgctcacatggaaacaaatatgtttacatcgtttattgacgatgtttgaactactaaagggaacatgttcggagcttaaaatttctgaatctaaatagagcgctttgcaaaaacacatttggtggaaccattttgcgtggtgatctatagacatattttttgtcagagggcacttttatagcaagagttgacttgcagcgcactcatcgttttaaaagaacgaatcaaatggggtgcacagttggtgttcctgagaatacaggtat

SEQ ID NO: 117466 - DNA, 278 bp, Glycine max
  Clone ID: PAT_MRT3847_77081C.1
gatcaggcatcaatttaacaactaattgagaactaatcatgataatcatatggcttcctcaactgatgacgtccccatctgttaccactgtcaaccgttcccgtgccggcattgttgctccattcagtagcctcaactccattgctggcttccccattaaaaagaccaacaatgacattaccatccattgctatcaacggtcgtacaatacaatgcattcaagtgttgacaccaattcgcaatacctagtttgagactctttccttactgccagaccg

SEQ ID NO: 117467 - DNA, 387 bp, Glycine max
  Clone ID: PAT_MRT3847_77082C.1
ggaaaggaaagggaataaaaacatacctttgttttattaggggaaaccctttttcggcttgggtggggcctataactaaaaataatggggggctaaggaaaggtcaaccggcttttttccgggaaagccccaattttataagggaaacaaaaaaaaaaacccctggccaacccaaagggggagttgggtacaaacattacccccccggacttaaaaaaaacattcacaattggggggtcccaccaggaaaattttttattcccccccggattggcccccccgaaaagaggggggtatgcccccaatgggaccgtttaaggcccacccctcagcaaaaatgggggggagttttcttccccaaaaagcttggggtggtgagcatttgtt

SEQ ID NO: 117468 - DNA, 526 bp, Glycine max
  Clone ID: PAT_MRT3847_77083C.1
ttttgatttgtagaaggtgtttctcatcaaattgtttcaaacttgatcaccaaaaagcacaatttaccttacaaaaaacacaaattttggataattgctataaaagagatggagttggggtggaggagaatggaggttggaatttctgaaccgtaccggatttgattgtgaaatcatttgtttgactggatggactgccactgcaatgcatgatgtttaggttacaattggttggtttattttctctcacgaatgtgttcccaggacctattgtgttttaaatccacaaaatccttttgtgttaaataagtggatggggaaactgactttcccccaacgcactttccgaagtgttaaaagaatgtctttttttatagggggaggagctggtgcaaagaatgctattcttatgaatttgccaaatgcttgtcttttaatgaggagatatttttgttggagatctcgcttttgaagttctaagatgacttttccctcattaaagtacagtatttttttaattcatttg

SEQ ID NO: 117469 - DNA, 331 bp, Glycine max
  Clone ID: PAT_MRT3847_77084C.1
cccacgcgtgcgaggactcgagggctgagtgctgctccttggacgtatagtcctatacgatgaagtccttgtagagtatgagaatcaaccaccgtactcatctattgatgccagacgagaaggaaataaaactgcactttaaaggcgttgagggtaccagcccttgagagagggactcaacggattataaggcggcagtagagaatgctactcaggtgtgcacaccacacgatatgagaacccatcagtgaaatgagctcatatagaggaggtctggaggcacaagcggccacatgggagacaatgcttgtacaagtcgccagacagaagg

SEQ ID NO: 117470 - DNA, 176 bp, Glycine max
  Clone ID: PAT_MRT3847_77085C.1
gcaccgagaggggaatacgacggggtacggcatcttgcgtcgactcggaagatggaacaggaagagcacgacgtgtactgacgatagatccctgatgacggagagatggacggagaccttgacatgtctgccgccgacgatgagcccgccgtcaaggagctcgacgagatgaaacg

SEQ ID NO: 117471 - DNA, 272 bp, Glycine max
  Clone ID: PAT_MRT3847_77086C.1
ctcgaaccggattaaaataatttgaaggcgatcttttaaaaagagcttaaaccgaagggaccaaaagaccttgtcatccatgacgcagggagaattgcgtcattcaaagcctagttaacgcatttactaaacgcagacgaaaatggaaagattaattgggactggtaggatgaaacaatttggagaagatagaagtcatgaagtggaaaactggaagacagaagtccgggaaggcgaagaccagcatagagaagatagggcaattagaagat

SEQ ID NO: 117472 - DNA, 310 bp, Glycine max
  Clone ID: PAT_MRT3847_77087C.1
cccacgcgtccgcccacgcgtcctaaaaaaaaaacattaaaaaaaacaaaaaaaatagagaagaaaaacaaaaaagagaaataaaaaatgtcaaccattctaaatgatccaaattatctatcccatccatgcaacttttctgactctacacttgggccacctataatcaatttatactcctgtcttatactacacttatcctagcaaaacccttacataacccacctaattacatttgcaatatattcaacttttctcatcttgaaccactacaaaaatggcttcacttttagccctttcaaacatcttc

SEQ ID NO: 117473 - DNA, 2184 bp, Glycine max
  Clone ID: PAT_MRT3847_77088C.1
gcaccagcgtctatttgctaataagcacttcgatccaagcgtcctctctctgcaagaccctgtctctctctctacaaaactctctctttctctctctagaaattccattttaaagagatgctcatgctcctctctttaccttgctcccgttaaagctacgcttccaactctttttttcttcattcttatagggatagagctgtgttaactggtcctggttggtgagggtgctattggtgttgttctgttgatgtaagcagctgaatattgtttctatatcagaatagggtgctgtttgttgtgttgctgccaaagataaaactatacaaagtgcatcacccagtgaaatcttgcatcggaatattcgacattctccaacatggaacttccgctgggatcatcgagggcgtgtagctggtgaagatactgctgtaacttggttttctaacagtattagcgggaatgatggatttgagaacaaaaatgaatcctcgtatgtatcggaggatggaagcccattgcagaattatcaaattcaaaggaataatagattgcaaaaatccccaatctctgaaggaactgctagaaacgtgataaattcatcttctgatcaaactatttcaaggaatatctcctcaaatgtgagcatagaacaggtgaaggagttggcagaatcatcaaccgtatcatgcccatatcccgcaaaacttccacattcattaccttctacttctttgtcagtatctcctctgccatcccaaagtcacccacttccaatgagctcaacaccatcaacccttcgctgtcattccacaggacagcaactattcgcggcatgtttctgatagccgaatattgggatttaagacttctagcaacttttattcatctgaagagagcccggtggccccttctcggaccagtgtttctgctgcgcgctccctgggtgggtctctggattctggggcgtggcctggcttttctgagctgacaagcacttccctgaaagaaagatggtcatttgacagtgagtcgtttggttttaattgtgaaaggctggttagatccagtagtcagttttcaaattgttcagttgatttgcaaacttgtggtgtttgctcaaaacttttaactgagaagtcttcctggggcacccaaaagataattgcaagtaatgacctttctgtagttgctgtccttatctgtggacatgtctatcatgctgaatgtttggagattatgacacctgatatcaataagtatgatccagcttgcccagtttgcacttttggtgagaaacaaacacttaagttgtctgaaaaagctctgaaagctgaaatggatttgaaggctagaaacaataaatcaaagaatcgggttgtggacagtgatattgatgatgattctgttgtgtttgatcactttaaagggagagggcttaaaggtaaaggtcctaggatagattccagttccagtgggagaagctcctttgggaaaccttttctgaggcgacatttttcctttggatcaaagggttccagatccatattagataatcaccctacaagaaagaagggtttcttttgggcaaaatctagcaaggaataagctgcttcttggttgttgggaggttccactgttgaacttttgtgcatcctcaattggtttgtgaaaaggacaaaatgcaatttatgatttcagagcatctgtataaactaatctgcaatttcaactggataagaggttgaagttactctgtaaagaagacatacagaagtataagttgaacatacagacgtaaaatattgtgtttagaccccaatgttctttctgcattgtacaggttgatttgtttatttcatggatataattcttatatccaaatgatgttcagttgtccatggttcttatgtaatgcaaaccattagcccttcggagtttctggagttgggaaatggtcttcaaagattgataggcaaataccaattatttcgatccacttagttggttgcttttaatgaaggagcagattcaggatagcctattatcaaaccagtgtttttgcagttagcagattgaattgaatactttattctgatgtgttgcctttaatgaaagaacggtttcagcatagcatccggtcaaattaatatttttttgtcggtagtaaattgaattatatgc

SEQ ID NO: 117474 - DNA, 111 bp, Glycine max
  Clone ID: PAT_MRT3847_77089C.1
ggctcgaggtctactatagctctgtgtggctctttatcctctctataaacaactgacagttgtaccgtaagcccatcatcattgaaaggctggtcttcaccatggatctta

SEQ ID NO: 117475 - DNA, 250 bp, Glycine max
  Clone ID: PAT_MRT3847_7708C.1
ctcacacactccagatcatactcacattactttgattctttcctgttactccacatgcgagtgcaatttccaaacttaatgagccacctatccatcctacctctttaataactaaacatttacttattttccccaatcacccctttcttttccatttataaaatcattctatcacttcatttaaacccttctctgtataaaccttacctttattactataactccatcttcttatttcccaaaaatgcta

SEQ ID NO: 117476 - DNA, 1954 bp, Glycine max
  Clone ID: PAT_MRT3847_77090C.1
aattcggctgggcatcactggtttcacacttgcgactttcagtactcctattatcagtttcattgggaaattcagcttcactccaagaaaattttgtccaatgtctcaacttgaattcggacagaacattcccatttaacccactaatttacacaccaaaaagtccttcattcaccagtgtccttgactcctccggcaagaatcaaaggcttttggtgccttcaacaccaaaaccaaagttcatattcacaccaacccgtgattcccatgtgcaagcagcggtaatctgctccaagaaacttggcattcatcttagagtgttaagtggtggccatgactttgaaggagtctcgtacgtttcagaattcaaagccccttcatagttgttgatttgatcaagctccgtgacatcaacgttgatatcaaaagcaacactgcttgggttcaagctggtgccacaaatggtgaattgtattacagaatatatgagaagagttcacttcatggttttcctgcagggacttgcacaagcttaggaattggaggacacatcacaggaggagcatacggaagcatggtaagaaaatatggacttggtgctgacaatgtcttagatgctaaaattgttgatgccaatggaagaattcttgataggaaagccatgggggaagacttattttgggcaataagaggaggtggaggtggaagttttggtatccttctttggtggaaagttaagcttgttcctgttccaccaactgtgacagtttttacagttaaaaagacccttgagcaaggtgcaaccaagcttcttcatagatggcaagaagtggcaccctttctcgatgaaaacctctttatcagagtccgcattcaaagagcacagagtactgtgacaacttcttacgaaggtctcttcctaggtggggcaagaaaactccttaaaatcatgaaaacaagctttcctgagttgggtgtgacaagaaaggattgcatggaaactagctggatcaaatcagtgctctatattgcaggctttccaagtggcacccctcctgaagttctgcttaaaggaaagccaatagctaagttcttcttcaagggcaagtcagattttgtaagaaaaccgataccggaaaccgggctagaggggttgcggcaaaggctgctggtagaagacagccccttgattttatggagcccttatggtggaaggatgaaccaattttcagaatctgacaccccatttccttacagaaatggaactctgttcataagtctgtacatctctctttggcaagagggagagaagaatgttgcaaagcacatagattggattggaaaccttcacaactacatgggggcttatgtgcctagtttcccaagaggacaatatgtgaattaccgggatcttgatttgggaataaacaccaagaacaacacaggcaacattcaggaaagtgcctggggctataggtatttcaagaacaacttcgacaggttggtaaagattaagaccaaagtggatcctcagaacgtcttcaggcatgagcagagtatcccaccacttccaaagtaaacacaacaggcaagaaatcttaaataaagcactgactgtgctgctacaatcattagactgtgccactgtggtatccataaatttgtgaaaaaaggttgatttgctagtttagagcaataaggaaacgcaaaggggaagtctaactcaagtttctttggctctaaagtttgactctttcctatgaataataataaaaaaaaaagaagcaataaggatacaattagatctgttgctttgttgttgttttttttatcgatttgatgttgtaaccatgttttcaactatgtttatttctcgctatcctccaatactagttctttcttaagtttatagaatttccttttccttaaaaaaaaaaaaaaagggcttttatct

SEQ ID NO: 117477 - DNA, 571 bp, Glycine max
  Clone ID: PAT_MRT3847_77091C.1
ctcgtgccgaattcggcacgaggctcattctcgtgaaagcaaaacactgaaaaatgcaaattttatattatattgactacatttatattattttatatcaagtttctgtataagaaacttgacgcaatcaatactcgacacatataactgataataacatttacttttcagtattcattttcaccattattcactctttgacgttgcccgagctgcttccctataccgagttgaaagacataaaattgctttgctgaattaattttttattgggccagtctgttaaaaaatgtgttttttaatataaaataatttagtaattttatgagaattattttaaaatagcttatgattctaagcagactttaagttcttttcaattttttatcgttttaaaaaataaaataaacacgaatttttaaaaaaaatatattatatgttttttttttatttaaaaaaactgtctttaaaatattataacatactactaaccaatagatctaattattatagaaacagatttatagtataactcatagggagatagggatcaaccttggatgggttttgg

SEQ ID NO: 117478 - DNA, 364 bp, Glycine max
  Clone ID: PAT_MRT3847_77092C.1
gattttcagaggaacaatggcgggtaaggttgcggcttgctgcgtgcacgagtttgctcgttgtcgcgctcctccgtttgagatcgccagctgaggaagcatcgtgataacgagttcgtactcacattggatcaggctaacttacaggagactgctagcaatcacgatttcatcctcgtcgatttctaggcacgatggtgtggctactgatagaagcctgctctggattatgagaatgctgcttctacctagactagacaggattctccggttgtcatggctacaggtgatcctgatgaagagacgagtatagaccatgcatctcattctgatgttaggggatgaccaacaattgggattctga

SEQ ID NO: 117479 - DNA, 508 bp, Glycine max
  Clone ID: PAT_MRT3847_77093C.1
attgtctaaaaaaaaaaaaaaaaaaaaaaaaaaaaaaaaaaaaaaaaaaaaaaaaaaaaaaaaaaaaaaaaaaaaaaaaaaaaaaaaaaaaaaaaaaaaaaaaaaaaagggaaaaacaatataaaagggggcggccttttatggggtccctggctaccttccgcctcctttcaagtttaacatttttttatggtgccccccaaattcattttccggcccgtctgttaaaaccctgggggcgggaaaacccttgggttcccccaatttacccttttggaaagttatccctttttccagggggggggaacaaacaaagggccccccccgttgccccttcccaaaggggggcgacccccgatgggaaaggggccccccccctggccggggctttagctcccgcgggttggggggtttcccctcaggggccccttaccccttgacccggccttatcccccccttttttgtttttttcccttccctttttccccctttacgccttttttcccc

SEQ ID NO: 117480 - DNA, 606 bp, Glycine max
  Clone ID: PAT_MRT3847_77094C.1
ttcgagcgaatcggctcgagctcaactcaagtttatgaatgattgatatgtggaagagtgtattggtgttggtgttcttgtgtcttagtcttagtaatggtgatgatcaagagaagaagaaaccctgtttgtgggagtggaagagactgagtagcgcttactctgcctatcgggcactttttccttcaagtattggtcttgacatgcttaagaaccttgtcactcacacatatgcccgtttctttcctccaaatatagacgaaaaatttttagaagagaggaggaagggcaagtcaaagagaatggagctggggaaaaggttagagaagcttttgcgaaaagcctaggaaatagcaaagctacgttggaggatgcagcaaaatcagcagcggaaaccgtgaggaccttctctgagtctgatgagaatagggaaacacaacatcaaaacgagctctgagtgattatcctcttctcatctttaaccaacccaccctcacacgacacaaatttaaagttcttcatttcatttcttatttgttttcttttgctgctaataaatagtaacgagtcttttgcttaatgctgtgattgtaagtaaataaatga

SEQ ID NO: 117481 - DNA, 452 bp, Glycine max
  Clone ID: PAT_MRT3847_77095C.1
acgaggtgtgagtaaaaagtcctgcattgggtaagaatgaagttgagcaacatataagtaaaaaaaatccacaagcctaatatcttaagattttgggtcggatatagtgtcaagttcatttctgattaattcctgacccatttgatctggtgtacttaaatgatcatactttagtttggagtagttgcttagcaataggctttgttatttagttattttcattactttctggacaaatttttgaaaacaagaaataaagtgaaaatgagattgcgtttttgtaataatttatgaaataggaaacaaaaacagaaaatatggtgcaagttgttcaccctggttgggtatgtgggaaatttcttaagattaccatccttgagaaaataagtagtaatgacttgttaattttatttgcttgtgtaaggaacaaatgcaaccttgatatcttattg

SEQ ID NO: 117482 - DNA, 606 bp, Glycine max
  Clone ID: PAT_MRT3847_77096C.1
cggacgcgtgggtggtgttggtgttcttgtgtcttagtcttagtaatggtgatgatcaagagaagaagaaaccctgtttgtgggagtggaagagactgagtagcgcttactctgcctatcgggcactttttccttcaagtattggtcttgacatgcttaagaaccttgtcactcacacatatgcccgtttctttcctccaaatatagagtaagttatttcttcctcaaatcaatatactatttactaaacactaatcacatgttatgaatcaattaattatttagcttgaaaaagttttagaagagaggaggaagggcaagtcaaagagaatggagctggggaaaaggttagagaagcttttgcgaaaagcctaggaaatagcaaagctacgttggaggatgcagcaaaatcagcagcggaaaccgtgaggaccttctctgagtctgatgagaatagggaaacacaacatcaaaacgagctctgagtgattatcctcttctcatctttaaccaacccaccgtcacacgacccaaatttaaagttcttcatttcctttcttatttgttttcttttgctgctaataaatagtaacgagtcttttgctt

SEQ ID NO: 117483 - DNA, 392 bp, Glycine max
  Clone ID: PAT_MRT3847_77097C.1
gcaaaagatgttagggcttgggcaattatggctatgagaagtgcagaccatggtttggatgaaaagtccattctgtcttatgatggagcactagcctggatcctaaaggaaatgatgaaggaccatcatgtgcagagtatcattgagctgagctggtaggaatgacatgaggaaagctggtgatactcttacttcggaccttctccaagatgaggtgccactacccaaagggagcttttgagtgaacagcttaatgaatcgcgtaatgaatatggtcttatgatatgaccactatggtgtaagttccagtttgttgcaagagatgaagaggacataagaagaacgtcttaccatgtaaacggagatcgagatgatttgttgactaaagaaaa

SEQ ID NO: 117484 - DNA, 398 bp, Glycine max
  Clone ID: PAT_MRT3847_77098C.1
attaaagaattcattcattaacagattacatacgggctccaaatcttacaccaaggaatctgatgaatattttgccctgaatatagagtcttacagggccggtggcatcaaatgctggactaatatcgcttaccacactgcatagtaacactgcttgaaatcgaccacgaacctgatgacgtacccagatgactagggatattaattcttgatcagtgatctaatacactctttactttcacactgtgtgaaccatgcgagaggaagtgcttgaactgctaaaaagggcatatgctgtgcagcacatttattatgtattactgtaatgatgcccttccgagaagactcagacttttagccagactacattgactggcacttttattcatcctatcgat

SEQ ID NO: 117485 - DNA, 2607 bp, Glycine max
  unsure (1)..(2607): unsure at all n locations
  Clone ID: PAT_MRT3847_77099C.1
tatacatttcacgtaacacattcaattatagtcctcgccgggtacccggtaccgcaagatcgtccacatcaaaaactcgattcaaaacattataaattcatcttctgaaacaatttcacccaaattcaacctctcaacggcaacaacaaagtactttcgacaataaacataatttgcatcaaacttcatatcctcacagcagcaaagataaaaagcactcctcacaggagatactttcaaaacaacacaccttattcaacacaccacactcctgaaatagtttcaaaaaactcaatacctaatgaccactgctggagaaactttgaaagcaaaaaagcactccactaaacaaggttttaacagtaatctttggcattcatgtcttaacaataaaacataactctcttgacgttctccttgagtgcaggcaatggtctcacagcagcattggcaccaggtacacgcgtgctacgccctacaccgcccatcccacggcctgcaacagcaccacttgtcatagagccactatccgacgtctctggttccatgtaaaaccttgcgcggaatgcagcaaggtgagcatagtatgcaggaggcacgattgaaacagaccgggtgcaccgagcatatgtgtagcaaagattgttggtgagtgtttgcaaggcatcagcagtaaaattgttttcatcccacaacacatggtagtgagcaggacggcttgtaccctgtattccagcatggctgcagagataaagtcaaattcggtgggatggcagattttggagtcaacaancagtgccaggcaatatgttgccactcttgtcancagaacctcttatcatgatggttgctagcaaagagccttgtgtggtgacgcttttgaaccaccacaaaagtcnacaggaggctgataattgggttccagggatgcacatgcctttcgaatagcatcaagctcaaacagtagaacctgataaaactgtccctcactcacaccatccctataaaatatgatgcgttgtggcttttgtcctgtagctctcctaaaagatataagaagttccttgatcattccaccagtcactgttcctctgactggatcttgccattgtttgaaaagatcctgaatgagttcctgcctatgaacttgggcacaaactaaaccagcatactttgtaatttcaggatagtcttgcgaagccacaactgctgcaattgatgggcttgaatcctctccaggatgtggatgagtcacatcagctccaaaaataattgtaggtctgtcactgaccaagggaatgcgtcgtgagagcgcatcaaccagtacagtgtttctccctccaactttgacattaatttttggagctgatgtgactcatccacatcctggagaggattcaagtccatcaattgcagcagttgtggcttcgcaagactatcctgaaattacaaagtatgctggtttagtttgtgcccaagctcataggcaggaactcatccaggatcttttcaaacaatggcaagatccagtcagaggaacagtgactggtggaatgatcaaggaacttcttatatcttttaggagagctacaggacaaaagccacaacgcatcatattttatagggatggtgttagtgagggtcaattttatcaggttctactgtttgagcttgatgctattcgaaaggcatgtgcatccctggaacccaactatcagcctcctgtgacttttgtggtggttcaaaagcgtcaccacacaaggctctttgccagcaaccatcacgataagagttcttttgacaggagtggcaacatattgcctggtactgttgttgactccaaaatctgccatcccaccgaatttgacttttatctctgcagccatgctggaatacagggtacaagccgtcctgctcactaccatgtgttgtgggatgaaaacaattttactgctgatgccttgcaaacactcaccaataatctttgctacacatatgctcggtgcacccgatctgtttcaattgtgcctcctgcatactatgctcaccttgctgcattccgtgcaaggttttacatggaacccgagacttcggatagtggctctatgacaagtggtgctgttgcaggccgtgggatgggtggcggcggtggtggtggtgtagggcgtagcacccgggcacctggtgctaatgctgctgtgagaccattgcctgcactcaaagagaacgttaagagagttatgttttattgttaagaagatatgatatgcatgccaaagattacttttagcaaccttgttttgtggaggagtgctttttcccttgctgctttcaaactatctccagtggtgtggtctgtgtcattagtattgagttttttgaaactatttaaggtgtgtggtgtgttgaataaggttgtccagtgtggagtggagtgttttatctttgctatgagggtctgatatttgatgcaaactatgtttattgtcgaaagtttcttactttgttgttgccttcgagaagttaaatttgggggtgagtcgagtttttgatgagatatataaaatttgctgcttagtggtggtacttaagaaggtttaagataat

SEQ ID NO: 117486 - DNA, 349 bp, Glycine max
  Clone ID: PAT_MRT3847_7709C.1
acccaacaaaagatcaaatgttttcatttcctgggatctctatcctaagcatgattccaatttaacaaatcatagatcggatcaacaaaacaaccaccattagggttacaacaagacccctccaacataaacttatgatttttttcatacccaatgggagtaaaaatggccgctttggggggcccaaatcccaatgacaaataggggcaaaacataatgggatctcaccggatcaagctgcaagagtaaacctgttggggcaacctccacccctcaaatttggggaaacacatgttattaaggacctcactggtgcaccagctgcactttgagttttgggagcactgaa

SEQ ID NO: 117487 - DNA, 719 bp, Glycine max
  Clone ID: PAT_MRT3847_770C.1
ggctcgagaaaacaatggcgaagctgttagcgttgagttgctggcgaagcctctcgccgcgacctcactacccctccatgcccaaatatcccaagggcgagagtgtcgccaccgtccaagagctctctgagtccaccgctgttctctccgtcgtcggaatgagctgcgctgcctgcgccggatccgtggagaaggccgtcaaacgcctccccgggatccgtgaagccatcgtcgacgtcctcaacaaccgcgcccacgtcatcttctacccctccttcgttaacgtggagactattcgcgaggcaattgaggacgctggtttcgaagccgcgttactcacagacgacaaaaaatccgttcaagtatgccgcatccagatcaaaggaatgagctgcacctcctgctcctccactctggaatccgttctgcaagcccttgacggggtccttgaagcccgcgtgggccttgccaccgaagaggcccaagtccactacaacccaattctcctcaccaccaaccacatccttcaagccatacaagattccggtttcgaagcccaccttatcaattcaagccaagacttaagcaagatagacctcctcgtggaaagtgacataaccatgaaaactaatcgaaaattctcttcaaacactccccagaatccttgccgacgacataacaaccccactaaacaaaaaatacgatttcttacaaaccga

SEQ ID NO: 117488 - DNA, 270 bp, Glycine max
  Clone ID: PAT_MRT3847_77100C.1
ggacacaaacacacactctactcagcatgtacgactattaatagcatgggtggaaactttagagataggtacataatactgaacctgagggcgctgactatgagcctcttactggaaacattcaaacgacactacctatagaaaacacagacccccaaatcaggggggaggagcccgctttcttcgattatccgcctgctctctcgtggaacggagaaacctggcctaagtaggattaccctcaggttctaaaactggagagatacccct

SEQ ID NO: 117489 - DNA, 552 bp, Glycine max
  unsure (1)..(552): unsure at all n locations
  Clone ID: PAT_MRT3847_77101C.1
gagaattgaatgctactaggctacattcattggattatttaaagtgtgatggaatgcattctgttccatttaatccagtatccctccgtttctttcctttcaatttgggaaatataggatgataataatcttattttaattccactgtttttgttctactgtagaaatgtccgaatgatatattggtaactttatcctatgctgttccttccaattccatttcattccactcaccattcaagtcaaaaattgtttttattttgttgaaaagactgtcctttttttgtatgctgtgtgtactttccaatgtctctaactgtagttttcatgcattttaaagagagtttgatgaaatatagtatcaatatgttcctcagttttaaatgggctgaaagattgattgaggtgctatgtcagggtatttctcacttcagtgttctttctgccactagaaataatgaaagtgtgcttattactttttttagtttcacctgnaaagactaccttgtcaagttatgaacttgagaattcctggttaatccaaatctaagt

SEQ ID NO: 117490 - DNA, 505 bp, Glycine max
  unsure (1)..(505): unsure at all n locations
  Clone ID: PAT_MRT3847_77102C.1
cggctgcgagaagacgacagaaggggacgaaacaatagtagaactagtatctcaataccccagaacgtgtgaacgaaaaatagcgtttattttaaactagaagactagaagattacgtatttgattatgcaaagcggtgcacaaattacataatccaaagtccaaaactcacactatatatataagcaggacctaggcttcttctttgcactgcaaatcacttttctactttgagtcttcttgatccttctttttctccttgaactcaaacatggcagatgaggtggttctgctagatttctggccaagtccatttgggatgagggtcaggattgcacttgctgaaaagggtatcaaatatgagtacaaagaagaggacttgaggaacaagagtcctctactgctccaaatgaacccggttcacaagaagattccggttctcatccacantggcaaacccattgggtgatgccctcattgctggtcagtacattgaggagggttg

SEQ ID NO: 117491 - DNA, 342 bp, Glycine max
  Clone ID: PAT_MRT3847_77103C.1
ggctcgagctcgagccgaatcggctcgagcccaaaaatctctccctctttcgctctttggctctttcttttaccgattttcgttgtaatttctttcttagtcgcatcgctctcggatcactttgggtttttcagcggagacttgcgtcgcactcgcatgcagcactttactgcgaggtacggaatccgtgaattttccggcgaggtaagattccgttgacactttgctttggtccgctggcgacggtggtactttgggggattaggatcgatttgacttcagatctgggaattagggtttagctctggttgcagctgatgtggattttggcatacgggcttt

SEQ ID NO: 117492 - DNA, 380 bp, Glycine max
  Clone ID: PAT_MRT3847_77104C.1
gttgatgatttttgtgcccccggccccaagacgaggtagttagatctttttcaggaacaaaaaatagctttgccagaccacatatatgaggggggcggggcccagttaaagaaccttttgattttttttcgattaaggggcaaaaaaagccggggaaaaaactgaaagaaagggaaggggacctcccttcccgattgttggggaagggccccctgcctgaaaaacaaaaaccaaatattctagggctggtttcctgacaaaataacagtcccggggggggggcaccccggaagacacccgcttcccgcaggacatttttttggaccaaacggctgggggtaacctaggttagaaaaaaacgtttgggggctttttttttt

SEQ ID NO: 117493 - DNA, 225 bp, Glycine max
  Clone ID: PAT_MRT3847_77105C.1
gtatataccaatgctgtctgtttcagtcgcacgctgtaatcctgatcttgtgtgcatttcaaaatctcattcatcatcatcttcttctgaaaagttaaaaggtgaagagagagagagagatatgagtagcgtgttgtagcattgtgtggtgggatggtgcaaatcagggccatgctatgctagaccactggaagccatgtctggtcgaagagtagtctcttattt

SEQ ID NO: 117494 - DNA, 780 bp, Glycine max
  Clone ID: PAT_MRT3847_77106C.1
aattcggctcgagttattctgcatcctgggatcattctattaggaaatgggatgttgagacaggaaaaaacttgacagggttagtaagttgaaaatttcatgctttctctcctctaccccaatttgtttaaaattgtactcatttgaagtgttaattttgtctttaggtcaagctgtgacatcttactctttgatgctctgccattgattaactatttgtgggtagtcaggcagctaaattaaaactggattagggcaagcttatcaattttcttctttttcttgcagtgaattttaaaattgcgttgtttcttaatcttgttgtagcgacatttaacttatttgtttctctagataagattttgtctaatctttaaatttagtgcacgctagttcttcaacatctttttcctcattatgatccagtatcaatcatctttgggatgctcaatcccaacaccaactgtgctgctgatgcaggacagaaggcttgcattctaattctcttttttctgcaatcttaactgcctatccaatgttctgatcagcaaggatacatgtaatcttctcgtttctaatctatttacgcattcgattatctcctgcacgagctccttcataatcttccaaggttgcttcagatgatttacctggctttttcctctccgaggatactaatcctctagatatccacactagacaatttgagataatgaatcatttcctgttcttctcgtggttatcttaggtgttcacaaaaattattatgataccttgatt

SEQ ID NO: 117495 - DNA, 431 bp, Glycine max
  Clone ID: PAT_MRT3847_77107C.1
gaaaaatgtcaggcttcgatcctcatcttcaatcaggagacaaatcacaatataacacaaactctggtcaatattataatcaaaatcaaaaccaaaaccagaacgtaaatatttcgagtcctcaaagtatgcacgacagaggaagatcaagaatttatatgagagaggaaggagagggaaaagaaggaaaatggtcgaacaattcatacctttcttattcgtgccctacttgccgccgaagtacaaagtcagttccaatgtcttattacgttaccttattttataagttcctttggttatgcttttctttattttgcctgttatttgattacaaatttcttttcaatatcgacgaccgcgataaagaacaagatagagatagatatcgttattaaatattgttaaatattcattttcttccaaaacttaac

SEQ ID NO: 117496 - DNA, 359 bp, Glycine max
  Clone ID: PAT_MRT3847_77108C.1
cttcttctcttcttttttttttttcttttttttttttttccgggggcaatataccctttctgggttttattcttggccccccctcctcaactgaaacccctttttattggtccgaaagggctccaatacctgttttgccctccccaaaaaatctatttttccctaaaaactttttggcaccccctttttaaacaaaaacccccacaaaaatattggaccccctttttatcaagggaactttgtgggggggggcacaaaaaaaattgggtttccaatactctttccccccattgttaaacgcccattgggaaaaaaggcttccaccataatttttcccgggccacaaaagctctttttgg

SEQ ID NO: 117497 - DNA, 250 bp, Glycine max
  Clone ID: PAT_MRT3847_77109C.1
gttggtttatcaggacctcctcacaggagatgagcttctctcggactccttccgttacaacgaaattgagaatggaatgctgtgggaagctgaggggaagtgggctgctaaaggagcagtcgatgttgacctttttttaaacccttctgctgagggtggaaaagatgagggatttcattacacacctgctaaggatgctgcccttgctaatacattcatacctcatgagccaccccgttttgataagaaa

SEQ ID NO: 117498 - DNA, 165 bp, Glycine max
  Clone ID: PAT_MRT3847_7710C.1
tctgtatgtatgcttgacatatacaagtgggaaatccaatgaaatgtgtggtcctaaaaatggtgcaagattagcaactctctatggagattggcggggtggagttgttttaaactgttttatgggaatacttgccactgattatgtgtaattattgcattatta

SEQ ID NO: 117499 - DNA, 541 bp, Glycine max
  Clone ID: PAT_MRT3847_77110C.1
agaagttcatcaacaacttaaagcaaacttgatgaaacatatttgataaagtttcgatcacaatgatgaaatttaatttttgttgatcaatatcgatgtttctatttttttccgatcaatttcatgtattattgtaggtttaaattatattgataaataaatattttaattattaataaattttatatttctgttataaattttttaaaaaattaaaaaatacataattaactaaaataaatattagaaagtaagtccttgtaggattaataaaaaaattatttaaaattctaaaataagatctattattaaaataaaaaaatgtagaaaattttaagattgatgtgatactagtatctaaaaaaataattaaaatctcataaaatctgctattggacgtccttagaagcttaaactcttcttcaaattgaactcccgttagaaatttgtgcttccaaaaacaactatcctggcgtcttttttttttcacgcaagccgcacacctacgtggaccttcttctacgttccctgattcaataaa

SEQ ID NO: 117500 - DNA, 647 bp, Glycine max
  unsure (1)..(647): unsure at all n locations
  Clone ID: PAT_MRT3847_77111C.1
atgtgaagcccgtctactacaacctgctttaatggtctgcttatagcaataccattattggtctaaagacaagacagtccttccactcaaccaaaccatccactactcatttgaaaatgagaatgaagaagtctaactcagttgattgaataggagatgtgtaaatattattaaatctctaatgttgtattcaatgatcctatagattaaaaaaaaacatttgaagatggaaaaccctgtggctggcttcttctttatttctacatagattttcaatttattaacgatactaaaaggggcattcttgcgaagtctcaaactatatctgatgtctccactgcaagcttctcagttcccgggcattcaacttgtgcttttatgtcagcgtcccacagttcaggcactgcctccttaaggntnnnaatgctttccatggcataatcagcacctttaaccctgtaggatctaccaaccagcacagtgtgaaggcccaatcgttttccannttgtatgttgcggacactatcctcaaagaacaagnnnctttgtgggttaannntggccatcttganngcnnatttaatggcatgtcctgatgnnttgcagatnattgnngtctctggcaggactgcactgggtacannnng

SEQ ID NO: 117501 - DNA, 1882 bp, Glycine max
  Clone ID: PAT_MRT3847_77112C.1
gagttattgacctagatgtgttcctgcgattaacttgttacacggatctgtgttgtggaaggcttatatgtaaaatcgtagacaagaatcatataagttctatgggtgcgagaagacgacagaagcggaccaacacttgtagcggacaaaaccaaattataatatttcatgcttctctttcactcttgtcacattccacaaaaacgaagtactactacaagggaagaaaaacttagctactaaggaaggatcaaagagaatggctcaagcaatggcatcaatggctggcttgcgtggttcctctcaggctgtgttggaaggtagccttcgtgagtggctccacacgcttgaatgtggggagtggaagcagggtggcctcagtcacacgtgcagggttcacagttagagcacaacaacaacaagtgagtggtgaggtacaaagcagccgtagggcagtgctttcacttgttgctgctggtttggccactggctcttttgttcaagctgtgcttgctgatgccaaatctatcaaagttggaccacctcccccaccttctggtggattgcctggaacgttgaactcagatgaagcaagagaccttcagctgccattgaaagataggttcttccttcaaccattgtctcctactgaggctgcacaaagggcaaaggaatcagccaaggagattgttggtgttaagaagttgattgaaaagaaggcttggccatatgttcagaatgatctgcgtctcagggctgagtatttgcgctttgatctcaacactgtcattgctgcaaagcctaaggatgagaagaaatcactcaaggaactcactggcaagctcttccaggatatcagcaatctggatcatgcagcaaaaattaagagcagcccggaagcagagaagtactatgctgctactgtatcttctctgaacgatgtccttgccaaacttggttaatgtgattaatttcttgctttcttgtgtaagctttgtgcatgattttctcagacactttattgactgatattttaagaaaatcaaatgatgagggaaaattttctataaaaaaaaaaaaaaaaaaaaaaaaaaatatatcatgaaaaacaaaaacaaaaaagtaaaaaaggggtaaagtaataataatagtagagtgttattataattgccagagcaaaagactagaatagttataatgatacaatattatcagtctgggtggataggttcttccttcaaccggaacattgaactcagatgaaccaagaggccaaggaatcagccaaggagattgttggtgttaagaagttgattgaaaagctgatttggccatatgttcagaaggatctgcgtctcaaatctgagtatttgcgctttggattgaaaagaaggcttgctcatatgttcagaatgatctgcgtctcactcaagagtatctgcgctatgatctcaacactgtcattgctgcagaatcatgcagcgagaagaaatcactcaaggaactcactggaagtactatccaggatatcagccatctggatcatgcagcaaaaattaagagcagcccagaagcagagaagtactatgctgctactgtatcttctctgaacgatgtccttgccaaacttggttaatgtgattaatttcttgctttcttgtgtaagctttgtgcatcattttctcagacactttgttgactgatattttaagaaaatcaaatgatgagggaaaattttctataaataagatcaatatatctagacgacttctctgcatgaaaactgaaaggtttaaggggtgttaattaactctctctctctcccccctcctcctcttataaattaaataatatattaaaatgtttattttattataaataa

SEQ ID NO: 117502 - DNA, 755 bp, Glycine max
  Clone ID: PAT_MRT3847_77113C.1
tttttgatgtaagcaacatggtgacagggttatcctgacataaattgaatcagctcaacgtcacagaaaattgaaaatggaaagaaaaatgaatgtactgtgatagacaacaatagattgacaagtaaagccaggaaaaaaaaaagaaaaacaaaaaattctataaatgccttcaagaataacacttatatatgatatgacccacggtagctttcagcatgttaccttagccatattcaggcaccttgaatataactgccaaaaccaactgccttgtagcttatttgattatttaactttgtaacaatcaattttctattttacacatcctttctgatcctctagttcatctgttcgccaattaaatccagacctacaaggaggaatgatacaccttgaaatagtaaataatagaagtgcatgccttgtgctgataacaggctcctaactgcagcagtaagcagtaagaatgcaagggcaagctctttcttatatatcttgttcattttctttacaggaactgtttcttggcattcctttattttgttaagctcagaaagtccactatcagaagtccctctgtgaagttggagactcattgcctttgaatcccgttcttcggcagctaataggtcaggctctgatgcccgacctgcttttttggtaacaatccattcatatgaacttcccaactggaacaaaccggacaccatggcattgaatttggttactgacattgtgctcgagacgcaaaa

SEQ ID NO: 117503 - DNA, 418 bp, Glycine max
  Clone ID: PAT_MRT3847_77114C.1
tcctctagagcggccgctttggtttttttttttttttttttcttttttttccggagaatatatttatttatcttggaccaaacataggaatactggattcccaaacttacatttcaaaaaataattggttgaaaaaaaaggaaaggttttattttccgggaaaaaaaccttacccttaagcctggattaaaggatatttttaccaccatttaacaataaacccccccttaggggagggggatattattccccattccctttggtccccaaaatttcaggttatttgttttccagaaacttagcaaagaaaaggttttttactccagtggctaaacggttaaaacccttttttttagaggggcaattaaaaaattgggaaaaaaactgcctaaaacaaaaaaggaaggggggggaaaaa

SEQ ID NO: 117504 - DNA, 253 bp, Glycine max
  Clone ID: PAT_MRT3847_77115C.1
ggacccatctacacgaccgctatcatacaagtagagtgaggcgacacacctagaggacaaagccaagtttacaccaaccacagtctacacgtacgggtcacctggaccacgatacaagtggcctactcctccacacaccatcctatatagtacccatcttcaccacccgcagtgtacaagtgcacatctcctactgctccctacaagcaccaatatccaccacctgcaccctacaagtaccaatatcctccac

SEQ ID NO: 117505 - DNA, 239 bp, Glycine max
  Clone ID: PAT_MRT3847_77116C.1
ttttatgttttatagctggacataccatcaccagtagtgatggtttgggaaaactgggcactgggcaatttagagcgaggcagttgggattccctaaagaattaaaagcagatgtaaatggttggcgggtgggtcctgacgacaaggcgagtttttggtcacaactgcattatgtatggagtaataatggggaaaggcaagaagcttatcttgcaatctcgttaaagagtttcgagaat

SEQ ID NO: 117506 - DNA, 836 bp, Glycine max
  unsure (1)..(836): unsure at all n locations
  Clone ID: PAT_MRT3847_77117C.1
aattcggctcgaggtgaatttgacttcacggtagcagcagcagcactgacacgtataaatgtaggtctcagtggttgatcattagccacgctactcggcaacgatcatggcttcctctctcactttccattggttcctcttcctcatcctctggatcctggtcctctgctcccacgctcacgcgcgctttttcaccgtcgatccagtctccgacggcttcgccgccgcctcgggctccaagtggcagagcatcctccgcctcccaacggtgctgacgggcgagtcggtctgcgagcagacctacggcttcctaccgtgcaccaccaccgtcctcggaaatttgttcctcatcatcgtctatggcttcctcatgttcaaggccgccaccttcctctccggcggcagcgagctccttctcgagatcttgggccccggcattgttggtggcctcttcctccccatcctcggcgcactccccgacgccatgctcattctcgtgtctgggctttcaggtagtaaagaagttgctcaaagtcaggtatctgttggaatgggactgctagctgggtcaacaacactgcttctgactataatatgggggacttgtgtaattgttggcaagtgtgacatcgagggttcaattgcaatagattcacgagacactaggggatttagtttaactggttctggtgttagtactgatatttggacaagttatgctgcaaggattatggntatatctgtccttccatttgtgatcgttcaattaccacaaattctcaattcaacttcaggaaggcacttggctgntttgattgctctcattgtgtctctcg

SEQ ID NO: 117507 - DNA, 1597 bp, Glycine max
  Clone ID: PAT_MRT3847_77118C.1
agagagagaaagaaaggaaggaatgaggctctatttctctcgagagtaagtgaaaaaaaaatatcaaaatagaagaagaaaaagaagatggtgatgatcacgctgatggtgatgatagaaaaagggtcagcaacaagaacagaagaaaagagattcatcacagtaacatagattttatctggttcgagcaaggttgtcttctaaaacctaggtcttcagttgtggctaccacaaggcggttcccttcagattccggtgcctttgcagactggtcggcccctccgtctgccatctccggccgcggtgacgacctctccctcggcttcaatgcttcatccgccgccactgcgcacggcggcggagccatgtggccgggggtatcgaggtcgttcaactacaacctggcgcctcaccatgacatcttcgtggtggcgcctgcttcctccttctaccaccaccacaacgacgtcgtcttatccgatccaaacaacaacaacggttccaacaattccaacaaccctgcaacggcacacggagtcaacgttttccctctcctaaccgccacgccatgcctcgagagcgagggcataatgggaaacatcagtcaccaccgtaacagaattcagttatggcaggagcacgagtcttctccgccgcagaagcaacagggtcacatggagcgtgacacgtgtggggatgggggcgggactagcacgtgccaggactgtgggaaccaggcgaagaaggattgtagtcacaggaggtgcaggacgtgttgcaagagtaggggttttgattgctccacgcacgtgaagagcacgtgggtgccggcgtcacggcggagggagaggcagctcaagggggtggcggcggccggtgcggcggttgggtccaatggggccacttccggtgccaagaaacctaggcttgttgcttctcaaactacttcgcatacttcaacgtcttctaataccactcctccgaggagttttgacactggttgtagcccccaagatgtgggtttcaaggagtcactaccaagtcaagtgcgtgcaccagcagtgttcaagtgtgttcgtgtaacatcagtggatgatggtggggaagatgagtatgcgtatcaagcagttgtgaagattggtggccatgtcttcaaagggtttctctatgatcaaggggttgaggacaaagaagggtaccctaatttatctgaattacatttgagtggtggtggtggtggaaatgttacaagtggaagtgatggtggtagaaatggaatttcatcttcatctccaatggtggatcgttctcatgatgtctatgcagcttcaggtggagggttgctacttggaggttcatcaaactatggtaatcatccaataaattaaaaatcattttttccaagtgtaacgtaaatgatgatggatgggcttggaaagcttgacttattattgtagggtaacttttcttatttttccaacattgggggtgggttggagggtatagattaattaatattaatattcttttaagtttgtatcttattataaccatatgtcactctgcatttttcaactcctcggtttttgttcctttt

SEQ ID NO: 117508 - DNA, 418 bp, Glycine max
  Clone ID: PAT_MRT3847_77119C.1
cgattatgcttctaggcccacctatcacaacattgatgggagaccacaccatactggtgtaatgccatggatagatcataatgatgcttacatgcgcgatgaaatcctgacaggatcggatatcctcgccctggcgcctactacagagcatggatgcatcagcagctgctacgactgggctaatacaatgctttatgaaagatacagtgccctactggacctatctgagaaacaatctgaacttcttaccggagactctcgaactcactgtggctacatagagagtatgaggtgtattatgtttgagacgtataatgagcctgccatgtatgttgcaattgaggctgtctatgctctgtatgccattggacgtactacatgtactgaacttgattctggtgatggagtgaatcatacg

SEQ ID NO: 117509 - DNA, 291 bp, Glycine max
  Clone ID: PAT_MRT3847_7711C.1
gcataaatgctacattgagctatccaagctagggacggaaaacctgtgcatggtagatccttaatgtgacaagttagcagacgccattgcctctcgaattgaaccttgtcattagcttaaccctgcgggagcatcataggacaatgactgacatgaatatgcacttaattaactgcataacagtcacaaaactagtaaatgcaactatatatatactgcatgtaatttgcttagtccagatcttcaacttatccgctaatcatggctaaaaattccgagcattataagact

SEQ ID NO: 117510 - DNA, 271 bp, Glycine max
  unsure (1)..(271): unsure at all n locations
  Clone ID: PAT_MRT3847_77120C.1
ggataggttgttgggacatagantttgtttgtacctattctttctttttttctttaaaaccaaaaacctcaaattttgatccccgcctgattttgggggttggcaataagggggggttgaaacccacaaaactcccctgtgggcagctctttggaaacaaaaaaatatacctgcaaaacctttggggccccttggcccaagaataaaaaaaatttccccccccttttaaaaggccccctctcttaaggttgggttaaccgtttatctcccc

SEQ ID NO: 117511 - DNA, 900 bp, Glycine max
  Clone ID: PAT_MRT3847_77121C.1
gagcattgcaaaacttagaatgatggaatttattgaagcttggaagtgctttaatggaatcctccctccccatatgagggtggatttcaatctcgttcagttcctcccattttcatacacaaataattttctttatatttctgcattgctttgagtggattttgcataatcatattatcaatttttcattcatttaaccaggggtgtaagaagaagttgaggtgatggaaccccaggatgaagaagagatccataactgtttgatcaagctggttgctttattgttccttaccttgggttatctttctagttactgtctttaatgcagcatcaatgctagtgaaggaattgactctattgttgataatgcattccgaggaagtaaccggaaaaggcgaggagataattacaacatttgttgactgggtttgtttgtgacaagcccttggctgctcttaagttgcttcatagagttcgtgaactaattaactggtcttttatgctgctggcgaactcatccttttcgtatgaatgtgttaaacgtgctaaagcgggagaatatctggttagagcatggatggaagaaatatttcctggtcttaatcaccgtatactttcttatataattgggtttgatagccttaaagctaccagcgggaatggaaatgagtcatcacagacaactagtgaagataataggctacgcatggatgggctttttgaacagaaagaacaagccatccaatttaccagagaatttatagcattgtatacaaatggaccagctggtggtggtggtatcagtactggatataagaaagagactcttctagagaagcatttgtgaaatcatccttctgaactgctgaagtcagataatgaacttgaacattcaatgaa

SEQ ID NO: 117512 - DNA, 995 bp, Glycine max
  Clone ID: PAT_MRT3847_77122C.1
cccacgcgtccgtgaaaatcgagaattttccgagaaaatccgaagaaggcgggccatggtttccccggaaaacagcaattggctgttcgattacccgctgatcgacgacgttattcccgtcggcgacgcctccttttccgtctccgcctccgccttctcctggcccccacctcccgccaatgtcagtgttgaaattgatgcttcgcttggggattctgatggccccaaagatactgctttgaagaaaagatttgatgaattgggctccatcttggagcctggaaggcctcccaaaacagacaaggctgccattctgattgatgctgcccgaatggtaacacagctgcgggatgaagccctgaagttgaaagactcaaatacgagtcttcaagagaagattaaagagttaaaggctgagaagaatgaactccattatgagaaacagaggcttgctccatgaactctctaatctgagatggatctaagtttgtagttcccatgaatattgacttcctaaacttaaagccaggacactgtcgaggctcaacctcaaagacaccacttgttggatagtcatgggctccaaatgcatattctactccataaacttcaacccttgagtggaaaataccaatgcctgcccaatacatatagccatttactgttgtcaagtcatagacattgagatagacaggtgtattcccaggtatgttgccagctgatttcactttagagaatatgcaaaagggtgtcactgatttgtctcggagacgaagacgcacaacagagggccaaccattttttaaacctgatttcattgtatgtgaacccaggaagcagtcaatatctacttcctaccttttgtgttgcaaagggtagctgaaagaagagaggatgaagtgaaagactccttcggagtttgaaagagccattgtggctcgagcccggaaaaaggggacccttctgtgtcttctgacgctggtgatcccggaatt

SEQ ID NO: 117513 - DNA, 842 bp, Glycine max
  unsure (1)..(842): unsure at all n locations
  Clone ID: PAT_MRT3847_77123C.1
taccggttcgagaagacgacagaaggggccacgcgtccgttcccattttggcagccactctttctctctaccctccaacgtgctctccttccaatcacactcacaataacaaactaaccaattcaaagttcacacacacacacagcttgggaagaaaatcgagaattttccgagaaaatccgaagaaggcgggccatggtttccccggaaaacagcaattggctgttcgattacccgctgatcgacgacgttattcccgtcggcgacgcctccttttccgtctccgcctccgccttctcctggcccccacctcccgccaatgtcagtgttgaaattgatgcttcgcttggggattctgatggccccaaagatactgctttgaagaaaagggctagatgtgattcaagtactgcttctagctctaaagcgtgtcgggagaagttgcggagggataggcttaatgacaaatttgttgaattgggctccatcttggagcctggaaggcctcccaaaacagacaaggctgccattctgattgatgctgcccgaatggtaacacagctgcgggatgaagccctgaagttgaaagactcaaatacgagtcttcaagagaagattaaagagttaaaggctgagaagaatgaacttcgtgacgagaaacagaggcttaaggcagagaaagagaagttggagatgcaggtaaaatcaatgaatgctcaacctgctttcttgccaccccctcctgcaatccctgctgcatttgctccacaaggccaagcccccggcaacaagttgatgcctttcatcagggtacccggagttgccatgtggncatttatgcc

SEQ ID NO: 117514 - DNA, 814 bp, Glycine max
  Clone ID: PAT_MRT3847_77124C.1
aattcggctcgagatacacacactctgcacaccacattcccagaaacatcgtcaacaacacaacaaacacaaaccctctctctctctctctctctctcccgctctgtttctctccacaggagcagagaatgcatcgcttcatcatcctcaccattctcctttccctggcactcgcagatggaggttccattggagttaactacggtcgtatagcgaacaacctcccctccgcggtgaaggtcgttcaactcctcaaatcccaaggactgacacgtgtcaaagtctacgacaccgacccggcagtgttacgggcactatccggatccggaatcaaagtgacggttgatcttccgaaccagcaacttttcgcagccgccaaagctccctcctttgcatcctcatgggtcgaaaggaacgtcgccgcgtactaccctcacacgcaaatcgaatccattgcggtcggcaacgaggttttcgtggatccacacaacaccaccaagttcctcgtacccgccatgaagaacatccaaaaagccctcaccaagcacaacctcgacaaggacattaaggtttcctcccccattgcactctccgcgcttgcaaattcttacccttcctccgccgggtcgttccgacccgaactcgtggaacccgttttcaagcccatgctggactttctccgcgaaaccgggtcatacctaatggttaacgtgtacccgtttttcgcgtatgagtcaaacgctgacgtcatctctttggactacgcgctgttccgtgataaccctggagtggtggatccgggtaacgggttgag

SEQ ID NO: 117515 - DNA, 2447 bp, Glycine max
  Clone ID: PAT_MRT3847_77125C.1
ttttaaattaaatattaatagcctaatagccacagcaacaacaaggcacttgatataactttcttgaactactaatagcctaatagcgagtattggtatttaactagactgcatgtgatttcatgaataggattagataatgcttctaaaaaaacttataataaacatgagaatgtatattcccttgacaataaaattaaaaaaaaatcctaaacgatttttttttatttctacactgcaacgtgctctcttgcctactgcagcttattcaaatctgtctcattttgtctaccaaatcacactctcaattacactaacacacactgaacttgagagttattttgctcacattcgattctatatatttatagccatagattcccattttggcagccactctttctctctaccctccaacgtgctctccttcccatcacacccacaatatcaaactaaccaattcaaagttcacacacacacacagcttggagaagaaaatcgagaattttccgagaaaatccgaagaaggcggggcataggtttccccggaaaacagtaccttggcatgctcgaatacccgttgatcgactacgttattcatgtacgctacttcccctttttcggtacccgcatccgcggttctctcgatccccacccgccgtcaatgggagcctcgaaattcattcgtagcttcgggattccgatggccccgcagttaaagcattcgatagaccgcgttgacgctaggatctatctgcctctcttccaaactccactgcataaaaaacagttctcgatttttctctccccaaatcacactttcaattacagtaacaccacactcagcttggaaggattttccccaaaaataccaagagctcgcgccatggtttccccggaaaacagcaattggctgttcgattacccgttgatcgacgagcgacgttattcccgtcggcgactcctcctttgcagtctccgcatggagcttctcctggcccccacctcccaccaatgtcagtgtctaaattaatgcttcgtcttggggattctgatggcctaaaaaatcctgctttgaagaaaaggactaaatctgattcaagtactgcttctagctccaaagcgtgtcgggaagatagttgaggagggataggcttaatgacaagtttgttgaattgggctccatcttggagcccggaaggcctcccaaaacagacaaggcttccattctgattgatgctgcccgaatggtgacacagctgcgggatgaagccctgaagttgaaagactcaaatacgagtcttcaagagaagattaaagagttaaaggctgagaagaatgaacttcgtgatgagaaacagaggcttaaggcagagaaagagaagttggaggtgcaggtaaaatcaatgaatgctcaacctgctttcttgccaccccctcctgcaatccctgctgcatttgctccacaaggccaagcccctggcaacaagttggtgcctttcatcagctatccgggagttgccatgtggcaatttatgcctccggccgccgtggatacctcacaggatcatgtactccgtccaccggttgcctaagttggcattgtacaattatttgggcttccattttggctcaaaagttgtaatcattttcctatagctttttagttattatcttctaagtgttccaagtaactggattcagtggtggctttgactgtatttggcatctgatactattatgaagtaatggctggtatttgcatgtaaatgttaataagcatgtctggctgtcttcacagcggctttgatggttgttactgtttttgatataacccaaaggcagaaccaaaataatgacaataataataaaaggtcaagcacagcgacttgttattttcgtgaaccaaagtcaatatacttcccttttgtgttgcaaagggtagctgaaagaagagagatgaagtgaaagatcttcgagtttgaaagagccattgtgggtaagaaaaaagagaaagagaataataatgtgtgtgcttaaactcacagatcgcctcgctaattgcgttttcccttttctcgctttcgttctcgcactctctgatttcgcctctttttgcttattattgatgattagggtttcttaatcggtgtttgattgtgttggttttgtgaatgtttggttttagggttttgtgtttcggaagttctgtgccgtacagaattttgtggtcttggaagaaatgtgatttttttaaaataaaaaaatttgggatttcttagtcaccggtggttgttggtttggtttttgttttttgaatgttacgtggctgaatttggtatttttgtgtgtaaatgtctggtcagaattaatgctggtgcctcaggacattcttgcacgtgcgagtcttaattgcttctgcagatttcacattgcttaattttctg

SEQ ID NO: 117516 - DNA, 521 bp, Glycine max
  Clone ID: PAT_MRT3847_77126C.1
acgcttgttgcccacgcttcgttcgcgttcaccagttattaccagaagcagtcgcgcaagggtggtagctgctatttcgggggtacgtcgtacgtggtcacgcaggaacctaggtatggtagctgcgagtttcctactggatactaaaagctgaagagggcagagatattcccgcatgaggatatgcatctggctgattttgctttgtgtaaagtatgttatgggaaggtgtctggaagtgagactaggaagagaagataaattaattgttggtttatattagttttaagattttttggggttatggattatgttagttaaaaacgttgacttttcttccagttggtggaaactgggaatgggttagctagtaactacattaatttaactttggggactaaagtaaattgtatctaagattttttttttactttgcagtagactttatcttttgtgatttctgaagtgatcgttgttcttcaggtttcatcatatttgaagtacctttttcttcccctgcc

SEQ ID NO: 117517 - DNA, 270 bp, Glycine max
  Clone ID: PAT_MRT3847_77127C.1
acacgcctcttcaacaagccttgattcgttctgtgcaagtgctcttgaaaggtacaagaatggtgaagtctataaactttctccagcttctgtctctactagcctttgttccctcctgtcactgctaaaagaaaataggcggctacctctaacctcaattgtacgacggttcatgcaccagcagtcaagagcttgtccaatccatcgatgccaaggctgtggcactagagacccgcatggctgcttcgttgctcagactacatttccatg

SEQ ID NO: 117518 - DNA, 2082 bp, Glycine max
  Clone ID: PAT_MRT3847_77128C.1
tggttccacagacatgcaccgcactctgcacccctctgcaccccaaattccgtcaaacatcctaaaaaacacaaatccgaaaacaaacacaaaacgcaaaaccagagcctctctctctctctcgctctgtttctctccacagaagcagagaatgcatcgcttcatcgtcctcaccattctcctctccctcaccctcgcagatggaggttccattggagttaactacggtcgaatagcgaacaaccttccctccgcggttaaggtcgttcacctcctcaaatcgcaaggactgacacgtgtcaaagtctacgacaccgacccagcagtgctccgggcactatccggatccggaatcagagtgacggttgatcttccaaaccagcaactcttcgcagcagccaaagctccctcctttgcatcctcatgggtcgaaaggaacgtcgccgcatactacccacacacccaaatcgaagccattgcggtcggcaacgaggttttcgtggacccacacaacaccaacaaggtcctcgtacccgccatgaagaacatccaaaaagccctcaccaaacacaacctcgacaaagacattaaggtttcctcccccattgcactttccgcactagcaaactcttacccttcctccgccgggtcgttccgacccgaacttgttgaacccgttttcaagcccatgctagacttcctccgcgaaaccgggtcataccttatggttaacgtgtacccgttcttcgcgtatgagtccaacgctgacgtcatctctttagactacgctctgttccgtgataaccccggagtggtggatcccggtaacgggttgagatattataacctatttgacgcccaaattgacgccgttttctccgcgctaagtgctttgaaatacgacgacgttaagatcgtggttaccgaaacaggttggccttctaagggagatagtaatgaggtgggtgcgagtgtagacaacgctgctgcgtacaacgggaatctcgtccgtaagatcttgaccgctggtgggacccctctcaggcccaaagcggatctcatcgtttttctgttcgcgctttttaatgagaaccagaagcccgggcctacttccgagagaaactttgggcttttttaccctgacgagaggagggtttacaatgttccgttaacggtggaagagctcaaggactaccacgaccgtccgtcggcgccggtgagcggcggcggacagcagaaggagacgccggcgcccgttgtgagcggcggggtttcgaagagtaccactgggaacacatggtgcgtggcgaacccggacgcggataaggttaagctgcaggcggctctagatttcgcttgcggcgagggaggttctgattgcggtccgattcagcgcggtgccacgtgttacgatcctaacacgcttgttgcccacgcttcgttcgcgttcaacagttattaccagaagcagtcgcgcaagggtggtagctgctatttcgggggtacgtcgtacgtggtcacgcaggaacctaggtatggtagctgcgagtttcctactggatactaaaagctgaagagggcagagatattcccgcatgaggatatgcatctggctgattttgctttgtgtaaagtatgttatgggaaggtgtctggaagtgagaaactaggaagagaagataaattaattgttggtggttatattagttttaagattttttggggttatggattatgttagttaataaatgttgacttttcttccagttggtgggaactgggaatggggtaactaaattaatttaacggtggggactaaagtaatttgtatctaagtttttttttttttttactttgcagtagactttatctttagtgattcctgaagtggtcatagttgttcttcaggtttcgtcatattttaagccaatagtttaagagaagtaccttttttttcccctgcatcccatgacctttttaaatttttgttccgaaggattatatgaaagaaatattaacttccagcctaagggggggggggggggggggggggggggggggggggggggggggggggggggg

SEQ ID NO: 117519 - DNA, 375 bp, Glycine max
  Clone ID: PAT_MRT3847_77129C.1
ttgtaatggggtaagagtttaaatataaaaaattagaagaagcaaacgatacatattcaatatatttatttgtaaatgaggaagtgcattttatttttgctgaataatgagggagtgcatttgcacccatgttttttttatcggaattgcacccatggttataatgtctttatattttatcaaaattattaaaatttcgaaataagtagaatttgtttgtttgcattttcatcaatgaattgaacttattgactttgtaccgaatatgtaaaattgtaaacacgctgcggtattgccgaatactccctcataggctaacagatactattgtaaattatatacataatttattatatcaatttattaagagtttta

SEQ ID NO: 117520 - DNA, 585 bp, Glycine max
  unsure (1)..(585): unsure at all n locations
  Clone ID: PAT_MRT3847_7712C.1
gcatggcaccgcgctacgctaagcctatggatccctctaaagcggccgcccttcttttttttttttttttttttttttttttttttttttttttttttttttccctaaacccttctaagcctttaagggaaagtcctagcgggactcatttaaataggacaccaagaaacgttcctaaggggcaaaacacaggggggaacaaacgggaaaaggacaatacaacttacacactagcatccaatcatgaaaacccaaactaacaaaaaaacggcggttctgaaaaatctgaaaaaaattcgaagggaaagccataatggctttaaagttctaatggctaaaacgcaactccggacaaacaaagtctgcttcggggggcacaaaaaggtcaacggggggtctaagttaagcgcaaactttaagggctccgggcactgggtctgacaggaagttgctgataaagcccctgttaacaggagttccattggccacagccaccatggcctgctgggttaggatgtanccaaatgggggagcccatttcctggaacccaacctagttggggtggaccagttttcacccgtgaa

SEQ ID NO: 117521 - DNA, 205 bp, Glycine max
  Clone ID: PAT_MRT3847_77130C.1
gtatgcacaaacaaacgcgacattcgatactcaatttgagacagatacatgaccaacataaaactataaatcagacagaacccgggggggcatagaagtagcctctgaataacagttatggacattgtatccatacccagtaaagggagcagggatttacggctcccatgaagaaaaatgcaacatctgtttagccccgggatgt

SEQ ID NO: 117522 - DNA, 152 bp, Glycine max
  unsure (1)..(152): unsure at all n locations
  Clone ID: PAT_MRT3847_77131C.1
aatgcggctcgagtcgagctcatacagggcagccaggagggtaatgcagctagcaatgctacttgtatgagtncaacgggaaccaattcttgcttggaggagcagatgctaaccccagacaagcgactgacacagaaagcaagaaagttcaa

SEQ ID NO: 117523 - DNA, 163 bp, Glycine max
  Clone ID: PAT_MRT3847_77132C.1
tatttatggcaaaatgggcgaaagaacttttgggcacgttttggaatgcttggacacataaaagaaagaaatggtcgccttaaaagttgttcgagggataaagaaatatcgataagcaggcatggtacaaattgaggtactgcatcatcttgggaaacacaat

SEQ ID NO: 117524 - DNA, 447 bp, Glycine max
  unsure (1)..(447): unsure at all n locations
  Clone ID: PAT_MRT3847_77133C.1
aataatatccctctaattaaagtaaagggactaaaaggtacaattaagcttactataatttgtgagaattaaactgtcatcctctttatcgttgacattgagagttgtaaagaaacacaaagacataacaatagaaacttttggtatccgtttggcacgtcaagttgcaattgtagtttaaaattgtaaattcaattccaatcttgtcataattgaaactggttcattgtcataattcttatgtttgggttatgcaaaaaattagagcatataattatagttgagtccattttcattttggcacctttgagtaagggtagtcattggtggggtaatgtcggctttgagtgggaaagaagaaaagatccatangtggtagtcacgatggtggtggtagtcacgatggtggtggtagtaccgtggtantggcggtgaggtgagtggtga

SEQ ID NO: 117525 - DNA, 612 bp, Glycine max
  Clone ID: PAT_MRT3847_77134C.1
gcatctcgtaccaagctcggtactagtctgcagaccaccttccaatacatttttaatgaaatctactcatttgtttaataaagtcccaatgcctggcaaaagtgtacaaatcatcatgaaatggcctcaccatgtattttgcagcccactccccgtcactgattataaaccaacatgcacgttattttattatgcctagtactcagtcgctatattgtgatggccacatcttatagccagatcttagggtgtttcttttgtgctgactttcaatcaaagtcttattttcgaaacaccaattctgattgaaaaacaacataaaaatacttaaaagaaactgtatctaagttttgtcctactatgatcatgacatggtctacttaccttttgactttttttaaaagggaagagtcgctatggtattttgatccaagcactagagcagaaccttacacttggaggaactcgaggcttctttgatccatatgaaccagaatgcatatcaaggcactctatttcatgcttcactattaccttttcacttccttcaacccacctcttgagcctcttaagcactttctccttttggaagcagcatgatcaccatgagca

SEQ ID NO: 117526 - DNA, 301 bp, Glycine max
  Clone ID: PAT_MRT3847_77135C.1
ctcgagccgctacggatcgaagtggatgggaaaagaggggggaccccaaggcactgcccgaagagcgaagagagtgcctttttctcttgggggaggagctggagcagagaatgctcttctaaagaatgtgccaaaagctgtagtggcaatggcgatagatttcgagggccatctcgggattgtagttattcacatgacttcttcctacattaaacgtacagtctctcattacataatcactgctaaaatggttgatgataccatcaattatgacgctgtggaccacaaactgatgcaactt

SEQ ID NO: 117527 - DNA, 1339 bp, Glycine max
  Clone ID: PAT_MRT3847_77136C.1
aaggatgaaaaatgtaatttaaaggttgcattaacggcaaagtcatttggccaaaatcttggttgccgtgccggcttcaacggcttttgactttagttgtaaatccggccaacagaacactgatacgtgttcgatttagttacaacttagtattgtacttactaatattaatatatgatgatgtttagcttggttagcaaaactgttgaaataaatatggagtaaattgcttttgaggggaaaaaagaaaagaaaaaggagaattattgtatgcgtgagagagtgttactcaaattacgagactataaagaagcatcacagtctgtaaaggaactaggtttcttggatcttcttcttctattctggagtaaataagggaggttgcaatggacactagtattagtattagttaaagaaaaccccattgcattccatttggcaactattcctatccaattttaaatgctcttccacctcacgagatctccgtggccctagcctaccactactcacttcttcaatgtcctactcctcttcgatatgagtcaactcggcgccgtgttgcggactcagagggagcccaggaggagtaccattctgggtttgttgacggagcaaatggacggcgttgatagtgggacccgcaggaggcgcagcttcaaggaacgcttcggattcatcggcatggggtgctgtggggccacctggggcttccgttccgacgcgctaagtgtcacccaaggagaacagcaacagcaggaaacggatccagagtgcgtgggtccagcaggtttgggttcgggtatgaatctcgcggcggcgttagcggcggagaggcagctccgggggccgcaggaggaggcagtgagagcgccggggacgccgtggagggtgtcgctgatgaggctgctggaggagaccgaggcggagaaggagaaggagaaagagaaagaggagaatgttgtggggaatgattcggtgtgctgcgtgtgcatgggaaggaagaaaggcgcagcgttcatcccatgtggacacactttttgcagggtgtgttccagggaactgtggcttaatcgaggctcttgtcccctttgcaatcgctccatcctcgagattctcgacattttctagaatttcttctaactactttttattattcttgatccagaaccaaccacttcatccctccgcatgtgtaatagtatcatactatgaatctcatcatgtatttgttaccgcgctaaatgtttctctcttgtatgtactatatactactatatgcctgtgactttacaccagacaacattcaacaaagtcggctccattattttgttaaaaa

SEQ ID NO: 117528 - DNA, 231 bp, Glycine max
  unsure (1)..(231): unsure at all n locations
  Clone ID: PAT_MRT3847_77137C.1
ggcttctgttgcttcttttaatacgaatgcggttgtggttatcttaaacntagaatctggctttctggtgagatatctagacagtaaaagtgagggatgaatgcatcctgatgacatgcctattctccaagcaatttcaattgtgttaaatagacatccagaactaaggcaacaaggacttgctcatgaagtgctgcaatggtatatatgcagaatggaagcttggtttgc

SEQ ID NO: 117529 - DNA, 249 bp, Glycine max
  Clone ID: PAT_MRT3847_77138C.1
gatacgcaagaggtttatccaagagcgatgcctcagtcattgggagaaatgctgcagcagcattcatcgtcatgacgacgtgaaaattgcgctaacgtccgaatacctaattctctgccagcttcatcttactcttcagtttcaaggagtctactaccgctatatacatcaacttttgatgactacttcttaactgcttctaaaacctcacctacttcacatcattgtcctcctgtgtaatccaagtcc

SEQ ID NO: 117530 - DNA, 1870 bp, Glycine max
  Clone ID: PAT_MRT3847_77139C.1
gggactgaaaacagtccactctatgacggtatatatggggcatatcaacagtgctgactactgtttggactcgggggtgtcaatgtcagtgcttactatggaagttggtggtcccactgaatgggtgcgctttggaggcacacaacttcattagactacatgttaaagacacctacacagtaccccttacaagatttccatgcgccctatattgatttcccagtttgcaactgtatgggcccccttggtgtttgcttgttcgtcctatagtgtcatccttgaagccaacttattcctatcacggggagtgtcataacaacttcttcataccccttacatatcacttcgagtaactattgaaatcttaatctttagagaatgtggataatagacaaatgatttagagccatgatcagttccttacgctgtttgtttggaccggacatgtactgtcgctgtagaaggtttttgtcacgagttctgcacacaatgtgccttgtatctttgttctacaaactctacttcaacaaccacaacaggacccccaggttcaattgcatgccctctctgcaggcacggcatagtctcatttgtgaagcttccagacgcaagaccactacacaaggaaatgcaaaggacatcaaacttgtccctaacattttgcacatgttcaagtgaggtattaggggattccagtgacatgaccaccccattttgcaaaccaacttcccgtggatccaaaaattcttccccttcaagatcatttcgctccattagctgccaagggttcccctcattcagaatgaaccccagcctttgcttgggagcagatgttagcccctccttagtgccttgcactgtgggcagaaacgtgaggaaccacttggcaaggtgttctggttccagtttcagacgatcatcttctcaaacagaaagaaggaagtcatcatggttttgttccctcaatcaatctgttgacacaggcagtggatgctgattacattttggtctttttctttctcaccccaacattataccccatgattccaaatatcatccactgttcactacatttctacattgattgtaaataccaagcccaattgttttcagctgggacaaatttcttttttggcaacatatttcacaacacaatttctacaagtctcatgcttggtgcacgtaaatgcaaactgctctatgtggaattcatggcttataattatcaaatagcaaacctgtaaactagttgaaggaaaaatcgtattgtttgtgatcatggcttgtaattatcatacgttctgcttgaaatttggaccaaagactaatgctctttgcacatggagaaagccacaggtgatgttagctgcacgtcacaatttcattaaagttggctaaggggccagaagctcagaacctaaagacagcattgatgccttaataattcagttttcagtaacacaataaatctgtgccagcaagtcttaggaattatgggcaacaattggacccacaaggccacgtgcagatatttattgtcaccgttgggtagcctcttttcgcagaaattgcaaacctaaacaacatagaagctaaatatactatgaaatagaacgaaataagcacaagatgtttccactttaccttactagagttctgactttcttcatgtatgcgtttatgtttctacttatttctgttcattgtattaccgttctcaaacaagttattatataattaagaccggtctcatttcaaaaaaaaaaaaaaaaaaaaaaaaaaaaaaaaaaaaaaaaaaaaaaaaaaaaaaaaaaaaaaaaaaaaaaaaaaacaaaaaaaggggggcccccccaccaagagaccccccccc

SEQ ID NO: 117531 - DNA, 253 bp, Glycine max
  Clone ID: PAT_MRT3847_7713C.1
ttttcttttgtgtatatacactatggggcacatttatttgtgatcataactataacaaagcgagaaaagaagtccttgccccttagaagaacaattttgggagcatggcaatgccatgcgtacgacacgctccctaaccaaatgaacactggctatggccccctttctcccgaggtgaaatgcgcatgttggaggctggctgaggaagcacacaacaggggggggtaacacaccatacctgaacagggcgttg

SEQ ID NO: 117532 - DNA, 418 bp, Glycine max
  Clone ID: PAT_MRT3847_77140C.1
ctagttctagtcgcgactccgccctttgctggtcctccccaaaaaagtagattttgatcattttttgaccccatttttaaggacctaaaagaagaaaccgaaccattttcaatttttcactttgcgagtcctaaaagttttacgtgaaaagttgaactggttcctaactatcttagtggaaaaagcaaaatggattagcaaaagtattatcgaaggaattcttagaagtatcttcaaaaggattctaagcctaacgaaagtaaaacaattttgaaaatggctctttattaaattgaaattcataaggatcgatgaattgagcgactataaagaggattgaacatttattaggattaatccaatgatttctgaaacaaccatttcaattcaatcgttaaattcagtaaatggttcattg

SEQ ID NO: 117533 - DNA, 610 bp, Glycine max
  Clone ID: PAT_MRT3847_77141C.1
caacaaccacaacaggcccccaggttcaattgcttgccctctctgcaggcacggcattagtctcatttgtgaagcttccagacgccaggcctttacataaggaaatgcaaaggacatcaaacttgtccctaacattatgcacatgttcaagtgaggtcttgggagattccagtgacatgaccaccccattttgcaaaccaacttcttctcgtggatccaaaagttcttccccatcaagatcatttcgctccatgagttgccaagggttcccctcattcagaatgaaccccagcctttgcttgggagcagatgttagcccctccttagtcccttgcactgtgagcagaaacgttaggaaccacttggcaaggtgttctggttccactttcagacgttcatcttctcaaacagaaagaaggaagtcatcatggtttttgttccctcaatcaatctgttgccacaggtggcaatagatgctgattacattttgctcttttcatcatccttgttatattatactcgtgattccaaatatcatccactgttcactacattgactgtaaataccaaagcccaattaaatttcttttttggcaacatatttcacaac

SEQ ID NO: 117534 - DNA, 403 bp, Glycine max
  Clone ID: PAT_MRT3847_77142C.1
gtggagctgttttgctgcaacctgatgatcggaaagagcacgtttttttttttgacgtggattaactcatttaccgttaccgaatgcaagctgatccattcagtaacaagaggttggagcatctgcaaaatgaagacgacgggaagcctgatactaacactgtcactagtttactagcggaccaccataaagactatggattgagtcacactcacactggactcagaaaagaacctgacgcttagctagagcggaaaacaattggactctacttctgatcggaatgatgcgtccgatgctccacggtcactccaaaactgatttatggctacgagaagataactcacgagctagccggaaagggagaggaagacttctgagttgagctaatattcaactatcg

SEQ ID NO: 117535 - DNA, 179 bp, Glycine max
  Clone ID: PAT_MRT3847_77143C.1
ctggcattaaaacaacttatttttaatattgatcaacaagtttgacgtcctgcagacagccgaactcattcagccgaaaaaagaaacgacaacgtgacccgccaattgcccacagggtgtaaacgcacaacatattactttgcacagcccacattctgagcagcgagcggctttaaaag

SEQ ID NO: 117536 - DNA, 210 bp, Glycine max
  unsure (1)..(210): unsure at all n locations
  Clone ID: PAT_MRT3847_77144C.1
tccgccatcgccactccgttaccgtaaagcctccggganatttcgggcctncgnagtggnataaagggnnggacttattacaaacccgttgnganaaacgggtgggntcgtnaggtcgtcgtggangtngttccattcgttgcaacgtttgggaaaaaacaaatcgcttaagccttcctttcggctcctccctntcccttcccattttct

SEQ ID NO: 117537 - DNA, 426 bp, Glycine max
  Clone ID: PAT_MRT3847_77145C.1
gtggacgatgcgttgagcgttaacaacgccaatgctgggtctgctgtgagtagaaggtggttgttgctgtcgaagctgaagcaggggttgacgaagcagaaggagggtgaagggagagggtggaatatggggaatgaggagaaggagagggagaatcaagagaagcattgtgggaggaagaggagagtgggaccggtggatcatggactggttttgagtgccttgtctcgggcgcttgaagtcaccgagcttgcttatttggatatgacggataagctgctggacacgaatccggagcttgctttgatgggttcgtgtttgatggttgcattgatgagggatgaggatgtgtatgtcatgaatgttggggatagtcgggctattgttgctcactatgaaccgaaagagggtgattctagtgttgaa

SEQ ID NO: 117538 - DNA, 289 bp, Glycine max
  unsure (1)..(289): unsure at all n locations
  Clone ID: PAT_MRT3847_77146C.1
aacaaaaaatnagacaaaaaggggcccggggaaaacaaaagaccggggaaccccaaacacccaaaaaccaaaagaccccaccacacccaacccgggcaagaagaaggaataagggtcccaatcaccacccccttagacaagacgggaaagagaaggtacagccaacaacccccaccatgggcaaaccggaggaaaccccccagagagacacacccgccagaccagggggactccccccagggcgccgcagccccggggggcccctgcaaccaaaccacgnctcccacat

SEQ ID NO: 117539 - DNA, 455 bp, Glycine max
  Clone ID: PAT_MRT3847_77147C.1
ctcacgcgtacgtccacccgtgcggacggcttccaccagcgctgattaattgatcttgcgattgcctgcaggactttcgctcgactttaactcttagcatcagacctcaacacataccgtggcccacagacgctgctgacgcaggtttgcgtcgagacctccttcggtctgacccgtgcatggatgtgcatggatggggaacgaatgacatacgagttttattgacacgggttgcggctaatgtgtgcctatgcttcctcattcatgagcttggattactgggtcaagctaatgaatagggtgtgcatgggcgaaagagctttgataagctgcagacaacgacctgatttgctcaagactcagatgaaggggtgaagacggctgtgcagaacctgtgaggagagttggtgaaacactatggggctctaaacgtgatgtaaagcatgctgatgatg

SEQ ID NO: 117540 - DNA, 379 bp, Glycine max
  Clone ID: PAT_MRT3847_77148C.1
gtctgccacgtcaccgtcactcttttgttctacaacaagtacgccgttagggctggggttagggttccgtttgtcccgtgccccgaggcactcaattttgatccaattcaatcgagatcacgatctcgatctcttgttcaggaaccgggctccagaggcgtgaacgaatcaccggcggatttgattatttcgatctccgacgacggacggcgagggttctggttcaaattggaggaagaaaaaggttcttgttcccggagaattcgaattccgaggaacacttaccgcgcggtgcttgagttatacgtttctttccacggaaacgacgagttttggtactccaacccgccgaattcgtacatcacggcgaacggtttag

SEQ ID NO: 117541 - DNA, 511 bp, Glycine max
  Clone ID: PAT_MRT3847_77149C.1
ccacgcgtccggtacgggcccatggagtccgtcatgggcgccggcgccaagccctacgccaactgggcagccaagatggccgtcgccaccggcgccggcgtgccctgggtcatgtgcaagcaggacgacgccccggaccccgtgatcaacacctgcaacggcttctactgcgactacttcagccccaactccaacagcaagccgaccatgtggaccgaggcctggacgggctggttcacggcgttcggtggcgcggtgccgcaccggccggtggaggacatggccttcgccgtggcgcgcttcatccagaagggcggctccttcgtcaattactacatgtaccatggaggcaccaacttcgaccgcacctccggtgggccgttcatcgccaccagctacgactacgacgcgccgatcgacgaatacggtctgctgaggcagccgaaatgggggcacctgagggacctgcacaaggccatcaagcaagccgagccggcgctggtctcaggcg

SEQ ID NO: 117542 - DNA, 489 bp, Glycine max
  Clone ID: PAT_MRT3847_7714C.1
ggagaaaaaaaatactaggggttttttttttttggggtttaatttcccgggggaaaaatacagggggacttttttttttgggaaaccaacccacaagggggaacaagaacataaaaattttgttcgaaaatattaaattatttttgggaaccaaaattggatcttgtaaacaattggcataaataaggggagggatatataacacgggtaatacaaaaaaatcatccataagtggtgggggtttgaaaaacctatccctgaaaaccgagagccttgaaacgttgagaaaccttttgagcattttgaaaaaattcttgtccaaaaatgggccaaaaaaaggattcataggatttccaaccttttggtggaaggtttgcttgctgaagccaactttaaaattttttttgggtggacgcagggaaatgcccccctcacattttttttattatgttttatgtttaaacttaaaatacccccaattaatttttt

SEQ ID NO: 117543 - DNA, 202 bp, Glycine max
  Clone ID: PAT_MRT3847_77150C.1
ctcgaaacggcactccctagcaaccgtctcagacatacatggcggtttgcattcccacatcaaacgatgacggccgatacttccttcagaatttactgtgcgaaatactgaaaagatccgaaacatttaggtgcaagaagtagaggggaccctatatatgtattcgagctagaagcaaataagctcccacttggaataatac

SEQ ID NO: 117544 - DNA, 339 bp, Glycine max
  Clone ID: PAT_MRT3847_77151C.1
ccgcggccggcagcccgtaactcggcgcgagtgatgattctttttcatgtacgcaaaagaacgaattatagtgggatgtcgagccaactcggacccggtatcttcaggctattcaaccgatcctatgtgtgtcttgtcaaagcacatatggcctggcttcagatgaacatgctgacatgtcagatgcaatgtcccactcgcgtgacaccgtgcaacatggaagcaggagattgcacaaagccattgccaagtggttggactgcatacagaacttactgaggcaaagagtcgcaatcaggcttcagatggaagtgcatataatgagtgggaggttctttg

SEQ ID NO: 117545 - DNA, 2355 bp, Glycine max
  Clone ID: PAT_MRT3847_77152C.1
ttaggcttgggcttagattccttaggctgggaaggcttctttgcagcggatggaatgggtgaaacagactcagtttgcttaacctgacctaatatctttcggaagttaggctggttgaccaatgtccaaaagtacctctcgacgtgagggaactcggaggtgaagctcttaactaagagctggctgaatcctaaatacaagttgcacgtcgttatgatatcagcaagggtaacagaatggccaaccaggtatgtattggaagcaagatgagtgttcaaggcctcaaatgctctcttcaatgcagaatttgcaccctcctcaactggaggaaggtatggggcaaatccaagtcttggtaggtataatttcataatattagcatcgatctccaaggatgaaaagtcaatccactggtcaatgtgggcattatcaatggcagaagatgagaacaaagcgttgtcacccttgagtcgagcaacgtaacgagcaatggcattgctctcaaagactggaccatcgggcgtttccaagacaggaacctttcctatgggattcattttaaggaattcaggagttctattagagacacccatctcgaaattaggggccaattccacttggacgccactgtactctgccgcaatcagagtcttgaaagcattcttgtttgctttggttgcgtgcaagatcagagccatgacttagagcaaacaagttaatatgtggccgttttcttcttcatcatagtcgtggccgtgtcgcagcaaaaccaaaccacatattaacttgtttgctctaagtcatggctctgatcttgcacgcaaccaaagcaaacaagaatgctttcaagactctgattgcggcagagtacagtggcgtccaagtggaattggcccctaatttcgagatgggtgtctctaatagaactcctgaattccttaaaatgaatcccataggaaaggttcctgtcttggaaacgcccgatggtccagtctttgagagcaatgccattgctcgttacgttgctcgactcaagggtgacaacgctttgttctcatcttctgccattgataatgcccacattgaccagtggattgacttttcatccttggagatcgatgctaatattatgaaattatacctaccaagacttggatttgccccataccttcctccagttgaggagggtgcaaattctgcattgaagagagcatttgaggccttgaacactcatcttgcttccaatacatacctggttggccattctgttacccttgctgatatcataacgacgtgcaacttgtatttaggattcagccagctcttagttaagagcttcacctccgagttccctcacgtcgagaggtacttttggacattggtcaaccagcctaacttccgaaagatattaggtcaggttaagcaaactgagtctgttccacccattccatccgctgcaaagaagccttcccagcctaaggaatctaagcccaagcctaaggatgaaccaaagaaagcagctaaaccagagcctaaacaagaagcagaaccagaggaggaggcacccaagcccaagcccaagaatcctcttgatcttcttcctccaagcaagatgatcttggatgactggaaaagactctactcaaacaccaagaccaacttccgcgaggttgcaatcaaaggattttgggacatgtacgatccagagggatattctctgtggttctgtgattacaaatacaatgatgagaacacagtttcctttgttacgttaaacaaggttggtggatttcttcagaggatggatctggctcgcaagtatgcatttggaaagatgctggtgattggatcacaggcaccatttaaggtgaaggggttgtggcttttccgtggacaagagattccaaaatttgtgattgatgaatgctatgatatggagctctacgactggaccaaggttgacatctctgatgaaactcagaaagagcgcgtcaatcagatgatcgaggattttgaaccatttgagggagagtctcttttggatgccaagtgctttaagtgagaaacaaaaaccgttattccccagtcaaaatggtatgatttttgtcgtgtctttttcgtgttgtgtccttggtttctatcctattttctgttatagtgagttcttagctagctgttttgggatcgtagacgctgaaacttaaaaatgcttgattttggtacacattatcttttatgactatagcaagaccagtgtacaaatacatttctccgtggatgtgtatgaatttcaatatgctcacgataaaaaaaaaaaaaaaaaaaaaaaaaaactcgagactagttctctctctc

SEQ ID NO: 117546 - DNA, 1765 bp, Glycine max
  Clone ID: PAT_MRT3847_77153C.1
ccacgcgtccggtttgtatttgggcttatgaaaacaaggttgggtccagcccttttagggtttcgtcagagttataaaatacctaattcatttcctctgtgccgctttcttcttcatcgtcgtcgtggtcgtgtcgcagcaaaaccaagccacccactaacttgtttggtccaagacatggctctgatcctgcatgctaccaaaacaaacaagaatgccttcaagactctgattgcggcagagtacagtggcgtccaagtggaattggcccctaatttcgagatgggtgtctctaacaaaactcctgaatttctcaagatgaatcctattggaaaggttcctgttttggaaacgcccgatggtccagtctttgagagcaatgcaatcgctcgttacgttgctcgactaaagggtgacaacgctttgttctcatcttctgccattgataatgcccacattgaccagtggattgatttttcatccttggagatcgatgctaatctcatgaaattgctcctaccaagacttggatttgccccataccttcctccagttgaggagggtgcaaattctgcgttgaagagagcatttgaggccttgaacactcatcttgcctccaatacttaccttgttggccattctgttacccttgctgacatcataacaacatgcaacttgtatttaggattcagccagctcttagttaagagcttcacctctgagttccctcacgttgaacgatacttttggaccttggtcaaccagcctaacttcagaaagattctaggtcaggttaagcaaactgaggctgttccacctattccatcggcaaagaagccttcccagtctaaggaatctaagcccaagcctaaggatgaaccaaagaaagtggctaaaccagagcccaaagaagtagcagaaccagaggaggaggcacccaagcccaagcccaagaatcctcttgatcttcttcctccaagcaagatgatcttggatgagtggaaaagactctactcaaacaccaagaccaacttccgggaggttgcaatcaaaggattttgggacatgtacgatccagagggatattctctgtggttctgtgattacaaatacaatgatgagaactcagtttcctttgttacattaaacaaggttggtggatttcttcagaggatggacctggctcgcaagtatgcgtttggaaagatgctggtgattggatcacaggcaccatttaaggtgaaggggttgtggctcttccgcggccaagagattccacaatttgtgattgatgaatgctatgatatggagctctatgactggaccaaggttgatatctctgatgaaactcagaaagagcgcgtcaatcagatgatcgaggattatgaaccatttgagggagaacctcttttggatgctaagtgcttcaagtgagaaacaaaattttagtccctagtcaaaatgctgatttttgtcgtgtgtctttttcttatgtctttggtttctatcctatttctgttatagctgttttggttgggatcttcaacactgaaacttaatgcttgattttgttacacattatcttttatgactatagcaagaccagtatacaaatttatttatctgtggatgtgtgtatgaatttcaatatcctcacgatacgcgtttcgcggggatcaaaaattaaaaaaatatatttgaagtagcattttcaaaataatgagattatgtaaatagttttaaaaatattgaatattgtgtcaaa

SEQ ID NO: 117547 - DNA, 433 bp, Glycine max
  unsure (1)..(433): unsure at all n locations
  Clone ID: PAT_MRT3847_77154C.1
gaaaaaccgggccgaccgcacgcgtacggctgtgaaacccaacctgctctacgactttttgtgcaagccgaatgatatccacgcgctgtatactactccgtgggaggagcgcgtgaaaaaccacnataaccacacggtgcacgccacgcaccatatcgcttaatcttgtattcacgcgtcgcggaagtgtttttttttttacttttctcatataaaatttaataccattatatctatctcatctttttattaatatctttattatttaatcttatcattcattataaaattatattaaattattttttattgttttcttataattttctttatttactttaactatattttatttattttttttttaatattattttactttcactattatttcatttatattttattctatttaattattttctttttattt

SEQ ID NO: 117548 - DNA, 603 bp, Glycine max
  Clone ID: PAT_MRT3847_77155C.1
gtttccgaatcagggtctcttccttcaccacctcacaccttgctttcttgaaaacttcattgattgattctgagaatacaactaatagggtatagacctggctagctgaattgcagcttcttttttggatctgcttctgactttccccactgtatttggagctgaccatgaagatggggacactactggatgggccctcgccaggaaattacaacacctgcgccactgcgaaaactttcacagctggtgacactttggtgctcaagtatgactccactcatcaagttgatgagattgatgagagtgcatactacaactgcagcctccgcaacagcatcaagaactaccaagatggcaactccaagattgaattgacttcaccacacaaaaggtacttcttgagcaccatttcctgccactgcggtgccggcatgacccagcaccgtcgtgaggctgctgctagcgacgaccacaatcgcttactcgaaggatgagcccacggcggagcagtgtgacgcctccgcatgtacgaagttcgaccaactacccctcttcactcctgttgccaatgacgcgatggccaatgctgccgactgcactgag

SEQ ID NO: 117549 - DNA, 511 bp, Glycine max
  Clone ID: PAT_MRT3847_77156C.1
ggctcgagcccaattcgaaaactccgcgcgtgctacaatacggctgcgagaagacgacagaagggggtattagcacaaaacaaacaaaccctaactctaacccttgtcgaaaccccttatccgatcatggctactgatgcccgtgactcgcgtcgcaagtatcgccgatcatcctctccggaggacgtggacagatcctcgaagcgccacaagcaccgccaccacagccaccgccaccgccacgggagcaaaaaacgcgacgaagagattaaattcgatgatcgaacaattggtgcggttccttctccaactccgcacgggcatctccctgacgacgatgatgtggaggagggagagatccttgaagatgaggctctcgacggcgaggtcgggaaaaaggagacggaatctgatgctgaacccggtgaaatcaaggtgacgggagatcgagatgttcgatctgataatcaaaattcgggacaccttactaaaatttcagtaactagaaatg

SEQ ID NO: 117550 - DNA, 196 bp, Glycine max
  Clone ID: PAT_MRT3847_77157C.1
ctttgaatacccctcggcggctaatccgaccataaagatatacaacactgatcgcgctgtttctggacctataccttctgtcattgcaaatatgctcggagacactgggtctgatgtaccgctgattatatcacttacaggaattgctgggcagtcattcgcctgctctttgactcctggaagaacacctcgcatc

SEQ ID NO: 117551 - DNA, 461 bp, Glycine max
  Clone ID: PAT_MRT3847_77158C.1
tgcaatggtagcaatactctcgttacacatcatccttttcttcttctttcactgcttcgatgctctgatatctctctctcattcaggacattagtttcttcctcttttttgctcggcgtttgtattcaagtgaacgtgtatcagacatgaaaatattcagtggatggcatcgttttgtttttggtttcctttgattttcctccttactcatttgttttctgtcagggaattgcacacaaactcaaaaatggaggaaccccgcaagcaactaaacaagaaattggatcatctggttcttggccctgctgctggacaaggcttgtcaaatcgtttgcaatgccaagggacaaaatcacttaataggatccattcttctaacagcagatcaggtgcagatggaagtatcacatttgtcactgtctttaccatttataattcttctctcaatgaaggagacgata

SEQ ID NO: 117552 - DNA, 1080 bp, Glycine max
  Clone ID: PAT_MRT3847_77159C.1
gttctgtaacctctgttaccactcacgagttacgactgttaccctatttgtagaaggctggttgtcgcggttgttatttttctcatttaaatttgaataaataaaacatgtcaacaataaacgaggacgatatcgtcgacgaatcgaactgttcagaaaccaaactagtcgaagaggaagaggaagacttacagaagcttctagtccctgacttgcagaatcttcctctcactcctgcttccgccgttgaaaccaactttgccatttacttcgccctagatttcatgaagccagctcacgatcagtacgtttaccgccacgccaatggcttgtgtgtgattgggttggctccttcccacattgctttcaatgatgaaggtggaatcacagccgttgatttcaatgttggaaagtctgatcgcagcgggataaaagtcactggaaagcggaagaagaacgcacaacactttgagtccaatacggctctgtgtaaaatttctaccaaaaatgatacttatattgtgagatgttgcgtcaaaggctcccttttagaaatcaatcaacaactaatcaagcagccagaactgcttaatgtttcggctggcagagaaggatacattgctattatcatgccaaaacctgctgattggctcaaggtcaaggcttcccttgttagccttcaggagtacaagaaatcgagggaagtcaattgaatctggaacaagaatggtgccataatcaaagtgctaaccccacatgatgcttcatttagagaggtcccaaatgctacaaactggatcaaattgataaatttttaggtgcagtagatgatgagacaccttacaccgtggccggatgattagttaaatctcttaactccccatgggcaaccaagaatctcatgatattggatccacttcattctttaggtttttctcttttattttttgctttgttattttatttcttctttttaactatttaaattaataaaaaataatgatgatgatgatgatatgacttttggccacttttaagataattactggccagaggtgagtgttacaaatgttttttttt

SEQ ID NO: 117553 - DNA, 391 bp, Glycine max
  Clone ID: PAT_MRT3847_7715C.1
gggggaagggcggaatatttgggaaacattggtctgattctaacaattaataaggcaaaggccctgtttgggaggtgagacacaaacaactttttttttctggacataatcatgggcctttttctttgcctggttttttttagggcaaaaacctttcccacaaggtaccaaagaaaaaactagttttaacccatcctccaatttcaaggggtttgggtttggttgggacttttttggcatccccccttattggtttaccttttttttttcaaaggggtttcattgttttcatggccacaggggtccctggtgcctcccctcccgggaaaacaatcaggggttggtccccctttggtggatcacctgccctacacactgggaacccattctt

SEQ ID NO: 117554 - DNA, 333 bp, Glycine max
  Clone ID: PAT_MRT3847_77160C.1
ttgggggttaaaacatcgacaaagtcatcaaaaggtcaaaccctccatttatttttattttttttggattttgggaaacattcacaatcccattttggggcattataaaaaaatcttcccccacatttagctcattcaaactgggcataagggaacttttttggaaaaagtttttccaggcggaatttggggggggggcccaaggaggaagtttccaaattaaaaaatccaatggcctccacccttcatggggggaggaggacgagggggccccattgattggtttcgactggaaaaaaacaaatggcccaactttttaggtggttttgaaac

SEQ ID NO: 117555 - DNA, 156 bp, Glycine max
  Clone ID: PAT_MRT3847_77161C.1
gaatccaatatccatcacatgggaatgtggttctctcacatctcctatatgcgcgcctctctgctttacatctcacagctacgttggtctcacagcgccactgaggagcttcaacttttcttctcctcaaactgccaaaattcctcgctcccaaag

SEQ ID NO: 117556 - DNA, 252 bp, Glycine max
  Clone ID: PAT_MRT3847_77162C.1
aattcggctcgagcggagattgattatcacatgaacaaggacactagtgctcttgcactcagtagcatgtatatcaaggtggatgcaccttctaagagaaagcacggcgtctggatagatggttgtatctagtaatcacttatgaccttccaacagatgttgatctacacgggtgaaaatgatgaatactttccagtcatcggtatcactaagttctcgtaaagttgataaactttgctctgatggtgatca

SEQ ID NO: 117557 - DNA, 270 bp, Glycine max
  Clone ID: PAT_MRT3847_77163C.1
cccgcgtccgccgatgccagccgtttgattcgatgttctccgatttctctggcacgaatcaaggtggtttggcggtaaccatggttgtgttcagccacatccccaaccaatggagtttcaccatgctaactctattctatgtttctacctttaaccatctaagctcttgttactgttagtgttaggtctaccatgtaaaattacaattactgtttccagattctcgtatctgtggacttttctatcattctttagctttaaactttgttt

SEQ ID NO: 117558 - DNA, 237 bp, Glycine max
  Clone ID: PAT_MRT3847_77164C.1
gaaacttatcctaagtttgttttggtgactacatctctgggtggcttacagaagttccttccaaggaaccaaatccaagctgttaccccatgtgagaaaagcaacttgctttcgtatagaaaatgctcacacgcttagacctattgttgttttgatgatcatatatgcttcatctttaactgtgttctaatgatatcgatactatagcacatgcttgttagatcaaaagtattccat

SEQ ID NO: 117559 - DNA, 689 bp, Glycine max
  Clone ID: PAT_MRT3847_77165C.1
ccacgcgtccggcagaaaccgccatttctgtgcagaattcgaaaatagcaacacgctgagctctctccgcgaggttttctccgatcaaatgataccgtccgatcagaaaccctaggagccggcgaggcgaggaacctatcgggcatgttcatcctaatcgcagcggcggcgggggcttaatggcgagcataaagttattgtcggaggctgtgcgtagctcactgcgttcgggcattttcctcgtcgacttcacgcgtgtcgtcgaggaactagttttcaatagcctcgatgctcgtgccacaaagggagagacagagaagttaaaagttcattagctttgagaatttgggttataccaattgagctgtctgtctattatttctgtttcaggtatcggtgtttgttagtactgggagctgctatttgaaagttgttgatgatggaagtggaatccctcgagatgggatggaaatggtgggagaaagatatggtgtgcatttcattgttgttgtttctttcttttttctaccatgttaacttgcgactagttggtgcatttgttgtgcctgcatgctccatttttttggtggtcgtttcctgaacacagcagtgttcaagctatgttcattaaaagaaacgaaagcaacatcaaaatttcttaatttggttgacctgaatgcctcgagtga

SEQ ID NO: 117560 - DNA, 484 bp, Glycine max
  Clone ID: PAT_MRT3847_77166C.1
ccacgcgtccgacgcagcatctttatcactgacactatcagaaccgtacttggctcttttattcacttgtggactttcttccagcctgtaacctacctgattttattctctctcaacatgttcaccttcgtgctgctgaaccatgtctcactttaagggcatacaccatgatgagcttatcaacaatgctgggtacatagacactcctgaagagggaattcttgctgctgatgaggcaacagggactatagacaagcagtttggccagcatcataagcaaagaacattgaatccacacaggcgagctcttagggagcggtttttaactgctgctggtgctcttcaatatctcaatggagtgatcctgttctgagagagaaccctctaccagagcacagctgcgggcccggcctcagtgaatggcgtgaaagaagctagcgtgcttgctggcgtcactgatgacaagggcacaggacagcttgct

SEQ ID NO: 117561 - DNA, 441 bp, Glycine max
  Clone ID: PAT_MRT3847_77167C.1
actcgagccgcggctcgagccaagtttcaacaaacaaaaaagccttggtagctgatatggaactactatcaaacaagtgtcatggaattggcaatggagaagacaactctttgtttgggaacatgaactcctaaatgagttggaagaaattttgcagggcgcctgtgttgtatttgtagaacaagactcatggatttggctactggatccaatctctggcttttcggttgcagcaacatataaattggtgcaaaatgctttggcacaagaacataatccaacacaacatggatctacatacaacaagttatgggactgcatggcgccttcaaaggttactattcatggtttggcgcttactcaacaacagacttctaactctggaccagctgctaaaaaggaatattcaaattcaggatcaacattcactatgttgttttt

SEQ ID NO: 117562 - DNA, 336 bp, Glycine max
  Clone ID: PAT_MRT3847_77168C.1
ggggacagtaaaaaggactacaactctcctctaaagtcatttcatgtaattttactatttcatcctaacagcgaggttgttcctaactaggatagattcttttaaattacttcataatgcaaccaaagcaattactttcattaattcaacatataagaatagacttcattgtatcaactcactatgaatatggcatagataaatacatatttttcaatatactagagtctgttatcaatgaaattatcactcctctacattctatattactcattactatctataaacatactaggtgcttttaaataaatgattaaaaattaaatcttcaatttt

SEQ ID NO: 117563 - DNA, 439 bp, Glycine max
  Clone ID: PAT_MRT3847_77169C.1
tcttcttcttcttcttacggcaaaggcatgtacgttattccgtttactttgctgttagcttcagttcaaattaagtatacagaggcagtgaccaatcccttcctatcaactccagccatgccccttttgatcgcctctatcacttgccatgggctggcatccatggcagacacgaacttgcgggctccattcataatattccacctgtcaggaatagttggatgtgaggtactcatctgggttattctcactgacattttctggtactgtatggtcaacatgcttgcttcactggtagctttcttatgcttcttcaataatcatattcctaacatctttgctgatcatgagatgccaattatagaaatgcagccgccgaaagaagaggtgtagtagtatttgtaagaaaagcctggtgcatgtgtgcttgtgtactcat

SEQ ID NO: 117564 - DNA, 2278 bp, Glycine max
  Clone ID: PAT_MRT3847_7716C.1
accccctttccatttagagttctctcttccaaaacccaaaacaaaaacctcactcacctctgctcttttctgtgaatcacttatcacttaagaaaataaaagagcaaacgaaatgttgcggtcacttgcgagagccgtagcgaccaatcatcgatgtcacgccacgttctcatctctcagtcactcttctaggcccccaaagcccacaccacccttcaaacccgatcccaaaaaatccgcccccaacgccgccgccgccgccgcactcatcgacgagcaggaacgtcgccggcagctcgacgccgacgataaaaatccttctctcgatgtggggcccaacgggccgccctctcttctccgccgccccttccttctcccacctctcccgcaacgacgtcttcacctacttcaagctcacgtactctcctttactcactttgtttgttttgtttttcgttgtggcattttgtagaacaccttgtgtgcgtcttttagtttgacgtttcttccggactctgcgttcctgagtcggtttggttttgcaggaaggatgccctgaacaaggttttgccagagggattgccagtgggtatgttagtagccaagggatttacccaaactgctggtttagactacattgaaacttttaatcctgttgtaaaaatgactatagtcagatttgtgttatcattggctgcttctcagggttggcatctccatcaacatgttgcggtcacttgcgagagccgcagcgaccaatcatcgatggcatcacaatcacgccacgttctcatctctcggccactcttctaggcccccaaagcccacaccacctttcaaacccgatcccaaaaaacccaccgccgccgccgccgtcgcactcttcgacgaccaggagcgtcgccggcaactagatgccgacgataaaaacccgtctctcgatgtggggcccaaaggccgccctctcttctccgccgtcccttccctctcccacctctcccgcaacgacgtctgcacctacttcaagctcacgaaggatgccctgaacaaggttttgccagagggattgccaatgggtatggtggacgagtttcaggactccctgcgaacggctttgcttgttcgccagagcttcttggatcttcgtgataacttcaggcgtgtcgttgatccaccaatgtggtcctctaatggtaaaggagttaaagttaggaagcaagttgtgttagatggtcctgttagctgtgggaagagcattgtgcttgcaatgcttgttcagtgggctcgagaagaaggttggctggtcctctatgttcctaaaggcaaggattggactcatggaggatttttctataagcacccacaaactggtttatgggacacacctgtccaggctgagaatgtcctcaaggattttttgaaatacaatgagtcctacctaaaggaaatgccatgccaaatatttgatccaatcctattaggtgagggtgctggtgttggatggttgaaagatgttgattccttggcaatacctgaaggtacaaatttatacgagctggtgaaggctggcattgagcagacacatgcagccgttggagtagttgttcgtttgaggaaagagttatcccttgttaaagacaggcctgttcttattgccgtagaccaatataataactggtttacattcagtgaatacgaggagccagttactatccgttcttgccggccaatacatgctagagaacttacaatggtgaaggcttttagatcaatggtgcatgatgatatgatggtaggtgccttttctcattcaacagcggtaggaaaacttcgtaaagacttaccagatgttccagtagattctcgtgttatgtttcctcgatacagtttagatgaagctgagactgtttgccattattatttaaggcaaaggctaattcgtcgcgaagcattctcagaagaaaattggaagaaaatttactttttgtccaatggaaatggaacagagattagggggttggttcctttcatgcgatgacagacaacagatgcactattttttcaccaatgagttgtgttctgattgttgtttttaataatatttatttttgccatccatttccttcaacataggatacagatggattgctatttgcgtgatccacttcaatcctattaagtagcactaacaattattctcaaaggcaatgtactattatgtatattaacttgcatcttatagttttagaatcagtaataattttcttaacttatactt

SEQ ID NO: 117565 - DNA, 272 bp, Glycine max
  unsure (1)..(272): unsure at all n locations
  Clone ID: PAT_MRT3847_77170C.1
aattgttaaaaccacaccaattttggggttctggaagaagcttcatttgagagccaaattattgaaatctgtttccactggtggaatgaattcagtgtcttcctttatgcctntaaaactcaccaatntngttttatnaattnatgtatgtcngccttactagcantgtgtnactgtccaatatgagaatcggcttaatttggactccatngcnacagtnatatgctcatgccaacctaatccaattttccnggaaactatttcttacngat

SEQ ID NO: 117566 - DNA, 547 bp, Glycine max
  unsure (1)..(547): unsure at all n locations
  Clone ID: PAT_MRT3847_77171C.1
aaacgaggtaatttcacggaacatgaagagaagatgataatccacctccaagcccttttggggaacagatgggctgcaatagcttcatatcttccacaaaggacagacaacgacataaaaaactattggaacacccatttgaagaagaagctgaaacaaagtgggagtgatgagggtgttgaccaagagggacattcttcttcttcttcttctaattcacatccaaagggtcaatgggagagaaggctgcaaacagatatccaaatggccaagaaagccttgtgtgatgctttgtcccttcacaagccagcaacagcaacagcaacaaaccttgttgtgcctgatgatgccaccaaaccttcttcaacttctcaccaaccctacaagcatgcatcatcctcatatgcatcaagctacgagaacatttcacggntgatggaaaactggatgaaatccccaaactcaaactcaacaaataattcgccagggtattattcttcttccttcagcaacatggtcaataataacactacaactggatccagtt

SEQ ID NO: 117567 - DNA, 617 bp, Glycine max
  Clone ID: PAT_MRT3847_77172C.1
tatggtacctttcacagatggaggaatacttattgtgacaaaactgggagcattgcttcacactatatacgaaaagtcttgacttcctgagcttcgtttgaagttgctctgttggtaaaaaagggctgcttaatggtcaaagatgagcatgtcttgcgaatgcatcatatcaaaaggagagatcggtgcctgatattaacaagtgttttttacacacagtatcaatacaatggattctgttgcatataagagagagatctaagaaacccatccctgcgaaattgacagaacccagtgcgtttgctatgctatttctgacgaccaaactgatatcacctgaggaaagggatcggacgacttccttttccaagctccataagatgctggaactacatattccagcatgagctcctcccagtacctaagcactggacttcgcaagtcctttggacaataaaatggatggattatacattgatccagcttttatggacaagcttgttggtcacatctctaagaacttaattgaccctgaccaacataataggttcctctaattcttggtattctggggaaggaagggaaaaggaaaatttttccaatgtgagctttgtctt

SEQ ID NO: 117568 - DNA, 488 bp, Glycine max
  Clone ID: PAT_MRT3847_77173C.1
ttccaaggaaggtttcccgtcatcactgtatgacgtcctccattctttggggggggggggggggggggggggggcctatgtaaatctaccgtcgagaaagtataaagagaagaaaatatatgccaataactaactggcggaaaacgctaagacaagggagcttataatggcgcaaaaggcatacgggcccattagaatgatttaacggcattagtttataaatgaccagaggggttagcacgatgaacctggaaccaacgtggtgtttattacaaccttgatgaggggtgagaagtaggggacggcctttcctggggcaatatagtacgatttagtgtacgaccagtacgggtggctaatgtgatgcgaaggttaggtactgtttgtggcaagtgcgtgggccaatggctagacagtagtggctgttgtatttggcagcgcgtaccgcattaggtaagcaaaaaaaggtgctggggacccataggttt

SEQ ID NO: 117569 - DNA, 438 bp, Glycine max
  Clone ID: PAT_MRT3847_77174C.1
cagatatgaaatcctaggctacgaaaacgcgaataaagcatgaaaaggcaattttccccattgactatatacgtgtacacggtggtctttattgttggtgatgaagacgaggatgtggaggtcgtagccgggagggtggtacaagaacggagtggaaggaaagctacgaagaagatgagtaaaaaatctgatacagagggtgcaccgtataaccatgtgcacaaaattaatcctatgatatataaaagtgatccacaataaatccctaacacaactagactagtccaccttaacttttttgaataaaatagtttaattatcaattaactttatcaaaagacaactttttatactatatttatgtactggacaaacttaattgataaaaacaatcaactacacatataccctaaacatttatgaaaagtaatttaagaa

SEQ ID NO: 117570 - DNA, 1493 bp, Glycine max
  Clone ID: PAT_MRT3847_77175C.1
tacggctgcgagaagacgacagaaggggggagtgcaataattctgattttcagatctctcattctcactctgtttccttcgttctaccgtcatcaactagaagaagaagcttcaatttctgcaaaatggatccgtctgcggcattgctgtttaaccacctcaaaggtgcagacccgttcttcctgctagcgggtcctaatgtgattgaatcagaggagcacattctgcggatggctaagaacatcaagactattgcatctgaagttggaataccgttggttttcaagtcaagctttgacaaagctaaccgaacatcatcaaaatcatttcgtggcccggggatggttgagggattgaagatactcgagaaggttaaaatagcttatgacattcctatagtgacagatgtgcatgagtctatccagtgtgaagcagttggcagagttgcagatatcattcagattccagcattcttgtgtcgccaaacagatcttctagttgcagcagccaaaactgggaaaattatcaacattaagaagggccagttctgcgctccttctgtgatgacaaattcagctgaaaaggtccggttagctggaaatcctaatgtgatggtttgtgagagaggaacaatgtttggatacaatgatttgattgttgatccacgtaacttggagtggatgagagaagccaattgtcccattgtagctgatataactcactcactacaacagcctgctggaaaaaagttggatggtggaggtgtggcaagtggtggtcttcgagaactgataccttgcattgcaaggacagcagttgccgttggagtagatgggatcttcatggaggtgcatgatgatccactgaaagcacctgttgatggcccaacacagtggccgttgcgccactttaaggagctacttgaagagcttgtagccattgctaggataagcaaagggaagcaacggttcaacattgatctcaccccatttcgtgaataaagaaagggtgatggttttcagatattctgaatataatttcgttaccattggtttttaaagattgttcaagggtgatgaatgcaaaactgtctcctatcgcaagttccttataaggagagtttatattaaaaaatgttatttgatgatccatgcttgttactctgaagtggtaacactataccaactaatgtttgtcacatatcccttaatcatgtcagttactgaagttgaggcaattaattgaatatcaaaatataggtagattatttattaaagatataggtaggttaattattaaatttattattaggtaaattaatttattatttttgtcatttctcccaagtactttctacaaggttttcaagccatttctaaaatatctcaaaattttggctgtggcttagggatattgtttacgatttaggagaaatatcagaaaatgatgtataaggatatatggtttaatgcatgatctacttggtaaaaaaa

SEQ ID NO: 117571 - DNA, 927 bp, Glycine max
  Clone ID: PAT_MRT3847_77176C.1
gctcatcatctacgacttcgttccaaacggttgcctcgccaatgttcgttacaggaaagtggggtcctcgccgagtcatttaccgtgggaaatccggctcaagatagctaaaggagtggcacgtgggctgacttacctccacgagaagaagcacgtgcatggaaacttgaagcccagcaatattctattgggcaacgacatggagcccaagattggagacttcgggcttgagaggatagtgacgggtgacacaagctataacgctggcgggtccgcgcgtatttttgggagcaagagatccacggcatcacgagatagtttccaagacatgacgtttgggcctagcccgagcccgagcccaagctcaataagtggtgtgtctccttatcatgctcctgagtcgctcaggaacttgaagcctcaccccaagtgggacgtgtactcttttggggtaatgtttcttgagttgctaacgggaaagattgtggttttggatgatatgggccagggtcccgggcttttggtggaggataagaaccgggccttgcgcatggttgatatggttatacgggccgacatggagggtagggaggaggccttgttggcctacttcaagctagggtatagttgtgtctctagcattccccagaaaaggcctccaatgaaagaggcactacaagttcttgaaaagatctcatcctccttctcttcttcttcctcttatcattatagcgtctaaaccatgatttgccacacactggttttgtagaaagaaaaaagaaaacaaaaaaagtgtacttatgattgactaataggtttttgtgtttgattcaatattgtgtgttgtaattgtgccaagtccattgaccatctctctgccaattcatttgctaattgatttttaaggaataaattctgtcttcattc

SEQ ID NO: 117572 - DNA, 578 bp, Glycine max
  Clone ID: PAT_MRT3847_77177C.1
gttgtttctcttttcagatctctcattctcactctgttttacatacaatgtcgttctgaatcactgcatcttttcttatttccactctctgcagcttcattttctgcaaaatggatccctctgcggcattgctatttaaccacctcaagggtgcagacccgttcttcctgctagcgggtcctaatgtgattgaatcggaggagcacattctgcggatggctaagaacatcaagagtgttgcatctgaagttggaataccattggttttcaagtcaagctttgacaaagctaaccgaacatcatcaaaatcatttcgtggcccggggatggctgagggattgaagatactcgagaaggtaaaaatagcttatgacattcctatagtgacagatgtgcatgagactatccactgtgaagcagttggcagagttgcagatatcattcagattccagcattcttgtgtcgccaaacagatcttttagttgcagcagccaaaactgggaaaattatcaacattaagaagggcccgctctgtgctccttctgtgatgacaaattcacctgaaaaggttcggtta

SEQ ID NO: 117573 - DNA, 367 bp, Glycine max
  Clone ID: PAT_MRT3847_77178C.1
cttggaaggaaggtgaggagtaaagacacggattcctgtaacagatctgcaattgtggtactaattctcaattgatactgctcaaataatgtaagtgtttttttttccactgcaaaacttaggttgcttgcaatgtgtttgatgaaattgtcttatttcttctttgctttagtttgagcacttcatctaattttcatttcactgttagttttgctctaaattttgaatggcaaggtgcaatccaatagcttgttgccttgattccatgcttataaaacaatcacatagcacacaaaaagtttttctaatgttgcaagcttaaaattgtcctcattcattgtgaaattgatcaaatatcaatttttgt

SEQ ID NO: 117574 - DNA, 258 bp, Glycine max
  unsure (1)..(258): unsure at all n locations
  Clone ID: PAT_MRT3847_77179C.1
gctgcatcctcatgaaaacggtttntacttntcattaattaacaatatttggnaagtttcttctgtagtttctttaaacagtgaccatcataccagnttttgtgcaattggtaatcaaagttgagacttaaggtgaggaaggtnggactntcnatagaactaggataatatcanatganaatgtgtnatatcacagattaangatgaaaaggaggaganatcctatggttttnggcctaggattcggggcatgacact

SEQ ID NO: 117575 - DNA, 305 bp, Glycine max
  Clone ID: PAT_MRT3847_7717C.1
ggctcgagagatcatgtaatggagcttcaccctgtcaattgtgacatagagaagatcaggactcagttcgatgagatctattaaaacagggacggttattgaattggcgaaggtgatttccgaatcgatgaagctggtgcagaagcagaaccactcctcaagatactgacgcgtgaagatgaagaacaggaggctggcttagtgcctgactcaagccctgtaattcatgaactcatggtgagtgagtcactgctaaaaattgtgtccatagtagtaatgggcggtgtgtgtaaaaccactcttga

SEQ ID NO: 117576 - DNA, 143 bp, Glycine max
  Clone ID: PAT_MRT3847_77180C.1
agctcgataacaaatcaacagacatatgcagctctaaatgtgctagcacagacatccactgatagtgaggggatacacactgaggattgcggtaccgatgcagatattcatgcgcatgaatacaaccctgaagagaacagggg

SEQ ID NO: 117577 - DNA, 779 bp, Glycine max
  unsure (1)..(779): unsure at all n locations
  Clone ID: PAT_MRT3847_77181C.1
gaaaatatatcanctctcataacgtaaatgnctgctatattgaagctcngatgcccgtgcgnncctnntngaaagccngctgnngtnngggatnncccnananctantaatcgccaatgagaatcnatgcagtcttntgcctcatgtgccncntcttccncctncngaaatatcncatcgtcacaangcnncccgtacnnttcnacacatgccactgctggtaatcattagagccatcacctccgantgcattnataatcnaatatnccccatctgtttaanaaatcataaagatctcggccctggaantgnncnnaaacatttgtcatggaatgtngtgtgacaatttgacttcaatgccctangtngtncaggccgggaaatcancantcgccccgaggaatncacactngattttggntggggggantccncntccgccaactaaaaananacaattncatanctgctgncaaagccngngnntnatgaaggtnaattantaccngttnnaggaatcacngttcntcngattcnttatccnatctttntctctcnggtagctgaaaagntacttaacannnaancnntgnagttctttcaaatnggacgggggacctnncccnnttgttgcatcaacgtgnngggagttgttgaataangttgcggaaacctngnacnccgggggggggccgggcccctctcgncaaanataaattcnttcnnctccctgggacaaantctcgtccngattttgaccggaaaaaccaagccctgtc

SEQ ID NO: 117578 - DNA, 130 bp, Glycine max
  unsure (1)..(130): unsure at all n locations
  Clone ID: PAT_MRT3847_77182C.1
aacaccaagtttacaatagcactaatcaatcagaagctgaaagaaacgctaataactacatcgcacatagaancagtaaaagatgaaaaagaaccaatcacttttaaccccacttcacttctttctaact

SEQ ID NO: 117579 - DNA, 530 bp, Glycine max
  Clone ID: PAT_MRT3847_77183C.1
ctcaagtcaacaaattatataattgcttatatgaaaccttgcaaatttgttatctctttcccaaccaccaatagatgtaaggtcaaaattgctcactggcttacagagatgatgggactttagccccaatgataggactttagcacccagtgaaaaaaaaaaaggaaaagaaaaaaatgatacaccagaattaagttgaaggatcttaacaacctcaagatgattaattaaccctcttcgccggataataatgatgtctaaaatgcaaccttcccaaacaagtcataggaagaacctccttcggcttgtgtccatttccggcttgtgaacccactcatattccccacccttagtgtcaaatgttccatgctgcaggctaatcaactttaatgtgaaacgagggccacattcctgaagtcgggcaattgttttctgttcgggaacattctcactcttgccttctttgtcctttttacctttagactctgtttttttaacttcttttgtttcaaaaatgtaccgatgatgcc

SEQ ID NO: 117580 - DNA, 267 bp, Glycine max
  Clone ID: PAT_MRT3847_77184C.1
ccactctccataaaaccacacattcttattcacccttactacctcaactctcaaggcagggctttttctttcactcaaccactcttcctctctccttcacttattcttctccttctcctaattgctctctctgcttcttctattcctcccacttgtttttctcacaaagtttttgattctcaatcaactcatgctatgaacaaccctcctcatgctaaaaaaagttagcctagtgaatttcgacttcttaaactacacagtacatca

SEQ ID NO: 117581 - DNA, 283 bp, Glycine max
  Clone ID: PAT_MRT3847_77185C.1
aaaaacgaaaacccgggttttttgtaaaaactgacctgtttctacttacccactcgatgaagggctttcgagaggaattggggggcgcaaaaagggggggggcccaatttggggggtacagaggctcttcccaggggcgggcagccggacccccgaaaaaccggtgcccacctgggagaaaagacctgggccgctcgggccccaaagaaaacaatgggagggcccggggagggtaaacaaaatccgaaaactccttggctaggagaagaaccggcggggaaaa

SEQ ID NO: 117582 - DNA, 401 bp, Glycine max
  Clone ID: PAT_MRT3847_77186C.1
agggtgcgagaagaccacagagggggattcattcacaaatcttagttactttatgagtgtgattcatagcaaataggattgatctaaaagcaattattactcttgagaagaattaaaatatgataattacaataacaagatcagttcaagaattataaaatggaatggcgcagctactggtagagtcgttgaggccttgcaagaccaaagcctatgcaggtggaatgatgctttaagattatcttaacaccaatttaaaaaccaagtgggctcattatgtaagggtaacatgacatcttatactgctatgatctccacaacactaaaacatgcaaaggcaaatcaattagaggagctcttcagaactgctatgtacttaagctggtggggccccaactaga

SEQ ID NO: 117583 - DNA, 438 bp, Glycine max
  Clone ID: PAT_MRT3847_77187C.1
aaaaaccccaaccctttttccctgacttggttaaaaaaatttaggcaaaaagccaacccttattggcctgaaggggccggaattgttttttaagaagggttgggtttggcatgggttggcttttaaaggaaggagccctacaattcccaggaaaaaaaggaaaaattcccggggttggggggcttgggggggggtcctgggagcccaacccggaaatacccggagggaaacaaaagggtggggcccattttgggccaaaagggaaaatgggcaggtttaaatataccccgaacatttttatgggcccttaaagttggccaacttttttcgggaagggggccccgaacatttcaaaattttgggaagggcttaaaacccccccgccccaagggataaaaattgcccaaaaaccggattcaacgatttttctttttttta

SEQ ID NO: 117584 - DNA, 2862 bp, Glycine max
  Clone ID: PAT_MRT3847_77188C.1
tggaagctggtacacctctgacgggaatcctgatctcctttcatctaacgtggcagacataaagctccaatcatcaagtgcaccagcacaaccattagggtttcatggctatgttcttacagggaaactgaaatcgccaaagctttggtccgcagaaaaaccatacctctataccctagttgttgtcctgaaagatagatctggccgcattgttgactgtgaatcatgtccagtagggtttagaaaagtatctaaagcccacaaacaactgcttgttaatggacatgcagttgtaataagaggtgtgaacaggcatgaacatcatccacaagtggggaaggcaaacatagaatcctgcatgatcaaggatttggtcttaatgaagcaaaacaatattaatgctgtgaggaacagccattatccccaacatccacgttggtatgagctatgtgatttgtttggcatgtacatgatagatgaagccaatattgagacacatcattttgactattctaaacatctcaagcatcccactatggaaccaaagtgggcaacttcaatgctggatcgtgtgatcggcatggttgagagagataaaaatcacacatgtattatctcctggtctttagggaatgaatctggatttggaacaaatcattttgctttagctggttggattcggggaagagattcatctcgggtattgcattatgaaggaggtggatccaggactccgtgcactgatattgtgtgtcctatgtatatgcgtgtttgggacatggtgaaaatagccaatgatccaactgaaacacgtcctctgatactgtgcgagtattcacatgcaatgggaaacagtaatgggaatctacatatatattgggaagcaattgacaacacttttggactccaaggaggctttatttgggattgggttgatcaagccttggtgaaagtttatgaagatggtaccaagcattgggcatatggaggtgaatttggggatgttcccaatgacttgaatttctgtttgaatggcctcacatttcctgatcgaactcctcatcctgttttacatgaggttaagtacttataccaaccaatcaaggtggctttaaaggaaggaaaattggagataaaaaatactcatttttttcaaacaacagaaggattggagttcagctggtctatttctgcagatggatacaaccttggatctggtcttttgggccttgtccctataaagccccagagtagtcatgctgttgattggcaatcaggtccatggtattccctatgggcttcaacagatgaagaagaactattcctgactataacagctaaacttttgaactccacacgctgggttgaagctggtcatattgtttcatctgctcaagttcaattgcctaccaggagaaacattgcacctcatgttattgatattaatggtggcactctggttgctgaaacactaggagatacaatcgtagtcaaacagcaagatgcttgggatttgactttgaatactaaaacaggtttagttgaaagctggaaggttaaaggagtgcatgttatgaaaaagggcatcctcccatgtttctggcgagctcctatcgataatgacaaaggaggaggttcagccagttatttgtccaggtggaaagcagctggaatggactgcctccactttattactgagagctgttctgtgcaaaatattacggagaactcagttagaatattggtggtttttcttggtgttaccaagggcgaggatggttctctctccaaccaagacaagtcaaaggttttatttacaacagaaatggcatatacaatttatgcttctggggatgtcattatagaatgcaatgtgaaaccaaaccctgatcttcctcctttgccacgtgtgggaatcgagttaaatgtggaaaagtctttggatcaagtaacttggtatggaagaggaccatttgagtgttatccagatagaaaagctgcagccctggttgcagtctatgaacataatgttagtgagttgcatgttccttatattgttccgggggaatcttcaggtagggcagatgttagatgggcaacattcagaaacaaagatgcttttggaatatatgcttctaagtatggtagctctccacccatgcaaatgagtgcaagttactacagcacctcggaacttgaccgtgcgacacacaatgaagagctcattgaaggagatagcattgagattcatctagatcacaagcacatgggattgggtggagatgatagttggtcgccatgtgtccacgaacagtatttgattcctcctgtgccatactcattctctgttaggctgtgcccagtaaatccagccacttctggtcatgacatctacaaatcccagtttcaaaactcttgatttcttggatcacatgacttgttctattcaagaataaacatcttgtagaagaccgaagaccgaagaccaaagactggtgtgcttactaaggactacaaagaaacttggaagctattggtgtaaagatcccatgcaatcattttggttggaagcttgatttaataatgtggaaggtgaataatcttattgtacaaatttgttccattacccaaggaaccaagcagacaatttcacaacttgtttaataaatgtgctgtaactgtgatatgaataatttactgttcttatttgaagatcaagggcaatgaaatgaacaaaaaataatcctcgattgtgtaagtttgttcgggctcctttgaatttgcttgtgtggcatttatgtaagaaattgttataaattcagtatttcataaacattaattaaaattattatttttatcaac

SEQ ID NO: 117585 - DNA, 379 bp, Glycine max
  Clone ID: PAT_MRT3847_77189C.1
ctaactctgtatagcccgaacgaaagaaagaaggaaatggggatcacagccttcaacggaaccggcttcggatatggcttctgcataggttgcgagttcggtatcggatggggtttcggcggtatgccattgaactcagtgggtcttggtgcaggtagatgctgtcgcgtaggactaggacttggttgatcatttggtgctgcctttggtagcaagtatcgatccttacgggtcacatttacaggagtggactgtgatatgaaggagcaagttatcagcacggtaatgtgcattcccggatcacaagttacaagattacgggcacgtttggacaatgtagaactctagttggcctatggatacacattgaatgtgaact

SEQ ID NO: 117586 - DNA, 2056 bp, Glycine max
  Clone ID: PAT_MRT3847_7718C.1
tagattttctcattgtgggctctcagtcctttaaggttgggtggtctgaactttacaactgatgatgttggcaatgttcttgcaatatcaggtcttgctattctagtcttccagcttaccctgtaccgattggtgcaaaaagcttgtggacctgttgctcaagttcgtatagcaggggtgttatccatacttctcttgcaatgttatcccctcatgacaatgttatcaagcttcacactggacatagtgatcaatattgcctccattctgaaaaatggtttgattggggcattttctactagtttattcattctgcaaaataaagctacagtaattttttggttcattccatcagatgtcatttatttcccctactttcggtatattttttagattgatgcaattgatgatagtttatttttgctgaaagaaaaaacagcgaagggagaccgcaaatagaattccaataatttggatgtcagtgttaagaacaattggaaaacaattgggtcctgcttgtgacgtttccttattattttgttagcaaatgaatattaattattgtatactgttaattatatagataaatcttaattcgcatcttaaaatccatgctatatatgttcatatataatacggacctttcatccatgtattctagatttccaaaattcagaatttcagacttactggtgattcaataataagcaagttttaggcattgtcttgaaaaaatcacaagaatagaaatagatattggtaaaaaagatttcgaacatagaggcacacctgtaggttttgttatcagcgttatgttcttatgcaagatgcattgttgggagcttactcttttacatttaactgcaggtacacatattgtcttctttgtcctgtatattgttgatgttcttggaatactttttatgtttaaacaagtcttgagtgtaataaattaaatatcatcaaaaaagttaaacggatattattaaatatggtataaggggaaaacagtatgtgtactgatatcaataatttttgttactgctttcgaaacaatctgtcaattgatttatgtagcttagtctattttttacaattacatactttgagcctcgactgttagaattaactgaggctactctctatactctatggtgtaattgcagttaacaaatcttgcattaataaaatattttgtgatgagagtatgccgtatagcattgattaacaacactttctaactacaatgacatactgaaaattatatcaagttttctaatattgctactggtcaatgtagattatcttggtcgcaaaagcatataaatgattctttcctgccaggtatgttgattaaaaaatttgcttgaattggtttctatttcatatacagaatatgggaatccttaatctaagtgttatttctggttcacttattgttccttaattgaaaagaacataataggccatttctattacagcatggagttttgcctagaaccaaacccaagaatgaaaatgcaactttagaacaaagagtttgaacttagtctaacctcttcatgtatgcttaatttcaatcttttcttttgctagctgcattgctggaagctcactcttttacatttaactgcaggcacccatattgtcttccttgccctgaatattgttgaaggacttggagtactgttaatgttcaaaccattcttgagtgtaaagaattaaataccatcagagaagttacactgatatcactaaattttgtacaaggggtgaagaatttgtgcgttaattgcgtgcattggttttgagatcgtagccactatgaatgatgaaataattagagatgattgtgtgttgtacacttgcatcatgtaagtttggactttgattattgagattttaggatgtgtgaactgagtagagttagttaaagtttggacctttatgttgcaatttatgtaacagagtttttttaatatgttctttaaaatctttcattaaaattatgtttatagaattctcttttttttaaaagagaatcctatcttgtttg

SEQ ID NO: 117587 - DNA, 639 bp, Glycine max
  unsure (1)..(639): unsure at all n locations
  Clone ID: PAT_MRT3847_77190C.1
cgggaacaaattatcagggataatacctcgatgggtcctcgcaaataacgaaaatattgatatctctgacaataacttctcctgggacagctcaagcccaactgaatgtcaacgcgggagcgtaaaccttgttgagagctactcttcatctgtaaatacacaaactaagattaattcatgcttaaaaaagaactttctatgcactgcttcacctagccaatatcggtactccctgaacattaattgtggtggaaacgaagcaaatgttagtggtaatatttatgaagctgacagagaacaaaagggtgctgcaatgttatattacactagccaggattgggctcttagtagcactggaaatttcatggacaatgatattgactctgatccatatattgtggccaatacttctagacttaatgtctctgcactcaattcaaaactatacacaacnagcacgtgtttctccccttgctctcacatanctatggtctctgcctaataaatggaaattacacagttaagcttcactttgcagagattattttcatcaatgataggtcccttaacagtcttggaaggcgagattttgacgtctatatcagnggaaatttagtgctgaaagactntgatatccga

SEQ ID NO: 117588 - DNA, 259 bp, Glycine max
  Clone ID: PAT_MRT3847_77191C.1
ttgactattaaaagaggacttggtcgggctcagtttctgtttaataaatcaatggtcatttactttcaaaaaaaaaagtgtgagcgaaacaccctcttaatatttcttgggtttccttggaaagtattgggctcggtctcatcatttgtgccctaagtgattgacattagtttcacccttaatacaatttagggttattttattttaacaggggattttgcaccaccatttgggccaggttattccacctattgagggg

SEQ ID NO: 117589 - DNA, 304 bp, Glycine max
  unsure (1)..(304): unsure at all n locations
  Clone ID: PAT_MRT3847_77192C.1
tcgcnngcncgcgtacgtgnagctcggnattcngctcganggngattcnagaganatngctttgntggnagccaaaatggncnnancgttgtgctttgntagagnnnacaattgctcgancaanagacaannctgtaaagangcnngccctaacatatgnggnnntggnagcnnagcncgaggcggangagncgcnagaggncactgnnngcgntgtctgaggaggagcagatatataancccctatcattnccaatgggntgggtgggaagcctataccttatttgctgtngaagtnctggnn

SEQ ID NO: 117590 - DNA, 352 bp, Glycine max
  Clone ID: PAT_MRT3847_77193C.1
gggcagcccaggggcataatactatatggcacaaactgtttctttgtatagaatacaaaatgctgcaaagcttccaacatcaaacacagaaaaggcctcccatggtggtgaaaaatacaagagatgactcttctctgaaatattgagaagtgcactttgttttttaaacttttaaacaacactgttgcactgtcggctttgtatcactcactgtgtataagttgtaaagcggagaacaaagaggatgagctctgcctttgggctctatactactttgtgctccgggccttccatgttataaaacctacctattttgatccaacctactgaaatgcggaatacacaggggaag

SEQ ID NO: 117591 - DNA, 420 bp, Glycine max
  Clone ID: PAT_MRT3847_77194C.1
acgagaaatccaggacaaggagggtatcccaccggaccagcagcgcttgatcttcgcggcaagcagcttgaggacggtcgcactctctccgactacaacatccaaaaggagtctactttgcatctcgtcttgcgcctgcgtggtggtatgcaaatcttcgtcaagacgcttaccggaaagactatcacgttggaggttgagtcgtccgatactattgacaacgttaagtcgaagattcaggacaaagagggcattcccccggatcagcagcgtcttatcttcgccggcaagcaactcgaagacggccgaacactctccgactacaacattcagaaggagtccacactgcacttggtgctccgcctccgtggcggacagtaggtgttgacgggttgattggtttctgcacatggagttcac

SEQ ID NO: 117592 - DNA, 260 bp, Glycine max
  Clone ID: PAT_MRT3847_77195C.1
gggtatgcatggaggatctgcgtagtagccttagtctgtcaaggaacactatggagagcgagtgaggagtctcttctatgattatggttatggcgccggtcatgcagcagcatgctgcgacgtaaaccctatggtgctaagacagacgaatcacggcacctgggggagggctatagaaacaccagtcccatggatgagcctgggccagaggctagcgcatactcattataggcttagacggcatgtagcctatgcataaa

SEQ ID NO: 117593 - DNA, 1209 bp, Glycine max
  Clone ID: PAT_MRT3847_77196C.1
tccaaaacggagcgttatgccaatacgacatcgtgtgtcagagtctgaaacctgaatcctgaaacgctgaagctgagttggagtcacagttgttgttggtagccatggatgcagtagctacggcgaaaccgcttctgtcactgtcgtttttgcttttgctaccgtcttttcttccgatcgccgtcgcttacagacccggcgacatcgttcccatgagccgcatgggtcaataccactcctcgcgaaccgtgtggcaggacctcattggccgtcactgccccatcttcgcagtgaatcgcgaggtgttgatgcccatacccaagcccacgggttacactggtgcggatgcttataaaatatcgtttcaagttggcagggaaaagtttttaatcccgtggcttcttgtggtgaatcgaaaaagcacggaggtcccaatgattgaagtagatctgaggtattcaggaagtgatttgcatggtgtcacagctaaagttgtggatatgcctcatcactatgttgaagttcatcctgagattcgtaaacaattctgggattctcagcattggccaaagcatatacttgtccgatatacatggaaggaacattcagagatagatgtaacttcaggattttttgttctgtttggttcaggtctcatgttgtctttcatcctttcaatctacgtattgcaatcatcacgtgacaaattggaaagatttgtaagggaaacggttgtagaaagcagcgtgcctggtgaggtggtagcaaaggttgaatgatgcatccctggtgtcaatgatgcaatgtataacattgtaatattgtattcgtgaattgacaagatcaattttggaggagggggagaagggaatgttgttcttgcatatacaaagctatgaaccagttgtttcttttcttgatgaaggaggtgactcaggtgagtgagttggattggattaattttatcaggacgaactgtggagtgagaggcagtaaaagttgagagattgggtgtattaattcatagggaaggctggctttgtaacaatacatgaggttaaatacttgaaaagctataaaagaataaatcaaaatgtagggtattaatttcgcagaagaataaatcaaagtgtagggtattgatttggcaatcatttgaacctttaaaaaaaaaaaaaaaaaaaaaaaaaaactcgagactagtctctc

SEQ ID NO: 117594 - DNA, 414 bp, Glycine max
  Clone ID: PAT_MRT3847_77197C.1
ccacgcgtccggttgattcatcgcattctatcttctatcatatacaacctacgagaatgccctgcgcagatcgcacctcacatgacccttatttactactcccatatggctagccgtatacagatacttcattaacgtttttctagccggatccaatggcgaccctttgccaggggctgctatgtgtgaacccatgcttggcttcctgatatcctaattggtgaatctatccttcttcgacatgcactctgctaacgtaacagatggcatgatgagactgcagatctgatgcgacaatgatccgcacttacggacgcgacaagctgtagctcgtaagcatgaattgctggattctagtgcaatagcaacaaaggaaggccgagctgcgggtaatacatcgctaactgagcagga

SEQ ID NO: 117595 - DNA, 159 bp, Glycine max
  Clone ID: PAT_MRT3847_77198C.1
tctccgacacggcctcgaccagcgccgcccgtggtcggagtcgggtgacgtccggttctcgagccgagtattctccgagccctcggtcctgaatcttatcggcatatagggttatattgattttctaacttttacctggcttgctcgctctattcggaa

SEQ ID NO: 117596 - DNA, 476 bp, Glycine max
  Clone ID: PAT_MRT3847_77199C.1
ctcaacagccatattaaatacaacagattaagcaaagctgaacccaatatatcataatttatagggcgaggacgaggttgctttcattaagaggggacatcacaataaattgataattgagggtaagcataatttgggaaggacaaatggaaaaacattcaattagatgtgcttcatctacttcagtctatgaattgctggctgcataaatacataattattctgtatgaataaaaaatacatttactactcatgatctctatgacgtgttgaatactgactttctttactgattactaatcgcttcttggtctaacgacccataatcattgttggaaccctatactgattacataatcaataactatgacttgaaagatcttaattctgctgccgacatatatctttctacgcgtagctctgatatggtgattgcaaaacaggccatttgggtggcctatttatatgatcctcac

SEQ ID NO: 117597 - DNA, 376 bp, Glycine max
  Clone ID: PAT_MRT3847_7719C.1
taccggacttgaattcccggctagacctacgcgtgcgtgcacgcatacgaccacacgtgcgctatgagaatactacagactgtgaaatgaatgtgtcggaccccctacaaaaccctagcacacttttatcgcttaatgactactacagacgatgtaagcaactgcattcgcaatgggaattgatgtgaaagcctgatgtgagtccaataagaccatgctatccgaacacatatccgatgatatctaccttaagcttctcgacgagctgatccggcatcttgttaggaagactggcagtaacttcaatgctgctgtcctcaagcgccttgtcatgagcaaggtcagcatagcccacgctatacctctctagattgat

SEQ ID NO: 117598 - DNA, 471 bp, Glycine max
  unsure (1)..(471): unsure at all n locations
  Clone ID: PAT_MRT3847_771C.1
ttcccgggcagccaccgcgtccgcgactcttggaacntcctcaccctggtactggtagcaaggatcccagactcttgcaacatcctcaaccctgttcataaatacaacaatgttataaatattctagatggaggtcctggtgggtggctcttacatggtctgtatggcagctgaggaacaagattatattttcaagtgggactttcaacggaaacaaactaatggaggactccctatttttactttggacgtggctcagaaactatgagaaagattttatatctcattacaatcagtggtcatctaaccttagagaggctttcatttttagacaagggtagcagtcatagtgtattgatagttgtataaccaagctgtctagtttggttcccagcaagactgctgtcaactgtctagtctggcttgggaaccatttatctggattttattgtaatcacagtacctctgtat

SEQ ID NO: 117599 - DNA, 389 bp, Glycine max
  Clone ID: PAT_MRT3847_77200C.1
gctcgacttttgcagccgtgtctttcaattcacagatttattcctgcaatgacaaataagctaagtttatgtgcttcaaatatgttactttgaacatttaggacaaagtgcttttgtttctagcataaatagatcatgcattcagtattggaagcaaatgggaatctaaaatgtatatgtcacatgattgttcctacagtttgatgagcaaagagatcaagtggcaatagagcaaattctgcgggttatttttctggaccctgaaaagcctagtcctgtcctggataagcttaaacgaatgttggctgaggccgacgctgcacttgaagcgcgaaagaaaccactggaggagaaaggtccttgtgttgctggggagggccttgttatag

SEQ ID NO: 117600 - DNA, 367 bp, Glycine max
  Clone ID: PAT_MRT3847_77201C.1
ttcttttgcctggaggttgggcctactaggaaaccaattatttccaatcttttttaacatttttggcctcctattttttggaaatgtgggattggaaattcctttctttggcttcaggataggccttatagaaaacaaatgattcccattcatatatgaacatttttgcctcttatttcttgaaaatgtggattgaattccccgaggatccgattcattctttgcttaagatggcctatagaaacaatattcaatcatattgacattttgctcttttctgaatgtgaatgattccgagatcgactattcttgctagtagctatagaacatatcatatttactctgctctatctgaaggatgatccgg

SEQ ID NO: 117601 - DNA, 990 bp, Glycine max
  Clone ID: PAT_MRT3847_77202C.1
tcgtacgtctgcgagaagacgactgaaggggacaggaacaaaaaattaacatgaagaacaatttcagattaattagaacagaaaaaactcgaatcagttcacccacacagggcattagggagacagaatccacaatggctccagagtggacagacgagaaacacagcatgtatatcaagtctatagaagcatctttcgttaatcagttatatgattctaagcaaatgaaaacttcatatgaccctgctaccacttccggccagttcaaggtactacgtggtggctgttggcaaaaaatcaattttgagagagtgaatccgcaaacgagtaggattaaccagtgtcatgatttgatggaaaatccatggattcagcactaccgattttcaagcaaacagagaagcatagtagctccatctcttcaagaaagtgttactaccacaagtaatgttgttgatttaggccaaaggaaaggagttccctctggatcaggacatcttcatttgtgtgaatctcgaatctgccataaggatatgctttgtagtgatacagagatgtcagaccagaactttgttgatgaagaagtgaaaggcaaaaagcaaaataaaaaaagcaaggtgaaacgacagagatctttgataagtgatgcacaaagcaatgatcagggaacaaaataatatttactcacttacaatacgagggataggcagaagtgtgattcgctgtaactttttatggatgacacattcttacttagcctcagagtcaaaagggaacaggcggaaaattgcacatgccaatattgtacccggaattttaagatacaatgttttttttatgtatacccatgtttggggttttgtagagttgttggctatgacaaaaatttctgggttcaattgattttagcttgtcttaattatgatgatgatatgtgtacatacatgaaagcttttggttaattttatgaattgaaaactaatttgagtc

SEQ ID NO: 117602 - DNA, 479 bp, Glycine max
  Clone ID: PAT_MRT3847_77203C.1
ggctcgagaggccctttattttttttttagctgagagcgctctagctctctctttcggtctgggggctaaccctaacctgtttcaagccggagcttccttactctcctagaaccttatgcgtataagcggttctgcttcttgctgacaggctttttaacccacacccgggtagaccgggccagtctaccgtgagtctaggggcgcttaatgattcgaatccccaagccagatgaccagaacgtggctcatggaatggttcatccgcgggcgctgggaccctgaccctcggcatgggacttttgctcgctcaaccctctgccgtagctctttctggcatcgagtacgcctgcgactccggcgtttcctacgaaagattcgaggtgcatcgttgctgagcagactggtctgatgcttatgcacgagacgaccaaagctcggttgcattaataagacctgccctatggttctgggagtggac

SEQ ID NO: 117603 - DNA, 475 bp, Glycine max
  Clone ID: PAT_MRT3847_77204C.1
aattggttctcccaccactctctccagctccaaagttcgtcgttccctcaccaattttcaaccattcttcttttccttcttatctttgcttgcatttctgttttaagttattactattgtcttctctttgcgtttacttttctgctgttttcttgtttggagaaatgcagcatcatttcaagtcttgtgtttccaaaacttgcttcaattgtcaaatccaaatgtgtgcaattgcgtctatttgtttgtgttttctcttattttctggatggataatcatgtccattaatggtctaccaagcattgcatttctgttaaacatcaataagtattattgtggataaatattacccagactaataacagaatacgtgtatatgcgcagctcctgagtgtgtattattctgcattcaactgcagaatcacaaatagccggtttagtgaggcattgagtgttatacctgccacgtgagcc

SEQ ID NO: 117604 - DNA, 267 bp, Glycine max
  Clone ID: PAT_MRT3847_77205C.1
ggccgtcgacggcggtgccgccaagcctcttggaggcaccggagacgacgtcagtggtgatgggggacttccaggagccatatggtgcggtgattctctcagaaagtgaagggatggtggtggctgctgaagaagccattgcccttttgcagttgctgcaaaagaaacgacgtcgttgatgggttttttcgaaagagaccaactttgtggtgaaatggttgaaggagcgagtgaagaagaagttggaataataaggcggacgcgtgg

SEQ ID NO: 117605 - DNA, 196 bp, Glycine max
  Clone ID: PAT_MRT3847_77206C.1
tcttgattttttttttttttcttgatcgccagcgggcgtttcagtggttgcgcgcctacgactgcgggcttgctctgtccggtggtcggctagagtcgacgaggtatatcacactgcacacggggggttccgcttgaatcacaccgaggtgccacttgggggtggcgggttccatgttttttttttatcccccgca

SEQ ID NO: 117606 - DNA, 601 bp, Glycine max
  Clone ID: PAT_MRT3847_77207C.1
acgagtacaaagtccagtacccgtctgaaccttatatggttcacaccacacaagaaagaaaatagcctacatattccactttcttgaagtcttgtcagaaaacacaactatttaccgctagtcaaaatggatcttgtagccgaaaccttccaaccgcaacctcagcttggcttcgaacacacaaattttcgtctagtctactccatggcatgcagtaatcaagtaactaccacttactaggtagatcttcttaatgatttgctgaatctaagaacatggcaacctgtcaagtatttgaatcaaatattggtgaaacgactctgtaaataaatttccctgtctgatgtgagacctatctagtcactatttcaatttgcttaattgaactttgaatagaataaacaaattggattgaaatttagggacatattactcataagtccggaaaatttcatcccattttatcgtgtgctcttccttgaatttgtagtcaagtgcaactatgaacttattgggattatgtgctatatttgtaaaatatcattagtatcatctatgttaagatgttggatgtagccatttactaagaagattttgtttt

SEQ ID NO: 117607 - DNA, 453 bp, Glycine max
  Clone ID: PAT_MRT3847_77208C.1
aggctcgagccagcaaccaccaaatcgcggatccaaattgcaattcctcgagcgaactttgcaaggtctagggctaccccactggcatggaccataccgaattaacctccgaacagggatcctagtggggacatccgatgtgagacctacagagccaccaagctgatctcatgcaccaacctttagctcttaaggcgctacgatcacctggaccagagtcccaaaggacacatgctggaagatggaggtacctcttatggtcgcgtgattgcacccgttctgcgtgacatttacaaggcatataccgctgagtatggattggcactgattgaataaatgctggcttgacacccgtagagagctggactgtttcatgacacagcccttgttgattaagatacttgtgagcctttcctacgattgctataggaaggaagttggctcatacaagag

SEQ ID NO: 117608 - DNA, 217 bp, Glycine max
  Clone ID: PAT_MRT3847_77209C.1
tacaacctatacagggaatcataataagcccgctgcattgctccacaaatctgggatgaagaaagaatgcaagaggatagtaaaatctgttgaaaaccagttggtcagaaattactgcaggcctgatctcaggaaagctgaccttgcacggtagaatgctgttaacagaaacctgaactttgcaagagtctgggtagaaagtaggaataaacagagc

SEQ ID NO: 117609 - DNA, 207 bp, Glycine max
  Clone ID: PAT_MRT3847_7720C.1
gaggactctgcagaaaaggcacacgggtccgacttcaaagaaatggacttgtctcaccgaaccctcaataactctaaaactctgctatataaccattccacaccgtatgtttttcattgaaacacaactacattttgataaccatggaggactcaaaatctggtgttgcagcccatgaggacagcaagggtgggggtattaccatca

SEQ ID NO: 117610 - DNA, 1522 bp, Glycine max
  Clone ID: PAT_MRT3847_77210C.1
aaaatgtgttacgtacatttaattagaataaaccgaaataatttaggtgtacatttaaaaaaaaaacaaaaatgcataaaatttacaggaataaaatgtgtatacagtcagagatacaagatttttcaactgaagatcaacaacgcttttaaacaaacaattaaagttaaaatctattggagagcgtgcatatatttctaccttaagcgaccagtatgtgtcgatatattctctaaccaataaaatatgtatcggtccgcatgcatttatacagtaacctattgaattatagcacataataatcagaaatataatttgttctacgtttaaaaaaaaaacttataatagttcgtctagcaaagatttgatatgcaaattatcaaccttggagttgatagatagcatgcttttgttgagttcttctgactcgagctcgagctggctcaaacgacctctgatctcaggaattcgtgttttaatattagcaacctcctgttctttctgagccaaactttccaactctgattctagctcttctctcagtgactccacttggccaccagagttatccttttgtgcttctacctcctggtacctattaatgagttcgatattctgagctagttcatcgagggcgctagccaaccaagccacactaagttgagcagattctacatccttaagaatagccaacaattctttgactttggacttgcttaattgcattactgaggaggaattatgtaactcttgcaccacaaagcatacacactcaatgtaatatgagcgcatagcaactgattccaagtggcagtttgctcctatgtccccatacttgtgaaggatagattgcaagatggaaccaaaactttcttttatttgatatcttccaacttgagccgggcttcagaattggtcacagactcggtctctccttcatcaacgtgggtgaatattggaacaacattatgcatatgagatgcaattttgtcctcaccatgatctgttggcattgggttggcaatgtcctcaccatccttgattggttggtctttttgattgacaggctttacagcttggatatgtgtctgaggagaaacgtgctcattgttttctgtctccacttttttcttctcagaatactgtgatatttgtggtgaagcatcagataggtaaattgccccaacttttgaggcaggaacactgtcaagaacagggggttctggtttcaaacctaacttctttttcttgacgagctttataggaggaggagcacccgaatctgataatcttttgtaacaattgtcatcacactcgtggtaaggattagatgctttaggacaacctgggtacgttcgtttttggttatttatcttttttgcaagctgaccatctgtcacagtacttgggccataacctgaagtcttggtggtttgggagcaagcttgggtacattgatggtaaggattagaaagatgtacacagctgggagccatattctgttgtaaaaacaatagcaagg

SEQ ID NO: 117611 - DNA, 277 bp, Glycine max
  Clone ID: PAT_MRT3847_77211C.1
cgttctcgtgggtagaaatagcggcattcctgctgatgttcttgcaaagcgagctcatgaatttgaaaaacatgctgctcatgaaagtctcaaggatcaaatgcctgctgttgaccagttgtgttctcctcagggtaataagttctgaaaccttatgaacctcatacagagtgttgctggagatctcaaacttcttactgttgggaagatgtttgaggttcagcatattcctgtatctaacattagtgcacgggaaaatcatgtacttcaaataccc

SEQ ID NO: 117612 - DNA, 199 bp, Glycine max
  Clone ID: PAT_MRT3847_77212C.1
ggaacaacaaaaaacaggggcgggcattttcttaatagggtaaccataagttgaaacatattgacatgcacactgggttttcattcttttatgctgaccaaataacagtaaccggccaccttttgagccaaatgccatatcattttgtgaatgtcaaacctttagcagagactatttttttggaaggaaagccaaattt

SEQ ID NO: 117613 - DNA, 278 bp, Glycine max
  Clone ID: PAT_MRT3847_77213C.1
aattcggcaccagttcaaaactttaaattttcacaagatatgctattttgattttcatcaccaatttcttccacttaatcatgcatataggaggaataaaaaatcattcaagaagggttgggttgagacctcaccccctcctccatgtttgtctagtcttgatgtttgaatagagttgcacatttactgctcaaaaaaaaaaaaaaaaaaaaaaaaaaaaaaaaaagaaaaaaaaaaaaaaaaaaaaaaaaaaaaaaaaaaaaaaaaaaaaaaaaaaa

SEQ ID NO: 117614 - DNA, 252 bp, Glycine max
  Clone ID: PAT_MRT3847_77214C.1
cgtacgtgttctcggatttcgggtctagagaaaatgccattatggcagaaagcaattttgtgttgaatgggacattttgtgtctcggaggagcaagtagacatggtattctgggatgaagtagaaatttgtagaaatgatgaagagcatctagggaacatgagttacagattggccggtgccactgcaaatcgtttcttgaaccattcgtgcagcaagtttggtaacaaccttctggagactcttttcctgg

SEQ ID NO: 117615 - DNA, 826 bp, Glycine max
  Clone ID: PAT_MRT3847_77215C.1
gggaggaagtaagttaccaacttgcatttaacaaacaagaacttcgtaaagtcattaaggagtaccctggaaaggaagtaaaaaaaggtctagataacctctacaagaaagttgataaacatttatgtgaagaagagaacttacttcaggtggtgtggcactccatgcaagatgaatttatacgccagtataagcactttgaaggtttgatagctcgctgttatcctggatctggtgttaaatggaattcactattcaggacattctggattattgttccagcattgcacagtcccactaaaccttgtgaaagaagaaaagataactgaatgaagcatttgagtataacagacactataccaaaataccaagcaactgttttgagaacccagacttaaaattttatgtattattaaatgttagataaatgggtagtaccatactacaaatatttaaatgcaaaattaccaacctatatagcagttttatttgccctataggttgcatactaacttaagcattcatgtcaccataaaatgcctttagcatttctcaatgactggatgggaaattttcctttattgcctagctgcttgtgtttgagtggttgtcctatgagcaatgcatttggagttcttcagctttcactacttctctgttgcttgctaatcatgtaactactaaaatactgtgcaaaattgttttttcacactaacaaatgtgtatatggagaagagggctcatgtgatgatcatttgtgaacttagatttttgaggattatgtgactagtaataaatgtgaaataaattttcaaaaaagttgaaa

SEQ ID NO: 117616 - DNA, 116 bp, Glycine max
  Clone ID: PAT_MRT3847_77216C.1
atgccttctcaggctctcacatctgtgctgcttccttcaaatctctctgtctcactccatgcacttgggtctctcataattgcccgtgcattcactatgagccttgatatttatcg

SEQ ID NO: 117617 - DNA, 500 bp, Glycine max
  Clone ID: PAT_MRT3847_77217C.1
gcctgatgtcgaccctctagttgctctaccaagttgtaaggactagaagcattttccaatacttaaatcctaacaaaacatataaatgggtgatcaagccacaaagatggaaaataaacacagatagaagcagagaacactagcaataatattaaatagatagttagagtttttacattaagagtgctcaatggaaaaactctccaacaatgaagtgtttagccctccattagcaaggagggctctatacaaggatgaaataatatggaaatggaatggtgaagtgaaagtgtgaagaaaaatgtcttccttcagccttgatgctctgatccttctttcctacgctgcttgacgcttggttttccactcctcttccagttttaaagacttttggacttctcagattacgaatgtgcgctcagcgagcatgtctcgctgagcgagcgttagtgattgggtgcttagcgggattggacgcgctaagcgcgagaagagacaaa

SEQ ID NO: 117618 - DNA, 390 bp, Glycine max
  Clone ID: PAT_MRT3847_77218C.1
gccagacgtcggatagcttgccttgatgcattcattgccacccacgcgggtgtagcttctacggggatccggaataacaccaaggtccaatacaaagctggacactctttcccaacccactgcgcctcatagagactgatggagacaaaattctctggactaagatccacttcatgtgtgacatatgctcacgatgctaaagaatctttgcttcgtgatcttgtatctctccaactcactcccattaccattgagatcatcaacccctgcgaacttatagacaatggacatcatgaaggtggcaatcaatggtatcacactcattgttagacacttgcttcgctgcttgcacatacgaaataactcaccccttgacgtcgttgatatcaa

SEQ ID NO: 117619 - DNA, 1141 bp, Glycine max
  Clone ID: PAT_MRT3847_77219C.1
gcggattgcggctcgcgtcgtctttcaaacccaaaaatcctcacttgggtctcaatccgaaagcgataggccacaaaagagggcctttacttccttacatactctcacttgcttgtggttccttggtcgttcatatttttgatatttcttcttcttcttcttcttcgttttgttcagtttctttcatggcgatctcggagaacgtgtcacctttgaagctgttgttatgttccaattgggttccacttgtggtttttgcgtttgcttgatgttttccttttctgggtgtttttttcttctttgctttttggtggggttttgaggtttgtagagagcatgttgcggagcttcatggatccctttgaaggggttttggggtgggtttgattttttgggaagttgctgtttttttttttttttttttgtttgggcatggagtgcattggcaagtgggaggaggggaacatgggggaatgcaataatgataattacaataataataatattaatgggtttggggaaattgaggatgctggcactgagctagggttccatgtgtgtctgtgattgctgaatactgtgtcttcaaaaaggaggaaaaaggggaaagcttgatatgaagctttcaacatcagggttgggtcagcagggacatgaaggaggggagaagaagtgtttgaattctgagctatggcatgcatgcgcgggtcccttggtgtccctaccaactgcagggactcgtgtggcttatttccctcagggtcatagcgagcaggttgctgccacaaccaacagagaagttgatggtcacatacccaattacccgagtttgccaccccagttgatttgccaacttcacaatgttacaatgcatgcagatgttgaaacagatgaagtgtatgctcaaatgacgttgcagccgctgactccgcaagagcagaaggatacgtttcttcccatggagttgggcgttccaagtaagcagccctcaaattatttttgcaagacattaacggcaagtgacaccagcacacatggagggttctctgttcctcgtcgcgctgctgaaaaaaggttttccctccattggatttctcacagcaaccacctgccgcagaactaattgctagggatctccatg

SEQ ID NO: 117620 - DNA, 221 bp, Glycine max
  Clone ID: PAT_MRT3847_7721C.1
cagaacaacaacttggactcgaatatttataaaggttcaactctctgtttagttaaagcaaacgccattctatatttctatctttgaccaatcccaaacccagaccataacatgtgtatggggggagatccgatgcaaatgctggtgagaagaagaaaggaccaggacgacgacgatgaagaatagttatcatatagtcaacatggtgtgaaacgagagca

SEQ ID NO: 117621 - DNA, 497 bp, Glycine max
  Clone ID: PAT_MRT3847_77220C.1
caggtaggttacccgtcatcactgtatgacgtcctccatctttgggggggggggggaggggaggggcgatgagtataggcggcagacaacagctagtaagagcgcagacggctgatagtggcggcgtagagatggaaccaaattcaaagcggagttaactacctacgctaactgggacaggcggatagaaagcggataacctgataaacaggccagatgagccacgattagaggggcgaacctgatttaaagcgtagaaaggaggtggtgaacgagcggagttacgtgataccttgggtggagacggggtgagagtgcagtcagttaggtggatacaataccaacaacacgttgtaaccggtactgggaagaatggattacctataagaggcagggcaagtggtaatagaagcggaaataaggtaggggcaagacaatgtaagttagccgctgacaaaatgaagtgccagtacagaggtgaagaaaggggcgtgaag

SEQ ID NO: 117622 - DNA, 913 bp, Glycine max
  Clone ID: PAT_MRT3847_77221C.1
ataacaagctagttcgttcgttctcataaatcatgccccaaagggttttctatgaatcatatcatatatcaatacaactgccgtaaaacctaaagcaagatgcggatacatgtgaaaacacttaataaaatccgagcaatttgtacaagtcaaaattttggaacgacagattgattcggaaaaactaaaaccttttattgggaccaaataactctaaacataacagctactactagagccataatcgtcaagatgctgatagatattccacccaaaagaaccttatcaacgaagtcccacttcctcatgattccttcttgctttttaacagatcccgaggcaagctcactctcaaccgttttgtgcagatgctcccgcttcctcagcatccatccaatgaaatttcttttgctttggttctgtggcactgcactgcctcttgaattatcattattttcgagagtaccctgaccacaacagatgtcatttccacaggcacaatattctggctcttctgaaaatccaccagtcttggctgagttaccgcaatcctgattaggaaccagcttgtttagagctttattgtcacttacagggttcactgtctcaattacatccccaaaaactgaccaccttcccacggatgttatcttaaccatagctgaagttcccagcatattgtctggagcaagtacaagaacttgtatatatccttttgtatgaccaaccaagtgaactccatcagatgcaatatcagtaatccaaattctttccactttgccttccatcccagagtatggtgtgaaggattcaaagacatttgtcagttcacggcttcttctcttaaccacattacttggaacctttttcatccttgcagcaggtgtccctggtcgaggataaaattgtgaaa

SEQ ID NO: 117623 - DNA, 413 bp, Glycine max
  Clone ID: PAT_MRT3847_77222C.1
ggctcgaggaaacatctcttatttacgtacataaagagggaaagagaggggatgccacttccacgagagccaaccaggtgcctcttactgcggtacgaatggcaccccttccctcgctcttatctgctgtactcttggcttcctagccaagcaatagatgctattatagattggtacagagctatgatctccagacggaacgtaatcagatcagtcattgccatgcttagatggcgggccctcaaggtcactgtcatcatcagcaacatgtggatctttcagaaagaggatgtgcaggtctccttatcaaggacctgtgtgcactttatctggtcatccagtggggcgtatgaggcaattaacgtgctgaagctaaaaccactgctaactgttgacccttaagagcgctggat

SEQ ID NO: 117624 - DNA, 177 bp, Glycine max
  Clone ID: PAT_MRT3847_77223C.1
tagtcggcggccccctgtcttttgttgttggagcaactcatagccatcacatcttaaaagtccgatgtaatttataagattttacataatcacaaaatccccacccaaaaaacaccaatttacacatgtaacacttgtcttttgcatactctacacattcgaaaacagcaagttttt

SEQ ID NO: 117625 - DNA, 267 bp, Glycine max
  unsure (1)..(267): unsure at all n locations
  Clone ID: PAT_MRT3847_77224C.1
acaattcacaanngananagtttccatctcnctcacaaaatgacaacganatcgaattgcncccntgctgcttnctcttnctcttnntctcnacnctccanatagcttccagccnctnaacccccagcaanttcatcaagtcttcgnggagcaccacccagtanccagccctctgcatccngtccctcnccgtctacgcctcgaccatccagcaaganncccacgagctcgtccaganagcnctgntcgtctnccncaaccanagcg

SEQ ID NO: 117626 - DNA, 545 bp, Glycine max
  Clone ID: PAT_MRT3847_77225C.1
ctttttgccattggtaggtgggaaaaggtttgtccaaagatgataaggcgcacaaattagctctaaggcactggcttgaagctattgatccacgtcatcggtatgggcacaatctgcacatatactatgctgtttggtttcatagccagagttcacaaccttttttctactggttggatgttggagacgggaaagaagtgtatcttgacgagtgcccaagaagtgaattgtctaggcagtgcataaagtatcttggacccaaagagagggatgcgtttgaagtgattattgagggaggatggcttgtttacagaaaaggccagaaccttgcacacactgttgagggagctaagtggattttcgttcttagctcatctagaattttgtacgttggggagaaaaagaaaggctcatttcagcactctagttttttagctgggggtgctactattgcatctggaagattggttgcccagaatggagttcttgatgcgatatggccctacagcggtcattactgtcctacaaagaagcacttatggaat

SEQ ID NO: 117627 - DNA, 315 bp, Glycine max
  Clone ID: PAT_MRT3847_77226C.1
gatataaaagtgattaaagctaactgttaacttgctacagtagtaaactaaactgagttactcatatacactcttacaaaatggatgaagtcaagtaacctgcttatttggtctgtcttgtggtacatgcaaatgatgtttttggttcaatctttcattctgtttcctatctctggtttataggcggtgttacattcgttttattagaaaggtaaatgacaagaagggcatggagggtcaagaagagacaagaaaagcttttgattttatgcttaactatgttggtaagttgttttctgttgtcttgtttgcatt

SEQ ID NO: 117628 - DNA, 223 bp, Glycine max
  Clone ID: PAT_MRT3847_77227C.1
accaggggggcttattaagtcaaagtccctgtctaccccataccagctggaaatattcccgcctctaaggcgaaaaaaaaaaataatgcgaaatcaaaatgacataacggacattaggtcaaggacttaaaaatgtagcaattcattccgtgaaggataacgccatatatatatatatatatacatctatatatctatatatatatatatatatacatatatc

SEQ ID NO: 117629 - DNA, 512 bp, Glycine max
  unsure (1)..(512): unsure at all n locations
  Clone ID: PAT_MRT3847_77228C.1
cattattgaatgtcctattcatctatataatcgtgaaatcgtaaatgcacctggcactctagatagaacaactactcgcaacagtgacttcaaggtctgagtgagcaggggcacaacatgaagtaaagacgtttaaccatttacgacggttccaccgttggggtgtaaagtctggccactgatagagctgctgtctggggcagcgagaaagacagcgacagtcgcaatctcacttggctgcgaagggcggccgatgggagcggtgaattgttcaatggccttcttagtcattgtcgcagggatgagcggagtccagacaggacccggcgncgatggcgttgacgcgaatgcccttggagaatactnggttgtgcagagcgcgagtgaaggagatgatagctcccttagttgatgtgtagtcgagtaggtcggggcggccgatgaaagcgttgatggaagcgttgttgatgatgacggagcccggcttcatgtgaggcagtgcgtactttgaa

SEQ ID NO: 117630 - DNA, 464 bp, Glycine max
  Clone ID: PAT_MRT3847_77229C.1
ctcgaatctcaacaatgccttccgaaaccctagaaaaccagaaacctcaagtggaagaccaacaagacctagctgaagacagccacacagagcaagaagataattcggagatgaaggagattgatggcaaaggcgaagaagagaaggagaaagaggaagaggtagaaggcgatgaagaaaatgaggagaaggaggaacgtgacgagctgaagtcaaaaaagtcaacgaaagaaagcgctttcgctactccaggaagtgagagaccaactagggagaggaaaacggtggagaggtacactgtttcttcgcccgacaagtttcccagatcttcttccatcaaagctctctcaattgaaaagggcagcggtacacagctcatggacattcctaatgtggctttcacgttatcaaagagaaaagctgatgacaacttgcgtgcacttcatagtatatggtttgggaaa

SEQ ID NO: 117631 - DNA, 376 bp, Glycine max
  Clone ID: PAT_MRT3847_7722C.1
tagcttatatctctttgcgcgcactagcataaactaaacttaagattttaggtatcaacatagggaactaggaacagaagttggggcggatccatcgctcctcaaagctgtatcgttaatgatgcaaagaaaggagggcctggatcacctccaatgttcacgatggcgtctttatgaacaggtgaggattccatctcagaaggacattccgcgccttcttgaaccaaaaccatattcttcttgtaacatagtttcttcctcatcctcgggtaaatggcacaggagagaagcctatgggtaggccagttggtttgtcttcacagacaccctcctctcgatctgaaatttttatttgtcgcccctcttatgatggatc

SEQ ID NO: 117632 - DNA, 352 bp, Glycine max
  Clone ID: PAT_MRT3847_77230C.1
ctcctaaaacgaattttaacattttgttcattcatagggaccaatggcagcaagccctgttgaaaaaatggaccttaactgcccatgggtaaccctaatggtaaaaagcaattttaatcccataatttcgggctttctttttaaaggcagaaaccgggcttgtttttacccttattttgtaattgaagaaaccgtccttaacggtaaaaattcttttttctgaagccaaatcatcaacaacgtggacaaaaggagttgccaaaaggattccttccaagaaaaataaaatggccaaaaaaatatgaaccaaactgtttcggctggaccctttaggcgccactcctgtccccaa

SEQ ID NO: 117633 - DNA, 298 bp, Glycine max
  Clone ID: PAT_MRT3847_77231C.1
ccggctcgagccagcgaacagagtaagccaggggccacgacccggaacggaaagaggcgactgagagacggagcgaggggcctcgcaggagacgcactgaagcgagaccgcggcagggcaggcgcggaggcgacactgaccgcacaagcccacacaagcacggggagggcaccccgacactacgctcgtcgcaagcagacaccaggcagcaacacaccgcggcgcccaaaagaccaaacaacccctaacccgaccgcgaggcatcagaagaaacggaccacacacccaagggtgcagg

SEQ ID NO: 117634 - DNA, 282 bp, Glycine max
  unsure (1)..(282): unsure at all n locations
  Clone ID: PAT_MRT3847_77232C.1
ggccggtgggcggtggcggcacggcaggatctgtgccgcgatgacgacgtcgaacacggcgcggatggaggacagcggcggcgacctagcggacaccatcaagaagtggaatatcatctaccctgtctacctcaactccaagaggnaggtcgccgatggccgccgcatcgccgctgccaaggcctgcacggaccccacctgcatcgagatcgctgactgctgttcgcacctcaagatcgcccacgccatcgagttggataaggcgtaccctcgggatttctt

SEQ ID NO: 117635 - DNA, 170 bp, Glycine max
  Clone ID: PAT_MRT3847_77233C.1
gtgatggtattttgcactggaaagttgagcagggggagctaatacaaggaaagctcctggggtttatcagtccagttctgagtgtagcacatctgagaaaaatcataaactttcggtgctgaaattgggatacaaggatgatctagacgatgatatcaacaagctttttg

SEQ ID NO: 117636 - DNA, 878 bp, Glycine max
  Clone ID: PAT_MRT3847_77234C.1
gtagttaattgaaaccaatatagtacgttagagtatcctattactaaaccagagaaaagctaaaaacaaacaagcttgtcaatttcacggcttcttgaagttctgcattccggttcataaagctcacacaagtgcaaacccaatagatatatctacaactatttaccagaccacacctttcaagtgaaaactatactctttcttaggctaaatacatttttcagaacataaaaaatactatgaaaactaataatataaaaaacctgagtacacctgtgacaaaaaaaaatgttgaggacaaatgctatatgggaatggagtagtaaaacatgtctaaacctgctatgttcctaacctcttcgagccgcattcggagcagaacttagatgtttccctcagatatggagccccacattcatcacaaaactttgcaggagttgttggcagcatatgcaagcgccctccatgtcctccaacatggccaccagtgagtggctgtaagcaagccatgtgttgagatattgatattggctggtgagcatgagaaatttcaggtaggtgtgaaggaggaccactttgagggttatgagaatagggccctgcatgctgactttggtgcatagtttgattgttctggagaactgggtgaaactgaggttgatgtggcaatgactgcaattgatgtttacatggtgtttgctgctgattttgtggcgggcgagatccttggcgcgtagcctatgctgttgagtttccggctccaggagtcccagggtcctctccgagctctgccagtgcaaccgatagcataattaatggataagcatgaaaatagggtaaacaaacccaattcccagaaatagacaaaaaagaatttc

SEQ ID NO: 117637 - DNA, 299 bp, Glycine max
  Clone ID: PAT_MRT3847_77235C.1
ccggaagcatgaaagggggggaaaataaaaaaaactggaggggggtttattttgataaaatagacttttttaaaaaaaatatattaaagtttacaggacttatattttcaaagggattcttgaataaagcggaaatgaaaaccggactcccggggaaaaggtttcaaaggtcccgggaggggtttttaacttgaacaatcccgctgcatctggaattggatttcaacaactggattcaaaggaaaacacaaggggggggcttcttttttccttttttcttggacttagggggctgcaaa

SEQ ID NO: 117638 - DNA, 871 bp, Glycine max
  Clone ID: PAT_MRT3847_77236C.1
cgggttgtcctccttgagcttgtaactggaaggaaacccgttgatcaaactcagcctttgggagatgagagtttggttgagtgggctcgtccacttctccttcgtgcaattgagacacgtgattttagtgatctaatagatccaagactcaaaaaacactttgtggagaatgaaatgctcagaatggttgaggtggccgccgcttgtgttcgccactcagctcctagacggcctcgtatggttcaggtggtaagatccttggattgtggagacgaaagttctgatctatctaatggggtgaaatatggtcatagcacggtttatgattctggtcaatatgataaagaaattatgctattcagaaggttggccaatggaacctttgtcgattctgattttgagatatatagtagagaatacagtttgtcaagagacacctcaatgacctcaagaggatcccaccaagaattgatacgacatagttctagtgggagtttgaatctagagctatcaacatgcataggaccagtattgaatgaaaacagggattgagggaaagcacacagcagcgcagcactgaccaatgggcatagatataatggagttagaggctgctgcttttaacccaattagattccccaaattcttctaatggaccatgacactgcatgaccatcaaaccacatcccatcctgtatagaagcttcacttaatccttttttctctaatttttgttctattttctttccctctttttttttttttttttaatttgagggaatgttggcagcttgtaaaaagataagatttttgaggtcatttttttaatcactattatcagtagatgtctctcattgatgttggatttaaa

SEQ ID NO: 117639 - DNA, 1625 bp, Glycine max
  Clone ID: PAT_MRT3847_77237C.1
gtaattctgtaatcttgtaagattcatggtcaaagcccaaactactgaaaataagaaaattacaaattttactcatgggctaactctatgcagtttcaactgatatgtgcagttgctcatttaccaaccacatgacctaacatggaccctaaaatatactatatattaatatatcattctatagaagttgatctcatgataacccaaaaaccataagctataatgctatacactactattatccttaagtcaaacttgaaaaccattatcctcctgcatgcatatataactacctcagggcttctcattctgttttatatacaacttgatttccaccttcaggtataatcagtaggagagcaaaaaattccccatttagctctatcttatattcatcatgcaacttgtattgcttctgctgcatcgagttttgattcagaacaatcgaaatcttcctcactatcatcttcatcattgtcagcatcaacgtcaacatcattgtcagtgtcaccattattgcctccacctgagtacttatccttgtgttcatttaaggccagaagtgtcttcacagccttgtcagcttcatcatcgcagccatcaccagagttgttatccttgtcttcatgaatggcatagagtggctccctcaaagttgttattatattttccaggttaacaggtgcttccaaaccagataattctggctcaaccttcttagcaacttcaactttggcacttggtgttggtttactttctaatattgcagagcaatcagacatagatccatctaccactgcagaattagctgacatcctgatgctggacctggcatttgaagataaatagctgcaaatgtcgggctttccctgtatatcaacccacctgttattgatccaatctcgggaaatccgaatgttcttcttctcgacctttagaaacctctcttcgccaggggtataaacctgcaggactccatccccacagacattaactgcagtcacgacaccttcccaccatccatcacaccaccaggcatccactggtgctccaatctcaaaagtatgacctgtattatattcaggagggcatagtcgaactgttaggcggcccgaacttcgcatacccaatttgtcaggagctgccactctagacgcagggacccattcctctagtttctgtggtccgtctatatccagcaaatcatcatactggaccttgagcaaccttggagacatactcaagattttacatctaaaccagcatcctctgatgccactatcttgacagagaacctctatctttgcaccaacctgaaaagacagttgaggctttggtccaataaccttaatacccaatgtttttcttgatagttttaattttaaactagggtgttttggttcacattttgtcatttctttcacaggaacagagatttgcagacaagaaaaacccttttcaagtacatgatccttagaacttctattcctcttattgctggaccttaaagcatcatcttgagtgaagttctcatcatcatctgtgcgcgatttttcaaactttgcctttctcttggagagagtaggactattcaaactagaagaacagtttggttactataccca

SEQ ID NO: 117640 - DNA, 439 bp, Glycine max
  Clone ID: PAT_MRT3847_77238C.1
ggctcgagctttatattccattacacagaaccagggtggaaggtatgtttagtccatgcttgttacgccacttgcttacatacacagaaccagtgaaacatcagaccgttggcctcaaaggaggcatgtcatgccatgggcgtgctggagctgtacacagggattcggacataatggtgagtgaccaacgatttgacgttgatcagatggagcacaacgagactgagacaggaaaatgcccaggagggaacgttagagagagcgtttacaaaatgcaagcgaggactgggttctgggtggatgaagcacacccgcacagagaccgggccaacgagactgtgccagttatcttcggagacaatgatctcgaggctgaacacagtgagactggagtcgcagaaaacaatgcttcaaaagatgtgcatagtgcctcatctga

SEQ ID NO: 117641 - DNA, 227 bp, Glycine max
  Clone ID: PAT_MRT3847_77239C.1
tacggctgcgagaagacgacagaagggggttcttaccagatggctggctcagttagactcttatgtttgtcctttctctcgttgttcatctctttctccatagctcaaacctatataagaccaaaggcacttgttcttcctgtaaccaaagatgtttcgcatcagttcctcagtatgtcacacaaatcaaacaaagaaccccacttgtggcagtgaaactaactgtt

SEQ ID NO: 117642 - DNA, 241 bp, Glycine max
  Clone ID: PAT_MRT3847_7723C.1
ttattttaaccaaaagcaaaaaaagagcgctgccgtttttgacgagcagcccgccctgtccctcgaaaaattggaggtgttcaagatcaaacgcagggacaagcatgaccgcatgaccctccgcattatcgccaaattcttcccactacggttggagagcgtggaccttctgaaaaagtacctggaggagagggttttccccaagctcatggtgcacaggaaattcgcggtgctgtacgtg

SEQ ID NO: 117643 - DNA, 1186 bp, Glycine max
  Clone ID: PAT_MRT3847_77240C.1
aatataaaccaagtctcaaatcttttaattagcaaccaacgtacgcccttgtcaaattgggatcatattcaatttgaaaatgaagtacatcattcaacacttgttggtcacaggaacagtatatctttcaacccttgtgttgcattcttccaagttccaatttgatggggtggaaagaccagtttcttaaattcctgttttggagatagggttgcttccttacttgacatttaagttgccatggattgcaatgtgatttccaactccaattccatctgttaaaagaaattggcacattctgtgtcatatattggacacactccgcaccctttaattataatatcgctccgcttttcccaaatacttccagttttagcaaagaattcaaatgaaatctttggattataacttgccataagttcttccatgctttcactttcacattcttggtttttcagacagcatttttcatcataccacagacacacatggtcggagaaaaattcacaggcatgtatgctagaccaattatccatgtgcccacgtgtgaccctttcaccaacaccggtttccatgtaacagtcacatccaatatagttcttgtcgtttgaagtgaactgatcaacaataacacaaaagatgaaacccatgatcttggaacatggaacagaagaagagagatcaacagttactgaagcctgtgtagtcctatacacgaaccactctggaacctcacttccagggtagataaaatcaactggaccaccaagaaacttgattgagttggttccaattgttgaaaattgatcatatgccactttctttatgttcacataagcatttactccaatagcactgagtgaatgttgatccaattttacacaattttggaatgtcgtgtgtaacttgtatgcatgtagcatttcaaccgcactcaaagtgaacattacagtctccaaggatgaacagttaatggcatatagctcttttatggactgtggaagctctggcagagaataaagccttctgcaatcactcaagtcaagcttttccagctttgaaagatgcttgatgcttgcagaaacactctcaatatctgttccttttagtaacaactcacgcaatgatgataggaggttgatgttgtctggaatttcaaacaagttacggcattcttccaacttca

SEQ ID NO: 117644 - DNA, 263 bp, Glycine max
  Clone ID: PAT_MRT3847_77241C.1
gtttatggttgtcaacttaacaccaatgacaatatgcacacatattgtttatggttgtcaacttaacaccaatgacaatatgtgtgcatatgggctcaatcctggtatttcaggttctcgtcttttgggcaccattcctcagtctatttcacagctaactgttttggatcaaatggcaatagtgagtactccattgaattttgattctagctagcagtgcttttgtcaatatgctattgaccttctcggtggatgaatcttag

SEQ ID NO: 117645 - DNA, 263 bp, Glycine max
  Clone ID: PAT_MRT3847_77242C.1
cattaaaggtgaccaccatcagatttttcagcgagaatgggtcattaccaaagtcggcggcaacggacactttacaccaataacctgaaggctcggaggcaagccgaatagtgcactctctgactatgctgggtccttctactaagccgctgttgcatggttgtcatcacagacacgctagggaggtacaggtgggcaataataaaagtggtttactgggggacgggcccgtttggacacatatctggcactaaagggagcct

SEQ ID NO: 117646 - DNA, 122 bp, Glycine max
  Clone ID: PAT_MRT3847_77243C.1
tcggaaattcggtctcgagggtaaattgcaagaaaagaatgggattggattggaggcttaggcctgaaagtaagaagcctgtatttactgaaacagaggaaattttgtcggaggaggttcct

SEQ ID NO: 117647 - DNA, 328 bp, Glycine max
  Clone ID: PAT_MRT3847_77244C.1
gccgacaagaaagccaagaagacccagtgagagcatctacaacaggcttgctattgtgatgaagagcggcaaatgcacccttggttataagaccgtgctcaaatctagaataatctccagatggaagttgattatcattgctagcaactgccctactttgagaaagtcggagattgaatactatgccatgttggcaaaggtgggggatcatcattacaatggtaacgatgtggattgggcactgcctgacgcaaatatacagagtgtgcagcttagcgtatttgatcctggtgagtcggatgtcgttaatactctgcctgtggaacaa

SEQ ID NO: 117648 - DNA, 564 bp, Glycine max
  Clone ID: PAT_MRT3847_77245C.1
ccactcgaccatctcctagtattcggccgcccctctattccttttctctaaatatacacttggacaggttagctatcagatctccatctaaaagaatcaacgttctcctattgacactgattcttacaacatgattgataattttcttatgaagctcactgtgaccataggaccttctgataatatgcggtatgtcaagcaaccatttgtggagcaaacgcaatgtgcctaagatgcggatctcggctgggaagcaaggaacgcagatgctactagagccgtgaggtgcttacggctgtatgattggtgcttttaatcaataacattgggggtcacgtgctggctcctccactggctatgacccatcatctgatatacactcaccaatcaaatctgacaacgacacacagggtggctgatcatgatcatgagaacaccactcaacctcatcggggtaaaatactaaaccgtcccccctcaactccagaattctgatagggaacaccccacacaacattgtcccctattggatgaagaagtgccccaccacacattgctcatgga

SEQ ID NO: 117649 - DNA, 386 bp, Glycine max
  Clone ID: PAT_MRT3847_77246C.1
accctatcctaaagtatctggtgctttggttgggttttacgaaacgatggtatctgaaacttattgtttactattaaaaacggcgatcgggagagaccaaattcctactctctcacaggaacagtttctttcatggaatcgccacattgactctgcattatcatccagaaaatcctatatatccattaatcctgctaaatatatttcttgcaagaactttccaaataaatggtcttttactatttttacatgatccatttttttttaatttataattattctcaagttccttactttcttttcattttcttaatactttataatattctccttcattgtccttctttgaaattattttaattttcttatcaaatattttttttttt

SEQ ID NO: 117650 - DNA, 581 bp, Glycine max
  unsure (1)..(581): unsure at all n locations
  Clone ID: PAT_MRT3847_77247C.1
acnngcggaaatgggaaatntgggttgacnaaancgtttggtagntattctacctcacctatttcttttttttcactcacataaccatcattcgagactgattagaccaatccccgtcctttcttttgccaaacaaactgaagatacttctgtttagtgttaacagaactttgctgttgagttttctgttatagtattgtatagtcttaaactttactcttttttttaaactgaaaacgaagaaaacacaccaattgcaaccatataaactaaatagttttaaattaattaagtcttctctggcagcctttatatatactagtaatttccaatcaaagcatctaaccatgcagccattgcaattatgaagtttgagtaaacgttacatgtctccatacattttaataacctggtcattgtctttattagaagttttagtcattagaaaaaactaacctggatcatcatcaggaccacatttggcagaatgaactctgtcagtgcagaagcacctgaaagtgtacatgacgaaatcgaagccgcacctccctccagtgttgtggcacacgctgcagttaccg

SEQ ID NO: 117651 - DNA, 233 bp, Glycine max
  Clone ID: PAT_MRT3847_77248C.1
gaattcacagaaaatgtcaccaattttattaataataataatgtcatacaaaattgcagcaaaaatttctacaaggtagattatgcattggaatgtgcctcaattcagcagtcaattcaattaattacaggggttcattgtcaaaatcatagttatttaccctgtatcccccaaatatataagtttactttaaaattacccaggaattggcccaaaagaaaaaataataatgc

SEQ ID NO: 117652 - DNA, 512 bp, Glycine max
  unsure (1)..(512): unsure at all n locations
  Clone ID: PAT_MRT3847_77249C.1
ggggnnnnnnnaaggggccgatcagagtcgggataccaaaaaccacgtatgacgcacgctgccctcatacgtaagcttcggaatctaggcgtcgatgatcagaggcatcctcatattgctgccatagacctgctagatacttctctgcctaaaccgcgtacattacgtgacttttcaaagacacgagtactatggactggatagacacactaacatagttataatgatgatgggcaagcgcattcgtgtcgaagtatcagataacacctcaaataccaagcgacttctattcttgcacttctcaaacttgttcttccatggaatccaggaattgggttctcaaacatgcatcagcactactggctctcttacttaagctaggatgaacaagctggaaactgtgactgagctcactcttggactctgtggttaccaacaccacaggactacacatcaggaaccactctggtatcctagttcaggatgataaacagactaattttgaatgattg

SEQ ID NO: 117653 - DNA, 484 bp, Glycine max
  Clone ID: PAT_MRT3847_7724C.1
gtggcctgcaagattttttgagggagcaagagcctgaatttgtaacaagccttgttcgtacccggattttgccactgtatgcaatagctgtgtccctaccatacctagttgctagtgcaaactgggtacttggagaactaggctcctgtctaccagaagagatgagtactgatgtatattctcaattgctcatggcattggtcatgccagataggcagggtccttcttgctatcctgtgcggatttctgctgctggggcaattaccacactacttgataatgactacttgccccctgattttctaccccttctccaagtaatagttggcaacattggaaatgatgagaatgagagcgagagttccatcttatttcagcttctcagttctattatggaagctggagatgaaaaagttgcagtccatatcccacttattgtctcatcaatagtgggtccagtctcaaaatgggtaacttccaatct

SEQ ID NO: 117654 - DNA, 254 bp, Glycine max
  Clone ID: PAT_MRT3847_77250C.1
tttacttgtacggggacgcgtgggcagacgcgtggggttcgttaaaccgtgatcacagggtgccgcaacctaaaaccggacacaaacgtactggtggcttgattattggactcttccaatttctgtctactatttgggtgacgatcttctaagggaaagaagattactctttgtgttggtctcagactacagcgataattttactttccactctcagggtatatgctgaacactcttctatttgttataggact

SEQ ID NO: 117655 - DNA, 1031 bp, Glycine max
  Clone ID: PAT_MRT3847_77251C.1
ggctcgagctcacaccatcttcacctcattttcatcattctctgtcactgtcatagggacatacatacattttcaccttcacacatcaaaccaacaagaactttctattccttaaaccatggtcgagcctgcagtagcagcaagctcagaattatcagactcaacacgaaacaccaacaccaacaccccttcaccctcttcctcatcgtcgttatctccgtcgccatcaccgtcatcatcaagctctaaaaagcgagcgagagacaacaacaatagtagaaacaacagcaacaagcattctgtgtatagaggtgtccgaatgcgcacgtggggcaaatgggtgtcggaaatccgcgagccgcgaaagaagaaccgaatctggctcggcaccttcgccaccgccgagatggcggcgcgtgcccacgacgtggcggcgctgacgataaaaggctcatccgccatccttaacttccccgaactcgccgcctccctgccccggccggcctccaactcgccccgcgacgtgcaggccgcggcagccaaggcggcgtccatggaggcgccgccgcggacccctccgtcgccggccgccacgccggaggatgacctcggcgagatcgtggagctgccgccgctcggaacgagtttcgactcgcccgaccggagttccgagtttgtgttcctggacatggacgacgggtggccctattctcacccgtggtaccacagcatttatgatggtgggtacttcattagcgacatgaacaacatggtttcgatgcaagagtcagagagcatggttctttccctgtggccttgaagttaagccaatgctactcattgcagtatggttatattttggttctttttttttttttttgcgtgagacagataatcatgtttctgttcttaagtatgcgattagggattggattttcatgtccgtatatatgaaataacatttatttgccgatatcaatctcttgaatgaacatcaatacattgagaaattagtctctcattatcgactc

SEQ ID NO: 117656 - DNA, 146 bp, Glycine max
  unsure (1)..(146): unsure at all n locations
  Clone ID: PAT_MRT3847_77252C.1
nnannnggaagcgcagaatncggcncgagngncnangnnnnnccnnnngaatccnnggaactancnaaacaccgnaaancccngcaagtgcgaatncngcatcatcancatcatcancancgagnanttacaagcacaaatcacan

SEQ ID NO: 117657 - DNA, 336 bp, Glycine max
  Clone ID: PAT_MRT3847_77253C.1
acgcatcagtcagctggcagaaaacaaaagacagggggagggctttctaatcactcttactaattcacaactcaactctgtatgctcatcttctctctttcaaggtattatgattctaagatgtgaaacaccttccaatgtaactcagaatggttctacattggaattgatagtgcactctgagtccaaatcacgatcatggtcattgattctcgcgttaaatttcttcaagacaggatcgatgtttgtgacacatctgctactcttagcgtgtctgttatcgtcacacatatgactactaaggttattctcaactctgactgtatcttttctaaa

SEQ ID NO: 117658 - DNA, 396 bp, Glycine max
  unsure (1)..(396): unsure at all n locations
  Clone ID: PAT_MRT3847_77254C.1
agggggggcccaacgattgtatgcatgccctcgacccgactggaaagttcgatagggggggaagaccaaaaggagtgtgggggaagaaccgacaagcaagcccccaagcggaaaaaatgcccctggcggggcacaaccttgttttggggcaccggccccgttcggtcaagggtgaataaacccccccaggagcgggagactcgacaatgcactagcgcaatgctactttcacatggccaaatgcaggtcgagaagccctcatcggaggggcgtctatgagggggngtagttgctaaagtgaaagcaccaggttctgatttttgcaggacgaaggactttttactgggacttggagatctccgccttgcgctttcaagtccactgacggttgggggg

SEQ ID NO: 117659 - DNA, 273 bp, Glycine max
  Clone ID: PAT_MRT3847_77255C.1
tgggggggggggggggggggggggggggggggggggggggggggggggggccggggggccgaggagcgaagcaaagccatggataagtggaaacaactaccacaaaaatcaaaaaataaacatataacccattaataaaatcccccatacgatgtaccaaaaatagatactcagtaaatttcattaccccccattaacatttcacttttcaaacttatcctgatagcaaaaacctaaaaatgcacccaaaaaccccatctacaatattcccca

SEQ ID NO: 117660 - DNA, 1183 bp, Glycine max
  Clone ID: PAT_MRT3847_77256C.1
tggacatattggtgaaagacagcaatggaaatccatacatggttccaaacacagcttttgatgttggaatgctagatctaacgcacccaaaaactgcaacttggttcaagcagattctacgagaaatggtggacgatggagttagaggatggatggctgattttggtgaaggccttcctgttgatgctgttctatattcaggtgaagatcctatttcagctcataacagatacccagaactatgggccaaaattaacagagagcttgtggaagaatggaaaagtagctccctggacaaggtgaaggaagatgaagacgagggcttggttttcttcatgagggctggttttagagatagccctaagtgggggatgctattttgggaaggagaccaaatggtcagttggcaaacaaatgatggaataaagagttctgttgttggcctactcagcagtggaatttctggctatgcctttaatcacagtgacattggaggatactgtacagtaaacttacctatagttaaatatagaagaagtgaagaattgcttttgcggtggatggagctaaattcttttaccacagtcttccgcacccatgaaggaaacaagccatcatgcaacagccagttttactcaaaccaccaaacaatgtcacactttgcgcgttctgcaaaagtatacaaagcatggaaattttaccgaattcaactggtgaaggaagctgcacagaaaggattgcccatatgtcgccacctatttctccattatcctgatgatgaatgtgtgcatcgtttgagttatcagcagttcttggttggttctgagttcctagtggtgcctgtccttgacaaaggaaagaaaaaagttaaagcttattttccattgggagagagtagcagttggatccatatctggacaggaaaagtgttttccaaacaaggacgtgaagaatgggtagaagctccaataggataccctgctgtatttgttaaggttggctcccaggttggagaaacctttttgaataacctgagaagtttaggcattctttaataaagcattcatcaaaggatgaactttagatatgtataacatagcatccaagtgatttttcaattcttgcccctgaattaattcgcttgtatcgttgcaatcaaagctagtgtaaagaaattagttgg

SEQ ID NO: 117661 - DNA, 1721 bp, Glycine max
  Clone ID: PAT_MRT3847_77257C.1
tgtacgtgtaaatgcttcagcgaaagcaccatgcagcaacctagtttcaccacaagaagaccgcaccaattaatgacgaattggtacaatataaaataatttattataggcacagcgtactaatgaatcaattccaatctcaatttacatggttatttatgtaccaagattttgtggcagttcatgtcatgccttattatgtcaaaacatcctatacaacttcattaacaacagggtatggatctcccaagatcattttcataactgattttttgactgacatatcataggtaatgttcataaaaatgtcttgtccataccctcttcttagttgaagagcctggtgtatcaccactcccagcaaattcccatttcacaacatctccatcccaagaagagctaacaagtgtagtgtggaaggggtgccagctacaatctcttacaggtgatttatggtgcttcagcgttgcgacttgagctccacttaccaaatcatatatataaacacatgcgttgtgtgatccagtatagatgtacttctggcccgtgctaaacgctggggagaaatagcagcggatgagagtgcgtaagaccgaatggcctctataagtagccactgactgatcacaagggtgagtcaagtcttttgcttggggtggataatccatccacctgtaatcccattcgtaactcctatacccaggattgctggtaacattggatgacattttgcgtatgtcccaaagtttaatggtttgatctttaccatttgaaatgaaatagcgtccatctcctcgagtatcaataaatgtaatgccctcaaggtgtcccattaaaacccctgctggcttgcctttagcaatcaagcaacgccgatcccagaccttgcagaaactatcatcactcccagagtaaataagatggctagtttcatcagcaaaacatacagtgttcacatcacacgtgtgagctaaaattcgaagtgagagcttatttgcttcaagatcgtatacatatatagaatcaccactacttcctgcaactaattctttcccatcttttgagaatttcacacagaaaattccaaaggagtatcctccatcatcatttgatgaaaaatccaaaccatcatgtatctctgtaacatttgctagggactccgtttcagcagatccggcatttacaatgtgtacaataggtgacatactggcataaactagatagcgttgatcaggtgaaagagatgtatcagtgattgtccatctcaaatttttagctagaatgttcttctgaactttccaacctctgtccacgttgtatattcttatgtgacttccctggaacccagcaataaaaagagagccatcagctgaaaactgggagacataagccctactagacatttggtcaataagccagggaccatttacaggcaaatatctgctcaaaagatgacaacgatcggctgaagaaaaccttccccgtccgagtaattagactctcgacctgccagcatcttcacaggagaaactggcaattctggccttccagttccaacttggactaattgttgatggggtgttgacttcaactttgttatctgagcaatttcattgtctaaattttttaatggccttttagtttctccactactagaatcttcttgaatagagagaaaattatgttatagtatgtcgttgcattgacaacaatctcgagcc

SEQ ID NO: 117662 - DNA, 312 bp, Glycine max
  Clone ID: PAT_MRT3847_77258C.1
attttacgctttactgtgatcattggttgacggaccttatatccggcaacaaaagcaacatctacttgatatgaagaatgtatcaattggtttgtactttcatgaggactacttgttaagggaaagaaaactactctctgagctgaccaccgacttcatgaatcatttgattgtgcatccttagatgattggctgagcactctactatgtggtgtatgactaggggtctgattaaaacactgtctgcctttttgttagctatctgcgtaatgctaagtataagctggagaaattttgtgttagggctgccac

SEQ ID NO: 117663 - DNA, 185 bp, Glycine max
  unsure (1)..(185): unsure at all n locations
  Clone ID: PAT_MRT3847_77259C.1
ctcggtaccctgacatgagtcaaaagactagcttagcgccaccaacgagttgtccctccggcgagaatggagaggaactagaggaggacgtggtagcgaaggacattgacgagggcaatcggggagaggtgattgtcagtggcgaggtaggtgttgtggacgacgaanatggagagggaggagca

SEQ ID NO: 117664 - DNA, 432 bp, Glycine max
  unsure (1)..(432): unsure at all n locations
  Clone ID: PAT_MRT3847_7725C.1
ggtttgtgttgctctgttatgctgctcctccctgtttgatttcaagggtaaaggataaagggatgatctacacagcaattgacacgttggacctcacggatgancagctagcaaactcaccttctagaaaagatggcatagatgaagccactgagaccacccttagaatctatggccacaagcagtcatggctactgggcaggttctatttcatcgtttctattgtaagaagtcatttgcacggttcaatgtcaagaaagttgctgccagctgtgtatggttggcttcaaaactggaggaaaaccctagaaaagccagacaagtaattattgtttttcacaggatggaatgcangagggagagttttcccatggagcatttagacttgtattccaagaaatatgttgatttgaaaatggagttgagcagaac

SEQ ID NO: 117665 - DNA, 735 bp, Glycine max
  Clone ID: PAT_MRT3847_77260C.1
gattccacatttcatcttttatcttattcgttttggctcaaaatattctagaggcagagggtccctggtttgaaagttttctcattaatatcctcttggtttatgtatctgaaatgattattgatattatcaagcattcattcattgctaaattcaataacattaagcccatcgcatactccgagttccttgaagatctatgcaaacagactctaaatatgcaaactaagagtgcaaagaaaaacctgacttttgtcccccttgctccagcatgtgtggttattcgagttttcactccagtatatgctgcaaaccttcctcccaatccccttccatggaggcttttctggattctgcttttttcagcaatgacctatgtcatgctcacaagcctcaaggttctcattggcatgggactacagaagcatgccacatggtatgtcaatcgttgcaaaaagaggaaacatcattttcatgaagattagtttggaagggcaaaatactgctttcttgacataatataatctgtttgcccaaggattcctccactcgataattcaggaacacttgactcctgaattaccatcggtgcctggcacatgcgggaacaacttttggtttataacttgaaggtgaacctatagatggcttccccttccaattttgacagcaatatataatttgattattacagaataataatagaatgttgtaggcctccataattgcaaagaa

SEQ ID NO: 117666 - DNA, 1529 bp, Glycine max
  Clone ID: PAT_MRT3847_77261C.1
ctttaactttttggaggaaatgcacaatggaaattctttacgcagcacaacaactcttgggaatgaaaaagaacgagagagagtttatgacactatcttccgcctgccatggagatgtgaattgcttatagatgttggcttctttgtctgcttcgattcatttctttcgttgttaactgttatgccagcgaggatcatgatgaccatttggaggcttctaaagacaaggcagttcaagaggttgtctacaatggaagtttctgattttggctgttttcttattttgagtagtggtgttgttcttttgcaacaaacagatatcagcttaatatatcatatgatccgcggtcaaggaacaataaaactatatgtggtctacaatgttttagagatatttgataaattatgtcaaagttttaatggggatgtgttgcaaacattatttctttctgctgaaggacttgcaaattgtcccccagaaagcatgagattctggatttggagatttatttcagaccaagctttagcggtggctgcttcaattgttcattcttttatcttattagctcaggcaatcactttatcaacctgtatagttgctcacaacaacgcattgtttgctttactggtgtcaaataattttgctgagatcaaaagcaatgtgtttaagcgatacagcaaggataatgttcacagtttagtttactttgattctgtagagagattccacatttcatcttttatcttattcgttttggctcaaaatattctggaggcagagggtccctggtttgaaagttttctcataaatatcctcttggtttatgtatgtgaaatgattattgatattatcaagcattcattcattgctaaattcaatgacattaagcctattgcatactccgagtttcttgaagatctatgtaaacagactctaaatatgcaaactgagagtgcaaagaaaaacctgacttttgtcccccttgctccagcatgcgtggttattcgagttctcactccagtatatactgcaaaccttcctcccaatccccttccatggaggcttttctggattctgcttttttcagcaatgacctatgtcatgctcacaagcctcaaggttctcattggcatgggactacagaagcatgccacatggtatgttaatcgttgcaaaaagagaaaacatcattttcatgaagattagtttggaaggacaaaatactgctttcttgacttgatataacctgtttacccaaggattcctcctctcgttcccgaatcccgaaaaaacatcttttgaaagaccacagggtgataattcaggaacacttagactcctgaattatcatcggtgcctggcacatacgggaacaacttttggtttataacttgaaggtaaacctatagatggtttccccttccaattttgacagcaatatataatttgattattactgaataataatagaatgttataggcctgcataattgcgaagaattgcaataaaaaaaaatcccctttcctt

SEQ ID NO: 117667 - DNA, 208 bp, Glycine max
  Clone ID: PAT_MRT3847_77262C.1
ggatagcctctaggttgcattattggctgcagtgctctgcctggttgtgttgagtgcacccatggcacatgcatctatcacttgcggacatgtgacgaattgtctctgttcaattggctttagttacctccacaacggaggaacgcaccctattggatgctgcaacggagtgaagagccttaattcctacgtcatgaccaccgtcgac

SEQ ID NO: 117668 - DNA, 205 bp, Glycine max
  unsure (1)..(205): unsure at all n locations
  Clone ID: PAT_MRT3847_77263C.1
gtcgcangcacgcgtacgtaagctcggaattcggctcgaggtcaggccacccagatggcttaaggcaggacaacctaagcctgattcttgagacctatatggaagacagatttgattcttaaaagctgtcctgtgacctaccatggctgtcctccaaaagacccaacangcagctgaaagagtcaactgcagatntttacaccca

SEQ ID NO: 117669 - DNA, 895 bp, Glycine max
  Clone ID: PAT_MRT3847_77264C.1
cccaacttcactccgtagaccttagaatattttagtgatggcagaatcaagtgaggtagagatagtgggtaaacctgtccaagatttggttttgaattctgaaaatctgccaaaaacttatatctacgaggaaggtggtgccggatttcgagatgctcttgtgccatcacaggatgagaatattccagtgatcgaccttcatcgcctctcatctccatctactgcactacaagagcttgctaaactccatcatgctctccattcatggggctgctttcaggcaataaaccatgggctgaaaagctcatttttggacaaggtgagagaagtttcaaagcaattctttcatcttccaaaggaagaaaagcaaaaatgggcaagggaaccaaacaatattgaaggatatggcaatgatataattttggccccaaaacccctatgatttcaggaaatcaaaggcttgactggactgacagagtttacctaaaggtgcttcctgaagatgagaggaagttcaaattttggccccaaaacccctatgatttcaggagtattgtcctacagtataccgaaagcatgcgactgctaagtgaagtaattattaaggccatggcaaagtcactgaacttggaagaggattgcttcctaaatgaatgtggagaaagagctgatatgtttctgagattcaactactaccctccatgtccaatgcctgatcatgttctcggtttgaagccacatgcagatggatccaccataacttttctgttgcaagacaaagaagtagaaggcctccaagtcctcaaagatgatcagtgggttaaaggtccaatcattcctgatgctctcgtcattaatggtggtgatcaaatagagataatgagccatggaattt

SEQ ID NO: 117670 - DNA, 492 bp, Glycine max
  unsure (1)..(492): unsure at all n locations
  Clone ID: PAT_MRT3847_77265C.1
aggaaaaagatctagacatttccacacatatatgttacaaccatgtccatggcctccacgaccagggacgagtcctccgacaacgacagcacctgctcctccataaccctcgccgactccacccgcagctggctcagcaccttcagcttccgccgcagcagcagcagcaacagcagctccctccccctctgcgccgccgcccctgacaccacaaagtctgcatcatgggaggccatgcggcgcctccgcctcgacaccggcggcatcggcctcgacaacttccgcctcctgcggcggctcggcagcggcgacatcgggaacgtgtacctctgccagatacaaaactccatggtgggacggccgcagagcctctactacgccatgaagggtgtggaccgaganncgctnnnnnnnnnnnnnnnnnnnnnnnnnnnnnnnnnnnnnnnnnnnnnnnnnnnnnnnnnnnnnnnnnnnnnnnnnnnnnnnnnnnnn

SEQ ID NO: 117671 - DNA, 274 bp, Glycine max
  Clone ID: PAT_MRT3847_77266C.1
cgcattccctcgatatctcagtcatccaattgcctcagttaatcccttaattgcaagcatcatgcgtgaggacgtctcaccaccaccatttccaccaccacaagggcagatgatgagcatggcgatgctcgttacaagaacgaggacgatgtaccccaagcgtcttgagcaccttggggtacttggtgcttcggttgccggtgctcatgccttgcatgagaggcatgaggccaagacagacccagcgcattttgataggcacaatgtaaaagag

SEQ ID NO: 117672 - DNA, 333 bp, Glycine max
  Clone ID: PAT_MRT3847_77267C.1
agacgtcagaagacggcggggggggcctcttatatacatagctccaataaacagtgatactgcagatattcgatcactgatatgcttgtcacttctgcccttgcttgtcgtttccaagattgtgtgccagataatggacggactattggacttgtactatatttatatgctaagagctccatggctctcttcgcaacattttcatgacaatggccctgtcctaagtagtcactcgtaggacatgattgaaatcgttgatgctctgtgaaactaatgggcagattgatggtctagactttctccgactttccgctggctgctgatgcttaatag

SEQ ID NO: 117673 - DNA, 115 bp, Glycine max
  Clone ID: PAT_MRT3847_77268C.1
ccatatccctccctgctcattctcctattgttgttgacaagccgagttactttctatggttcagagaaggagaagagtaagactttcatagatccaggtccagcaggaagccaag

SEQ ID NO: 117674 - DNA, 264 bp, Glycine max
  Clone ID: PAT_MRT3847_77269C.1
cagtaatgtagtttgttaatgttttccttctcattcaggtattgtcagcagatctcatggatagaggtttaaatggcctctggtaatagtgacaatgcaagggcgagaaaggttccgctttcttttttgtgtctctcttttagatgtcagcatcataattctgccaactcagttagctaagtatttggctagttattttcattctcagctaaccagaatgtgttttaccttttaggtttaccgacaagactgtgaaactttcgg

SEQ ID NO: 117675 - DNA, 625 bp, Glycine max
  Clone ID: PAT_MRT3847_7726C.1
tacggctgcgagaagacgacagaaggggctttcaattttcgtgaatcccttcgaaccgcttttacgttggtttattcggtttgtgttgctctgttatgctgctcctccctgtttgatttcaaggtatttgcccgaatcttctttctcgaagggtaaaggataaagggatgatctacacagcaattgacacgttctacctcacagatgagcagctagcaaactcaccttctagaaaagatggcatagatgaagccactgagaccacccttagaatctatggttgtgatctcatccaagaaagtggcattttgctcagattgccacaagcagtcatggctactgggcaggttctatttcatcgtttctattgtaagaagtcatttgcacggttcaatgtcaagaaagttgctgccagctgtgtatggttggcttcaaaactggaggaaaaccctagaaaagccagacaagtaattattgtttttcacaggatggaatgcaggagggagagttttcccatggagcatttagacttgtattccaagaaatttgttgatttgaaaatgggagtgagccgaacagaaggcattttttgaaagaaatgggatttatttggcatgttgaacat

SEQ ID NO: 117676 - DNA, 388 bp, Glycine max
  unsure (1)..(388): unsure at all n locations
  Clone ID: PAT_MRT3847_77270C.1
ggggcgcgagcgcaatcgggtcgagctcagttataaatacgacacagaaacaacttcgacgcgttnaaactcgccatgatgctaaggatggggatgacttcacttttccctcaaaggctgaattctggaaagcacttcgatcaggttcatatggagaggcagggaaatttatggcaaaatggatctctggtgggggaacatacacgaactcaactcttggaatgaacaaaaaaggggatgggcatattaaagggttggagggtcccaaagatggtggtctggaatatcttttacatactggtggtgggaatgtttggggggctggtggtgatacttgaacgatatgcaacacgggtagggctcttacaaccatgcgaacagaggttac

SEQ ID NO: 117677 - DNA, 365 bp, Glycine max
  Clone ID: PAT_MRT3847_77271C.1
aagcttaaagcaaacagtttaggggagataagaaaaggctccatcaaaaaaaaatatcttacaggctaaggcatacataaaaatacaaatgtcaactgggaaagaacctttcaaataacccataagttaagaactgccaaggctaaatgcctttaaataaagggggtttttgtaaacatcacttctaaaaacatatccttgttacaaggaaacttgtgattaagggttagacaatgatttattatgaacttgctgatccaacatactatactggagtcaagggtgtgacaatgacccgaatgcgagtgtccagaacaaaactgtgaacaagatctgaatgctgatcatacaatgcaggtaaaaag

SEQ ID NO: 117678 - DNA, 392 bp, Glycine max
  Clone ID: PAT_MRT3847_77272C.1
gcagattgtccattttttaattcaaggtttcagcttttgagtaccactaccaatggtgattttgttcaaggaaaagatctcgcattggtttaagttaatgtattatgtgctgctgttggcttgacatcaagttacacttcaactccattgttgtaatttggtttgctaaaagacagagggttaattgtggaattttttggaaggatgtcttacgttgcttataactgtaaataaatccaagataaagatttgttggacggaaaattttcctttgattttaaattttctctctagattgaaaaaagttttcctctactaaagcacaatttgttattggaaaaatccttcatctttgatttaattggtgtctggctacatttttttaaataatt

SEQ ID NO: 117679 - DNA, 1360 bp, Glycine max
  Clone ID: PAT_MRT3847_77273C.1
gggcggtgttgggctgggaagcagcagcaatagttgagcagcgcggaaatcgcatcgacgactgagacataaagatgggaagacaagccgtgaccaaattgctgtcctcgatcgcctcgcgccgccacggcctccgcctcttctcggcggcgtcgccggcggtcttcgtcgataagagcacgcgcgtgatctgccaaggcatcaccggcaaaaacggcaccttccacaccgagcaagccattgaatacggcaccaacatggttggtggtgtgactcctaagaaaggtggcaccgaacacttgggccttcccgtcttcaacaccgtcgctgaagccaaggcggagactaaggctaatgcttccgtcatctacgttcctccgccgttcgccgcggccgccatcatggaggccatggaggctgaactggatctcgttgtctgcatcactgagggcattccccagcacgatatggttcgggttaaagcagcccttaacaggcagtccaagacacgtttgataggaccaaactgtcctggcataatcaagcctggggaatgtaaaattggaatcatgcctggttatattcataagcctggtcgcataggaattgtctctcgttctggtaccttgacatatgaagcggttttccaaacgactgctgttggccttggacaatccacttgtgtgggtataggaggagatccctttaatggaacaaactttgttgactgccttcagaagttcctaacagatcctcaaacagaaggtatcattcttataggagagattggaggaactgcagaagaggatgctgctgcactaattaaggatagtggaactgagaagcctgttgttgcttttattgctggtttaactgctccccctggccgtcgtatgggtcatgctggagctattgtgtcgggtggcaagggcactgcacaagacaaaattaaaaccctcagggaagctggggtcatggttgtggagtcccctgccaaaattggagctgccatgctagatgttttcaagcagaggggcttggttcaatagtttgggttcatttaatttcatcaagtcattttggtttcgattatttacaaactgttcaaaatttcttgattcccattggtaatgatgggctatttttttttttttttttttaagttacgagaggggcattaaaataaaattcaagatgctttatatttgcggaaagtttgatagtctttgaactccggattttctggcgttgatttgtaaacacgatataccctttgccaatgaatttccagcaacttcaaattaaaaaaaaaaaaaaaaaaaaaaaaaaaaaaaaaagggcggcgctcgcgatctagaac

SEQ ID NO: 117680 - DNA, 430 bp, Glycine max
  Clone ID: PAT_MRT3847_77274C.1
ccaaccttcctctatctttccattcactttgtgcgtctccttttgattttcttagctaaagaggatggaagatagaagcgagaatctattttgaaagatttgttgaatccgtatcttagtatttaataagcctcactcatgattttataaattttaattaacaataaagtacttaaacatgcatataggataatggataatgcagaattttttatctctctttatataaatattcggacttacatatctttttctaaagaaagatagacataatttcttttatattaacttcataatatatgattcgtaaattttttatcactcaccataaacaattgcatattatataaaaagtttaagtgacattctaatatgagaatatctatatatattctccatacatacagggcataacaatttgatattctaa

SEQ ID NO: 117681 - DNA, 514 bp, Glycine max
  unsure (1)..(514): unsure at all n locations
  Clone ID: PAT_MRT3847_77275C.1
gtatattattaaactgtgcaagatcatatagtcgctttgaatgtggtccacatagcttattttgcattaacttttctactctagcaaagttcattgtgcaggctagctaccataaaaccctggtaaaatgctcaaagaaaatattgttagtaattgaatgacttgatgaaaaggactataaatctgtaaggcatagaatgtgtcctgccattgcagaatgtgagagatttggcactgtaatggtcaagttctcatttactatatcatgtcagccatgaccttagtatgattatatccctttatttatctgtagggctgctttcatgtgtggaagagagcccaattttgagcttcccgaggaagagaagcgggatttgagcaaatttaaatgggacgaattcttggccatgactcgccaagcaatcacacgcaaaagtaatgtttctctttgaaccgtttcctatgtcttccaagatttctttttcctgatattnntaacagtgcacacacattt

SEQ ID NO: 117682 - DNA, 330 bp, Glycine max
  Clone ID: PAT_MRT3847_77276C.1
gacccagcgtccttgcaatcaaatattgtttctctttctcaaaccctaccctactggcaaagcaaatcttggtcggaccctcaccacaaaaccatcacccttgagtggaaagcttgacaccatcgacaacgtcaaggccaagatccatgacaaggaatgaattcccccggatcaacaacgtctcatctttgccggaaagcaactcgaggacggccgtaccctctccgactacaacatccagaaggagtcaaccctttaccttgtccttcgtcttcgaggtggccatgcaaatcttcgtcaagactctcactggcaaaaccataaccctat

SEQ ID NO: 117683 - DNA, 274 bp, Glycine max
  unsure (1)..(274): unsure at all n locations
  Clone ID: PAT_MRT3847_77277C.1
cgtaagctagcatcctctatagacgccagccgcttttttttttttttttttttttnnngagaagataggnaagtggttttttcctctccttcggggggttgattctttcgtacgcttgtcctgcttttattttgccggaagtgggggggtgcgatctgatgaatattattctaccccgaagaaaaaattctcagcagcattgggaggtctgctctccgcattgcaatagctcccctttgacaattccacacaacccgacacctgggtccacacc

SEQ ID NO: 117684 - DNA, 503 bp, Glycine max
  unsure (1)..(503): unsure at all n locations
  Clone ID: PAT_MRT3847_77278C.1
aacgaaatatcacgatgaaggctactaccaccgctaccatccttgcgaccgccgctgtggcgtcagctcaggtcgctttgcctgacactatccccatcttgggctaccccttcgggcagcagtgccagcagaccgtccttggtctcttcaccaatggctctttctcacagtgctttcccgctacggctctcttgcctctgctcacctcgacgacggactcgattgtccccgtcctggacaacttcatgaccgagttgtgctacaatgagccgtgctcgaacgacactctcaccgcggctgctcagcaggtcgctcagggttgcgccgatgacctaacggcctcgggcctcaccgccgagcagttgacagagatcttcagcatctacccgacccttcgcgaggtcctttgtttgaagaccaccgactactacactgaagacttatacggtggcttcctcggcgcccctgcgatcccaatctcggacgcctancacctgaccgac

SEQ ID NO: 117685 - DNA, 433 bp, Glycine max
  Clone ID: PAT_MRT3847_77279C.1
gttacatgccttaagatggtcatgccatcgttctacacaccgtctatccgtgtaacgagcgactactaagtggacaagacttctaaaaatcgattgtggtggatttaactgcttcctaccgagatccatccctatgtattgccaccactcttacatacattgctatgcatactcatcaaccgatcttgcttatgatgaatatccattaattttaggcttattgctgaccaatatatcattgaacccattacaaccttgatcttattaaaagataccttgatcctatataaacataattactctaataatgtgcaactgtatcatctcatatcctagcatagatctactattactacttcttatatatacgcagatttatcacattcatacagatccttactcatgcattttaacgatctcaactcagctttca

SEQ ID NO: 117686 - DNA, 1479 bp, Glycine max
  Clone ID: PAT_MRT3847_7727C.1
ttaccgggccgaccgacgcgttcgcacagattgagagggccagtctctgcatctcactcctctccttctgagccatgcctgcttcgagcccgtgctttatcaggcacttcagtagcccttgcagcttctttttcagcagttttacacctttcttggacctcatcaaatcttttgaactcagtatgatacttctgttctagatggttcttttcctgctgaaatactatcgcttccctttcatatgattgagccttagcattttcagctttcaacttctcagtcaactctttaatttcaatcctcagtgatgatatttctgtatcataactccttatctttgattcagcagccttcaactctaaattcagggttgttaaacacttctcagcatgctcaatttttgcagttttctcttttatttcatcttctttttcagccaaagttccagaaaattcttctcttaaagcatcttccctcaattgtgtctgcttgtttgtgcgctcctgcacattagctgctttctgcaaagcagattgtgcttctctccgggcgatatcatacttccgcttccactcctctgcctcctcttgagcagactgagcttgttcctttgctgctgccaaccttgcttcagcagcaccactccgggacttgagggctgctatttcagaactagcttgatcttcttcagctttctgcctcgataagacttgctcatattttcttttccaatccatggattcctgcttggtagagtcaagtgttttcaataaactagagtacctctcatccagtgagcgacgattagcttgcaggtcagttatgcgattcttatattcatccatgagtttcttcttatcattgatggcatcctcatatcgcttaatgtagttcgatttttcaccttcagtggcttccagccgttttgtcagaaggtccactttttcttcaatagaccgatattgtaaagcatgagacctcttctctgattcgatggtagctattagcctcttgacaaggtcaagcacagggccttcaaaactttgttgtaagaagacagcaagtttttgccacttccctggaccttgaatagttttttcatattcagataaaagggcatcaagaaccttagcaacattatcaatctttgcgtcagaagcattacaagctgccctcagccttttttccatagactgtatagcattagagcactgcagatctgcttccatgaaagcatctttcctataatcctcaaatgcctttttgaagaatttaagaaggagcccctcatatgtcttcctggctgaaccaactcctatggcaatagcattaaaagcagtccattgacttatgctttgcttgttcatgtgcttccctcaaaagcaacttcctcaggtggcgttgagcggtcccaagtagacatatcccccccccgcgatcatatgcggtaaaaaaattttgctgaccaattccagcttc

SEQ ID NO: 117687 - DNA, 547 bp, Glycine max
  unsure (1)..(547): unsure at all n locations
  Clone ID: PAT_MRT3847_77280C.1
ntacggctgcgagaagacgacagaagggtaaaatatattgacgaacataatttttaaataacatttaaaaaaatactaaaaattattaaaaatattatttatcaaataattaaacaaacattttaactcataaaaaaagaaaaaatgaattgaaataatttgtccagcatattcattatctaaaaagttagtgttcatgggactactctatttaatttggcatatctttagcatgtataaaacggcactctaaaagtaaatcatataaaatgattgaaaaaatttatttcacatgcttcttttatgatccttaagcagggctgttaaaagaactgagagaattggactcaaccaaacggtccaaaccataaataatcaaatattttaaaattgataaaaaaaatatgagtaaattggactttttcttataaaaaaaattaagagtaaaatacattcatctcccctaaatttaagccttattacacttatatcccttccaaaatttatcttacacaaactctcctaacttttataactctattacaaa

SEQ ID NO: 117688 - DNA, 309 bp, Glycine max
  Clone ID: PAT_MRT3847_77281C.1
aaccaaaattggtcaagttccgtttattcatactcatgatagaaaaagggggaaaaaaagggccagggaaatgattgaattttttcaagtaaataatatatttttttatctagcttatattcctgccattttcaacttgggttgaaattgggcttaccacaaaaaaaaatcctttcaaagggaaaaggttggattgggccttccccccgtttcccttaaaaaccccagttttaaaaaggaaatttttttggttgaagcttttttgaaacgcctttaaccgcctgttcctttgttggggtaggggggaaa

SEQ ID NO: 117689 - DNA, 1075 bp, Glycine max
  Clone ID: PAT_MRT3847_77282C.1
gaagatcgagatgaggatcaaaatgcacaagaggataataaagtagaaatgaatgatggtgatctttatctgaaagtagattttgatcctagggaagatgattataaccataatcgctcttgcgcgtttgaacgccttcaacatctttgcaacgggatcaggtgctctgatggtcggaaccgccagacttgagtggacagagggcggggacgggggggacggggaggatggggatggggacgaggaggtggatttaatacatttgcctctcaagttccatttgatctttttcctgaggctgttactttgcctgatgttaaccttgatgatattcatgatgataccaaaaagttgcttcgttgggatagtcaccttcaaaattattgggaagcctctccttattttctcgaggacaaaacctccaagaagaggcaaagtatgcacatagctaaattctctgacaggaagaagaacgatttcactcgtgactctctctcacaagttttaatgttcaatgatttccctcaggagttagttcaaggtgcatctaagcgtgcgtcgagaagaaaaaagtttcgatggaacccagagtcagagatgaagaaacttgatttctttgaacaacaagagaaaacaaaccagggcaaagaggaaaatgatgaaaatgaaaagaaagatggagaagatggagacgaggatgaaaatgcacaagaggaggatgaagaagatattagtgatgatgattataatcagaatatagattttgatgacgatgaagatgattataatgatgtagatgacggggatgatgaacctacctattagatatcagtatggagaatgttcttctgctcatcccgtgacagctatacaagcatggactgttgctcctttaattttacagtttggaagttaaaattgttcgttagccttatttggcttttactttgtcactattttaacttgttcaattactaacggatgttttccttgtaaatgtttagattaaagaagtataccgcttgacgagaaagaaaatatggttgtagaaaacttgaaagaaaaatctttttta

SEQ ID NO: 117690 - DNA, 252 bp, Glycine max
  Clone ID: PAT_MRT3847_77283C.1
cttataactataatacgtcttcgtgcatacctacacaaagatatagataacgaggattctatctagagtgctgaattacgtgatgaaaacgccaaactcgaatccatgtctattggtgtataaactacagatgtgggacatgaaaatgctgaacatgcattccgcttggggcagaaagtgagacataaaaaatctgtctatagagctgtgatctgaagaacgtatacagactgcagtgaatagagcaaatgg

SEQ ID NO: 117691 - DNA, 1236 bp, Glycine max
  unsure (1)..(1236): unsure at all n locations
  Clone ID: PAT_MRT3847_77284C.1
aattcggctcgagcttctctcaacgtttgctcaccccaactcttcttccagtctctatctttcattcttcaatcaaatttatacctattgtctactaggacaaagatttcagctgatgaatggacttacccttcctagatcactactaccaaaataaatcgacgtgagagagattgtgaagtaagtagaaatccacgacgtgagagagattgtgaagtagaaatcggtgcaagaaattctccactttatctaaaaaaattcggtgagtttgtgaagacaaaaaatcactagctactcaaaaatggccacagtaggaaggaacgttgcagctcctttgctgtttcttaacttgatcatgtattttattgttcttggctttgctagttggtgcctcaacaggttcatcaatggccaaacttaccaccctagttttggtggaaatggtgcaaccatgtttttcttaaccttctccatactagcagctgttctgggcatcgtgtccaaacttttgggtgggaatcacatgaggacatggaggagtgacagtttagcatctgcaggagccacatcaatggttgcttgggcagtcacagctctagcatttgggttggcttgcaagcaaatacacttaggagggcatagagggtggaggctgagggtagtggaggcattcataataatactaacattcacacagttgttgtacctgatactgatccacgcggggctatatagcagcagatatggtcccgggtaccatgacactgactatggtcatggacatggtgtgggagggactacaggagatccaatgcacaagcctgctactgcaggaactcgtgtctaagtgccactgcactgcaccacctttgttaatttcttctcttcaatcatgttctactttaccttttgttggaactttctttttttcattgtctttggtttagatcacttggattgtgtaatgtctttgttggcttgttgttttcttacacatgatagtcactttgtagcatgacattgtgtggtgtatatgaatggctgtaattgattttgtatcagccctctatcatgtgtatctatgtttgtggttccacatctcagacatgaatttttcatgcttactgagaagttaataaatttcttagacgtaaccttttacttctcnaaaaaaaaaaaaaaaaaaaaaaaaaaaaaaaaaaaaaaaaaatttttttttaaaaaaaaaaaaaaaaa

SEQ ID NO: 117692 - DNA, 688 bp, Glycine max
  Clone ID: PAT_MRT3847_77285C.1
gctttgctagttggtgcctcaacaagttcatcaatggccaaacttcaccaccctagctttggtggaaatggtgcaactatgtttttcttaatcttctccatactagcagccgttttgggcatagtgtccaaacttttgggtgcgaatcacattaggacatggaggagtgacagtttagcatctgcaggagccacatcaatcgttgcttgggcagtcactgctctagcatttgggttggcttgcaagcaaataaacataggagggcacagagggtggaggctgagggtagtggaggctttcataataatactcacattgacacagttgttgtacctgatactgatccacgcaggactatatagcagtaggtatggtcccgggtaccgtgacactgactatggtaatgctcatggtgtgggagggactacaggagatccaatgcacaagtctgctgctgctggaactcgtgtctaagtaccactgcactgcactgcactaccttattgttaatttcttcatttcaatcatgttctattttaccttttggagctatgtttatctttttattttgtctttggttcgacttggatggtgtaatgtcttcttacacatgatggtcactttgtagcatgacatattgtgtgtatacgtatatgaatggctgtaattgattttgtatcagccctct

SEQ ID NO: 117693 - DNA, 1419 bp, Glycine max
  unsure (1)..(1419): unsure at all n locations
  Clone ID: PAT_MRT3847_77286C.1
tcggctcgagtacatttccatctttttagggtttcatttcatggactccgattcctggatttncacgcgcctctcttcctcttcacgccgccaccattatcgatctggtcacttcaaacctaagaaatttattatttttattaattattggattgagattattgtggtgtaacgattaacgaattggtggcgtttctgttgcagatctgtacgcggaggagagtgaagggaacgatgatttcagggcggagtttctatgccctttctgcgccgaggattacgacgtcgtttccctctgttgccacattgacgaccaccaccctatccaagccaaaaacggggtgtgtcccatttgtgggaagaaggtgggagtggatctcgttggacattttactacacaacatgggaacttcttgaggatatcctttttgcaagttgaacttacgtgcagcgcaaaaggagggtcaggaaaggaggctctgcttcaacaatttctatattgagaaaagagttacaagaaggagccttgcagtcccttcttggaggttcttcatacttagcttcctcaaattccgagcccgatcctctgttatcatcatttatgtttaacccagttgtagctgatgagtctgtgagtgcaacacctccttccactgaagatgctctagtaaaagaaagttcaaaagacgatttcttgaaaagaaaacctcagcagttacagctatcagaagaggatcaagtagagaaggctcggaggtttgaattcgtgcaagggcttctgatgtccaccattcttgatgataagttatgactgcatttgtagctcatatgccaatgttgaaagagctggagctgtaagctagagagagggagagttatccaaaacgatacgaagctgcatcggataaatatgtaatgtgtctatagttatgttcataaaatgcaaccttttttttatgtatcatgcttgtgttcaatgttagctccaaataatcaatggaaataaaacacgtttcacgggcatgggaccatgtgcgctgcataatttataggccattttttcgtgtttttttttttttttttaggttttgtcttcaagattttattcgatgatccaaatacataaaaagggtgagacggctggagtgtcaatttgagctagtcttctgcaccaactggttgaatattcttataggagcttgacgagaagagttgttcttgggatcaagtataagttcgttattagttaaatgttccaaaatatctgacgtttacattgcataatgggtacgcagatcattaaatatgtttgtatactgaagattataaagtcttatttgtaatgtaatagtattaaaaatattttgtttactagtttttctcatgtgacaaggaggagtggggttgcaaagcttcttt

SEQ ID NO: 117694 - DNA, 970 bp, Glycine max
  Clone ID: PAT_MRT3847_77287C.1
acaatgccgccaatgtagggaatgaagatggctgtgacctggaagaagcctgcaggaaggcagaagaacactccaatgcctgtggctgctgctgtgatgagctttgggaagtggccatcaaggtgaaaggaaatgaagccaaggattggagcagccagggctagtcctgtggcccaagcaattgatgtccactccagagcagagaagtttgatccaccactggttcttatggtgtgatttgtcagtttgctatacagatgaaattccttttgtgagcagtgcttggttgggtggtttttgttccattcctgaagtgaatctgcagcagggagaggctgtagctgactgataatgagagggaacacaacaggaacaagcacagtttgaacaaagtagaagcaaaactcataaaggtaccaccccataacctcaaaccctgagggcttctctcccacttcctcagtgtacccattataaggctctctagccctcaaaattttcatggcactgttgtgtatgtctggcctaaccgtggttccttttccaccctcttgcaccactcctggtgctcctccttcagcttcaaccgtcacctctttcatcactttgtttgaaggcagaagaaaaataatgaagagacacaggtaggtgtcagagagagagtaatggctgaggaaagaggaagaagaaaaaaaagagtggagttggaagtttaacacaaaggtgacactagggaatatctaaagggtgggttgggtttggtttggtttcctcttgttaatgtaattggcgatttgtaatgttgttgaccagttccttgtgaaatgtaatgtgctatcctatctgtttttctttaataaaaaaaaatttaattttatttaattattatatatattttaaaaatatatttatgtttccttactttttgttttatttatctttcttactttatttattttttattattttt

SEQ ID NO: 117695 - DNA, 1597 bp, Glycine max
  Clone ID: PAT_MRT3847_77288C.1
ctgtcgcgtgggaaacaaatggctgcattgtgagttctttgtccccttcaacctcatttcaattctctctctcccccattcttacttcaccttctcctcctcctcctccctcttcattcccttttctttctctgcactccatctttctttccaaaacccaccctttttctattcctcttcctcttcctccttttcccttctttttatttccttacactcacaacatttcccttaaaataaacataaacaaaccagcactgttcttgacccccaaaaaaaaatctctactatttattaactatattaattcctccataatataatcatttgttttccttgttttctgttttctcttataatatataaccttcttttatctattttttctgttttgcaccttgtgattgtgagttatatctatttatatttatatatcattctctctcttttttttggatgtgtctatggctggtttggatttaggaagcgcctcacgctttgttcaaaaccttcacagaccagacttgcacttgcaacaaaatttccagcagcaccaggaccagcagcaccagcgtgatttggaggagcagaaaactcctccgaatcacagaatgggggcgccgttcgacgatgatagcgatgatagaagcccgggcctggagctcacttcaggtcctggcgacatcgtcggacggcgcccgcgtggcaggcctcctgggtcgaagaacaagcctaagccgcccgtcataatcacccgggagagcgccaacacgctgagggcgcacatcctcgaggtcggaagcggctccgacgtcttcgactgtgtcaccgcgtatgcccggcggcgccagcgtgggatctgcgtcctcagtggcagcggcaccgtcaccaatgtcagtctccggcagcctgcagctgccggtgccgtcgtcacgctgcacggcaggttcgagattctctccctctctggctcgttcctcccgccgccggctccgccgggagccaccagcctcacaatctacctggccggcgggcaggggcaggttgtcggaggaaacgtcatcggagaattaaccgcagcagggccagtaatcgtcatcgcagcgtcgttcaccaacgtggcttacgagaggttacccttagaagaagatgaacaacagcagcaacaacagcagcttcagattcagccacctgcaacgacgtcgtctcaaggaaacaacaacaacaataaccctttccccgacccttcttcaggacttcccttcttcaatttaccactcaatatgcagaatgttcagttaccagttgagggttgggctgtaaaccctgcttcacgtccacaacctttttgagagttcatgaagatgttgacggaggatttatatcacaaaaggctttatattattttaaggtcagcaaattaatattcatggactacaacatatatataaactatatgttttttcttcttcttcttgttattttgtttttttcttatgttgttaatggatataatatgacatgataattattatgtaataaaaaaaaaaactccttggaattttatatacttatttcccctgttcgcactactgaa

SEQ ID NO: 117696 - DNA, 267 bp, Glycine max
  unsure (1)..(267): unsure at all n locations
  Clone ID: PAT_MRT3847_77289C.1
acaancactaataacactcctgctgcttttttattacactgccgctccactcaaacacatatctcactccaaacctcatctctttcactactttttctttctccatatacttatcttcctacttgtatctacttaactacacttattcacattaattatttaagcactaacgctcattctccaccatttgtatcactgaccatacccaagaccatcttatacatcttctttataattagctttcataacacatattcacaattttca

SEQ ID NO: 117697 - DNA, 500 bp, Glycine max
  unsure (1)..(500): unsure at all n locations
  Clone ID: PAT_MRT3847_7728C.1
tcgtacggctgcgagaagacgacagaaggggctttcaattttcgtgaatcccttcgaaccgcttttacgttggtttattcggtttgtgttgctctgttatgctgctcctccctgtttgatttcaagggtaaaggataaagggatgatctacacagcaattgacacgttctacctcacagatgagcagctagcaaactcaccttctagaaaagatggcatagatgaagccactgagaccacccttagaatctatggttgtgatctcatccaagaaagtggcattttgctcagattgccacaagcagtcatggctactgggcaggttctatttcatcgtttctattgtaagaagtcatttgcacggttcaatgtcaagaaagttgctgccagctgtgtatggttggcttcaaaactggaggaaaaccctagaaagccagacaagtaattattgttttcacaggatggaatgcangagggagagttttcccatggagcattta

SEQ ID NO: 117698 - DNA, 422 bp, Glycine max
  Clone ID: PAT_MRT3847_77290C.1
gacaaaccgcgatcatagggagccgtaccttaaaaccggatacaaaagcaatcgctacttgctaccaagaatttctcactttctccctactttttggtgtacgagttcttaagggaaagaaaatcactctctgtgctggccacagacttaaagaatcatcttcttttacattcttagactatttgctgaacactgtcctatttgatatacgacttcgtgttagatttaaacttcttatgtttctttttcagcactctgattaatatcaagttcaagctgctgaaatcttggattagtgctcccactctcctatctggcataggactacgtgggtagactatactataaatctcctttctttcactctcttcttctcactgatccgcatatgccgttcaaagtggacttatttgaacaacact

SEQ ID NO: 117699 - DNA, 315 bp, Glycine max
  Clone ID: PAT_MRT3847_77291C.1
tcgttctggtgtttgatgacctcagaagggtttttctacagtcacatgctcaacttgtacacgctcattctcgtgcgtggaaaattgatccttcccgcctgcttgattgggagaatttttaacaatcgttagagatcatagatgttctgagcactatttatttacaaatccccagaggggtggttctaggagataatgtgtataaatatggggatgatgtcgctcgatacaagtgttaatactaccctggagatgagggcttctggtggacctcatgtttactatacttagactacttttagatgatgcttaatt

SEQ ID NO: 117700 - DNA, 391 bp, Glycine max
  Clone ID: PAT_MRT3847_77292C.1
atggggaaagcctgtgtttgtttaatcatttttccaaaaaacacaagatgaatgtttttactttttttcaacggatccaacaatgggcttttcccttgacaaaggctcctaccattgtgtaacatacaaaaaaaataactcctacattcattttgccgtaattttaaacatcaaaagcccggggaagcttgccccatttatgttttcagtttactaggcaaggggaagggggttcaaaaatgcttttttttggttcattgcgacctgtgatcaaaaagctcttttaaaatatcccgctcctttttgaggcatgggtcatcccctgcccttgaggccacccccaacacttgtttttttttcctaagtttaacacattcactttttacccttt

SEQ ID NO: 117701 - DNA, 481 bp, Glycine max
  Clone ID: PAT_MRT3847_77293C.1
gaatattcctgctgctggaaacagcatatgatgtctgcatggactcaatttactgtaaaatatttaggatgcattgatccttcctcttaccttgaggatgttgatgttccacttttatcctcatttacttcaagtttgtgtcattatttagacttaatttctcataatatacttgtagcccacatctttgaagtagtctatcactcacttgcacacacggtttgcttcatggttacatgcagcctgccaacataattatcattgatgtacactttaattgcgttagaaaactaatatattgttggagttataatagaaaaatagggtattgtaccactttcctttattatgcaagggattctggggggtgtatgtgctagtattttttatattccttaaaattgaactctagcatgctatatttcaagataatttatgaaagagaccaatttgaattctttgtctgtaacaatttgcagaa

SEQ ID NO: 117702 - DNA, 490 bp, Glycine max
  Clone ID: PAT_MRT3847_77294C.1
ctgatacttttgtaaactgggtgactaatggacagacactttgcaattgaattttcacatgaaataatcctttgcatttatatatataatgtaaatttatttaattgacttggcttgcccgaaagactgtgaattgaggaagagactagagtgagctaagcatacgatacagaagcggcaggaaaaaagaaataaacaggcttttaatcaaagtaggcttctctgtaaggtgatgatcgcagaagaaatttcttggtggtgacatgcagtagtctgtcgtgaaaatctcaatcaaatcttgaggtataataggacagagtaaatagcaaacttgtaaaattgtttttccctttttttgttacctttggagctcattgtcttactttttctttcatcagttgcatttgtaaatattgttaccctgtttgtctgagctccacttctagaattgcaaataattaattcttttaaataattttgcttcttgtaa

SEQ ID NO: 117703 - DNA, 212 bp, Glycine max
  Clone ID: PAT_MRT3847_77295C.1
cgcgtccgctgacacttcagtacagatggggacagtacgccttaggggcactcagtcaccaacccacactgcgttccgctgcacatttggagcgaggcatcgtcgaacagggccttcatcaggatcaggcgctctagagggtcaaagctgacttactcgtgcaagcaacgtcatagctcttccgtagggtcacctaaattcaggtcacgggc

SEQ ID NO: 117704 - DNA, 471 bp, Glycine max
  Clone ID: PAT_MRT3847_77296C.1
ggggtatgccttttttaattttttttctttttttttttattttttttttttttccccaaaaggggaacaaaattaattggggcaccaaaattctaaaggacccccttgacaggacccaaccatacccattgggttgtctaaaaaaattttttttttaagggggggcggaagaaccccccaaaaaggcggcaagccatttttttagggaacttttaaaggaaggggaacccccctgggcccaaacattttttttgaatggatgggcatggggcgccacaatcttccaacccgggggaaaccaatcgcccccaaacaaggcttgttgttaaaccccccaaagggaggtgaaaaaataaggaccctgggccatgaaaaataaaggggccacaccggggccccaatccgggtgggatcccccacctaaaggggggggaagagctgcgaaatttcgcatggccaccggggccagct

SEQ ID NO: 117705 - DNA, 902 bp, Glycine max
  Clone ID: PAT_MRT3847_77297C.1
atgcatcaagatattctgttggagcttctttacaaaggcaactcagttacacctttgttgatagtgtctagatcgagaaagcttgtcaagggaagaagatttggtcattgcttttcagtggcagatagtgatcagcttgccgcagacaacagtagcagtaaggattttgacaaagttgaaagttcaccaaccaatgatcagccttccaatggtccaataacccaaaaccaagggtcagaagcttttcttaagtcccaatctgcaaccaaacgacttaacttgactgcaagagagaggttaaaggcagctcgatccatcaaccgatacgccgaatcaaaagcatctaaacaagacatgagcagcagggtgttggaggcttcaaaacaaagtgacaaagggtcagggaagaaaaaatctggacttccggaggcccctactaatttgtttgatgatagcaaacgagggttgtcaacaggcttcactttccaatttcctggaggttctgatctctttttcattatcttctcatttgtttttatcagcacagtgatgtttgcaacaacttacattgtgtggaaagttggtgcaatccatttcaatgagtactgaggtgtggtgttaagaattcaccataaaaaaaacagatagttgatttattatatatatgtagacaagcttcggctgcttcaaacttcatgaactgatgatgttgatgatcagtttttcacattttaggtgcttagatcttctattttttcaagttaattattgttatcattattattttataagcaagaaaagatatttagttcagggtggatgtagaatacaatatataatggtcaacagtcaacattggacctgtccctttattttctttttaaaggggttatgaatgattt

SEQ ID NO: 117706 - DNA, 1440 bp, Glycine max
  Clone ID: PAT_MRT3847_77298C.1
gtgacgggaagggagtgatgttcttcttaagagaggtgagtgcagagcaaaaggtggggcggctggattcaaagttgcaattgtgggggctgctggaggaattggtcaatccctttctttgctgatgaagatgaacccattggtttcagttcttcatctttatgatgttgtcaacacccctggtgtcacagctgatgttagccacatggacactggtgctgtggtaatttccttttcatagggttattgattgtcaattaaattgtaacataagactgagttgtagttgttgtgttaatgctgaggctagttacaatagtttttattggagtatatgatcaattagtttgttaagaattatttacacatggttaggttaacaaaataaataggagcattgtaattcacttttcctatcttttaacgtctctaatatgatgaccatatctttaaaccccatcgtgagcttcagctcaacgaagttggaaacaaagtatcaggatgcatcaagatattctgttggagcttctttaccaaaggcaactcagtttacacctttgttgatagtgtctagatcgagaaagcttgtcaaggaaagaagatttggtcattgcttttcagtggcagatagtgatcagcttgccgcagacaacagtagcagtaaggattttgacaatgttgaaagttcagcaaccaatgatcagttagcattcatgaatcctccagatgaaaatttccaattgcaaactgaagtaaatgctgagtcaggatctccaacattagaggcttccaatggttcaattaaccaagagcaagggtcagaagcatctcctaagtcacaatctgcaaccaaacgacctaacctgactgcaagagagaggttaaaggcagctcgatccctcaaccgatacgccgaatcaaaagcatctaaacaagacctgagcagcagggtgttggaggcttcaaaacaaagtgacaaagggtcagggaagaaaaaatctggacttccggaggcccctactaatctgtttgatgatagcaaacgagggttatcaacaggcttcactttccaatttcctggaggttctgatctctttttcattatcttctcatttgtttttatcagcacagtgatgtttgcaacaacttacattgtgtggaaagttggtgcaatccatttcaatgagtactgagatgtggtgttaagaatttaccataaaaatagatagtttatttatatttctagacaagcttcggctgcttgaactgatgatgttgatgatcagtttttcacattttaggtgctgagacacttttttttgtcaagttaattattgttataattaatattttataagctagaagagagatttagttcagggtggatgtagaaaacaatataaaaaagctcaacagtcaaacaaagaaaaagacctattt

SEQ ID NO: 117707 - DNA, 505 bp, Glycine max
  Clone ID: PAT_MRT3847_77299C.1
cttgggtatggcacagtcatgccaagaagaacgcctatgtgtgctttccaccgcttacgatgagccctatccagaggcctaaacaaagcaccagccgtcattaccaatcttagagacgggattgggaccctactgaatatataaacagccaagctactgacgttcacaggtacggggatgctgcccaaatggcatattacgtgtattcaaattacatattcgatgcccatttcaatgtagataatgaagctcgtagaagcaattcatctgtctagatatataaccctgcactttattctgaaagatgttccttgccgaagactagaaatgagatcatagatactatgtctgtatgcatggctctgccagcgacttaagcagatttttggtctaaaaaccaaactgaacagttgccagaacctcacttgagatgaaatgcggcatatgagagcttactagggagctacaagccattccctgagcacatttcacttgcggaaatggt

SEQ ID NO: 117708 - DNA, 483 bp, Glycine max
  unsure (1)..(483): unsure at all n locations
  Clone ID: PAT_MRT3847_7729C.1
attgggttgtggtgattatatccaccgaacccttttgtgattgctttctggtttgtgatcagagaatcttggatccgattttgcgttgtttgcttgcctctcgtcaattgaatttctcccatttgtgatcaatatgtatcgctctgtttatattattatttttttaataagaatttgtaagttgaagatttatgttttctatttgacccgtcaataatttgaatatgattgtcatatttgatcatttgatattataattctcttgttatttgctttttacgtacactcactgatttcatctttgaattggtgcattatgtctgtttgtgttgctttgttgggtgttctgttctaactagactnttaggattgatgatttggtgagatcatcccttgttagataaattctagattgtgaatgaaatgttttatgaccgcgaaatctctcgattgttcaggttcagtgctgtgatagttgtaaaa

SEQ ID NO: 117709 - DNA, 377 bp, Glycine max
  Clone ID: PAT_MRT3847_772C.1
aaaccaaaaaaaaaacaagcctgggaatccccctttaaaaaaaggggccccatataaaaatttaaaaacccaaaaaacggggattggacaaaaaaaaacccgaatttggggggcccaaattccccccttaccaatttttcccggaaaattttagaataaactttccccccaaaatttttttccaagcccaattaaaaatgttttgcaaaagggggggcccccccaaaattaacaaaaattaacccggccccgggtttttggggtgggcagcccccattgggtaaaaaaaagcggggggggggggtgggataaaattgccccccaaattttaattaagccgggcattaggaatcccccgaggggggggggggctcccc

SEQ ID NO: 117710 - DNA, 633 bp, Glycine max
  Clone ID: PAT_MRT3847_77300C.1
ttgggactggaggtacagtaacaggtgctggaaaatatctgaaagagcagaatcctgatataaaggttaggcatttaattttctcatggtgtgttaatctttctaatgttcccgctgtattctttatgattttttctttttttcttttaacttagctatatggcattgaaccagtagaaagtccaatactgtctggaggaaaacccggtgagtattgattttttatgtgttttcagggcaactttctctgattatcacacctgttagaatatctagaaaatatctcctaatcttattgttgtatcctagaatattttaaagtatattagatgatatcttatgagtggtttccaatttccatatttcatgatttgtttgcttgtttaattaggattaagagtctaatactagtacaaataagggatagttctttgtattttgtaacacattattactcaccatataccgatattatattttattatctagagttggtttggttctgtctacatgctttgaaatttgcttggagaatccaataatataaaacaaagttggtatattcaaaggtatataaaattcttcttacaagatcgttggggtttctcattcttacggaaactgttgttgaac

SEQ ID NO: 117711 - DNA, 316 bp, Glycine max
  Clone ID: PAT_MRT3847_77301C.1
gcaccagcggcaccagctttttcaccatgattttggcagccggaattgaattgattccggtaactattcatatacactatatatcatgtcatatctcattttcctaactccttgattttagtgagacactgcaacaatttcggcagagtttagtgaaccccttctctgagaggttcatgtggccaaagagctctcctcgaggactgacttggtcttgccaagatgatttagttttaaaggagacatattgtggattaccatcaaaggatgctggtttgaagctaaaaaaaaaaaaaaaaaaaaaaaaaaaaaaaaa

SEQ ID NO: 117712 - DNA, 292 bp, Glycine max
  Clone ID: PAT_MRT3847_77302C.1
ggctcgtgttcggatttgaggtgcagctatgacttctttgagccgtgtattagtagtttctgatactccaatttttggtggtggtgttgttcaaggagtcggtgcacaagcttgtgtaagaatctgggtttttcttcaatatgaagtactttgaggaaaaagtacaggctggtgaatgggtagaagttgagaagtacttaacagggtttaccaaagttgatgataatagatactccatgaaaatattctttgaaatcaggaagcaaaaatatctagtagcacttgatgggca

SEQ ID NO: 117713 - DNA, 203 bp, Glycine max
  unsure (1)..(203): unsure at all n locations
  Clone ID: PAT_MRT3847_77303C.1
ancttatcntttnatcattttntcttttcantttcttgctggcagctgttaatngcagnaaaaagtgttanattgtatagatgngagctnattntcatggtcccagncctacgtctgctganctcgaacttgnnanggattctnattatgatttaactaggttnaatctttggaagtngggagaaggcgaaanaagnnttcat

SEQ ID NO: 117714 - DNA, 250 bp, Glycine max
  Clone ID: PAT_MRT3847_77304C.1
ctcgggacccttcccctgtgatatctttcttaaaaattcattactgtgcacacaagtgtttttaaatctgatatgcgtctgatacacggtttaacaagcctcctagaccaagactagattcggatcggaagggaagttttgaagcagagtcagttcagagattataaggagtgatcaaacaagtcaagtctttgtgcttgtttcaaaaggcgttagaaagaattggtctcactttctcttagggccagat

SEQ ID NO: 117715 - DNA, 546 bp, Glycine max
  Clone ID: PAT_MRT3847_77305C.1
agaaccaccagtgagctcttccaattcaaaactccaacagacctgcttgtcacagtggaacttcaaattccaaatttggccgacagaactccgaaattcgacattttctaaatagctaaattaggttgtcgccaaaaggcataaaatatattggttagcctttgatcagtaaaccatacaactcaaagaagaataattaaaactatttgcgtatcctcctgtataaggttggcggactttgttctacaaaacaaaagccactaaaacaataaaataaagatttttggtaaaccttgtgaataaaaacaacaaaagtttttcttcaagtaccaaaaacactctctgagcacattcttgcttgggcaaaaagactcacatcacaacagccagtacttgtaattgttaacttacaaaagatgaatggaagaaggaccagacacagcagcagctctctgtgcccgatgtgcttcacatttataaagctctttcatttcttttttattgcgacgtgcctcatgtcgttcctccttcacagcagccttccgt

SEQ ID NO: 117716 - DNA, 397 bp, Glycine max
  Clone ID: PAT_MRT3847_77306C.1
tgttgaggaaccattctgcgtgctgatctatgggcaaatttttggacaactggcacttcaagagcaagagttgatttgcagcgcactcatcggattaaaggaatgatcaaaatgagggccacagacggtattcctgacaatacaggtatagcatagacctatgctatgaatagaaattttaggtggcgtgccaaatctgattttaacactatctgatctcaagactgagaatcacggaatcctgcttgcacaaaagcgaagactatgtcatttaatccaaacccacatgctgatgcaaggagcttggaattgatgaagcggaccggatcacattgagatatcacttgtggaaatggatggactgccaccccaatgcaggatgttcaggtcacaatgg

SEQ ID NO: 117717 - DNA, 362 bp, Glycine max
  Clone ID: PAT_MRT3847_77307C.1
tggacatcttggtggatagcccttactcggaccatatggcaccatcgaaataagttggtgttcgaaaatcagacttttaatgcaaccaaagtgatggatgatgtacttcttctactctggtcatggcttaaagctacggagaaggattttgtgtttcattttaatcactggtcttctaatctaaaagaagcttttgtgtaattaggaaagtagggcagttgttggggttaagtttctttaattatgtaaagcacatattgagtgtaccttggccctactgtagtttactcattgcgaaccagctatgtgcccaatccctctatgtatcttcagtaccactggtactgctattattaatatat

SEQ ID NO: 117718 - DNA, 764 bp, Glycine max
  unsure (1)..(764): unsure at all n locations
  Clone ID: PAT_MRT3847_77308C.1
ctgcgatattactctactccgcatttaatttctttgttagtggattcgcagcatctgatctttccaatttcggtgttatgggatttgggcagaaatttatccccgtaacaacgtattatgatggaaatcgattcataacaaatcttgatggggtgtggaagggatcaaacattttgggctggccacccctttgcttcttactgtagctgttatcgagctcagtgacattgcatttgcagttgactcaatacctgcagtttttggtgtaacacgggatccatttgtagtttttacgtctaatctttttgccattttgggtttaaggtcacttttcttaataatttctgagggtatgtcagagttgaagtacttacagccatccattgctgttgttctgggattcattggggttaagatgatcctcgactattttggactccatgtctcaacggaggcatctcttgcttttgtagcctcaagtcttaccattggagtggtattaagtttggttaacaagtctgactagcttagaaactcaattccaactcttcatgaattgagctctatatggttgcttacatttaccaagcaatttcatcatcctctctacccctacacaccccctccaccccaaaacaataaaaacccatgttttcttaagccaatagaggaataatttgtagcctgtcctataacttaagttgatgttcaatgctaaagcatactatataatgttcacttcacatannngtccaaaattaatt

SEQ ID NO: 117719 - DNA, 218 bp, Glycine max
  Clone ID: PAT_MRT3847_77309C.1
caccaccacactaacaccgggttgggggcatccgacgaatattgcacctacaatacccgacaattaattgcaggacccagactctgaagtcgtaccacctatcacctatagagagtttgcctcacagcttgtcgtacacacggtcataaatgttatctatgtgaaatatttattctttcacattttcccacaacttaccagccgcatgcataaactgt

SEQ ID NO: 117720 - DNA, 917 bp, Glycine max
  Clone ID: PAT_MRT3847_7730C.1
gtttgtgactttgtgttgctcgctccctactctgttatgctgctccttcctttctgatttcaaggtatttgcctgaattttctttctagaaggtgatttgaaacacccttttactttgattccaaggtaattgccccaattcaattgtagggtttaaaccctaaaaaggacccacggcgagaagcttccaactcctctctcacgcgcggacctccccctccggcgacttctgcaccgacggacgggtaaaggataaagggatgatctacacagcaattgacacattctacctcacagatgagcagctagcaatctcaccttctagaaaagatggcatagatgaagccactgagaccagccttagaatctatggttgtgatctcatccaagaaagtggcattttgctcagattgccacaagcagtcatggctactgggcaggttctattccatcgtttctattgtaagaagtcatttgcacggttcaatgtcaagaaagttgctgcaagctgtgtatggttggcttcaaaactggaggaaaaccctagaaaagccagacaagtaattattgtttttcaccggatggaatgcaggagggaggactttcccatggagcatttagacttgtattccaagaaatatgttgatttgaaaatggagttgagcagaacagaaagacatattttgaaagaaatgggattcatttgtcatgttgaacatcctcataagtttatatcaaattaccttgctaccctcgaaacacctccagaattgagacaggaagcttggaatctggctaatgatagtttgagaactacattgtgtggtcgatttaagagtgaggttgtggcttgtggaggtgtatatgctgctggtcgcaggttccaagtgccccttcctgagaattcaccggggagg

SEQ ID NO: 117721 - DNA, 150 bp, Glycine max
  Clone ID: PAT_MRT3847_77310C.1
aaaaaaaaccaaccatgccaaccatttctactgatcatacaagaagatcctacatctatagaaggagggtattttaaaccctatggaaccacctatgataccaacaacattactaacaaccattcttcactctaaaccatcaacttcata

SEQ ID NO: 117722 - DNA, 420 bp, Glycine max
  Clone ID: PAT_MRT3847_77311C.1
gtgtgttttttttttttttttttttttttttttttttttttatgttttttcatttttttttttttggaagggaaggttttgaaatgaaaagtacggataaaaaaaaaaaaaacggaagggggttggtgaaagaaaaaaaaaaaaaccttagaaattttgtgattagtataaagattgcggtaagaaaagaaaggactattcaccaaccggggggggggggggggaggaaaacccagaaaatggggctcttttttaggagtaaaaaattcactgtggtttgtgattgtaattgcccctggacatgggaggagaaaaaaaaaagaaaatggggggcctggaaaattaacgcgaagaaaaaaatattaggcttctttgagccctcccctttcacctttgaaggggaaggagaaacaaaaagcg

SEQ ID NO: 117723 - DNA, 316 bp, Glycine max
  Clone ID: PAT_MRT3847_77312C.1
ttctgcactctctctacttcgctctcgcgtgggccaactatctgatatcgcgaattcagttaaatggctacaaactccctgctcgactaacgctgctctttattctgagttgaatgaactgcttcgctattttcaggcacgtgttcataagctgactatccatcatgtgtgtgttgagtcatgaataattactgttgttatcgcacttgatggaatgagacgtatgacatctttagtctgggtccgctcatctggtgacctggatgactgatttcgctctacgggcgtgtcacttgctcactgcctgagatatctc

SEQ ID NO: 117724 - DNA, 526 bp, Glycine max
  Clone ID: PAT_MRT3847_77313C.1
ctgcttaaattattcaatattttaatctattattcactttttgtcatattatcctctggtaagcctttcaaatattcatttcctatctatatttatcatagtttctctttcatcaccctgtcaaaccttgtggctttgagtccctttgggggaatccattttctgtttccatttttttccctttgcttattttcctgtcattttttgtccatgtataagatggccataatgttattgtcatatattacttcctcagcacacttgtcttgtttatcttgcctctgctttatactactaactcatactttatttctccattgttattttggaaagatagtttttgtggataatttgttaatttctcagcattaacttgatggttcattggtcattgttggcatgaaattgctattagaagttatccaactatcaaagttttagtagagcaagcatttgagttttttgcctgccatgtaatatcaatgtaaggaagtttctgcaagtttaatgttctgatttatgtgac

SEQ ID NO: 117725 - DNA, 333 bp, Glycine max
  unsure (1)..(333): unsure at all n locations
  Clone ID: PAT_MRT3847_77314C.1
naanaaaannnaaagtcgcatgcacgcgtacgtaagcncggaattcggctcgaggaananctagaacagtntnagatnnaccancantgactcttgtacacttttgatgagtnttattatagagtnnatatnggtgagaactgagangncacanaantcatcancncacatnccctctnnctcttgtggnaagcttncaaaanannaattccantggnagtntcatgcnagattctnagaagatcaactcacagttttctccagggtnncannattcnacacaaanttccccntgaaaaaaaaagtntgtggttgcttatattttcaacattg

SEQ ID NO: 117726 - DNA, 1497 bp, Glycine max
  Clone ID: PAT_MRT3847_77315C.1
cggtccggaattcccgcacccgaccaattcggttcgaacaaatacctggcaaaggaagaggtcttgttgcatcacagcctctaaaagcaggtcaaatagtcctcactgaatcccctctcattctctactcagcttctcctctcctcacaccctcttcttcaccttacacttactgtgaccattgtttcagaatcttacctctcactcacaatagtactactgtcacgtgcccttcttgctcaaaccacagtttttgttcccagaagtgcttctcccttgcactcaaatcctcacactccacttgggtatgcaaagcactcatgtctcttcaacaacaccccaattcaacacttcttcaacaacacccccaagaacgccaagtccaagcccgtttaattgttgcttctcacaagctcttccttcacaatcacaccccttctgagctagacacttttctttctcttcatggcaccccagatgatgctattcttgatgctgctaactttcttcactcgctaatctcaccacttttcccacctcaggctcaactctctgtggatctcattgcacaacttcttgcaaaggacagactcaactcctttggcttaatggacccttattcccctgatggccctcagagatctattaaggcttatgctatttaccccaaagccacgttcttcaaccatgactgtgttcccaatgcatgcaggtttgactatgtggacagtactaatgatgattatgaacacaacagtactgacattgttattaggttgattgaggatgttgatgaggggaaagaggtttgcatcagctatttcaggattggtagggactattgtacaaggaaaaggatcttgatggaggattatgggtttacttgtggatgtgataggtgcaagattgaagctaattgggatggtgaagaaaacaacagtgaccttccacacgtgcggtttcttagcaagtatgtttgtgagaggaagaattgtgcgggaactatggctcctctgcctccaaaagatgatgtgccatctaatgttctggaatgtaacttctgtggtaattttaagattgatgctgcttaattggcctttaacacctatcagttattatatttcatctttggtagaaatatatatgttgaggttgctcttgtcttttagcattgcctagagaaagtgatattgcaattctgtattttactttgactctgagagtggagtccttgcatgttctcattcacacctcagtttggtggattttgcgtgcaatatggaagatgaattcatgttttttcagcaacaagctcagtttctgagtccagtgttgtttagtgatgttattggaattcagttcctcgttatgttttagtgtaatcttttcttaggtctccttattattattttttttttcaacagaacaatcaaatatgtgatttttctcagctacagcttatggactttgaaacccgggaatttatttcggtgaggg

SEQ ID NO: 117727 - DNA, 663 bp, Glycine max
  Clone ID: PAT_MRT3847_77316C.1
tattggaagatgctataaagtacgtgaaacaactgcaagaaagggtaaagactctggaggaacaagctgtggataaaacagttgaatcagcagtttttgtgaagagatctgttgtgtttgccggcgttgatagctcctcctccgacgaaaactccgaccaatcgctccccgaaatggaagcaagaatttctggtaaagaggtactaatcagaattcactgcgacaaaaacagtggaggagctgctgctatactaagggaattagagaagcattatctcacagttcagagtagcagcttcttgccctttgggaataacactcttgacataactattgttgctaagatgaacaacgactattgcttgacagcaaaggatctcataagaagcttaagtcagtgtttgaggcagctttgatagtgaataatagttaaccagttcaagaaattcactgatttagctacatttgatttgttgttgtgcatgcatgactataggaaaaatacttacaataagattttttttatctcagagctttctttttccctagtccatcatctggattttggagtataatatcaatgttctgcgactgcaactgccttgagtctgttagttatgctgtagacttcaagataatgccaagtgttttccctttttcctc

SEQ ID NO: 117728 - DNA, 782 bp, Glycine max
  Clone ID: PAT_MRT3847_77317C.1
cgatctcacacaacagctccaaccttcccttccaccatggcggaccaatacccaagcccggcccaagcccacagagccactgccccacccccctccctctcagccgcgtttctccaaaaactccaggaccgggcccccaactcaacccagctcgccggcatcttacccctcctcgtaaccgcctccgtcttcctcctcctgacgggcctaaccgtcgcaggggccgtcctgggcctcatatttttcctccccttaaccctcgttcctcgccccgtgcccggcccggcccccacccggcacctttctattcatcgtcaccgcagctttcttgtccgtgtgcggtttcggcgttgcactcgtggccgtgctgtctcacgtgtccgattacttcagaggcctccacccgcccggttcggaccgggttgactacgctcggagtcgcatttacgacaccgccagccacgtaaaagactacgccagagaatacggtggctatttgcagagtaaggtcaaagatgcagctcccggcgcgtgaggatgacccacccgattaagatcggatcgggtcatatccaccaacttacggtgtgcaactattgaaattccgtcaacttttttatttttttttttggtttcttgtgattctgtctgttcctcgatcgacttacggggttggttggttgctctgctgccgcgtgtattttgattttgctctgtttctgtcggttatcgtcgtcgttatgttttagaattctgaatgaaaaaatgtagttgtttgttac

SEQ ID NO: 117729 - DNA, 382 bp, Glycine max
  Clone ID: PAT_MRT3847_77318C.1
tacggcttgttagaagacaacagatgggttcggttgctatatatctacataaaggtatgggttcgggaattctattgaagggttcggttgctataagactgactgatgggttctgttgtgagaagacgacatatgggaacggctgctagaatacaacagaagggactctctttcttccatatgacaagaacagggttgttcttaaatctagtactgattatagacctgaagcatagggtgatattaatgcaggccttgtcttgatctgttcagttgtaaacgtgttctattttatagccacgcaaggttcacttcaacatacttactaggatttctgggaaatgattattcaatttgactgtccggtaattatcatgcttac

SEQ ID NO: 117730 - DNA, 121 bp, Glycine max
  Clone ID: PAT_MRT3847_77319C.1
gtccaatcctgcagctgactagctggaaatttaattgagatacctcacagactacttaatggacacaatttggcttcaaaggttctctcaacatggctgagcgatgaaggaccaagatatt

SEQ ID NO: 117731 - DNA, 421 bp, Glycine max
  Clone ID: PAT_MRT3847_7731C.1
cccccgcctgcagccaccccgccataaataactgtcgggacgacttgatcactccccggccgccccccttttttgggtgttttttaacaaaagcaactggcatgtttcacgcataaaggcggacagctctccacacaaagagcccaaataaaatcaatgactcatcactcttccctcatagtgctggccctgacatatattaaacactcaaaagccatgtaagcttgacaagtccatacttcacacaacagcaacaacagcaacaacagcacaggaggcataccaacttccaaccctggttccaaccaatgattgagccagcaataaagacgaggatcactcaccatcatagatgctggttgccagtattcacgggagaagccctcatgccctaggcctgggagtatgtgacctgcggagt

SEQ ID NO: 117732 - DNA, 121 bp, Glycine max
  unsure (1)..(121): unsure at all n locations
  Clone ID: PAT_MRT3847_77320C.1
tttcaagcacgaagaagagggtgtntattacgcacttttctgctctatgatgggcagttttgaatgaatagccttgtatagacagcaattcaaataccacgttttggacgaataaaaattc

SEQ ID NO: 117733 - DNA, 143 bp, Glycine max
  unsure (1)..(143): unsure at all n locations
  Clone ID: PAT_MRT3847_77321C.1
acctnaattagtatcacgcttgagctttgaagcactttctttatttccagaacatggacaagtgcttcacaactcaagcttgatactaatttttttggacatttaccttgctcgatgcactgaagaaggtaaccatgcagccg

SEQ ID NO: 117734 - DNA, 257 bp, Glycine max
  Clone ID: PAT_MRT3847_77322C.1
ggccggaattcccggggcgacccacgcgtccgcgcactcttgggcgtaacttgataacttagctattgtgggatggagcctataataagatgatatacccggcgccagcacaccttgtatgtgtcctcactctctgagcacaccacacccgctgtagtagatctgtatatataatacctcttgaggcactcctctatgacggggaaagagactttgagacgatgaaggacaaagctctgggagtagctgaagccgac

SEQ ID NO: 117735 - DNA, 453 bp, Glycine max
  Clone ID: PAT_MRT3847_77323C.1
aatgatggttctgaggatgtacttgatgctttgactaatgatccttgcatggtaaaatttctgttactttatattatatcactccgaggatagacttcttttactatggagattttcttcccagttttatttggaccttcatcactggatttaattcttgcacattatgtttctaaatcctgcatttagctgttacagtatttgaatttttgtcaccattgcatacttccttttttaaatttgtttgggtatcattaattcgcgctgtttggagacaaccaatctctatagctggttgacctaccaaaggcaccagtattatccgattttgaatgacctgaaacctggatagaaagtgatattctattttatgcactgttggaaatcttgggttcaggctagtgctacattagtaacatggagtttttaatacaggttggaattgaagcgtgg

SEQ ID NO: 117736 - DNA, 380 bp, Glycine max
  Clone ID: PAT_MRT3847_77324C.1
caaccagttagggactgaagccttcttaggaccatcaggaataccagattccccattcacattagcagaaaaagccacagtaggatgaattggggttcctgtgctaaaaataaagggtgcaccaattggttgttttgttgaagggaggccaagtccaagaaaccttccaaatgggggtgccacatgaccaggaatggtgatagaagggtcatgctggtgcccaaaaaaaaaaattggggggattgggggattacccacaccaggtgccactggaaaaacccaattattcattgaaaaactggaattatgaagacttttaggtgattggctttggcaggtacttttaacattaaaccttagggccaaattttatgggtgat

SEQ ID NO: 117737 - DNA, 164 bp, Glycine max
  unsure (1)..(164): unsure at all n locations
  Clone ID: PAT_MRT3847_77325C.1
tcctctagattcggccggggggggaaagctgttttatattnttttttgggataaagaaacggaaaattttaataactacgctggcctggggcccaactattggggaaagattttaaacggggaaaagataattaatcaggggcgatagccaaaaccctttcaga

SEQ ID NO: 117738 - DNA, 1172 bp, Glycine max
  Clone ID: PAT_MRT3847_77326C.1
tacggctgcgagaagacgacagaaggggaccctgcggtgtcgtccccgccagtgccgcgcacacagcatcagtgagccaagaacatgaagtaacgcgacaacatcagctgcttgtaatcacctttctgcttttctttctcatccttgtctctcctggctcttgctggcatagattgacttgaggatggaatacgtcagcccagaaggacttcgcttggatggtcgccgaccaatggagatgcgacaaattcgtgcagagattggtgctgtatccaaagcagatggttctgccattttcgagatgggtaataccaaagtcattgctgctgtttatggccctagagaggtgcaaaataggaatcaacaaataagtagccatgctctggttcggtgtgagtacagcatggctaattttagcactggagatcgcatgaggaaacctaagggcgacaggagatcaactgaaatttctctggttattcgacaaactatggaagcttgtatactgacacatttattgcctcgttcccagatagatatttatgtccaagttctccaagcagatggaggaactagatctgcttgtataaatgctgcaactttggcccttgccgatgctgggattcctatgcgtgatcttgtaacttcctgtagtgctggataccttaatagcacccctctgcttgatttgaactatgtagaagacagtgctggaggtcctgatgtaactctaggaattcttccgaagctggataaagtgacacttcttcagatggattctaaactaccaattgacattttggaaaatgttatgcaactggcaattgaaggctgcaaagcaatagctaactatattcgagaagttttactggagaacacaaagcaacttgagtatcgacgaggtgtataattttagagcagaagtaatatttcctatttgcatcatgacgcgatgattattattgtcgttggtcttgtttttccagatttataggttcattctttcagcatttgtgcatttctcattttggattagaattctcctgtatttacctgtaaacaattttgttttttgcatacggtgttgactaaagggaagtgaggggagaggttctaactttgtgcatgtttgaatttcacttgtgagagagtttaaagtttttttcctccct

SEQ ID NO: 117739 - DNA, 240 bp, Glycine max
  Clone ID: PAT_MRT3847_77327C.1
tagtcattgaaagatatcttctgcaaatatgcatatttaactgacgttgttataacttgtaccttccctcaaaaaaaaaaacactataacgaaaaagaacctattatcctccttcattgtatatattacatctataatgattaaattctaccgtttcacaaaatacaaaaataatcaaaataaaaatcatcattcttacatctctaatattcttaacagattcaattagttaaattttat

SEQ ID NO: 117740 - DNA, 349 bp, Glycine max
  Clone ID: PAT_MRT3847_77328C.1
cgccaaataaacaccctttctctacatttatattcaccaatacttacacattccggtcactattaatgtatttgcgtcactactaaattccacataaaaccttatccacaatttagaaattcaatttaattttactaccacaaaatatccttatcttctcacataaacatcaaccaacctcactctttttgtttatacaccaaccctcatcacagattataaataaaaactctattcaatctctcttaccaataattatattaatatcctacatctaatttattttatctacaacacttacccttcacactttttcaactcttactattaaacctctttatttacacac

SEQ ID NO: 117741 - DNA, 578 bp, Glycine max
  Clone ID: PAT_MRT3847_77329C.1
acattgctgaacacagccatccacacccaactcgaagaaactctcttgctggaaccacaaggaagaacaattcccttgttcctcctccaaccactcatcgtcaccaaaagaatactaattgttcctcaaagtccattgaagtgcaacaaagcatgaacttgaagaaagaggaagattttactgactggttggatgatgatagtgctcaatttgttgatggttggattccaagctcggatcttgagaaactgatagggcttgagtgccaacattttgcattagatggtggtttcacggatgattttccacacccttaatttgttcctttatgaaacaaatatgaatagcgaaaatttgtgatttaatttttcttttttaggacaatattgtagatcaggcctccctatagtccctaactccctatttaaaccttcgatcagtttcctgggtattttgaattgcagttgtgattatatcacgatttttacattgcggttaaactcgctgtaatttgcaatgctatggtgaaacctatacgagccttgatgttattgcaatttcaagcaaacacttctctt

SEQ ID NO: 117742 - DNA, 412 bp, Glycine max
  Clone ID: PAT_MRT3847_7732C.1
accagctggcaaggcgggatggcaatgaaacgagtccaataggcatggataaggaaagtgttaagaaaggtagctatatatacaggtagagagatagatagaagtaaggatgtagtaaggggtgtagcattaggcgctaccacgcagacagagatcaacatatgctagaccgctgtgatatagggagtgtagcgagccgtcacatcgtgtgcgttatatcgatcgcagcggaaatatgacaatcacaccagtaaaagttagaccccacttcggaacgcacattatgccaagagttgaggcgcacgcacgtacacaaaagtttaaataggccagggcgtagcatacagtaacacgcaaacatagacataaatatatgagacgcagccacattatgacgagaaaaacgaaaaat

SEQ ID NO: 117743 - DNA, 1121 bp, Glycine max
  Clone ID: PAT_MRT3847_77330C.1
tacggctgcgagaagacgacagaaggggtggcatgagtcaaaataatgcatttgaagagttgaggaaggctgagaccatgattactgcagaacaaccaagccctgtgtctgttcttgatgctgcattctataaggatgacccaccatctccagtgaaaaataaatcagacatctcaaaaaatttaggtgaagctctaagcactgatgaggatagtgaagagagctcagtggatcttcttcaagaaattgactggattgatgagaaactcttcaatttcaataacaatagggatcctgaccataaatatatagcgaaaatactgttagcatcaggtctgctcagtggccgcagctatagccagatatttcattcgccgggtcatttgattaatccaaagttgttctttgcacttgaacaaatgaagacaaagaggcctttgaacattgaaggcagtgccaagaagattcccaggaatattaaccctgagcaaatgcaaagaaaactcatatttgatgttgtcaatgacattttagttcaaaagctgatattggatagttcttctgcattgtggtgccaaccaaatgagttagcaggcacaacattaaaagggaagcagcttttggatgagctatgcacagaaattgatcagttgcaacctcaaaataggaatgtcagtttagttcatgaggaggagaatttgaagcatcaccaagcaatttggactaactgctgcaatgagatgccaaatattgtgttggatgttgaacgtttgatctttaaagatttgataactgaggttgtgagaggtgaagtagcaaaccatcctggtacacattgcaggcaactggtgttttacaagtaggaattttggctaagcagtttgaggagaaaaaaagtatattctagttctaggctttcatatttcacccttctaatctagctacacatgatatagtttgatgggtaataagctgcttaattggcagtttcacgtgttttgtataaattgttgcacatttatgtttatctttgttgtctttcttcatgtatttgtagtcaatgtttataaatacatgaataaatacacagataaacgtatatcagtatcgtttttcacagg

SEQ ID NO: 117744 - DNA, 870 bp, Glycine max
  Clone ID: PAT_MRT3847_77331C.1
gaaaaagaaactaatttcctttctgcacaatcaaattttagaggaaaacttcaaatatacacgaggctgttagaccaaactcttatgcagacaaaactttaacacgcacgcacaattgtgtgtgtggggtggggggtggtttgacagcatataccttgggtccaatcttatatgcattattgaataatagtatttttaacaacataattccctaacataccaaaataatggagcatcccaccaacacagattagtttgccccttgtcttcgacttaccttcacaatcacatccaaggtataaagtgcaagaaaggagccgaaatcatatttccacagccattaacattctccaggaggagaaggaaggtcagtagtgttgaaagaacagcttgtatcaactcgttgattttctgagtcttttctctgcaagactagcagtcttgttctgtggttcaagaacgagagcatgctggaaatcttttagagcctccttataacaaagtagtacttctctagcagttccacgtctcagatatgccttcacattcttcttatcatgtaatatggccatattgcagtcctcttcggcttcctgaaagcatcctaactctaggtaagcagctgcccggttgctgtagtaagtcgcatttgtcccattcaagttaatagcctcagtgtagtaatcaacagccttattccacagccttcctttaaaggccgcatttcccttctccttcaaaagctcagaagttcccatactaccatttgtatccggcagtggcaaagcataagcaacactaacttgctcctgaagagttgaatacatatccaaaaccgtattaagaagaaatttatcctcgagccgaatt

SEQ ID NO: 117745 - DNA, 339 bp, Glycine max
  Clone ID: PAT_MRT3847_77332C.1
gtattcacccaaactatcaaatgcaagagggctttccacaaaagattttgagaattcatctgcatacaagggaggtcactatacttgtaatcctttctataatagagattacacaccttatgccaaactgtttccttaccatatactccaccaaagtggctacttgagggcttaccaggtgtttacgccattctttaaactgccaaagattcctcacatggtccaaaggattcgaaaagcctcataaaactatcctcttccaaaatccacaatacctccccttttgcccactttcccgttgtttaccaacactaagaaacacttcccattgataatcct

SEQ ID NO: 117746 - DNA, 537 bp, Glycine max
  Clone ID: PAT_MRT3847_77333C.1
ttgtttttttatttcttcttttttgtttgatttttaggtaataaagttcttcggtttgtgctatacctgcattaagggcgaaacaagaagccaaaaataatccgggagggtatcagggcaataaaaaggaggattgcaaggaaggaattttataaccaaagaatcacgaaggaataggcatcatatgagcggacatgtggggcgggcggagggcatgagaaaaacaaggaatccctcgccccaaaaaagccacccattttaagaaaacacgtggatgggatatttaagggggggaggaaaagggaccttatgcaggccatgaatccctgccaaacacgccacgaaaggagatacatgtgatacataaccttgggcttaaaaataccaacataagaaaacccctattgcggaatcgaaaaaagcacgaaggcttttgcagctaattgtagcttaccttggcggtattagaagaaaccaaggagaaaaggtgcctagcgttggagaaaaaaaggaggaaaaaaacccccgtgaagggaa

SEQ ID NO: 117747 - DNA, 170 bp, Glycine max
  Clone ID: PAT_MRT3847_77334C.1
gtggcactagggtcaatcatccaataaattgatgcacctaagagtactatatgagaccccatacctgttactcaagatgcattctcagtaccacccacaccttgtagagaaagagagaatttatcaattaagtcatagggaaaattgaagaaaaccaatgtgacttcagt

SEQ ID NO: 117748 - DNA, 613 bp, Glycine max
  Clone ID: PAT_MRT3847_77335C.1
tacggctgcgagaagacgacagaagggctagcatttaatccttacaaaatggaggtgttcaatggagtgctcatagagaaattgaagaaagctggcatcatcactggggtgattgatgactttgatatgacattttcatggcattttgataaccggtgtaatgatggaattcactatggaagggctcctgcaaagatgaagtggcgagatggcaaaattggtcatcagtattttgtggatctcatgttagctcatgttctgctcaatgcactatgtgcaagatgaccttggagcttcagttggaagagaggaaacaatcagaaaagaaaaaacttgtctgcaaagtggatagggttggaaatgtaggcattccctgtagaataatgcataccatagcaggtgtttggataaaaaaaactatggaagtagcctcccctataaaattagattaagcattcttttgttcattgatttataagcactgagttgtgtatttatgagctgcatttatagattagcaggggatttatatatccctcaaaacacatttgtgatttgtctacggataataaagatcaaagtttatagtatatgcttgatttgccaatctccc

SEQ ID NO: 117749 - DNA, 218 bp, Glycine max
  Clone ID: PAT_MRT3847_77336C.1
gtgggttcagggagtgatcggtgcgcacttgatccttgataagtcgacttcatcatgatgatcatcaccgttgattgaagaacacgccgatgagaaacatcgccaccggaagggctgacaaggctactcacccgcacacgttgaaggctgagctgactgagtccatctccaccttgatcatcgtgttcaccagctcaggttactgcatcgtctacaac

SEQ ID NO: 117750 - DNA, 344 bp, Glycine max
  Clone ID: PAT_MRT3847_77337C.1
ggctcgagattcaaggacactgtttctcagcaacagagacacacggccttcaccggggcagcttgcaaccataaggttgttggtgcacacccatacgttacaaagaggataatggcctctcccagtgtctacgtggctaggttcttgctatacactgcaactgagcttccggcaacacagttacacctaggccagagatgagcatttggaccgatcagcggagactgaggaacacatatgcgtattggacgactgcggcgttccaataatatacaccatagtcaggctcggccatataatcaacaacacagggcttaaggggtggctcgggaagaacacaaacc

SEQ ID NO: 117751 - DNA, 186 bp, Glycine max
  Clone ID: PAT_MRT3847_77338C.1
cgatctatattcgtacgcgtggtttcattttttaattccggaccgcttcctcctttcttgccagccttccataattgcgatttttaagagcttgtcatattgaaggctatagcggcatacagggtgacagtgtgaaaggctaacaacgccacacagcatcccaccacggaggcccggagggttaac

SEQ ID NO: 117752 - DNA, 451 bp, Glycine max
  Clone ID: PAT_MRT3847_77339C.1
cagtgcaacaataggaacgttaatattattaataataatcatgatatgtccttaaatgttaatgattatgatattgacaccccagagaataatcttgcattggacaaggatttctggtcggaagttttgtcatctgataattccggcgtgacaagcggatttccgacccttgactatgatcagtttcaaccaatgtctcctctagtgacagaagaaggggtccttatagattgttcgtcgagtacgtgcgacgatggcatggatttttggtgcaatgtttactcgagagctgaggaatttacccagttactggaattgtgatgttagctattgttgttgttcttaaatagagaccaagtccttcattcaacatgtcgttgttcttctgctgtttggacttgaattaattcccttgttagaaattaataaatcgtgtacattgatgattgcc

SEQ ID NO: 117753 - DNA, 832 bp, Glycine max
  Clone ID: PAT_MRT3847_7733C.1
taggcaccatcaagattcaagcacatagttatcatcaattccccagctagttttggccacgcctgcatcttcttctgctttaagctatggcctctaacttcagcttgagaactttgatgatatttgcccttgcattttctctcgtcctgcaaggcactcttggagggatagaatgtgagagtctgagccatgacacatgctcattcgccgtgacatctgctggcaaacgatgtgtgcttgagaagcaggtgaagaggactggtgaggaagcatacacatgcaggacatcagagattgaagctgataaactgaaggaccacattgaaactgaacaatgcatcaaggcttgtggtttggacagaaagtcccttggaatctcatcagactctcttcttcaatctagcttcacgcaaaagctctgctcccctatctgctaccagtgttgcccaaacgttgttgacttatacttcaatctggcagctggtgaaggtgtgtttcttcccaagttgtgtgaagcacaaggtctaaatgctcgtcgaggaatggctgaactgaaaagctctggtatcgtggcaccgggacctgtgcacggtgtgcagttcacagctactcctccgattaaccctgtggagctcacaattgaacctgccgttgccccatcaccaaactaaagtcaagtctagtttttttagaacacgcaaaagaaattgagaaaagcgtgtattaaacaacttagcatatactagtatacagatgagagtggcatatatactatattttgtttgtaataatgaagttgcacctaaatatggtttgtggtacaatatgtggc

SEQ ID NO: 117754 - DNA, 358 bp, Glycine max
  Clone ID: PAT_MRT3847_77340C.1
gggaaaaccaaacaaaaggggatcttgggcttggttcaaagagcatttcatttaacatgtttgatctgggcttctttagttgtagtggggggagtagaaagaagcaccaaacctttaatcctagcagggaaaactaaaaagctttttacataagttgttaatccaaacgagcccaattttttgcaacatgtatatttttctttcgggccaaacgatgagcagttttgtcagccataatgccctttatcattttaaactttttgtaatgcaccttaaggggctcttcctgctggtttgctagcttcttttcgtcttttaaaaacagattgtcaaggaattttacttctgcagcatgttt

SEQ ID NO: 117755 - DNA, 146 bp, Glycine max
  Clone ID: PAT_MRT3847_77341C.1
tatcaagggaatcggatcaggagatctgttgggaagtcgtgtatttgtgttcacactaaggggagatattaagaatattgctcagggtgatactgtaattgattatgcttatatgatactcattgaaataggcaacaagatggtag

SEQ ID NO: 117756 - DNA, 241 bp, Glycine max
  unsure (1)..(241): unsure at all n locations
  Clone ID: PAT_MRT3847_77342C.1
ttcagcttggttccggtgggcggccgctncttttcattctttttttttttttttttttagccgaaagaaacccagcttttcctctttagtggggggtaatgggcacattctccaaacaatacaaggcttatttcacccaaattggttttatattacaaaaacctaccggatgcccccttcctgcttactggtcccacccactcgaacaaaaggtctatagagataaaaatggcttccattc

SEQ ID NO: 117757 - DNA, 1641 bp, Glycine max
  Clone ID: PAT_MRT3847_77343C.1
ctcgagccgttgtttttctatttcctttttaaaattatggtccggggtcgatgatttctctacactttttcgaagcttgaggaggaagagtgcctcggtattggcgatgaaaaattaagactcaatcatggcgttcatgatgaataagcggggcactacttttttgaccaaagaaaggcgagaaaaataaaagaagcaaagggtggaaataaaagttgtccctttgacaagcacttcttagctcgctatctctccacttttctttattgctccctccctcctctctcccacacgcttcttcttatcctcgttcccaaattttcccttcaattccatttcacatcctaccttcaacttccactattagaaagtgcacgtatgcaacaatgcttctttaccagccactcaaagaagaggtagaaaccaccatcatgatgaagggcgacaacgttttggatctgaaaacattaattgaggagcttgagtcatcaacaattgaagtcccttccgttttcatctgcccaatttcacttgagccaatgcaagacccggtgaccctttgcacgggacaaacctacgaccgttccaacatcctcaaatggttctccctcggtcacaacacgtgtcccacgacaatgcaagagctttgggatgattctgtcacaccaaacaccactctttaccacttcatactctcttggttctcgcagaagtatttggtcatgaagaagaagctcgaggacgtgcaaggcacagccttggagctcttggacacgttaaagaagaaggtaaagggtcaaaatatagttcgagctctcaaaaaacttcgccaactcgttgattcccacgtgtccacgaggaaaaccgttgaggaaaataatggttcttctttgatttcttcattgttgggtcctttcacttcccacgctgttgggtccgaagctattgggattctcgtgaatttggagttgggttcggagttgaagagaaatctcatgcaccccgcgaaggtgtcgttgttggttgacatcatgaacgagggaacaattcagacaaagatgaattgtgccaaattgattcaaacgttgttggtcgaaggtaacccttccgagacagttgttttatcaagtttgagtcttttggttggggtgttgaggttagtgagagataagaaacacccaactagtgttttaaccggactcatattactcaaaattgtatgttcacgtgaaccggttagaagctcgattataagcataggagcggtgcctcaattgattcagcttttacccactttgaataacgagtgtttggagatagcacttcatattcttgaggttttgtcaacacttcctgaaggtagattggctttgaaagagtgtccaaatattattcccaatgtggtcaagttgttgatgagagtttcggagagttgcacacaatttgcattgtcgatattgtgggctatttacaagcttgccccggaggaatgtgcttcgaaagctgtgttgaagcagaaatctaccgagtttttgaaaatgtgtagtctagattactctactagtatttttatttccaaatgtatgcttactgcaacaatacaatgaaattcaaaaccaaaacaaatttgttcataaacac

SEQ ID NO: 117758 - DNA, 491 bp, Glycine max
  Clone ID: PAT_MRT3847_77344C.1
atgaacaaatttgttttggttttgaatttcattgtattgttgcagtaagcatacacttggaaatcaaaatactagtagagtaatctaggctgcacattttcaaaaactcggtagatttctgctttaacaccgggttgcaaccactctgaattactagcagtagcttcgccgccaaccctgcctccacagctttcgaagcacattcctctggggcaagcttgtaaatagcccacaatatcgacaatgcaaattgtgtgcaactctctgaaactctcatcaacaacttgaccacattgggaataatatttggacactctttcaaagccattctcccttcaggaagtgttgacaaaacctcaagaatatgaagtgctatctccaaacactcattattcaaagtgggtaaaagctgaatcaattgaggcaccgctcctatgcttataattgagcctctaacggattcacgcgaagatacaattttgagtaatatg

SEQ ID NO: 117759 - DNA, 407 bp, Glycine max
  unsure (1)..(407): unsure at all n locations
  Clone ID: PAT_MRT3847_77345C.1
ttcaataataccaatactgcactgctgttttacgatatttggagctaaattacaacaaaattgatcctgttataaggctttagaagaaaagggcaaatcaatcaaacacccttattctttttgcgcttgagcggactttttgatccctgacaaaaacgtataaatgtcatacagactacagatatagtattacaaagtaacgactaatgacactctagcgttatctttagatcagtgcaacattgtatttgtacttatattttataagcatccaaacacaatttttcctgtgcaccgactccttcatcattaaagattcaaaattggcataacaggttaaatcgatggctaaaggttaatcataccacagcatatatagccttaagagggnctccatcgtttcttaa

SEQ ID NO: 117760 - DNA, 368 bp, Glycine max
  Clone ID: PAT_MRT3847_77346C.1
aattgatccttaatataatgaggttcatgctcagatcggaacagacttgcacaaaatggctgttggtgatggtgacactcgtaagggttacatgctgtaacgaaagagttctcaggacctaatgggacttgcaaacaccacagcctgaggagcctatatgcggatgagaaatcggactattctccgacggactgcactaatagagcaaagaatgactctgtctatactgagaggagctaaggcatgaaaaacttggctgacgcagatgccatacgctggaattccaatgtagcgatatcctgtgctatgaatagtttttttagggggcgagacaactcttatctacacactatgtgctgtcaagactg

SEQ ID NO: 117761 - DNA, 700 bp, Glycine max
  Clone ID: PAT_MRT3847_77347C.1
ccacgcgtccgccgaagatgcttttccggaggttctatcgggcagatattgctgctgtgactgttgtggtacctgatgacgtttcagaggatgttactcatcaaaaggttgctgcctcgcttcctatgcaatctgagtgcattgtggatgataaagtcagctacgagggtgatgttaaagaagacaagaacaatgagccacgagaagaggatgaaccatatgattcaaatttgaaactggaaggaagtatcgacacatgtgacaaatctgatgatgcagatgctcctatggaggttgcccaccaagatactgttgtggtggctgatgatgtttttgatcaagatgttgctggcacccttcctatgtcacctgttaatgatgctctaaaggaatttgttgagtgcaacactgatgatgatcaaggcatcaataagggtgatgacaaccaagatatgaacagtgaaactgaaaatttgaatctggctgatggcaacatggcacatgaagattaccagcatccttttaatgatgatgaaaaatctgctgatgaacgtgactctatgacaggttctgaagggggttttgttgagctcgagtcaatttctcattctgctgctatcgaggtctgcactgaatcttcattgccagatgtagaagcagaggagaatacttcgggaaactgggaagctgaagaatctga

SEQ ID NO: 117762 - DNA, 1159 bp, Glycine max
  Clone ID: PAT_MRT3847_77348C.1
cggtccggattcccgggtcgacccacgcgtccggtccattattaggcccagtctcaggttgcaattgctaattttgatgcccgaaacgcaactacgtatgaggaaatatcaagtcaaaaatacagtggaagcagaatttatgtgattcaacaagtgcaatgcaacaaacagcataatgaccaacatcataacatagatcaaaccctcttatcttgaaaacaatggccacctctcagggtgctaacagttacagaaatgccagaacctctctcaaacctcacgtcaagtcaaagcctacgcaacaacgccgtaatagcaccggctccgtcaacggcaaggaacacgctgctgttcccggaagagttagagtggctgttagattgcggccacggaatgcagaggaatcagtggcggatgctgactttgctgactgtgttgaactgcagccagagctcaagaggttgaaacttcggaaaaacaattgggatgctgatacttatgaatttgatgaggttctcaccgaattttcatcacaaaaacgtgtttatgaagttgtggccaggcctgttgtggagagtgtactggatggctacaatggaacaattatggcatatgggcagactggtactggtaagacttatactcttggacgacttggagaggaagacaatgctgcacgtggaataatggtgcgggccatggaggatattcttgcagatgtttctttggaaactgattcagtctcaatctcttatttgcagctttatatggagactatacaagatctgcttgaccctgccaatgataacataaccatcgtagaagatcccaaaactggtgatgtttcattacctggagctagcctagttgacattagggacaagcagagttttgtagaactattaagattaggagaggctcaccgctttgctgcaaatacaaaactgaatacagaatcttctcgaagtcatgctattctgatggtgcatgtaaagagatccgtgaaaggaagagatgcggctctttcaagtgaaaatggcaatcattcacacgtggttaaatcaataaagccgcctcttgttcggaaaggcaagttggttgttgtagatcttgctggttcagagcgaattgacaagtcaggaagtgaaggacatacatt

SEQ ID NO: 117763 - DNA, 1122 bp, Glycine max
  Clone ID: PAT_MRT3847_77349C.1
ggttagcccctgcctatgctgttgctggaaatattgctccatattttgaattcggctcgagctttaacaaggattgcttagttgttcaatggtcaggagacaatccgaatagtgtggcaggtttgaccctaaatattccaggagatctcgccatcagccttggcactagtgatactgtatttatgatcactaaagatcctaatccaggattagagggacatgtcttccccaatccagttgatgcagaaggttacatggtaatgctggtatacaaaaatggatcccttacccgagaagatgtgcgcaactgttatgcaaacaaatcttgggatgttttcaataaatttttgcagcaaacacagcctttaaatggtggaaagttaggtttctactacaaggagcatgaaattctacctcctcttccagttggtttccaccgctatatcatagaaaatttctcagacacaccagatggactgaaggaacaggaaatggaggagtttgatcctccatctgaggtccgggcattaattgagggtcaatttctctcaatgcgggctcatgctgaaagatttggaatgccttctcccccaaagagaattatagctactggtggagcatcagcgaatcattgcatccttagtgcaatagcttcaatttttggctgtgatgtctatacagttcaaagacctgattcagcttcacttggagctgcattgagagctgctcatggctggctctgcaacaagaagggcgggtttttaccgatatctgatatgtacgtggacaaattggagaaaacgtccctgagctgcaaactttcagtgagtgctggagatcatgaattggtttccaagtatgccaccctcatgaaaaagagaattgaaatagagaatcggctcgttcaaaagcttggacgcttttgaaacatctaacctgctgtttctctctgaattcttacattgagttggctgtgaaatgtgaataaaataaagtgaatcagagaagattaagcattactttcaagtttgagttagaaatttttttttactaatattgctgccagaagggacggatcaatgacacatgccctcctaaaatccaatctttttttatgcctcc

SEQ ID NO: 117764 - DNA, 446 bp, Glycine max
  Clone ID: PAT_MRT3847_7734C.1
ggttacctaccagaaattgctaaattacccaccatggctacattaattcttactttgacttcaaggaacctatcatgtccccaaaataccaaggtgcaacacggaaggaatccccccgccgtcactttcaccccattcgctgacaactgagaaaggttgggcgggactctatttgacgagtcgccttgttgaagtgactcctgcttcaaacccaacaaaggccgcccttactgaccctcgccgctccgcgaatagtccagactggcccacccagacacttccgtgcagaccatgcaacagaacagtttcgccgtgccccaccgatatcgccccacgcgatgccaaaaacactggcactccttttcccttgggccgcgcttggaagaaagagccagggcccccggctgctgggaaccctgaggaggatgcgcaaatgataacatcta

SEQ ID NO: 117765 - DNA, 354 bp, Glycine max
  Clone ID: PAT_MRT3847_77350C.1
aaaaagactaaaataaaattttttcattgtcaaaaaaattaaacccattttttgatcttattttggcccatcagggggccccctcccaaagtactattgaggctggggtttttaaaggggcaaccgttattgtgcttaaagacgggcccaaaaagtgttcccaatttttgttgcttttgcataccttggtctttaaccgtccggggtaccgcggaatgggcctcatgttttttccccccccaagcttcaaaatttttccccaatgcccatatatcccggggccccttagttttgacctcatgacaatgctggcatttgggtgcttacagttgaccatttggggggggtttgaat

SEQ ID NO: 117766 - DNA, 382 bp, Glycine max
  Clone ID: PAT_MRT3847_77351C.1
gaggcatcttcacaatctccactcgttctttttcaccgcccacctactctagcttacgggggcgaccacctcagccgcggggggcgtcttctcaacgctcacctttcaccggatccactacccgtctttctctcccgccacgccgcctccgtcacagccttcgtcaacatcggcaggctcaagatagacacccagctcctctcccacctcccttccctccagcttctcgtctgcaccagcgtcgtcaccgatcacgtcgaccttgccgaatgcaagcgccgcggcatcgcccgcaccaatgctggcgacgccttctccgatgacttgtctgattgtgccttctgattgctgtagagcgttctccgtttattccggccggaga

SEQ ID NO: 117767 - DNA, 1191 bp, Glycine max
  Clone ID: PAT_MRT3847_77352C.1
tggatcctctagagcggccgcttttttttttttttttttttttttttttttgcgcaagctattgcatctactttattttaatttcaggtaatagaagccacaccctaaagttcactagaatgagatccaaattccttaattggctcagcagcgtgtgacagttattgtaaatttccggatacatgtgttcaatatctacagataacaaaagttcccttaatttcaaaataacatcaagattgcttgtaattttcatgatcacaacttgaagtgtaacagtgcagaagttccactgccacttgtataacgatgcgccatgtaatcttttaaagaaatgtctctgtatactggtggatgttcttcagataacaattctttgattggaccaaagactcttgatatacctgttctgaaaaaggatgcaaccgaaattctaggaccttgatcctttgctaaaactctatgttgaacactaatgaacttgtcattagtcatgagctgcataatatccccaatgttcactactagagccccatgcatgggaggtacatcaatccattgactgtcatgaagaacttgaaggccaccaatctggtcttgcaaaagtattgttatggtgttaccatctgagtgcttggtatttcccattgttattcaggctcaggacatgctgggtaatagtgacagagaagaagttgcccttcagcacaatccatttctttaaggtaaaagcgattaaggccaagagcctctgacagtaactcaaacaaagcataagcaagagccattattttctttgagtattcattcacaatatctctgcaagtgtgccaactcatcaagaacaaagaagtatcagattagagggtcctcattttctgcaagagaactcaactaaaattggaaataaagacattacatctgaaagactaaatccaatgtgttacatttcatcctaaaatcaattggcttagaatagaagaataggcaatgcacaatggtgagctagtagttttaagattatgttagatttcatcttaaaactaattagcattagttaaagttgcctacaaggtatataagtatcatctgaagtattgaagtagatgatgcgagactctccaacataataaaaaatttcagttgtggaagatattttagaaaaatcgaacgcgtggtcggacgcgtggg

SEQ ID NO: 117768 - DNA, 949 bp, Glycine max
  Clone ID: PAT_MRT3847_77353C.1
ccacgcgtccgtagggctgcgagaagacgacagaagggggcctccaatctattcactgtctaggaaaactccaatgaaaacattcttcattctctgttccatatactcactcttcaatccttgtgttttgaacacttcatacttacttccattgctatgatttggtgcatagaaagcctctaaatatggcagccacaagcacggataagttggaggcaggaacagtttcaagttatgacaggaaaagtgaaatcaaggcatttgatgattcaaagactggtgtccaaggactggtagaaaatggtgtaacaaaagttccacttatgttctatagtgaaaactctaatctcaatgatggcgtaaccggtgcatcatattcaaagatcagcatccccataattgacctcacaggcatccatgatgatcctattttgagagatcatgttgtgggaaaagttagatatgcatgtgagaagtggggcttctttcaggttataaatcatggaattccaactcatgttttggatgagatgatcaaaggaacttgcaggtttcaccaacaagatgcaaaggtgaggaaagagtactacactcgcgaagtaagccgaaaagttgcttatctttccaattatactctttttgaagacccttctgctgattggagggatacacttgcatttttccttggcacctcatccacccgaagctgaagaatttcctgcagtttgtagagatattgtgaatgaatactcaaagaaaataatggctcttgcttatgctttgtttgagttactgtcagaggctcttggccttaatcgcttttaccttaaagaaatggattgtgctgaagggcaacttcttctctgtcactattacccagcatgtcctgagcctgaataacaatgggacataccaagcactcagatggtaacaccataacaatactttt

SEQ ID NO: 117769 - DNA, 683 bp, Glycine max
  Clone ID: PAT_MRT3847_77354C.1
gtcccatccaacacttgtctgttttcccttctttccgtttccgggatttcggtttctctccctattttatccccagaaaatggaagttcgccggcgagtcctccgtcccgctcccgccggcgaacctttgaagcccaaacaggaccctaactcccaacagcagcagcagccacagcaatcgtacctcaccaacgccgtgttcttcgggctgttcttctcggtggcgtacttcctcctccaccgatggcgcgagaagatccgcacctcaactccccttcaggccgtcacgctctccgagatggccgccatcgtctccctcatcgcctccgtcgtctacctcatggccttcttcggcattaccttcatcctccacccattccttaattcccgttcttctcctgacgatgacatcgacctcgacattcccaaattacctgtccccactccctgctccgctgcccttcctccaaaactccctcctcccccactccctcaccacgacgaggacatcgtcctcgccgtcgtgtccggctccatcccctcctactcgctggaatcgcggctcggcgattcccaccgagccgcgtcaattcggcgcgaggcggtggagcgtatcaccgggaggtctatccaaggccttcccgcggaaggctttgattatgactccattctagggcagtgct

SEQ ID NO: 117770 - DNA, 1326 bp, Glycine max
  unsure (1)..(1326): unsure at all n locations
  Clone ID: PAT_MRT3847_77355C.1
ctctagccgttttaggaaaaagtgagatatgcttcaactaaataaaaacaaaaaatgatccttatcaagtcactttattgaatagtagtttcaatgatttagtttccctataattatacgtagggcatcctgagaaacaaacaagcatgcctccaatctattcactgtctaggaaaactccaatgaaaaaattcttcattctctgttcgatatactcactcttcaatccttgtgttttgaacacttcatacttacttccattactatgatttggtgcatagaaagcctctaaatatggcagccacaagcacagataagttggaggcaggaaaagtgaaatcaaggcatttgatgattcaaagactggtgtccaaggactggtagaaaatggtgtaacaaaagttccacttatgttctattgtgaaaactctaatctcaatgatggtgtaaccaatgcatcaaattcaaagatcagcatccccataattgacctcacaggcatccatgatgatcctattntgagagatcatgttgtgggaaaagttagatatgcatgtgagaagtggggcttctttcaggttataaatcatggaattccaactcaggttttggatgagatgatcaaaggaacttgcaggtgtcaccaaccagatgcagcttgcaaatgtacaatctcacttggaaaagttgagccctggcatttatcatttgaatgttatggctaaatatgcatataggtcatatatattagcatataattcacactccatgaaagatatattcaatgttccccgccttgatttacaggctgttgctgcttcattctgtttctcaaaccccccgaaggtgaacctgaacatagacagcagtgcttcaaagcataggaagaaaatacgcaaagtagaaggaaaaattaataaaggaaatttgtgacgtcttttagcaacagacaataatgtcacggctgtgcagtggtgtgatccccacaccacccccataaagttttggtaggaaccccaattttatatgaagagagatggatttgtaacttcatcaaacaaccttggttattagaagcatcagaaattttaaattagaatgggttatgcgcatttttgaactgtaatattcaacatgatttgtaagcttattttttagaatgggttatgcctatcccatgctacaatttgtaagcttatttttttgttattgttttgtgttcaacgtgtggtctaattctttgtcgtttgtgttagtttttttggtttattcttttggtaaaaaaaaaaaaaaaaaaaaaaaaaaaaaagcggccgctctagagga

SEQ ID NO: 117771 - DNA, 346 bp, Glycine max
  Clone ID: PAT_MRT3847_77356C.1
ctctagggcttgagagatcccgctgctgtacccatcatcaatgaccttactacgattttgggctctatatctaagcccatggcagcttgacatgtagtggataacactgcccattcctatgggtatcacatcctagaacatgtcgtccatgctagaccaaccattgccataggatcaatagtagtgcaacatgatgtgacttacaccgacttgtcatgacagcctctcagaactcgtagaatctacggctaatgcagatgatctttcatcagcaaatgctgaccatattgcccacgatctcttcaacctgcgtcaaagctatgacagagaagaccattccacagat

SEQ ID NO: 117772 - DNA, 304 bp, Glycine max
  Clone ID: PAT_MRT3847_77357C.1
gccgccgcaggcccaggccccgcatgccatgtgggccacctccgcccagcctccgactcagcaggagcccgccagcgccaacaaggtccaaaccctctggattagggatcaggagtactgggatgacgaaaactatatctatacctgcttagctcacaccggcgaggttacatcgagtaaagagattctaaacaagcgaactagtcaatctgaaggttgtgggtagattgagtttaataagcatgctggagctgagagaatactacatacgtataatggggcaattatgccaaatgggaggcag

SEQ ID NO: 117773 - DNA, 309 bp, Glycine max
  Clone ID: PAT_MRT3847_77358C.1
cgtagcgtatgatcaggtccagtaacgtacaaatcacatacggttccacacagtcataaaggcgttgatgttaggggacatcattttgatctattaccaattgatggcggtggaaatctgtctcctgtaaaaggacttagccttcaaatggttcaattgcgtcttgctagtcgttctcaatcatatgcagtcctaaaaccatcacagtgagctatacggaggactgatcccgttgtcttacagcaatgcgtacagccactccacatttagagtttactttcaccaacgagttaccaatcgatgtggtat

SEQ ID NO: 117774 - DNA, 643 bp, Glycine max
  Clone ID: PAT_MRT3847_77359C.1
attttcctttagattggaagaaagagctatcaagcggaaggagtttttcccgctgctgcggctcgagattctagccaaggaagcagagaaaaccaacctacaagctgaaatcaaacgaaaaccaagaggcagagatcaggctattgaggaagagtatggcattcaaagcaactccaatgccaagtttctataaggaaccacctcccaaagttgagctgaagaagataccaacaacacgcgcaaaatccccaaagcttggaaggcacaaagaatctgctatgaacaacaattcaggagaagacaagacttgctccattccacgtgggaaacaacagcagaatgattcaaacaaggttaagggtcataaagatatggtttcaaagaaaccaatccggaaaacccaagccaaggtgaagtctcaggaaaatgtaacgccagaaaacaaagaacaatgccaagatacacatgttaacaattctgaatgcaaaaatgacatggagttacaatctgaaacaggtcatgcaccaaatagtacactgcttctaaattcaactacacctgagcttttgtcatatgaggttactgttggagtgtagatttatatcaccggacttgataattatgtaagattagagctctatgt

SEQ ID NO: 117775 - DNA, 393 bp, Glycine max
  Clone ID: PAT_MRT3847_7735C.1
gtaagttaggaattaggttcgaggatgcattttttttatcttgtattactatcgatgagaggggatttactggccgtgagtatgtaaagactggccacctgacggctaggattgtcgggcatatgtttgtcatagatcttgaggagctttaaacatgtaggccttatttgttcgataggaaattaggaaggagacagtgataaaatgccatgggcctcaatgttagaacaaacctgttgaagagcatgaagtccctagattagttttggtataataaattcgtagtgcgggccgtgcaaagatcatatagacagtcttattactggttgaggcaaaatgccaaagtgtctgatatagatttatctttttcatgcacatcggggtgggaagaag

SEQ ID NO: 117776 - DNA, 524 bp, Glycine max
  Clone ID: PAT_MRT3847_77360C.1
aaaaaaaagggccgggggcaatttaagagggaatatgtaaaccagggcctaacttaaccagggaccctaaaactcacataaaaaaaggaaatgcaacccgggcagcagctaaaaaagtcaaaaggactcaggagtgggcccttcagcaaaaaaggacaacattaaaatgggggaaaatatttaaaccttttaataaaaggggtacatgcccctaccactcctgtttttaaaaaaggggccccgaaaggggccccaaatcaaaattgaaaaaaaaatgaaaaaaaaaaaaaggggggggccccgcgggaaaaataaagggggaaaaaaaaaaaaaggccctttaaatttaaccagtttaaaggccccaaattaagggaacataggcgaaactaaccctcgaaaaaaagcattaagcggggggaaaattcagcaagcggcccggccattaaaatttagccattttcaatacccacatgagccaaaatgggcgaaaacaaagcctcgaaaaaaagcaggggcaattt

SEQ ID NO: 117777 - DNA, 411 bp, Glycine max
  Clone ID: PAT_MRT3847_77361C.1
ggccgccctttttttttttttttttttttttttttttttttttttttttttttttttttttttttttttttttttaaaacaaaagcccttttaattggccaaaccaaagggaaatattggtttttttaggggaaaaggccaaaacaattttttccatcccaaacgggcccaaaaccaaaatccctgggaaaataaaaaaaatttttttttttttttaagggggttttaatgggcacaaacccaaagaggaatttctttcccgggggcaagaaattaggtttaacaatcaaaaaccagggggggggtggaaacccccaccccctcttaatgaaatctttattggaaagaaaaaccttggtatttgaaccggattattctatgggaagggggggatacttcttgggggggttt

SEQ ID NO: 117778 - DNA, 387 bp, Glycine max
  Clone ID: PAT_MRT3847_77362C.1
gtttcttctgagggttgtagtagttactttgcattccttaatagctatatatataacgtgaaatgcgtcaggtttggcatcccgtccagaaaagttcaattattggctttgaaaagttaaattacatgtttggttttgtttttcgatcaactaattaagatgcaatacacgtcctgattacaattttgaaagctctaatttgagtaaacgcttatttttcttataattttggataaatcatgatttagaaaccataatatataaattattaaataaaatgattgttaagcttaaaataaatctgataagaagacacttgtttaattaccgttgtctagaaaataagttttattgaagaggtatgacaccaaaaatattttttttaat

SEQ ID NO: 117779 - DNA, 211 bp, Glycine max
  Clone ID: PAT_MRT3847_77363C.1
tgacgtctagccaagaagtggactatacactgtcggtgactttatgacaaataacgaggatctacatgtggtgaaacccacaacatctgtggatgaagctctggagattcttgttgaatacacgagaactggtcttcccgcgattgatgataactgcgaactggttggcgttgttgcagattatgatctgatagcactgaactctatatca

SEQ ID NO: 117780 - DNA, 228 bp, Glycine max
  Clone ID: PAT_MRT3847_77364C.1
tgtgacatgacactttctgaataattgacttgatatgtttagactttatatatatgctaaatattaattttggtcttttctattttcatcttttacatcttagtcttttttaaaatttaaaattaactatccacaagtaaaaagtatttgacagtacacatctcatgtttaatacaaattcaacactccatatcgcagcagttcaaaaaaaaaaaaagggcggccgcc

SEQ ID NO: 117781 - DNA, 1095 bp, Glycine max
  Clone ID: PAT_MRT3847_77365C.1
aattcggctcgagaaatacgacaacacgaatccgttgtttgttcaaaccgaaacgacaaggcagtaaatcgctttccctttctttctctgagaaggcgtcgtaacagaacacgacgattccccaaggaagtgggcaaaaattgaagatagggatcagtgacagagagagataacaaacgaggtgaaatccctcacgttgaattgttctttcactccacttccctttttttgtgaatcccttcgaaattttcctttttttttttttgtataattgacgtgggttttggtcctgttgctatgctaccgttctgattttcgattttcttgaaaaaaatgaattttagggattttactgagtaatggtaattgtagtctctacatgcatccattcaatattttgttgagaaaaaaatgttattcgatattgtgtttaaagtagtgaaattgcatatttgaattactggtaagtaatacactgttacatcgtatatgtgcatgtaaaatataaaaacgtaggctttgtagtggatactctaaaaatgaaggaaagtgttgcttaaagaaaccctcgcatcagttctaataaaggaaagtatatgaaggtcactgctgcggaagattcagaatgagaccttaccaaattgttaagatgctttggatcattgggcatgatgtatattttacttacatgacaggatcttagttgccaactcaaattacaaaatttctcaaaaatcttaccatgtaattgttcttaagaacttggaatgtagtcttgagaaagggaaattattaggaggataaaagcatgctgcccagctaatttccgaaaggatggaagaagaaaataaggaagtaccctctatcttgctttacatcaatcattgcttatgtgtaagaactgtgtgctgtgtgctgtgtgcatttatattgtaattgatcgggctcctcatatagcagatagtttggcttcatccaatgttgatacatagtatgggtgctaatagttctctaagctttgtgggagtcagagttgtactggttaaatatgtgttgaatgtttactgtttagggtttgaattttactgcttttag

SEQ ID NO: 117782 - DNA, 259 bp, Glycine max
  Clone ID: PAT_MRT3847_77366C.1
gattttgctgagagtagttatctactgaaacttagatctgtgtatactaatttggaaagtccaaaaggtttgtacatacagtttttccttaactgttttttgttagcaaacatagattcaacagaaagatgagtgatattgcatttgagaaattgaatgcgagtagtttttatgacttctaaaaaaaaaaaaaaaaaaataaaaaaaaaaaaaaaaaaaaaaaaaaaaaaaaaaaaaaaaaaaaaaaaaaaaaaaaaaa

SEQ ID NO: 117783 - DNA, 360 bp, Glycine max
  Clone ID: PAT_MRT3847_77367C.1
ttttattttagtataatacgaggaaaaaaaaaggggggggttatacacaaaatagaagacatacaatgggatactagctaattgagctaattaaaaaaaagctaaaaaatttttatcttattagccagatttttaattagtcaataaaactataaatgttgggaaacaatagcatggtttatgaacattgagaatactttcttctttttacgagcatcatagatacttaataagattatacacagaaaattatattgtccattgagtgtaaagtaaaagattcttattttattaatactttatttagacatataagatataaaaaaaaggataggagtatttgaattaaacattaatata

SEQ ID NO: 117784 - DNA, 137 bp, Glycine max
  unsure (1)..(137): unsure at all n locations
  Clone ID: PAT_MRT3847_77368C.1
tgactntttctcanttttccgctgccattttnatntctttcnttctcctcactctccaccaccncggcgnatcnactcagcntccctattcctgcgactcgtntccaantcacnctactacccntttgcaacacnng

SEQ ID NO: 117785 - DNA, 655 bp, Glycine max
  Clone ID: PAT_MRT3847_77369C.1
ggctcgagcggctcgagcgcgagcggcgccctttttttttttttttttaaatgtaaagtgggggaattgagcttggattataatgcgaatgccattaataaaaaaaagaatgggaaatacaacagcctaaggtaatataacctctagaaatggaacacacagaaagaaacaaacaaataaaacactcagttttctatacaagggatgaagactttcactgtgagaaacattggctacaaaactgatattactcactagcagaccctactgctgtgcggtattctgtttctgaaattgatctaatgccatttgaatcaggggttatgtcttcctccatatcttcatgtggaggaaagccccgtacacggccgagtatccattgatcgataaccccgcaatcgattgcatacttgatggaatgttccaggtatcctttatcagttaacaaatcaggttgaactgtcaacattcgcatgagagcagcaacaatgccatctccagttgctgacatatcacaagtgaatggggtaattggggcctcctccatcccaagaacagcaccatcgagctcttttgtgtagtaatgtattttggaagttccattagtcacaaataaaaccttaagattttcatgccaaagtggggaaaccacttc

SEQ ID NO: 117786 - DNA, 337 bp, Glycine max
  Clone ID: PAT_MRT3847_7736C.1
tgtttatattttgttggagatctcgtctttgaaggttctaatatgactacttgctactttaaatgtacagtctatttcttcatagcatttggaaatttggctgatgacaccatctattttgaggcttttccccacaagctggtgcagtttggagtgtatcatgaaaaagttgtgttgaaatattcacaagaggaatttctttcatgatggtcaacttaagtgcgttccgctactactctgttggctgatgggtgcccaatattgtttgctatggtgtcatgatatatcaatgtctacattaccaggggattttgttatttgcttatatctttttttc

SEQ ID NO: 117787 - DNA, 221 bp, Glycine max
  unsure (1)..(221): unsure at all n locations
  Clone ID: PAT_MRT3847_77370C.1
agtgagtggacgtttgaagtttgaagtttgaagtttaaacatagagaaacgaaattgaatgcaacccaacaaaacacattaactcccatttccattcaatcaacgagaatagngattgggggatgaaaagattcttgctaacctcggagatcatgagggatagaatgaccggagtggacatggagcacgagggaggtggatgcgccggtggcgggaatcgg

SEQ ID NO: 117788 - DNA, 376 bp, Glycine max
  Clone ID: PAT_MRT3847_77371C.1
aaccttcccttgggtcattgacgacatcataggggaatggggtaactgtctccaaacgttggcccctcgaccatgaaacctggtttggggaccctgaggctggcctcttggtgctgatctttctcaccccttggccttggcctcagcccttgagctgatcattctttgatccttcctaaagccggacctcctcagtgcaccttggatgggataacaatgctccacaccgcacgtggaattcttttcctttatgattctggtggcggaccggcttgttgacttcgaaccccaacaggcacgtttgggtggccattcccaaaacccgaaccggggggcgggcccttgggtaaaccctgtgggttgccattttcccctt

SEQ ID NO: 117789 - DNA, 629 bp, Glycine max
  Clone ID: PAT_MRT3847_77372C.1
ttccaaattcggccatatctccttctttacttagttcaactcaacccaaggagataattaatatggctctgggaagaggcagtgcagtggttctactactttgcttcttggtgcttcagtctgagatggctcgtgctgccacttatagagttggagattctaggggttggacctttaacaccgttacctggccccaaggaaaacgctttagggcaggtgacacacttgcgttcaattatagtcctggggctcacaatgtggtggcggtgagcaaggctgggtatgatagctgcaagacaccaagaggagccaaagtgtatcggtcagggaaggatcagatcagacttgctaggggacaaaactacttcatctgcaattacgttggtcactgcgagtctgggatgaaaattgccatcaacgctgcatgactttcttctctactcatacgcatctattctaacgcaaactgcacccctttagtgggaatcaacttgtctcctttaaataaatggatagatataggacgtgtgtgttatttaagaaaaagggtagctatgtgtgctctcctatgtatgtaacttattatctattgatcctccagaataaatgtcggcagtatatcataaaaa

SEQ ID NO: 117790 - DNA, 207 bp, Glycine max
  unsure (1)..(207): unsure at all n locations
  Clone ID: PAT_MRT3847_77373C.1
cccacgcntcccatacagtcgtcaatacagtaccgacaggagtacagaacggaaatatacccttgaagggtatcaacccctttttgtaccccacttcgcctgcatttacgtctccgttggaagacatctactgaacctcctttaaccatactgggccttcacgtggcattgtttcaatacatggctgtaccttggctgaaacatgtc

SEQ ID NO: 117791 - DNA, 443 bp, Glycine max
  Clone ID: PAT_MRT3847_77374C.1
aaccgcgtggaatggaccggaaatttgaaacggaacacatattctgaacaagcggggggaaaaccgggaaataccaggcgggaaccaaagggggagcaaaaaaattcccagggggggagatgttcagaaggggggcaaaccgggaaaaaaagggcaaacggggaaaaagaaaaacccggcaaaaaaaccaaaaaaactaccggccgaaaatgaaaagggtaaagcggggggggcctaagagggaaaacaccaaaaaaaaatggcttggcgcacccggccccttttggaggagggaaacccggggggcggctaaaaaaagaaaagaaacaggcggggggagagggggtttagaaatagggcccaaaggggggctttttttaaagatgcggcagagggaccaaagggggggtaccccccccgccgtacccaggaaaaaaggaaaa

SEQ ID NO: 117792 - DNA, 480 bp, Glycine max
  Clone ID: PAT_MRT3847_77375C.1
gaaacataaagcaaattcttataaaagaatattttgggatctgaacttgaaacacactttctttcttgaaagatttaacattctaatttagggcctaaattaaaaaaagcaacaattccattttgtcctacaagagattgatttcagcattataatttaataataaacgggggcataaaaactgaattgcggagcataattggggtatttttttacacattcataaattaaattaaaggtggtggggtgttaaaaactaaatgggggctaatttatatattagaaaccaaaatgatgattgatcatgtgaaaacattaattttatgtgttaaaaggagggcaaatcggttaaaaggggggatatattgtaatcgcctataaattactgagcgctatgtcttggcggcccaccaaagacgcattgttaatgggccgcccccaaaaagaaaaagcctcgctttgtgttcctatggggggaag

SEQ ID NO: 117793 - DNA, 530 bp, Glycine max
  Clone ID: PAT_MRT3847_77376C.1
gaattcggcaccagattttggtgggactggttgtagattgtgcaaggggagaaatcgagctttttgttatagccgatcatggttttctgacttctctctcaaagcatgctctttccagtttcaaccaatttatgttgaaatttaatatttccccactttgttgggcaaaggtttttgtaatattatagtggtggctgaaatgaacaaaaggttcccgccgatgatttcaattgagcagactttttatgccttgtgactagtatggaaacatgttcattatgtttgaattctatatatttagtgagagattaacatagaccaagggcaaaggttatcttattacgttgcacaacagggcgtgtgccacattattatcaaataatgttttcactcatactttccctttttttcttaattatacgagtttagaaaggaaaaaaaaagctagaaaaaaattaaaatagaggttcataaaataattaaataattttattggggggggcccccctttttgttgttgttccccccgg

SEQ ID NO: 117794 - DNA, 449 bp, Glycine max
  Clone ID: PAT_MRT3847_77377C.1
aaaccttgaaattttaagcattgtaattgggggcccctaatggtcaaccatatgaccggactcctatggggctaagaaagttgggtcaggggatgatgatgcggcaacagcatggggttacaagaaaacaaaggcttgaaaaaaaaaaaacctaaaaaaaaccctttatgactcaagctgaacatcccagatgccctggattttggcatcctttggagcctttgctcccaaaatagtggcggacggttgaaaactttggaacacgccgataacctccccggtcttaggctggggcttggggaccctgtaggggaatccccccttggaggatgcggcccttttggggcgtcctttggcaagtgcccccccatatcgttttgcaccaacaggtgaaggcactgcttgtgaataacctgtgaaggcaccttttcccttggggtccaagaaag

SEQ ID NO: 117795 - DNA, 1047 bp, Glycine max
  Clone ID: PAT_MRT3847_77378C.1
cacaagattgagggggcccctaaccaaacctaatagcttcagaggatccatcatgcccactcaccatgcttccgccgccatttttggtattataggtaacatgatttctgtgatggtgtacttggctccggtgccaacgttttaccagatatacaaaaagaaatgcacggacggtttccactcgctgccatacttgttgtcattaatgagttctatgctttggttatactacgccttcctcaaaattcatgacggcgttgttccccttattacgatcaactcgatcggatgtgtcatagagctcatctacattctcacctacattaagtatgcgcacaaggatgcaaggaacttaacctatacgctattcgcggccatgaatattgccttcttgaccttggtcctttcctcgcattttgctctacatggttcccaccgtgtcaaagtcattggatggatttgtgacgccgtttcgctcagtgtctttgcatcacctctaagcattatggcaaaagttattagaacaaagagtgtacagtttatgcccttctatttgtcatttttcctcacactgaatgccataacgtggtttgtatatggtttatctatccaagacaaatgcatttatgttccaaatgtgggggggtttggactggggctagttcagatggtgctatatggcatttacaggaacggcggtgagagtgagaaggagcaagctttagctgaaggagcgataaacattgttgttgtgaaccccttggggcctgctgaagtcttcaatcgcagaggaagtggatgatgacaaagtcaaagaagggcttgtagttgatcaagagaaggatgccaaggattaattgccaagtgtcattgtcatattttaattgcttacggccgccagatcatactctgcttttcctctatgtttgttgcttgctgcctaagttagccatcattatgtgtgtcagttactacctcaatggagtatcaattatttaattgttatctataagaccattttcaacatgggtttctccatgagtttct

SEQ ID NO: 117796 - DNA, 495 bp, Glycine max
  Clone ID: PAT_MRT3847_77379C.1
ggcttggaacctttgggctgatttagtgcttgcatggtcgagaagatgatacgaggggaaggccgcctctacccttgaatataacacttgccgggcaaggcgaagaggaaaaaagagaaaaaagccgcgtagcgaggaatgtgaagatgtgagacagggaacaggtgatagcgtgcccggtcgtttttagtaactgaatcttccgcgtcatctgtattctacctctctctctcactgcactcataatcctaatcaatcaatccccacgaagttgaaggtgctagcgaactgatttttaatattagacgcggctgaaaacgctttcgaaagagaatttatgtcctaagagtctactaatactaagccgactgagatcggagagaacgagtgttctacggagtcgccgagggaaaggtccgccgaccgtggtcggaaggacgaaacggaaatctctcgtagagtcgccgcgaagaacaaagggagggacaacgccat

SEQ ID NO: 117797 - DNA, 729 bp, Glycine max
  unsure (1)..(729): unsure at all n locations
  Clone ID: PAT_MRT3847_7737C.1
cgacccagcgtccgcccacgcgttcgttttacatctatcaacaatgattttcatatacataagcactgacatgattaaggaagcacaaaaatggtgatacgcatgtcgaaggcttacgatgcaggtgaactgatcttggtctcgaagcacatcagaaccctagattccctcctccgcttccacgcgctgacggttacaagcgggcactccacgaaccttttcatggcctcaaagctgatatctctatacgattctctgaacaacgatcccagttcatgttccacactcttccactctcttccctccaaagacacattcctctacaactccttcctcaaatccctcttctcccgctccctcttccctcgcgtcctctccctcttctcccacatgcgcgcctccaacctctcccccaaccacttcaccctacccatcgtcgtctccgccgccgcgcacctcacgctcctcccccacggcgcatcactccacgccctcgcttccaaaaccggcctcttccattcttccgcttccttcgtttcactctactcgcgctgtggccgaatggaacttgcacgcaaggtgttcgatgaaatttccaaagggacgtggttgcttggactgcactcatcatncggcacgtgcacaacgnggagcctgagaagggtttaagtgtttccgtcacgtgcatggggttgttggagatgatgagaaagccaatgctaaaacgtg

SEQ ID NO: 117798 - DNA, 1103 bp, Glycine max
  Clone ID: PAT_MRT3847_77380C.1
actcgagccgagtcggctcccacgagattgaggcgggggttgatttggaagaaacccagctaaggtaattcctcgcaacccctaactaaaccttcaaaggatcatcatgggcagtcacaatgctttggctgccactttcggaatattaggtaacatcatttctgtgatggtgtacttggctccggtgccaacgttttaccggatatacaaaaagaaatgcacggacggtttccactcgctgccatacttgttgtcattaatgagttctatgctttggttatactacgccttcctcaaaattcatgacggcgttgttccccttattacgatcaactcgatcggatgtgtcatagagctcatctacattctcacctacattaaatatgcgcacaaggatgcaaggaacttaacctataccctatttgcggcgatgaatattggcttcttggccttggtcctttcctcgcgttttgctctaaatggttcccaccgggtcaaagtcattggatggatttgtgacgccgtttcactcagtgtctttgcatcacctctaagcattatggcaaaagtgattagaacaaagagtgtacagtttatgcccttctatttgtcatttttcctcacactgaatgccataacgtggtttgtatatggtttgtctatgcaagacaaatgcatttatattccaaatgtgggagggtttgcactggggctagttcagatggtgctatatggcatttacaggaagggcagtgagagtgagaaggagcaaggtttaggtgaaggagtgataaacattgttgttgtgaacccgttgggacctgctgaagtcttcccaattgcagtggatgataacaaagtcaaagatcttgttgttgttgatgatgtcactgtgagtcaacaagagaaagagaaaaacgtggaagccaaggatgattgcccagtgtgatgtttttagttacggccgccaggatcatactctgcttttcctctatgttacgttatgtgtgtcgatcagttaccaattaattgttctctataacatcaaacctaccatcatcttaatgcattacgcctagctactactttacttcaaactttaa

SEQ ID NO: 117799 - DNA, 602 bp, Glycine max
  Clone ID: PAT_MRT3847_77381C.1
ggctcgaggtggaggtggagaaggatatgggtttctacgagacaccggtggttcctcacatgggcaggtgcacgtgcacactacattctctgcgcttaaacttgcatgaagagacatgtactctctgcttggatgcacactaacatactgactattggcaattctgacccacattcacgtgcaactggatctaatctctcgaacaggacctcaatatgctgacagatctgaattatgctcagggatatcaacgccataatgagatcagatctgaaaccctcagaagttcatggtagggtatgctagtgttcatgttatcagaagcatcaagcatgccgatcgcggagtggagcgtactcaatgggaatatgcggatgatcacagacattgaatttccacttaaaggagtatttcacgtctggggaatgcacgtgcagaactggagatgatactcctttaccgtgatgcttatgatgatcagcgacatgtgtatcatgtatatctggctgactacgacatcattaaggaggcatatgatgctgttgatctcgggatcaatcagtatgatacagaccagtctgcaagatacgtgaataatactc

SEQ ID NO: 117800 - DNA, 269 bp, Glycine max
  Clone ID: PAT_MRT3847_77382C.1
cagagactaacaggaggatgtcgctgcctttgccttccaagataaggatgaccgctctatccagcgcagtttcttcagagcaaaggaccattgggaccacaccagctccttttgcatggcgtaatccttcaaataatcccactttgtaagcttaaagaaagttcatggacctaccaacattttacaagcatggggaattcgaactaaaactcaaaaaccaccagcttttgaggtgtgtctaacatgagaaactttattttttcaacagc

SEQ ID NO: 117801 - DNA, 520 bp, Glycine max
  Clone ID: PAT_MRT3847_77383C.1
gcgaacacttactatgcaagtatcaccctcaccgcgggcccggaatattgagtaagagatcagattgctgataaagatcggtctgaacacttcaaaatctgataagaacatttggtattcactgtgggatcgagataaattttcttcgacacaaccaacataatcgattaactaacttaacagtgtcatcagcaagaaatcaagggggagtattttatctaccttcaaagtagttgttcgcaatacattcttttattaaattttatcttggcatcaattgtcgaccttaatattttcgttcaaattcatagtttacaagcaggaaccttaattcagacttgcatagtagagatgctaatcacgcctgagaccaaaatgggcaagcatcctgtgcaacactatcaagaattcggcctatatattgaagcgaatgatgtcgctgcaccaccaaaatgcaaaggaacccataatgaccctatcaaggcagaagttaaatatgcggaacgatggcatgacgagt

SEQ ID NO: 117802 - DNA, 421 bp, Glycine max
  Clone ID: PAT_MRT3847_77384C.1
gcaaaaccattgaatcttggacacacaagggtaatcctaacaaatgccggcaccccggtgatgtatattgaaccaggggacaaaaaacgattcaagccccatcctggggacccaaatccacgggggagataaaaaaacgcgctcttaacacaccccatataaaaaggcttcctacacatcgtgggatacactatattcgaaccatggctacgattgttggaaactctccaggggtgacaaaaacttttgggggggagatgatctttccgggattctgttaggggagattacatgcccctaaagcttgcaaacgggggaggacacctgtgttttggtgcccccacccattacttccctaaattagatacccaccgcggactgttaatccagcagcaataccaatgggctggcccgttacgta

SEQ ID NO: 117803 - DNA, 545 bp, Glycine max
  Clone ID: PAT_MRT3847_77385C.1
gagagagagagagaggatctgtttactgagaggaatgcgctattgatgtgcggagaggatcctaagtacttggtgaatatgctcggaggcacctatggggcattcatgaagttgctccaagagcaagaggaaaagcgggacctactacaagctatttcaaagagagatcacagagcaatatgacttgcctctctacgatggatttgccatcaataaaagctgctaccatgcacatgcctatgacccattgatgcttgagctaattgctcttattatcaaattgcactccatgcactagatgatccttgtcatttgctttagccaccacattattgagcatgcattgggaggaaaagagtgtcggtctgccaatggttgcaacattggggtttaagttattaacgatttataatctttacctttgggtccatgatatcttaagctctcatgaaaggtgcccattgacatatgtcaccggactgatatcctagaactgcttccataagcacatgtgattgcttgatcccaaagtgactggagatgac

SEQ ID NO: 117804 - DNA, 266 bp, Glycine max
  Clone ID: PAT_MRT3847_77386C.1
aatgaaagggggacgatgcttcgaatgatgaaacaaaggctttagctgagatgacggctgggtgtggacaatttcatgaaaatgctgccagagactatagtcttccagctgtggatctttaccacactggagattttaaccaggccaccatctatcattcaaaggccttggatataaaagagagggagctagggcttggccaccctggaactataaaaacctattgggatctttccgccttttattatcgcctgcaacacattgag

SEQ ID NO: 117805 - DNA, 191 bp, Glycine max
  Clone ID: PAT_MRT3847_77387C.1
tacggctgcgagaagacgacagaaggggatgcctccaaatatttacctcttcagctgtgattagactggcccagtcgttgtctttctcaacgcgaagggcttacactatgcattgggcactgtggcgcttctgtgttcacttgatgctacttgctagcgacagctatgcaccttttgatatggcgacaact

SEQ ID NO: 117806 - DNA, 534 bp, Glycine max
  Clone ID: PAT_MRT3847_77388C.1
aaaaaaaaaaaattttttattttttaaaaaaaaaaaaaaaaaaaaaaataaaataataaaagataaaaaaagtttaaatagttgggtggtccacttaataacttctctgcttgtggcggcgtcctttttctttcttgtttttttttatcctccacttcggttcattaatttgccttggtgttaaccacgttttgcttggggaaaccctggtttttccgaatttactgtgtttccatttcgtctccttttcttacggtttggaaaaagggaccagctttgttttgtttcagtttccccccttttttggatcttttttcgcgttgggtacggtccttttaccggcgctttaagcgccgcttatttggtggtttcccgttagcttttcctcttttttttgccttttttttttttgcccggtttttttgtttttctttccctttatgttctcgctttttttcgcttttttttttcccagttttggcttgttatatttggggtgcttttctttttttggggggcacttttttttggttt

SEQ ID NO: 117807 - DNA, 668 bp, Glycine max
  Clone ID: PAT_MRT3847_77389C.1
ttacggctgcgagaagacgacagaagggccagggaaaaaaaaaaaaaaaacatgacgtttacccagaaaaatgtaaagtggaaattgtagacaagcaaagttacctaacaaatgaggattataccctcttttaatgtgatggaactgaaattttcccagccatgaaaaccttgggaacccacatggccacaaaactcattaaaatcatgtgggacaaacatatgaaaggacatgagttacaatgtcagactttgtagtttaaaatctcttttcattttctcatcctttagatctagcctcagtgctctgaagatcctctgtcaaaaagatccaaaacccttttcttatccattgtcttgtttcctttcatcactcaaatcttagaccaactctgccatatcgagtcttttatgtgcttttacagctaagtctgttgctgaaaattggcacaactcgaagctcccaagtgcatgcagctcaggttcaaggtacatagaaccaacacgccatcagtattctctgaacttgcatgaaagctacttgcttttctcatcccaaggtacactctacagttagtttggcccataccaacttggtttttagctaaaggttgttcttatcctatgatgtctgttttttcctaggtacatactatataacaacttcag

SEQ ID NO: 117808 - DNA, 497 bp, Glycine max
  Clone ID: PAT_MRT3847_7738C.1
aattgggcgtttcaaataggaatatgttgtttgtcgcaaacaaaaaattggatcgaacttctgccatgaccaacagattatatattgaaaccaattctattctgatgttcatcaagtgaagttgaatcaaacaaacttgagtgtgattttaattttaaaggtgtttgaaagggagaaaacccttagtgagttcaatatttacataactctccctcttaacacaacatgaaaggcaatccttggtatcttaatgtaacctaattttctcaaccttattttttcttggtgattttcccccttatttataataattttcatataatagtttgataaatgggtattgcttattgggggcttctttgggaaaaaaatttattaccttacaaacattttttaatgttccctctttttttctttgtaatcatggatactaggattaatttctcaccaacattgattgttcgaggattaaggcaattgtgacaacattatcgtta

SEQ ID NO: 117809 - DNA, 253 bp, Glycine max
  Clone ID: PAT_MRT3847_77390C.1
tatcagtccacccgcaagaagctcgagacgcgtcgtctggcttacgatacttctctggccaagatgcagaagacgaagaaggaagacttccgcatggaagaggaactacgcgcccaaaaggccaaatacgagagaccagcgaagaggtcttcaggaggatgcaggacatcaaggagtcagaagtcgacatggtccaggacctgaccgctttcctcgaggcagagctcagttactacgaccgctgtcgtgagat

SEQ ID NO: 117810 - DNA, 449 bp, Glycine max
  Clone ID: PAT_MRT3847_77391C.1
ggtaaggttatgaaggattcaagagtcgtgttaagttctttagcattcttgatccaccaagaatttgtaactatctttctgaagtctatgatgctggatttcttgggcctattttcaaggtattattcctgatgtttctgtttcatgttaaaatcatatcaagtactttctgcttgtagatttatgtacttcaaacctatttaataatgtaaataggagttagagttaaggtgtacagggatctgacaatcttctaacataatattaatggaactaagtgatagttgatttcttgttattctatttttacttttatggtatttgcatggacatttttcagttggaagtatatttctttctcattcagtaaaatatatttcaggttaccatggaagaacttccaaatgaggctttcacaaacacctcagcagataagtgctgggaatcag

SEQ ID NO: 117811 - DNA, 473 bp, Glycine max
  Clone ID: PAT_MRT3847_77392C.1
cgatctataaccgtacgcgtggtttttcttgtttattttggaccgtttcccggattcgtaccagctttcctatattgatttttatagtagcttgttatattgaaggacatatcggcatacagggctacagtgtgagaggcgtagaactccacacagcatcccacccgacatcccagagggaaacaccaggggtgccgactgagcgaactaacgaacaaactaacacttgttctaactgtcgcactgacagccagcaaaccagaagtgccagctgcccaaatgaatccatcaatgagccggccgacgcggagagcgagttggccgccagggcgcgcgagagggtaacctgtgatacaatgagaaggacaaactccttctgctcctgacccagagacagtggcagaaagcgtttcaacctgccgtgcaagatggggcgagaaggcggatagaaagtgtgtaacagggggacataa

SEQ ID NO: 117812 - DNA, 248 bp, Glycine max
  Clone ID: PAT_MRT3847_77393C.1
gaagatgaaagggaacgaaaggaatggaaggaggtggtgtcgttgacgctgctgaggtggccaggccgtggacgaggatgggcccacgcgccgaggtatgtcgcaagggcccccaagtttgtcgggcccaaggtgggcgcacggcgcattcaccagcccaggtaggcgcaggccgcggcattcccgacgagctagagctgtgtacataagcgcagatgacttcagagccttccttctttacattttcc

SEQ ID NO: 117813 - DNA, 170 bp, Glycine max
  Clone ID: PAT_MRT3847_77394C.1
tacggctgcgagagaacacagaaggggagaaggattatgacacatactaccatatgcatgtgcgtgctgtgcttgacaacatgtgggcccagaattacagcatatctgaggttgacaagcttaaagccaattttattgctagacagatcatacatggaatcgcaacctgg

SEQ ID NO: 117814 - DNA, 499 bp, Glycine max
  Clone ID: PAT_MRT3847_77395C.1
ggaccaaaaactagcccccttattttcaatggacccaaatcccctttataacaaacttattagagttttttcaaggccatatttttgggcccccttcaaaacccatcaaagttaaagattttatttaacaaatttttgatcttggggggacccccaaaaaacttttgggtgaaccaaattgatacaaactcaaccccggtttaaaaaatcattttttgatgggctaaaaaaagaattttctgacccattcgttagaaaacccaaatcaaggttggggaatctggggggggtcctttttgagggggacaaagggggggttgttgacacaccctttcccccaacaaaattctttttttccacctttttttttagttctaggcaggcctgatctcccttgtaaaaaaaactttttacaataacaaacagtggaaaggggtttaccaggttgtcttaaaacgccccggctaaaaagcacccgttgggtttcttaacaagcccc

SEQ ID NO: 117815 - DNA, 198 bp, Glycine max
  Clone ID: PAT_MRT3847_77396C.1
aaaacgtcggaaaagccaaatgtgtggtctacgaaatttaagtgtgaaaggttcgggagttgtttttacgcacggggaaggtattagcaccccacgcgtccacacaaaggacgacagcctttaatcaaatgtgcaatatcatgtcttcaaaaaaaaaaaaaaaaaaaaaaaaaaaaaaaaaaaaaaaaaaaaaaaaaa

SEQ ID NO: 117816 - DNA, 151 bp, Glycine max
  Clone ID: PAT_MRT3847_77397C.1
tcggtttccctttccaccaccccttttcttcccttcactgtaaaaaatgcttctactagaattccttcttgcacattattctcttacaggaaggcacgtaattaccaggattccaagaagggtggcttggcctgtgttggttcttcttaaa

SEQ ID NO: 117817 - DNA, 177 bp, Glycine max
  unsure (1)..(177): unsure at all n locations
  Clone ID: PAT_MRT3847_77398C.1
gggggtcgagggtctcactcatgaaacncctcctgcattttatttttgtacttttgatgggtgcagggagtggacccccgaaggtgggggagtaacaaaatatttattaagaggcagtttgtatgaacttcttcacattccccatggtgggtcatcacttattggaaagggtcgttt

SEQ ID NO: 117818 - DNA, 421 bp, Glycine max
  Clone ID: PAT_MRT3847_77399C.1
gggggggaaaggcaaaaaacaaaaagggcaaaactcaaaaaaccaaccccaaaaagggagaggactgggggaaaaaaacaaagggttttttttttaacatcttgaaaaacttgggggggttaaaggggaggttttttatatcaaaaccagaagcaaatcaaggggtcaacccctgggcaggagcaggcttggaaaaattcggcccacttgcttcggggggtttgggggacccaaaaaggaccggggcaaaaggaacccccacttttcggttcggagggttttcggcccccccaaatttttttttggggttggggccaacttccccagcccccttaaaaaccttactaaaaggccccgttccccaggaggccccaaaaagcacaaagggattttttattagggcagagcccgcataacccac

SEQ ID NO: 117819 - DNA, 879 bp, Glycine max
  Clone ID: PAT_MRT3847_7739C.1
ccacgcgtccgcgttttttagaaagagtgtgttgtttttttcttttcctgaatctacatctcggtggacttctctctcttctcgttctaatctataatggggttgtcctttggcaagcttttctcaaaactctgcgctaagaaagagatgcgaattctcatggttggtcttgatgctgctggtaaaaccacaatattgtataaactcaagttaggggagattgtcaccaccattcctactattggatttaacgtggagactgtggagtataagaacattagcttcactgtgtgggatgttggtggtcaggataagattcgaccattgtggagacactatttccaaaacacacaagggcttatttttgtggttgacagcaatgatcgcgaccgtgttggcgaggctaaagacgagttacacaggatgctgaatgaggacgaactaagagatgctgtgttgcttgtttttgcaaacaagcaagatcttcccaatgcaatgaatgctgctgaaataactgatagacttggcctaaactctctgcgccagcgccactggtatattcaaagtacgtgtgctacttctggtgaaggtctatacgagggactagactggctttcaaataacatttcaggcaaggcttccttcaaatgatagaattgtgttcgtctacatcaagatttgttggcgtcagtgctgttgtagttttatgatcttttattacccttggtgtgttgtcttgttcttcttcctgtctaatctgatttcaattcaaataaatactattgatatgcattcctaatatttatttttttaattaatgacatcttgatgtacattaccttcttgttccatgcaatagacactactaagttttacctt

SEQ ID NO: 117820 - DNA, 406 bp, Glycine max
  Clone ID: PAT_MRT3847_773C.1
tgcgggctacacaaacagcgggtatagaaccggcgatgcgcttcatgacagcaccgtgattctggatggaacatgtgcgctctgggatgacccagaggtgtggtggtaccatcagaggtatgaatgatggacctgaatgggcaggggcaaaccgtggtggagttcatgcccaaggataatactacacgccacgattgcttacaatgtgggaacaaccgatgccgacatgtctagccttgctaatgactcaagatgagactggtgcatctgatgacataattcatccatgcggtatatgacaccatgtctcagatagataatgatcgaaggcttacagccttattactgatataaacgtagattactaccagcgtgaatatcgtgtatgacatccatctatattgag

SEQ ID NO: 117821 - DNA, 286 bp, Glycine max
  unsure (1)..(286): unsure at all n locations
  Clone ID: PAT_MRT3847_77400C.1
tggattggtacaagcaaataaccaccaaacagaaattaacaggacaantaagaagcacaaaaatactgtaattaattaattgatgggcttaaatgaaacaataattttaaaggattaagtggacagtcctatgggcgtacaaataaaatgcacgagaaaaaacatccatccgaggttatcacgagggtgaaaagctcaaaatcctccaccggacctgaccacatccaacacgggctttgttttgtccttttcaccgcccaattcgtccaaataacggaccaatcca

SEQ ID NO: 117822 - DNA, 454 bp, Glycine max
  Clone ID: PAT_MRT3847_77401C.1
gtctcgctgcgagaagcatacagacgcaatggctatgctgggtggaggaccgatcgcgatacgaactgacacggtagcttcacacgtgctaacatgcgtcgaacctgactcggctgacgcctccttcgccaaattcaaaccctatctttattgcctttctgtctgggactacgttatgaccttcaccattcacattcctctacaactaaaagtccgcgcacttctattcgtcaaaaccaccgcttccctctgcgcggaccctaatccatctgtctatatacaacgcctcaatcttaattacatgcaactgcacaccgacgacatctacttaaacctttatgctgactctaagaatgaattcgagcctatctcctagactggaaccaagtatgttgaatttgagcttccggaggcgtgggataatctagatattgaaaagtacaaagctaataag

SEQ ID NO: 117823 - DNA, 393 bp, Glycine max
  Clone ID: PAT_MRT3847_77402C.1
acacccttccgccaacccttccgaaaccactaggttaatttttaacccgaagacttggaagaccttccgaggggcaaatttttgtttagaatggaagggcccaacttttttattataccatactacaaaaaacttgaatttggggggcggaaattaacttcgtcctatttttaggaatggatttaaatgggccttgcaccaatctttccttggaatttatggataaccacaaggctggcgcctattgattccaaattgtttttttgacctggagtaccacggaccaaattggcattaacggagcctactttaaagagggttgcttccctaacatggaaaatttaatttaagggatctacaggaaccttcaactcaaattctactttcttccaa

SEQ ID NO: 117824 - DNA, 368 bp, Glycine max
  Clone ID: PAT_MRT3847_77403C.1
cgttggtaacccccccacacacccacccctaccgggggaggtacaaagactactccggctaggacgaggctgacgagagacaccaagaggctgcaacaagacccgccagtggggaacagaggagccccccaggataacaccataatgctgtggaatgctgtcatacagggacctgaagacaccccatgggatggaggcacgttcaagttgacactccaatagactgaggactatccaaagaaaccaccgactgtacgacaagagactcgcaagattcatccaaatatctatgctgatggaagcatcaggtacggaagaacacaaaaacagaggagcactaataaagacgcggctgctatactcacatc

SEQ ID NO: 117825 - DNA, 426 bp, Glycine max
  unsure (1)..(426): unsure at all n locations
  Clone ID: PAT_MRT3847_77404C.1
ggatggtcnccgatttcgcgaggccggnggggcggtgtccgatcggtgacgancgacgacaantgnggnccgganaaggaggangaggcatacggcngaaganngncggtngangagaaaccgacggagacggaaacggaaacngngaanctgaanaaggctttgntggattaccnttatggcacggatcttgnacgtgaaagcaaccgagtgaaactagagcacanatcgttgaactcatcactcanactagaggccaanaaccctaaccctgntcccactgacgccttgactctgctaaanggnaaatggattctccccgtntnccgtnctttgcaggtttatttccatngttgncaaantggaacactccattggtcaaggnagangaaatatcttaatctattgacacgctgaattttccgt

SEQ ID NO: 117826 - DNA, 498 bp, Glycine max
  Clone ID: PAT_MRT3847_77405C.1
ccaaaactgccattcagcattttccaaaaaccgttttatcagttatagttttttacagtttcaaaatccaatcgaatacttaacagactaaaaactttacaaaaaaaaaaaaaaatcgcatttcccctaaaaattcaaacgaatcctcagtaaactaaaaacatcacaaaaaattgaaaatcccactggggtcggggttgcagtatcgggattgtttccgatcctacaaaaaaaattgcaaacagaaccagttgatgcgaccgcaattgcaatcacgtttttttaaaaaccttattggggggtctcgccccggcctattttttgatatgacaaaacccgaccaatggggggaccccgattgcaaaaccgttttacagagtcagggacctcaaaaaccttgaggttacgggggaaattgcagggtttttttttttaaaagcgagatcttccgtgggcacgcaaatttctcgttcggggaaaaaacgagctcctcaccct

SEQ ID NO: 117827 - DNA, 573 bp, Glycine max
  Clone ID: PAT_MRT3847_77406C.1
acaaatcatatttttatctcataaataaattatcaattataaaaatacatatcagaagtttaaaccgtctgatccttatccaacagcactaattcacaactgcctgaatgctcttatccagttcccaaaaccctgtgccaatccaaaactgccattcagcaatttccagaaaccgttttatcagttatagttatttacagtatcagaatccaatcgaatacttaacagactaaaaacattacaaaaaaaaaaaaaatcgcaattcccctaaaaattcaaacgaatactcagtaaactaaaaacatcacaaaaaattgaaaatcccactgtggtcggggttgcagtatcgtgattgtttccgatactacagaaaaaattgcagacagaagcagctgatgcgaccgcaattgcaatcacgtttttttcaaaaccttattgcggggtctcgtcccggcctagtctttgatatgacaaaacgcgaccaatgtggtgacgccgattgcgagaccgctttacagagtcagtgacctcaaaaaccttgaggttacggtggaaattgcagtgttttttttt

SEQ ID NO: 117828 - DNA, 210 bp, Glycine max
  Clone ID: PAT_MRT3847_77407C.1
cgcttttcaaacccgttgctggacaatgatttcaaggctgggttcaaagaattcaaggtggattcggaaatcgaggatgttgatgacaaggacgatgaaaacaaggaggagttgaaaaaaaacccctttgggttcttttgttccagcaacaaggctgcttttaagcctttttttcgtggatcaccaactttggaatcaaagggccaacct

SEQ ID NO: 117829 - DNA, 1180 bp, Glycine max
  Clone ID: PAT_MRT3847_77408C.1
ggggagccaagtaaaaagactatggatggcgaaaggaacatacgaccacaaatgtgacattatacaattgtgtcttgccacagaccagggtcagattactcaattaaacaaaagatcatgcattactcggactaacatacgaccacagatgtattgctctggggcctttaaatgatatggatcttatggaataaagaagaagctttaaacccaggaaaactgaaattaaatactaaaaatcgaaattccttatttatcaaacagaatactaggacaaagttccagggcaaaagggggggcctaaactaatcagcaaggctcagtctctctcaaaagcttctaaataaccgtttccactgtttgcaagacaattgctctttatccaacgattatttactctttatctgcgtcaatctttgaaggggttccatcatttttagcagctgctgattctgatgggccatcatcttcagtaggctttgaagattcagcatcatggacattagattctgctgcttcgccaggggattctggttcagttactggaacggtctttttgacagttccaacttttacatacttgcccataaacttgtattcccagtcttgcaaggcctcaacctcaaatgggccaagaccagagatatctccagttagatctttctcttcaaaagacatttttgctaaagctctgctagcatccttgccagcaaatagagcatagggtccaccaggtccataaaacattctggtagggcacattacagaaacattgaaaaatggaaaaggaaaacatatattgttggtgacatttaaaagtagaaatcaaaagaaaaatcaatataatacttatccaactagcaaggaaatcaggtatgctgtgggttttcggaagattcacacatctacatactacagttagaaccttagttgttctctctaaaaaaattatgcatgttaaaagcaattttagtctcacatgttttcttcaaggaactcaagtccctctgtttctaaagttaacaaatctggtcctctcatcagttttcttatacctaaaaccctcaaaatcatattttctattcaaatagttggggatatgtggtgaattttaaatatgaagtcattttaaaagttcatgttgttgtgaaaacttgataaaatcggacgcgtgggtcgt

SEQ ID NO: 117830 - DNA, 1641 bp, Glycine max
  Clone ID: PAT_MRT3847_77409C.1
agacttcaaatcctcaaatcaaattatttcaaggaaagaaaaagccaaagcacaaacgcaataaacgattatatcttgtaccataccatatataagaccaaatgcattcattcaatacttggctcagtacatggtctcaaatgttcattgatttgttgcctctaagtaatatagatcttatggaatacaagaagaagctataaacccaggaaaactgaaattaaataccaagatttccttatttatcaaacagaatacttaggcaaactttgtcccacatttgctgaatacattcagcaaggctcagtatttctcagaagcttctaagtaaccgtttccactgtttgcaagagaatttgcaagacaattactctttatccaacgattattactctttatctgcatcaacctttgaaggggtttcatcatttttagcagctgctgattctgatgggccatcatcttcagtaggctttgaagattcatcatggggagtagattctgatggttcagcagtggattctggttcagttactggaactgtctttgttacggttccaacttttacatacttgcccataaatttgtattcccagtcttgcaaggcctcaagctcaaacggtccaagaccagagatatctccagttagatctttctcttcaaaagacatttttgctaaagctctgctagcatccttgccagcaaatagagcatagggtccaccaggtccataaaacattctgctctgggaaacatcatagatctggcccttgatggccatgaggagaggcttctcgggatcggtgccgtcgtaggccttgaggtcgtcctcggtgacctcgccgatctgaacggggggtcgcagaggctccatctggggctccaagtcgcgcgaggcggtgttgtggcggtggtcggaagaggggaagagcccagaaacgacgtagtatagggctaggatcagggccagaagggtgaagaaggtgggcggggagagccccgtgtaggcaactatggcctccttcaatgtctcccatagttgcagagccatcttcttctcttgttgttgctgctgctgctgcacactgtgtgtgttcagtttgagtgttcggtgtgtgtcagagagaaggagagttgcaaaaaagggcgaggtaatgttaatggtgaatgcatgggccattcatagggacccaaaaatatgggctgatccaacgagctttaagcccgagaggtttgagaatggaccagtagatgctcacaagctaatctcttttggattggggaggagagcgtgtcctggtgcaggcatggcccaaagaactctgggcttgactttaggttcgttgattcaatgttttgagtggaaaaggattggtgaggaaaaagtagatatgaccgaaggggggggaactatagtgcccaaggccattccattggatgcccaatgtaaagcacgtccgatcattagcaagattttttaaatttcttgcaagtttgaactttggtcgacgttcaaattatcacattaaattagtagccttacagcgatttttatttgttataattcttaaatttacaatgtgattctttagtgagtatatgctttaataaaagatattcgtgtagatttctctatagccc

SEQ ID NO: 117831 - DNA, 484 bp, Glycine max
  Clone ID: PAT_MRT3847_7740C.1
tcgaggcttatgcctatgatgcgctgttccttcatggaaaatccacgtgcgtgttgcggcttcttcttcttcttcttcttcagggtcaaccatcaacactgaccaacttcgttctcaacttgatcaccttcattcagaggctgacgccaccagagccaagggtaccctacttaacttgcccatctctattattgttcttgttcattcttatttcattctgagttactttctctatctttttttttttttttagataagcagttactttctctatctgaatcaaccgtgttttctggacaacacccattatagccagtcccatgaatatgattgaagttttactttttttttactttttccactacaattctcaccaaaagaattgaaattggactgctgtctaaagggttcatgtaaagattgaggattgaggcttatattgaaataattgtgtgtggtggttaacacttaacagcaactaatg

SEQ ID NO: 117832 - DNA, 440 bp, Glycine max
  Clone ID: PAT_MRT3847_77410C.1
agactgagtaacacaaacatatatatatatatatagcatatagctgctgctgcttagtaactgaggagcagatatacagagagaggctcattttcaaaatggccggtggggtggttcctgtcgattcatcaccattagccaatggctttgctggcaagataacgctctcagttatcatcacttgcatcgttgctgcatccggtggactcctttttggatatgacatcggaatttcaggaggtgtcacaacaatggtaccatttctggaaaaattctttccagctatattaagaaaggctgctagcactgaagtaaacatgtactgtgtgtatgacagtcaagtcttaacattgtttacatcttctctgtaccttgccggattagtgtcatctcttgccgctagtcgagtcacggcggtattgggtcggagaaacaccatc

SEQ ID NO: 117833 - DNA, 723 bp, Glycine max
  Clone ID: PAT_MRT3847_77411C.1
accctcgggcctccgtctatataaaatctatcacagtacaaaatccacccagccctgctcagaaaattgatgatgattttcaatcttggcttcttgtctgtggctttatcacaaccgtacaaaatctacaacgatcatgttcttcttaacagttcctttaataattccaaaaatacatgattttttttgtctcttgtccgcataaaaccctcttaagaacctgtcttacataaactaacaccatcttgttagagaaaacataaaaaagaaatcttgttctgtgattttacatctttgagactgctaaatgatgtgataaattcacttttggttgtgaacgccaattatatttatgaagtcaaagtcggaaaaaaaatcatgtaatgcattaacaaattggccttaaaaagacatgttattggaaagcaatattcgtcggagatttataaagttattgggttcaaacgctcgtcaatcctcacagccaaactggaccgtcgcattcatgcgttggtgagctcgtgaaaagaacttacggtaatttgacatgttagatatttttactgtcttataagatgaaattaaaaatgttgcaatttttagaacgctcgtttaatagatggcatgcttcctgcataggaatatatattttttaattgataaaatctattatttcatttttatactcattggacaacagagaatattcgacaacccctattg

SEQ ID NO: 117834 - DNA, 166 bp, Glycine max
  Clone ID: PAT_MRT3847_77412C.1
caaagaaattgattatcacaattgcagcggttattttgactccaagaacaaggcaatggtagaggatctgctgaagaactatgataatgtgagcacatagagagtgaggatgactatgtcatcggaattattgaagccgagtaattttatcactaagaccacacga

SEQ ID NO: 117835 - DNA, 372 bp, Glycine max
  Clone ID: PAT_MRT3847_77413C.1
tcaaagtagatcatcggggataacaaaggacatgtggcacacactcattgtctcgccgtgctgtgttcacacgtctcgtaatccctagcgttcttcgcgcttccgccgagtcgcgacatgctcatcgactggtccgacgctcaaaccgttagatagaggttgaagacggatgggtgctggtgctgggaggaagcaatcgacgaaacctgctgaaggattggaacaagctctacaataggtcgaaacgctttcttcggatttaagtttgacgatatcagaccagttcaagaacgaacattctaagaatagatctctccatgttgtcagttgagctggtggtgactcctggcactcgcgagctgatgcttaaaa

SEQ ID NO: 117836 - DNA, 377 bp, Glycine max
  Clone ID: PAT_MRT3847_77414C.1
gtttcgcgtccctacatgggttgctacattgtgtgccatggatgggaccatggctgagaaactaccttgtgacaaaccttttgcccgacgtaagacgagctgctccatggtgttcaacatggaggttcgtctggaggttttcaagaaggtgaggatcattgtgaggattatgatcaagataaggggcaaggttggttgtcacccttacttcatcccatgctccgtgtagggcactggattgcccagtaaaggactgagtatggtgtgcggcaattagggttgcgactatggtgggcttgctggtcaggttaccagacagatggtgaacaagatggctcatatgtgtagtggtctttaaagtggggttgaaaaatgga

SEQ ID NO: 117837 - DNA, 408 bp, Glycine max
  Clone ID: PAT_MRT3847_77415C.1
cctctctctcctgtccatccaccgtcatgccctgatctcactcttacaccatcgcggtttcaatcgggcatcgttggctaccttcgtgcgtgccggggcgtttctcctccttcaccactggtttggaccttttgcctctctcgtaagtggtttgtcatcaattgagcctaaaccacttcttttctgaacagagaatgtgatttgcacgagccctaataaacattgctcgccctctttcatttgcatcatcaagaactttaacgcctcctatctccaccaatgcttcgattgcaccattttttttctgcttttccatcttcctgcataactcctcaatggctttatcccctttggaataacttccacaaatttgacagacactttcttttcccaagatactaccccttg

SEQ ID NO: 117838 - DNA, 164 bp, Glycine max
  Clone ID: PAT_MRT3847_77416C.1
ggaataaattgacccttcaccctggttaactgctcatatagctacctagatgtatgtaaatcatgtacactaatgacagtcaaggcttaggatcttctggccatgtaatcactaaacactaatcaacattcccttcaaggtgatgaatatgaactgattgtggt

SEQ ID NO: 117839 - DNA, 611 bp, Glycine max
  Clone ID: PAT_MRT3847_77417C.1
cataaccagaaacacaacagggaaagttcttctagtttttcaggttctggaaaagaaaaatgttttttccaaaactagctatcatcatcactgcacttgcattagtccctttgattttcatcaatgaatctgatagtgctgaggttacaccctttgcttctcagaaagttaacctttcagtgtactatgcaagcctaagccaaccttgtgcaactttcattgttaagaatctggaggaaattttccacagtgatctcatcaacattctcaaccttcagctagttccttgggccaatgcttatgtcgataagactaatcattccataatatgccagaatggccctgatgaatgcgagctaaattcgttggaagcatgtgctctcaacgttttggatgatgtgaacaaacattatgctttgatttactgctttgagtttctggccattgagggaaggcacaagaaatggcaggactgtttcagccaattggacttgcccgaggaacctattctgagctgctataacagaggaaatggaacagagcttggacaaaaatctattaatgaaacagctctcctttacgcaccccacgaatttctgccttgggtgatg

SEQ ID NO: 117840 - DNA, 501 bp, Glycine max
  Clone ID: PAT_MRT3847_77418C.1
ctcttcctaaaacatttaaaacctaattaaaaagaggtatattatttgtaggacattacttttgtttctttttttttttcccgtcaaatcaattattttatcctacaactttatctttcttctctttctatctgtccttttattgtaaaaacttatataaggaaaggaaattatacaaattcaatctcatcggaaaatggccaaaaggattattctagatttattggtccaggccgaaatgcatatcattatcatgtgtgtgcaaaattaccttcatgattaaccaaaatttcaaattttcaatgtgtagaatggtgacttaaaaaatcacaattacaatctcgttgcaccacttgtgaaaaaagcagtccattattgaatttgaatcttatgattttcttcctctctctcttttttcaatgaaaatatatcattttcacattgactagcctcttagccattttcatttgtttctactcactacaactcatcagttcggct

SEQ ID NO: 117841 - DNA, 362 bp, Glycine max
  Clone ID: PAT_MRT3847_77419C.1
tatttttgcggcaagacgaccgacggggagatgggctgcttctcattgttgaagcggaacctttacaagttgcacactggcatacgttgaaatgcgatgtggtagctgctgctatagcgtcggctgactaaaaagaaaacgttcaagaagttcaactttcgagagtgtggatcatcatgcacttctccacatgtacaccgttgaactacataagatgttcagcacctggcctcatagaaagttggacagaggccttaccacaaagcaaatggtcttgatcaagaatctccaataagacaaaaggtaagctccaccatgtgagaagccagaaccggtacgcacccaccttcgtaacatgatta

SEQ ID NO: 117842 - DNA, 251 bp, Glycine max
  Clone ID: PAT_MRT3847_7741C.1
cttgagatctggcacatttcatatgtcagaatttcattcttttatatcgtcaaaatttggaaaagcacagagcaaagctagcacttctcgactcagagttacgacaacacacttagcgctgtgcgtgagagagtgagacatagagagtgaaagcgggctcttgtgaagtataggttgaagcagatcatttccctataccaaagctacactggaagaacccttctacacagatgactcagaaagatcatgga

SEQ ID NO: 117843 - DNA, 321 bp, Glycine max
  Clone ID: PAT_MRT3847_77420C.1
accgacgcgtccgtttgatcctcattgccgtctcacaaagtgtgtttagacattgaagttttacccaagggtgggctgaagccggcgaaagagccgcgaggctcacttcaccgctgcgtcgagcgtgcgtcgcgttctgatgagcgcagcctctgtcagaccgatgcttcagtcgtagtacagcagcgcggaccattccgggtcgcaaggacaacaaggtgcaggtggtgcagggatcctacatgggccgtgagagcaaactggtgcacgactatcgccacaagtgggtcattcacatggggcgcatgacccgctagaagg

SEQ ID NO: 117844 - DNA, 158 bp, Glycine max
  Clone ID: PAT_MRT3847_77421C.1
ggaacacaagtgatttgagaactaatttgaggtaccggctaaccttttaatacaactaaatacacgagtactcagtgtcactcacagcaccttgaggagagagggttggaaaccaaattgttacaaattagagctgtacaggaaccggtcacatattt

SEQ ID NO: 117845 - DNA, 120 bp, Glycine max
  unsure (1)..(120): unsure at all n locations
  Clone ID: PAT_MRT3847_77422C.1
tctcgagccggatcggctcggacataactgttattctcaggttggatgngtgtcttgacgtacgcgtgngatgtgggaggtaacatcgtggaagcttcgttttccctggggcacagtctt

SEQ ID NO: 117846 - DNA, 469 bp, Glycine max
  Clone ID: PAT_MRT3847_77423C.1
ttcttgggttttcccacgcgcccgattacgcgtccgcccacgcgtccgcggacgcgtgggttaactcttacatatatatatacacacacacaatagttaatttgttgttgcttcaattcgtttcttgcgtcaaattaagtcatctggggaggctcataatgaatatagggttagtggtaatagtggctgtggtattgtggagtggggttgcagctgcacatgcacaacgagtaccttgctactttattttaggagactcttcggcagattatgggaacaacaaccagctttggtcaaatgcaagagctaattaccttccttatgggattgactcctctgttggcccaactggaaggttttccaatgggaaaactactgctgatgtaatcgctgagcttttggggttggccggttttatacgtccctatgcatgtgctggagcccgagacatattttacggagtcaattt

SEQ ID NO: 117847 - DNA, 1135 bp, Glycine max
  Clone ID: PAT_MRT3847_77424C.1
gcgattactgcccagactcggaagtctgaagttactgctgatcttgatgacatgaaaacagaagagggtaccaatgcttcttcttgcagaagttttgatcggatgcaagatgacctatggcaagttagcaataataaaacaactgttaccaggactactaatgatattgattcatttgatgtttggaatgacttcactagctcagccaatacacaagatcattccaccaatgtttggaaacaaacagtaaacctgacttcagcaaatgactctgaaacgaatttaccagtttcaaacagctcacatgataaagattttagtggattttcacagcatgatctattttcaggacagtttggtagttcacttccagttacttcttccaacagggtggatgaagtggatatcacgagaggaaactctggagatgtttccactgcaggtgggtcaaaagatgacgtagagatgttgatgtcacagatgcatgatctctcctttatgcttgagaacaatctttcaattcccccaaagtaagatggaactacactattttctagtaacccatccatttattctatagcctattatgattacttatgtaatctgtagcatagccccccgtctatgtatttattctttgatgaatggatagggaataatatggctttcatctacagttgtaatttccacttttcccttgatcatttattttgggtgcaagcaattccctaaattagtttttttattgtagatcaagcatgttgctatgtcggttttgtagaatgctactactgtatattagctagcagtttatgctggggagatgaatatgattatgattttttgtaaggtccgatttgagagctgcctttagttttgttgtgttgagacttttcagacattaccagctccactgccaactaatctgcagtagatgcatcacttataaatcagtgaattttgcccttgtgagctttaaaacaaatggtgcagaaactttttagtggaaattgtctctttttttcttcttacatttttaataggtttaattgtaattttggttcccctggttttataaatcagtgaatttggttttcctgaaatttaattgagacatttggtctacttaattttg

SEQ ID NO: 117848 - DNA, 317 bp, Glycine max
  Clone ID: PAT_MRT3847_77425C.1
catgaataaaatctggtgttgtatgtgagaggcatgcacagacagcaaggcctgtctttcttaccactagagatatatttcaaaaacagaaataatgttgaataatacgattgtgccgttgtgacaaataaaaaaaaaaaaaaaaaaaaaaaaaaacaaaaaaaaaaaaaaaataactcaaaaattttaaaatgaaaaacaggaaaataattatgcttaattaattttatggctgaataaacaaaaagaaacgctagctacaaatagctccaacgaaactcttataaagcaacaaatagtaggggggggggggcttc

SEQ ID NO: 117849 - DNA, 488 bp, Glycine max
  Clone ID: PAT_MRT3847_77426C.1
acggctgcgagaagacgacagaaggggacataacatctgacattgtggaatgtgaagtgaaaggaaaagaaaaaatgatccctgcatcaaaccctaatcctaaaaatgtgtacctcatcagaggtctgtaagtggagtttccctaccaacctatggatctcagtttgtgtttatgggtagagtgatttccaccttaatctagctcagaaagaaggccattgtcgcacgttgcttgagtctccaaccggtactgccaagtccctttcacttctatgttcctctctcgcttggcagcaccattataaatctcaacaacaccatctcaagcccgtgtcggaggcaaccactgatcctctggctcatggtggcagatttgttcccgatttcagaaattcccgaccatacgcaaactgagttcaacaacaagaataagatgaaaaaggaagcaccgaccatatattatgcctcgagaaagcactcacaaattt

SEQ ID NO: 117850 - DNA, 879 bp, Glycine max
  Clone ID: PAT_MRT3847_77427C.1
aattcggcaccagaaaaaaattgagtctctcatgttattttataattctttcttgtgattttataatttttaataaattttaaaagaatacattaagaggagtgtgttcctaatacttttcttacaaaaatatcttagagatttgagaaagattcaaataatcttttgacaacactttaaaataaagtagtttaaggttaaattaatctagccttttatgaaaatatgttgcatcaacaaatggataacatgagccccaattcatattaataaaatgttaatagttttgaccgctaatttagcaaaattgtaaacattattccttgggggatttcttggactccaatcttggttatggtccaagccttgtctggcgtagcatttggagttcccgggatttaatcaaagatggtactcatgaatcattttgggaacattcagtagaatcaagtacctggggactggaatgatatatgagttggaagttcctcataaggtcaagactctcttatctggcgcgtatgcagagaatgtctccctacacggattcaactccaaacgagagagatggtgtttaagtgtttgaagagcttcagtgcagaaaataccaggttttggttgtgtgcttcgagatggagaaggcaattttgtacagggtggattgatgttgtaatggaggtacaagaaaaagagactttagccatgtttaaagctatgaagtgggtggaacaattaccattctcggtagtgatttttgagagtgattgcaaaggcttagtaaatcaagtcaaaagccgaaataatagcactactgaattttgagttttggtagatagcataggacatatgcttatttgtaatccatctttttatattcaa

SEQ ID NO: 117851 - DNA, 239 bp, Glycine max
  Clone ID: PAT_MRT3847_77428C.1
ccacgcgtccgctagttcttctcgctcctcactctcactgcagcctcggctcagcatgacggcccttagatcagcagagcagccatggagcatagactccgagtgacaaaatgcacgaacctacgctctctccaaccctctgtacacatctccggtgatgactcaggctcttcataaccagatggatgatgcgttgcaggcgtttgctgactgacctgatccatcattatagcacaggg

SEQ ID NO: 117852 - DNA, 421 bp, Glycine max
  Clone ID: PAT_MRT3847_77429C.1
ttttgtttcttgcacacaattttttttgcttttttgcgatattttattggcacagatcccggggcactgctgcgtatcgaacactaaatgccctatcccctcctggaacccaatgggagccagaatcttgccatgcccagaagcccaagagacatggcacatggtggttcaagcctgtgtttgtggaacataatattgctgacgtagtgaatagcaaggacagtttcaattgcacccttaacaacaaccgtgaacaaggtacctgagaagtgagcttcctcgctagggtattcttgaaggtatgcacgaaaatgggaaacatggtgcttgagaaccaacaggggggcccatgggaacccctaatacggcattgagttgaacattcgctgccctgctatgcactgtgaacaggcattccatt

SEQ ID NO: 117853 - DNA, 231 bp, Glycine max
  unsure (1)..(231): unsure at all n locations
  Clone ID: PAT_MRT3847_7742C.1
ngtcgcatgcacgcgtacgtaagctcggaattcggctcganctcgagccgaatcggctcgagngnccttnngcnatactanacannacacacnntagaggnanaatgncgtccatnctccantactttttagccctctctnggtcttgntntttgcttttcttcttatccgactcagtcactccctnacaaaaccaataanccttgttgttntanccgtttcaaaatgatg

SEQ ID NO: 117854 - DNA, 587 bp, Glycine max
  Clone ID: PAT_MRT3847_77430C.1
aaaaaacaaggaaaaggcccccctttaaaacaaaaattattcagcaatcccaaatcccataggggggaaaacagggggggcaacaaattaagggggcaaaaacccgaaaaaaacaaccgggggggggccgggaaaaaaaacaagaaaatctccccccccccattaaaagggaagggggcccccaggaaaaaaaaccgggcaattccccccaaaacgaccctaaaaaaggggggaaaaaacaggagcacaagccccagttccacgggggggggggggtccgggtccccgctccaaaacacaaattttcaggggaaaaaaaaacaacccttgaccaaacttgggggtagttcgggcggggaaccccctaggggggtaaaattgggggccaatttcgggtagcttaaataaaaaaaaaagaaaattgggggttccttttttacggaaagaaacccgggggggatttcccaggcggacccagggcacaggccaaaaaaccccatttacaactaggtcggaataaacaacagcattatccttattggcggggaattaaggcggcccatgggggggttaaaaaagggggcccc

SEQ ID NO: 117855 - DNA, 274 bp, Glycine max
  unsure (1)..(274): unsure at all n locations
  Clone ID: PAT_MRT3847_77431C.1
aaatgaatcccaccaagacccaccccccaaagncgaggcattttgtacaccactagagggctttttatacaacgcaactcaaggatacacaagtaaggagccatcactcaacctagatcagaatcgcgagctgctgatagaaactactaaccagtgtctaggtaatctccctcgccggatcggatacaacgtaataaagctatcggatccatgggattactcttccagcacagccgggaaccattatggttccaatactgggatccatggatca

SEQ ID NO: 117856 - DNA, 198 bp, Glycine max
  Clone ID: PAT_MRT3847_77432C.1
acggctgcgagaagacgacagaagggcgagtaaatgtctttcttgagccaaaagagattcccagaatactagcgggagctgtaccattccaggaattcctcctccaaagctaaggtggtgactcctggatggacggctatagcatcagaactcttcggattgactacccttctttccaatttaataggaggacctttt

SEQ ID NO: 117857 - DNA, 336 bp, Glycine max
  Clone ID: PAT_MRT3847_77433C.1
agctatgatcgctcgcatgcacgcgtcatcgtgagctcggattgaggctcgagcaatattctcatgacaatccggggatcaagatggtatactcgcgagggcatgtgagatcctacttacgtggtagaatgtgtcaagtgttgtgagggcttgaatggactgggagccggtagacttgtagtgacttcagatgacagcatagtgttgcctacctgctgcataggagctataagaattggcatgacagtgtgagcgtctaaagaatcatcactgatgctcaaggatctaacatgaagctcaactcagctgcagcaagacttcaaacgcaactcactg

SEQ ID NO: 117858 - DNA, 423 bp, Glycine max
  Clone ID: PAT_MRT3847_77434C.1
catgtttgatgttttggtctctaccgcaaccctggcgtggggtgtgaacctcccagctcagactgcgatcattaaagggactcaaatttacaaccctcaaaagggtgcttggactgaaatcggtccattggatattatgcagatgatgggaagggcagggcgtcctcaacataacgcactcggaaaaggcattttgatgacccacaacaccgaactgcaatattatctgtcgttgatgaaccaacagctgccgatcgaaagtcaattggttgcaaaattgccagacactcttaacgcggaaattgtactcggaactgtcacaaacgttgtggaagcgatggaatggctcacttacacatatttacacgtgcgaatgtgcaaggcaccagcactgtacggaattgtcgcagattgaaatgacaa

SEQ ID NO: 117859 - DNA, 171 bp, Glycine max
  Clone ID: PAT_MRT3847_77435C.1
ttttttttttttttttttcgcagaatggcttaaaaatgataaattccgatggcggcaaaaaaattggcccatttaccaatggggaaaacttttttagaaccaaagccggccccattaataataataattaggtcacctctttaccaagttggactataaaatttccccccc

SEQ ID NO: 117860 - DNA, 1227 bp, Glycine max
  Clone ID: PAT_MRT3847_77436C.1
ctttccacccttcactccctcacactccctcaccaagagtcttcgcctcaagatgctgatgatgatcttcaatggcaggaaggtgactggccttatccccaatgctgtagctatgctcgatggtctatgtaaagatggtttggttcaggaagcattgaaactttttggtttgatgcgggagaagggaaccattccagagattgtcatatacacagcagtagtggagggatacacaaaggcccacaaggctgatgacgccaaaaggattttcaggaaaatgcagagtagtggtgtttcacccaatgctttcagttacatggtccttatacaaggactctacaagtgtagcagattacacgatgcttttgaattttgtgtggagatgttagaagcaggtcattctccaaatgtgacaacttttgttggcctagtggatggtttctgcaatgaaaaaggtgttgaagaagctaagagtgctatcaaaacattaacggataagggttttgttgttaatgagaaagctgttagacagtttttggacaagaaagcaccattttcaccctctgtttgggaggccatctttgggaagaaagccccacagcgaccattttaaatatctttcagactatttaaatttaaggttttatcttaattctttaactgatttgtcagactgttttctgtcattatgtagtttattgttaattgttaaaaaaaaaaaaaaaaaaaaaaaaaacaaagaagctgtgatctaaggagacagacttcacagatttgtagtgaatccagaaataccattgtgtttcctatctgatggtgattgggattgtggtggaatcaaatatgcaatggaagtaatagggatcagctcctgttcttgtggctcatttcttcacttttggagtcacttctcactagttcgattcacaattgtggttgctttgggatgaatacactgatacttaatttcttcgaatcccaaacttgtgctaaggttcatcagtttggatctgaactgcaaagaataaagaaaggctcgcactctgtttctgaatacttgttgtggatcacggctctgattgattccttgatcttcataggtttttgtgtactacctcatgaacacattgatgtgattttggatggattattgagggaatgtgatgcctgttgtgaacttctggttgtggtttccatgaatagtagattggatccttattgagtggg

SEQ ID NO: 117861 - DNA, 638 bp, Glycine max
  Clone ID: PAT_MRT3847_77437C.1
tggttttggttccaaaaagctttaaaactttttggttttgatttgggaaaagggacccattccagagattgtcatataccaagcggtagtggagggatacacaaaggcccacaaggctgatgacgccaaaaggattttcaggaaaatgcagagtagtggtatttcacccaatgctttcagttacacagtccttatacaaggactctacaagtgtaatagattacatgatgcttttgaattttgtgtgcagatgttagaagcaggtcattctccaaatgtgacagcttttgttggcctagtggatggtttctgcaatgaaaaaggtgtcgaagaagctaagagtgctatcaaaacattaacagaaaagggttttgttgttaatgagaaagctgttggacagtttttggacaagaaagcaccattttcaccctctgtttgggaggccatctttgggaagaaagccccccagagaccattttaaatatctttcagactatgtaaggtttattcttaattcttttactgatttgtcggactgttttctgtcattttgtagtttattgttaattgttaattttggtccgcctattgaaatttgctaaaaagggttcaacaggtaattgtttccttcttgaaaa

SEQ ID NO: 117862 - DNA, 729 bp, Glycine max
  unsure (1)..(729): unsure at all n locations
  Clone ID: PAT_MRT3847_77438C.1
atattattaatccattcattanntgaaacagtgtgcaaatttgaaatatatataaaaaagaacagcttaactaaccatttgattggccagtcaatgcatttgaacggagaagttatagagggcttgctttgacaaaatgtcgtttgaggaattccaacggtaccccaaacaggctataaatggttaaacaaacataccatactaatttgtacctttatttctagatgtcaaatgcattcccctagttcttatccttctcttttcagttttataattaattgggtatcgaaacttaaggagatattcccttggatttttcttacaaatagtattggaatacaagtgtgaggtaaagtttcatattgaatagaagtgaaaaagttaagtaccatataagtaaggataggacccataaacttgaaccttaaggttttgggttaaaacgtggtgtcaaatttctttatgtggttgttcatggcttattagtgtaaatctccccgtgtttactcccctcaattccccaacaactggtatcagagccaggtttgacttggtgaccggatcagacgagtgagatgacggcaatggattcttaaccttgnggatcccttgtatcgaaagtcttcttggcggcgtgtcccgtgggtatgggatactcatggatgataatgacttctactcgagagggagacctacaccatataagtgaggagagaacccataaacctg

SEQ ID NO: 117863 - DNA, 317 bp, Glycine max
  Clone ID: PAT_MRT3847_77439C.1
cggaaaacccgggacgacccacgcgaacggatgttgcaacggagactcaagaaggagccgggggagggaagaaaaccatggggggcggccaagacagcaagacaaaccgaaccgaagaagaagacgccaacacaaagagaatgacagcggcaacaacacaacacgagaaggaagggatagaaccaaaacaaaacgagacgcccggaagaaggaagcgagaccgcgaaagacaaaagcaaagacagcaagacaaacctgatgcggagctgcgagaaaaacggaaaaacagacaacgagggagatgaaccaacaaatgc

SEQ ID NO: 117864 - DNA, 540 bp, Glycine max
  unsure (1)..(540): unsure at all n locations
  Clone ID: PAT_MRT3847_7743C.1
actcgctctcgcgtattcaggcgatggtagttggataagcccgtcgtatatgggtgtgatgtatctnttaggcatgataggagtcggttgctgaaagcagcgcattatgcttctccaatgaatccaggctccagagaccgttcgtggactgggttctccgagtgtctgtcaaagagaggattaaacaagttactctcctctttggacagcggcggagattcgtcttgatcttcgctatctgtggtgactcgctcgtttcccaatgccgggctccgggcagcgagggctcgcaaacgcctgttctcttcttcgagtttattgagataactggcggcttgtcaaccttgatcacgctggttcttctctctgctgacctttcatctactcgaatctttcgctctttggcagggaactgacattcctcagcccgaccgctagataaacatccgtcacacggccgtttgccggagcatttggtcttttgggaatggcatctatgacaactacataactgtattagaatattatcacgcatgtggt

SEQ ID NO: 117865 - DNA, 328 bp, Glycine max
  Clone ID: PAT_MRT3847_77440C.1
gcttttccaaacaaaattgtttttgatgataaccttgtgtgggcgcacacacaacaattctgtgatggaaattttccagtggattcttggttaccaatcatagtgaatagtctgtatcctgtcagtcaatcaccctcagtcgctgccacaggaaatgttacatgtggtcttggacgtggaggtttacccacgactgttaggattagttctgcacttaacaatcgctcctcatatatcaacaaaaggattcgcactgcactttggaaaggtgaaaaaattgtttttcttactagaattgatcctcttccagtatctttactggctgttc

SEQ ID NO: 117866 - DNA, 339 bp, Glycine max
  Clone ID: PAT_MRT3847_77441C.1
gaatccttgatctgtgaaaagccttataggcattagaaataacattactaccaagttaaatccatttaattcgctaggttatatgtaattcctttgaacctcattaatactacttcggcttaaatagttgaaatgattaatgttcaatattaaattccaactcccgatcattgacatcgaatggttgacatgtgaaacgagcttcggaaaactgcttaaaccaacccaacacttcagagaggacagtgttattggaaagggaggcactggcacaatgcacagggcaactcttcaaaacgcgcgtttctcgctcacagttaaaactctataagactgaga

SEQ ID NO: 117867 - DNA, 390 bp, Glycine max
  unsure (1)..(390): unsure at all n locations
  Clone ID: PAT_MRT3847_77442C.1
aacacaaaaggcggctcgaggaaacaatatggtctctaatccctctcccatttttcttgtttttcaataaaaaatataaactggccttttcaaatttcagctcgtggctacgtcaactcatcacctncaccacccaanaagtacccacctgtgtctcctccataccactattcttcaccacctccaccaccaaatatttccatattattaccactctccaccaccaccttttccttcaccaccaaaaaatccatactactatcactctccaccaccacctttacctcctccaccaaataaaccatattactaccattctcctacaccaccttcaccttttccaccatataaaccatactactaccattccccacccccatcattactttc

SEQ ID NO: 117868 - DNA, 392 bp, Glycine max
  Clone ID: PAT_MRT3847_77443C.1
gggggggaaaaaaaaaagcccttaaaaaattacagggggccattttttcaggaaaatttaacctttttggcaccaattttgtttttaaaccggcccaaggaaccccttacctcgggggtcccaaggggcccccaaaacccccccggaaaatttggaaaggggtttaaggcccaatttttggagggggggggccccagaaaaataattggccacacttttaaccgggcccctaaatttttggggggggccaccccgggggaactgggggccccccaaccccaaaaggagccttgtttaaaagggggggcccccccctttggggaagttttcaatttaccgggcctttggtaaaaaatttggtgggaaaaaatggccccccgtgaaaagaaccc

SEQ ID NO: 117869 - DNA, 1071 bp, Glycine max
  unsure (1)..(1071): unsure at all n locations
  Clone ID: PAT_MRT3847_77444C.1
cttaccaggtccagacatagtaaggattgacagactgagagctctttcttgattctatgggtggtggtgcatggccgttcttagttggtggagcgatttgtctggttaattccgttaacgaacgagacctcagcctgctaaatagctatgtggaggtacccctccccggccagcttcttagagggactatggccgcttaggccacggaagtttgaggcaataacaggtctgtgatgcccttagatgttctgggccgcacgcgcgctacactgatgtattcaacgagtctatagccttggccgacaggtccgggtaatctttgaaatttcatcgtgatggggatagatcattgcaattgttggtcttcaacgaggaattcctagtaagcgcgagtcatcagctcgcgttgactacgtccctgccctttgtacacaccgcccgtcgctcctaccgattgaatggtccggtgaagtgttcggattgcggcgacgtgagcggttcgctgcccgcgacgttgtgagaagtccactgaaccttatcatttagaggaaggagaagtcgtaacaaggtttccgtaggtgaacctgcggaaggatcattgtcgatgcctcacaatcagattgacccgcgaacttgtttattcatctaccgtcgggagggaggggatgaccacggcgccccgtgcgcccggcctcctcgtcctcgcgacaaacacaaaccccggcgcttcgtgcgccaaggaactcaaatctgttaagtgcgactcccgggggcccggagacggtgtcccgcgggagtcgtcacgacacaacatttacatacaatgactctcggcaacggatatctcggctcttgcatcgatgaagaacgtagcgaaatgcgatacttggtgtgaattgcagaatcccgtgaaccatcgagtctttgaacgcaagttgcgcccgaagccattaggccgagggcacgcctgcctgggtgtcacacatcgtttccccaacgcaaacatgtaaccatgttgctgcgcggggtggatgctgacctnccgcgagcaccggccttgtggttggttga

SEQ ID NO: 117870 - DNA, 207 bp, Glycine max
  Clone ID: PAT_MRT3847_77445C.1
acacgtacaagtacttgtgcactaacaaggataagcaattggcttcctcaatgatctattcgccacctgttaccactgtcaagcgagccggtgcctgcatggttgctccattcactggcctcaagtacatggctggcttcactaccaggtacaccaacactgacattacctccatcgctagcaacagttgaagagtgcactgcatgc

SEQ ID NO: 117871 - DNA, 331 bp, Glycine max
  unsure (1)..(331): unsure at all n locations
  Clone ID: PAT_MRT3847_77446C.1
gtcgacagcatctcagtccaccaagtgaagaaaaaatgggtttgttgggtcgactcgtggttgtgttgatgattgttctgcttgccagcgggacatccatcgctgagaaagttggttcgcgncttgccggggccattcgaagttcaacaaccggcaagtgcaagccgctgggaactgtgataggnaagcaacaagccgtgttcattcgaaacattgttcgtggacnattcccaggattggnaagccgcgattggttaaaccatattcggaacggtaacngaacaaacaaaacgggtcttgttgggcaaacggggcttccaaagaaggttgg

SEQ ID NO: 117872 - DNA, 1610 bp, Glycine max
  Clone ID: PAT_MRT3847_77447C.1
tacggctgcgagaagacgacagaagggtacggctgcgagaagacgacagaagggtacggctgcgagaagacgacagaagggtacggctgcgagaagacgacagaagggagaacaagaggaacagagaatgtaaagaaggaggagggaaggagaaaatatagaggggtgaggcagaggccgtggggaaaatgggcagcggagataagagacccattcaaagcagcaagagtatgctagggagattgaaggggtattattttttcatgcagaaacgagggatcatctaattaaaccagctttcatcagggtgtgggtgatttattgtaagctttttcttattatcttcgattgtgtttacacgtgtgtgttaaaggtggcgaatcctaaagagaagggaaatgaggttgatgacaataaggaattgatattattccatgaagggataatgaacaaccctacattgtcaaggctatttccgggtttgaatagggagagggagatgtctgctatggtctcagctttgacccacgtggtctccggagaggtgccaataaccggtgattcttcttcttcttcttctttggttcttcatcatcaacctcatgatgatactgttattgttacaccaaccatgccttcttcttcttcttcatctacttatgttgttggcacctcttctctcaagagaagtagggaaaatgatacatatacatcatgcttattctcacatacaccttcatcatcccctgctatgccaaaaagggcagaatatgcaacaagggaaatgggaaactgtggggataagtgaccaattcaaaccaggaagagtatggttaggaacatttgagacggcagaagcagcagcaggcagaggccgtgggggaaatgggcagcagagataagggacccattcaaagcggcaagagtatggttaggaacatttgacacagcagaggcagcagctagagcatacgatgaagctgctcttcgtttcagaggcaacaaagccaaactcaattttcctgagaatgtcactctccgacaacctcaattcactgtttccaatcctccatcttctcttgtatctattacaacatcaatagacccagttgttcacagtactcgacctctccttcttccttctcaggcttcaactgcgaccaatgtttacgagtattttcaactctcgggcttccccaccaacaccaacctttatgatggtaataggatgtttgtgacgtctaatgccatggcttctcatcatcttcaatcttcgtcttcgttgttgtcgtcttcttcttctgcgtttgtttcttctgtaacttctcaggacacttcactttcttcgttgtattctggccagttgccaccatggtcaaaggtttctggtcacagctcgtcttcctccggatgatcctttttgtttaatgtttatggaatctgtatttttcttctttcattatcataatctcttcatttttttttaaaaaaaacattatacttctattatctgtaattgcaagactagcttgccaatacgtacattcatgattcatgactttagatgattaagatgtttatggaggaaattatggtattaaaaccttcac

SEQ ID NO: 117873 - DNA, 1664 bp, Glycine max
  Clone ID: PAT_MRT3847_77448C.1
gcccttttctgaggaggagagaatttcaccaaatcaaggggaaactctctgaagaatatgggtttaatggagtgcaatgtggaggacaataagaatctataccttcatgctcctactttcattgagtggcttaaaccatgttcttctcctaattattcatatctaaattccaacacaatatcatactcatcttcttcttctccttcttcatcttctttttctcttactcagaatgagtttgttcaggaaactatccaattcttgccaattttaagtgagaaggcctcaaaagatgaagatcaaagttttgaggtgaaagaggaaaaggttgaacaagtaactgtggctttgcacattggattgcctgacagtaataaagggcatgctgatgaggttgatgagaagatgattttccatgttaaggaagaagaagagtcatcaaagagaagcttccatggttgctcctttaacaaccaagagagaaggttttggattccaactcctgcacagatccttgttggacctatgcagtttgcttgctccatttgtagcaagaccttcaataggtataacaacatgcagatgcatatgtgggggcatggatcagaatttaggaaaggaccagactcactcaaaggaacacaaccagctgcaatgttaaggttaccatgctattgctgtgctcaaggatgcaagaacaacatcaatcatccaagggccaagccattgaaggacttcagaaccctccaaacccattacaaaagaaaacatgggacaaagccattcatgtgcagaaaatgtgggaaaacatttgcagtcaaaggggattggaggactcatgagaagaactgtggcaagttgtggtattgcacttgtggctcagacttcaagcacaagagatccctaaaggatcatattaggtcttttggaaagggacataaccctcatcctccctttgaagcttttgaggatgagaaggaatgcattactggctctgatgaagatgaagttaatgctcatcatacatgatctaacaacattctatagcttatttcctttattatgaagatatggtagtagcaaggttttaaattgcgatcgcagttacaatttcgtcgtgatttttggtgttaccggaaattacagacaaatgcggttgatgcaattaataccttgagtagaagtggtaattaatgtactagagggtttggtcactacgcttgtgctcagtaacaaaaaattctcaacaactgctgaggcatgaagactcagggaaaggtttgctaccgagcacttgcagggtggtgataaacttagttatatcaatagaggtttggagtagtttgcttttggtttaattaataagatggttgcctcaagtgatgaagcagatgaattttcttctcatagcaacagagattagtgttatgtcaagtttagtttttttgtaacctcttcaatatggaggaaatttatccgcttcattactaaatggtaaccctcactcattctaggactttattgtatgtaaggtcttgttaaaatatctttgtgacgctttgatgtgaattaatttgctgctataaatggatagccaatgtgtgtgtttttttcaagattaaaaaaaaaaaaatcttttactatatattgaatccaagctgacg

SEQ ID NO: 117874 - DNA, 727 bp, Glycine max
  Clone ID: PAT_MRT3847_77449C.1
ttcaggcaaagaagtcgaatatttggtatctgaagaaaggataatgtacacaaaatgctcaatggaaatgacagaacccaggtcccctcccccgatcagtccagatagtatcatagcgtggcggtcgggaagtagtactgatcccacaggaactcatagtcctcaataacaccgccaaccatatcgagcagaggcttgcccttcaactttccagtgatgctgtggatccaagccttggtgatgttctcgtaaaaagcgccgcgcattgcccaccaccccagggaccagccccgcttgcgcaactcttccttctccagtccagtcaagcccctcagacctccggctagtcgctcctggaagtctttcttggcgagttgcctggcgccgtactccatgctgacaccgatcaaccacggcctccagctctttctgtcgccgctgaagtgttgcatcgccagcgcgtaaacaaccggtcggagaatgtacagtgcttcggccagctcgcccttcccgctgactcgatggagcagtgcctttggaggcttgatgtcgtctgcagtcagtaccttggagagaaggtagcttgagatatccgacgagtctggtaggctcggcatggacaggccagtcctaggcatggcccagttctctgcctcgaccgaacgctcgctcggtggtgtgtccatgccgtctgccgatgccgacgactcctcgagtgagcttgggt

SEQ ID NO: 117875 - DNA, 391 bp, Glycine max
  Clone ID: PAT_MRT3847_7744C.1
gagagagagagagagagagagagagagagagagagagagagagagagagagagagagagagagagagtatatgacagattgagatagacactgtgggatatacagatactagttatactttctctgtctcacgctctcatgtagagtgtttcttgtgtcgttcatggtctctgctgctctggatctcttggtctctattactctctttctctgtcactattggctctcgcatgttatggtctttttctgtctctctgtatctcgctctgtgttactgttttgtgtctaggtgtctgtcacaatgtctctttatctctctgtcattttgtccgctctctgaatatcgctctgtctgcatatgtgttatctgcttgtttattaatttatctca

SEQ ID NO: 117876 - DNA, 791 bp, Glycine max
  unsure (1)..(791): unsure at all n locations
  Clone ID: PAT_MRT3847_77450C.1
ggagagcaaattaaatgaatctgtatttcactggagatcaataaacacttggtataaaacccaacaacctttaaaaataaaataaaggtgtctgcagaacaattaatttgtatattttaacacaaatccggcgattgtcacagtcaaaggccacatgatttggcacaacttacatagatgtagtcccattagttagaaatatagacagatcagtctcatagctagttatccagaaagagctttttatcaaaatgagaacctgtgcaatagtttgattaaaattttagccctcttatattgatgaactttttttgtatctcagctacacgccgggcagagttggctttcttcatctcccattttgatttttcagataatccatgattaatctccccaacaagggatagaattgagttggcaacacctgcttccccagaagtcagctcaactttacccttttgcatgctttctagagcagcagataattcgctccgttttgattgaagttgccggatttgatcatcaatttcttggattgccaaagtgtttctatccatttcggactctctctgagctactttttccttgtagtcatttttcagactaagaactttacgtttctttgcctcnnngacacctaannatttgtctgcctcttcaatgtcccccttggcctcaagaaaggcctcactgactaatggaagttgttccaccaactttacctgtgccagttgctcaacactgagtgtannatctttgcgaatttgtgatgcaagtgtcgcaacttctac

SEQ ID NO: 117877 - DNA, 241 bp, Glycine max
  Clone ID: PAT_MRT3847_77451C.1
ccccccttccttagcctggattctttaaaaccggcctcccttttttttttttctcccaataaaggaattcctcccttttaagggaaggctttttcctcctccaaattccagggaaagaagggaccattccgaaaccttatggccaatttaattggagtggacttattacctccttccatttaagaaaggctaaaattatttttttccccggaggtaagggccttaaaaattaaaattaaaa

SEQ ID NO: 117878 - DNA, 1724 bp, Glycine max
  Clone ID: PAT_MRT3847_77452C.1
aatcgagaacccgcaaacagttatttttacaaggatatatacaaccatggcaatagcatattggtcattgacttcatcaactctttgcaggacgatgagtactcctccagttgttgagcgcgtttcagaatgcttcatcaagccgcagcactccaaccatgaatcaaaccaaatctgctacttaacaccttgggatattgctatgttgtctgctcactatatccaaaagggccttctcttcaagaagccctcatcaccacttgttagtcacaataatttcatagagaacctgttggagaagctcaagcactctctttctctcaccctcttccatttctatcctttggctggtcgccttgtcacccaccaaacccatgaccctcccttctatgctgttttcgttgattgcaacaacagtgatggagccagattcatccatgcaactttagatatgaccatatctgatatcctctctcccgttgacgttccacccattgttcaatcattgtttgaccaccacaaagctgtcaaccatgacggtcacacaatgccgttgttgtccgtccaagtcactgaatttgtggatggtgttttcataggttgttccatgaaccacactcttggtgatggcacttcttattggaatttcttcaacacatggtctcagatctttcaagttcaagttcaagccatgaacatgatgttcccatttcgcacccacccattcacaatcgctggtttccagagggttgcggtccattaatcaaccttcccttcaaacatcacgacgattttataaacagatatgaaacaccgttgctgagagagagaatcttccacttctcagcagagtctattgcaaaactgaaagcaaaggctaactcggagtgcaacacaaccaaaatctcatcgttccaatcattatcggcacttgtttggagatgcataactcgtgcgcggcgcttgccgtatgatcaaagaacaagttgcaagttgtccgcaaacaacagaacaagaatggaaccaccactgcctcaggagtactttggaaactcaatttatacactgaatgcaggaaccgccacctcagggaaattgcttgagaatggtataggttgggcagcatggaagttgcacaaatcggttgtaaaccataacgacagagcggtgttggaaacgctcaaagagtggttagagagtcctctgatatatgatcttggtcgttattttgacccgtactgtgtgatgatgagtagctcgcccaggttcaacatgtatgggaatgagtttggaatggggaaagctgtagcagttagaagtggttatgccaacaaatttgatgggaaagtgacatcatacccaggtcgtgaaggagggggaagcatcgatttggaagtgggccttttacctcatataatgagcgctctggaatctgatgaggagtttatgaatgttgtctcggtttccaatcccttatgctagtttgctattgttcccactgttagtagttcgcagtatttggcagttcaacagctcaaatatgattatttctgtcattttaaacgctgttaaatctttattagtgaagtgatgcatttatcttctaagcaatagatttttggctcctcccacggagaaatatctaggctcccttgcgcaatgattgttgagtttttgtcaaatgaaagaaatatatgttttataaaatagttttttaaggattg

SEQ ID NO: 117879 - DNA, 375 bp, Glycine max
  Clone ID: PAT_MRT3847_77453C.1
tttgggttggtttttttttttttggttttttttttttttttttttggacaccccatgatcaagttgataacttggataattggggaacccttccctggacttggggaataaacaatttcgggttggaataattacatgaggacatttttttattttccaatcattataagcttacaattgcataaaatacttacaaaggggggaaagcataatatttttacagagagagagaatacttttatatatttttagctagaacgaactttggttatgggatcaaccaaataattgtatttagctccaggaactttttttacaaccttggtgtgcttcaaaattttgaaagggggaaccactttaattcccaattttttt

SEQ ID NO: 117880 - DNA, 478 bp, Glycine max
  Clone ID: PAT_MRT3847_77454C.1
tgacccgaacaacgcttatcatccgacctgaaatggaaatccggcccaatgttcagaggcaaacgagttatcgattcacgcacgccaacactgtcctgactattgtgcaaaaactgaaaaaccccacttgaaagcctctcaacttgctttttcagaacaagtccatatcatcgctaacttcctcccacgcgattacccctgcttgagcaactggttgccctgcctgtaaagagcgtccgtacaaatcctcttggtcggtaataccatataggcacacaaaggcatgatattctggccagtgctgtctgtccagcagcttggacacggtgtacggcacttatctatgcccatatttcacttgccggggctcatgatggactacttgtgtccgaaccttctacagctgactatgataccatgactacagagttgtcatctaacatcacaagatctagggaacctgctgccacctgaaaag

SEQ ID NO: 117881 - DNA, 230 bp, Glycine max
  Clone ID: PAT_MRT3847_77455C.1
tgagattttagcaagtcaacagtcgtcgactacgtctgtggactaatcaaaaccaatgcggactgaagaactgtcgcctgaacgtacgtatcttgaaacgctaattcgatatcctcatcgtcagctgagaaagagttcgatactactgcttttgaaagttctcaatcgcatagtgggtcctattatggtgccgataattccaattataatagtaatcagccgccgttccg

SEQ ID NO: 117882 - DNA, 437 bp, Glycine max
  Clone ID: PAT_MRT3847_77456C.1
ctaccccagctgtgtctctctttgttatcaatagctggtcctgcttgtcggctgttccctcatcccctcctcgcctttaaggctacttgcgggttgctgagattgcatcagcatagatccactttgacggacggaaggcgtaccttgtagtggagaaagcattaccatatgcagcaaattgtgaccaggcctcaccatgaaccttcacatctttagggattgtgaccgtttcagtcaggatgtaagtgctcgagttgacaaagataatcttcctgctggtgccgtggtcattgaatatctgctgaacggcggctgtgacattggtgcttcccttgtctgtttctgtcagccataagtgacacataattgaccgcggagttgcattcctatctacatagcgattggacctggagacataccttgtaatctgtattacc

SEQ ID NO: 117883 - DNA, 402 bp, Glycine max
  Clone ID: PAT_MRT3847_77457C.1
aaaaaaagggtttccacccaggggttaccgggggccccccggcaaaccgggttaaaaaacccgggggtcacttggacaaaaaaacggccccggtatattaaaagggggcccccccggggcagggtctggggggtaaaaccttccggggaaacgctttatagcccataaaaaaaaaagggacccccatttaagggtttaccaggggggttaaacccaattgggggcggggaaatggccccccctttttgcgggccgggtacaaacttttaaagaatcagaacttaaaacccggggggccccgggggggcccttatgcccaagtttcttgggttcaagggggttttaacccactcaggaacccccctttggacagggtggggggggacccaaaggggttccccc

SEQ ID NO: 117884 - DNA, 367 bp, Glycine max
  Clone ID: PAT_MRT3847_77458C.1
ggctcgaggcgctacaatgaagaagtttttacgagactgaatggtgctactcacatactggctgcatcatcaagagctcagtggttatgatagctctccaggcgatgactctgctaataaaatgaataaacctagtgagccactatctataagtgctgatgtccaagatacaaagatgccactaccacctttggcccttgctccatcgcaacatggaatcaaaccatgcactgtttctgaagaactggcagacttggttgatgcagtgagaccacttgcccaaggtcaaaaacgtggagtaaaactaagtgaacttttatcatcacctttgctagctgctgtataagaacctgcaatgctccacgct

SEQ ID NO: 117885 - DNA, 451 bp, Glycine max
  unsure (1)..(451): unsure at all n locations
  Clone ID: PAT_MRT3847_77459C.1
ctctggacagcctatctgggcccaaattcaggtcactgatggctggtcttgctatgcatgaggtgagaaacaagggacatgcatagtttgataatccaccccgcgactaatgtgagaaacgatcctaaggtgagttgagnctactcactccatgaactgatctctggatatccggcatgtgctggatgctgtataccgtcaaacgataccgagatcgcgtcacacatgcctctacatcttgcctaggagaaaatcacctgtctataaggcgcttactctgaaaacgaactacgatcattatacgagatgatgccataccagagttggcggcgaaacacttaacaacaggactaacaaaaggtgttgacgatattaaaaaacaccgcaaagctctgaaaaagagtgattcatatgtctttataagacttatcgaatataatgtataaatcat

SEQ ID NO: 117886 - DNA, 1344 bp, Glycine max
  Clone ID: PAT_MRT3847_7745C.1
ggtgacagtgatggcggggagtgtgggaagaagttgggaattgaagcagtgattgttgctccttctagggagcttggaatgcagatagtgagggagtttgagaaggtgctaggaatggataacaagagggcggttcagcagcttgtagggggtgcaaaccgaaccaggcaggaagatgctctcaagaaaaataagcctgcaattgttgttggcacacctggtaggatagcggagctcagtgcatccgggaaacttcgaactcacagctgtcgatttttggtattagatgaagttgacgaactcttgtcgttcaatttccgggaagacatgcacaggatattggagcatgttgggaggagatcaggtgcagaccaaaactcagattctagaaaggccgagcgacagttaattatggtttctgcaactgtgccattttctgttgtaagggcagctaggagctggggttgtgacccacttcttgtccaagctaagaaagttgccccacttggaactgtctctccctctgagcctatcagtttgtctcagtcttcacccagctcaagccctagcttggctatgccatctccagcagcagtagagagtctacctcctgcattgaaacactattactttgtaacaagggtgcagcacaaagttgatgtgttgagaaggtgtattcatgcactggatgccaaatttgtgatagccttcatgaaccatactaagcagctaaaggatgttgtcttcaagctggaggcccgtgggatgaaagccatggagttacatggggatcttgggaagcttgctaggtcaacaactctgaagaaattcaagaatggtgaggtgagagttctggtgacaaatgaattatcagcaaggggtttggatgtggctgaatgtgatcttgtggttaatctagacttgccgacagattcaattcactatgcacaccgagctggccgaactggtcggcttggtaggaatggtacagtggtaaccatatgtgaagagtcagaagtgtttgttgtgaagaaattgcagaagcagctgggaataccaattgcatcctgtgattttgcagaggggaagctacttgtcagtgaagaagagaaaacagtaagcacttctgaaagatgaggtgttatatttttgcaacttgtttaggcaacaatgcagtttccatgttccatgttttattcttcatattgcttcttacctattgtacttattgacaatacttgagtgcacattagaagcttccttgtattttacattttaagtttagtatattgataagggtatctgtttcaaagtgctactgctaatagatattatttttgcctg

SEQ ID NO: 117887 - DNA, 283 bp, Glycine max
  Clone ID: PAT_MRT3847_77460C.1
ccgtaaattcacttgaattgctatctgactgttacctttctaagtcacttagaattgcaagcagggtctccaaacagaatacagattgttaaaagtcagatagcaattcaagtgaatttacctcagattacttttggagagaaaaggaagggggagaagtagttttacagacagaccatatactgaaccggagaagtgttttgactagacatttactgtgacatgtagtcagaaaatagtagttcccaactgtggttaccattccccctccccagaaaaagaa

SEQ ID NO: 117888 - DNA, 268 bp, Glycine max
  Clone ID: PAT_MRT3847_77461C.1
aaaaagcccaaatttatggaaaacaacccttctaaaaaggggggaaaaacccttctggtggggaaacctagcccatggggggggggccctccccagagggggtggcccacagcatcgccctcaggggggacaaaataaccccaccccccaaacaaaagtgggccccaaagttgaggcaccaacttgcgcacccctttttggcttgaacacgtaaatggcaagcccttaaaatctaaaacctttgggaccccggggcggccccccgagc

SEQ ID NO: 117889 - DNA, 436 bp, Glycine max
  Clone ID: PAT_MRT3847_77462C.1
ccacgcgtccgcaggcccactgcgcagtgcaatcagttgaaggatttgaaggactaattctcatccggcccggcccagcccagcccattaagtcaacgtcatatacctttccttctctttcttgcccttttgattcattattatttaattttgtgataactatggggggatgaataagatgattgtgaatatttttggattagatttagatagataccctagctattttgatccaagagcttctctcaagtctgatgctctcgctctacatattatgattatggttattatttatattactaatgtaatatgattagtccattaggaaatcaaaacaaaaagttattggtcgttattatcatgctatattgctatctgttcaaactattgtcatctcttgtaaataaatcttttcattctctttcttatttttatt

SEQ ID NO: 117890 - DNA, 722 bp, Glycine max
  Clone ID: PAT_MRT3847_77463C.1
tgcagagcgatatcgctatccagatgttccttctttcttggtatatgtgcacaaccgtttggttgttcgctttaggactttggagaaaccaaaggaggatgaatttagtctggagctgacaaagcttgacacttatgacaatgttgtagaagaagttgctcaacatattggtttgagtgatccttctaaaattagactcacatctcataactgctactcccagcaacctaaaccacagtctatcaagtaccgaggaatggaacatttgtcagacatgctgattcactatttctggcagagggatatcctatactatgaagtattgaatatccctctgccagaattgcaatgcctaaaaactcttaaaattgctttccatcatgataccaacgatgaagttgtgattcatactattagattaccgagacatagtacctgtgtctgatgtacctcatgatcttatattaaagggagatttatctcaaactttgtgcaaaacttagattgcttgaaattttttatcacaagagctataagattttcccggtcagcgaaaaagattgagaacattaatgatcaattattgggctctacgagcagaggagggtctttgagaagaaaaaaaccttggcccgcatgatccggtgatccatgtttatcattttttgaaagcacaacttaaaatcatgagcaggttaagaactttggacatcctttttatt

SEQ ID NO: 117891 - DNA, 3286 bp, Glycine max
  Clone ID: PAT_MRT3847_77464C.1
gagcttatcacggttgttatacttatttaacatgcagcttgatagaaatgttgccatgttccttgcggtgctccttttagtgtgcttctcatttgttgtcgttggtggtctcctgttctttaagttcaggggtaacaaaaattctctggaagattgtctctgggaagcctgggcatgtctttgttcatcgtctactcatttaaaacaaacaacacgtgttgagcgttttattggttttcttcttgcaatatggggtatattgttttacactcgacttctaagtacgatgaccgaacaatttaggcaacagagtaatatgcaaaagctcagggacggaacccaagagcaagttctggagactgatcatatcattatctgtgggatgaatagtcatcttcccttcatattaaagcagttaaataagtatcaggaatttgctgttctcttaggcacagctacagctaggtatggttcagacaaggaggcagagaatccttcttatgtctgatcttccaagaaaacagtagaaaatgtggcatccaaactatttgttcaatgctctcggcagaagggacttataaagatctacaggcacttgctaaattatcgaaaaaatgtattcaatctttgcagcttgcctaatctagaaggactgacatatagacaaataagacatagatttccagaagctgttgtatgtggtctttaccggagtgggaaaatatacttccacccaaacgatggtgaaattctgcagcaaaccgacaaagtattgtttattggatcccttcgggatacaaatactaaaaagccagaagtaatcctagatgggaaagaaggaatgtatgaaattcataatgaggaaatacttgaaaaggatgtggaacatgccattgaattgagtaaagtaaggcttgctaatattgtaaaacggcctaatagatcaggttccaaggcatcagatgggaatcttggaccgaaagaatgcattcttttacttggatggcgccctgaggctgtagaaatgattcaagagtatgataactatcttggtcctggaagtgttttggaaggtgttatcagacacaccattagatgacaggatcaataaggcaagcaacatccatggtcataacaaactcaggaatgtccgagtttcacatcggattggaaatcccatggactatgacaccttaaaggaaaccattttgcatattcagaattctttgaagaatgaggatgttcctatgtcaattgctgtcatatctgacagagactggcttcactaaactggtaaacagttgtagtagttgtcggcatgcattttctctcacgttgctatatcccatgatgaccaattacaagcttcaccatgttcagttgttcacatagatagcttcagttgttttagtagagtaactagtttttacttaatttgacttttgtcatgtgctgaatttcacttaaatgaagttaatggatttcagattgtttgtatgctacgtaatgaagtttggaaagacttactagatgcagagggagatgaaatatatattaaggatattggcctatacatgaaagaaggagagaatccatcattttctgagctttctgagagagcatatttacggagagaagtagctataggatatgtgaagaacaagaagaatgtaatcaaccctgttgccaagtctgagccactctctcttgaaatgactgactccttgatagtcatatctgagctggaaggagagcaacccgttgttttgtaatgctgaagctttaatcttgtcaagaatttttttggaaaattctaaccccaaaaatttggggccattgattttgatgattgatgattaggatgattcaatatcattgtgttactctttcatcattcgaaataaattgtgtatggtttctctgtcaaaaagccagaagtaatcctagatgggaaagaaggaaaccacgaaattcataatgaggaaatacttgaaaaggatctggaacatgccattgagttgagtaaagtaagacttgctaatattgtaaaacggcctaatagatcaggttccaagggatcagacgggaatcttggaccgaaagaatgcattcttttacttgggtggcgccctgaagctgtagaaatgattcaagagtatgataactatcttggtcccgaaagtgttttggaagtgttatcagacacaccattagatgacaggattaataaggcaagcaacatcaatggtcataataaactcaagaatgtccgggtttctcatcggattggaaatcccatggactatgacaccttaaaggaaaccattttgaatattcagaattctttgaagaatgaggatgttcctatgtcaattgctgtcatatctgacagagactggcttcttggagatccagctaaggcagacaagctgtctgcttattctctcctccttgctgaaaatatctgcaacaaacttggggttaaggtgcaaaatctagttgcagaaattgttgattcaaaattggggaaacaaattagtagaatcaagccatcagtgacctacattgcagcagaggaaataatgagccttgtaacagctcaagtggcagagaacagtgaactgaatgaagtttggaaagacgtattaaatgcggagggagatgaaatatatgttaaggatattggcctttacatgaaagaaggagagaatccatcattttctgagctttctgagagagcatatttacggagagaagtagccataggatatgtgaagaacaagaagaatgtaatcaacccagttcccaagtctgagcctctctctcttgaaatgactgactccttgatagtcatatctgagctggaaggagagcaacccgtcgttttgtgatgctgaaactttaatcatgtcaagagccccaaccccaagagccctgtcaaatgttgattgattttgatgattgcatccaggtgattgattgctaattaggatgattcaatatcattgtgttactctttaatcattcgaaataaattgtctatggtttctctcctctctaaggatattcttcagtagacaaccaaaagttaatctctttcaagaaggagagattgccaaagtaaatatcacctttccatgtgttaagcatagatagtacttgagactagctacttatgtcatgagaggttgaattccaactttgtttttgacctttgagagatatatgatgatattacgataattgagttgtcaaattgtgatcatatatggttttaagccgattc

SEQ ID NO: 117892 - DNA, 1036 bp, Glycine max
  Clone ID: PAT_MRT3847_77465C.1
cccacgcgtccggggctttcttctcttctgacaggggatcgtgatcgactgtagctgcgatcacgggatcagacgggaatcttggaccgaaagaatgcattcttttacttgggtggcgccctgaagctgtagaaatgattcaagagtatgataactatcttggtcccgaaagtgttttggaagtgttatcagacacaccattagatgacaggattaataaggcaagcaacatcaatggtcataataaactcaaatgtccgggtttctcatcggattggaaatcccatggactatgacaccttaaaggaaaccattttgaatattcagaattctttgaagaatgaggatgttcctatgtcaattgctgtcatatctgacagagactggcttcttggagatccagctaaggcagacaagctgtctgcttattctctcctccttgctgaaaatatctgcaacaaacttggggttaaggtgcaaaatctagttgcagaaattgttgattcaaaattggggaaacaaattagtagaatcaggccatcagtgacctccattgcagcagaggaaataatgagcctcgtaacagctcaagtggccgagaacagtgaactgaatgaagtttggaaagacttactagatgcagagggagatgaaatatatattaaggatattggcctatacatgaaagaaggagagaatccatcattttctgagctttctgagagagcatatttacggagagaagtagctataggatatgtgaagaacaagaagaatgtaatcaaccctgttgccaagtctgagccactctctcttgaaatgactgactccttgatagtcatatctgagctggaaggagagcaacccgttgttttgtaatgctgaagctttaatcttgtcaagaatttttttggaaaattctaaccccaaaaatttggggccattgattttgatgattgatgattaggatgattcaatatcattgtgttactctttcatcattcgaaataaattgtgtatggtttctctgtcaaaa

SEQ ID NO: 117893 - DNA, 170 bp, Glycine max
  Clone ID: PAT_MRT3847_77466C.1
ccaggtacacgtacgtatcggaacaggtacacgacaacgagggacagcgaatccaattaagcaagatgtgtttgaataacgacagtgtggtgctaaaggtgtgtttgttgcgtcttttccttgtgggggtgatcgctacgctcatggcactgatcttcttcaagagtgat

SEQ ID NO: 117894 - DNA, 151 bp, Glycine max
  Clone ID: PAT_MRT3847_77467C.1
agaacccacagtgcacgctgatcattgatcacagaaccctagaactcaactctggcttcagcaaaggatctcagatacttgagtagatgtctcaaagatggatgtagatgctgtgctttcagtctccggcgatcaagagaccaagactgcc

SEQ ID NO: 117895 - DNA, 635 bp, Glycine max
  unsure (1)..(635): unsure at all n locations
  Clone ID: PAT_MRT3847_77468C.1
cggaattcccggctcgaccccgcgtccgataaggtacgttagtctgtatcaaggctagattagagagataaataaagacaggttatcttatatcagtacaccaataaataaataaaaactaaaaaagtacattgaatgttgtctatctacctcgatcttgaactatatatgttcactatctcgcatcaaaaaactatttcacggtctaatatttattaagttcaaaacactatcgaagttaaaaggaaatttgtataatgcacaatattgttacacgacaccctgcttaattttgacgaaataaaggtcacgacaaagaggaagctagagaagtaagcacaggctgcataagtaaatgggccttgctatctagtaagaaaatgtggaaaagcttctcacgaataacatgaagaatcacacaatgaacaactgattttctttgaaagacaaacatttatcggaaaattaaaaaaaagaaaaagaaaaatggaagttgatgcaatacagtgttcgtgtgcttttcacgaaaaccatttggtaactntcagcattntcctaagtgaatatctcccaagttcaataatggcctgcaccttcaagttgcttactacactntttttttttttttttctgga

SEQ ID NO: 117896 - DNA, 1648 bp, Glycine max
  unsure (1)..(1648): unsure at all n locations
  Clone ID: PAT_MRT3847_77469C.1
ggcctgcgcgtccgctcacgcgtccgttcacttttaccccacgcgtccgcccacgcgtccgcccacgcgtccgttcataatgaaaggtttttatttaaggggcttgcctttggcatttggtaactattggatgcctggtatgtggagatgccactgaatcctctaatgacaagcacttcatgctgagttggtgtcacgttattttctcttgggcatctatggccactaagactgaggaaaaaagtatgtggtggtaggcaaatgcgggtctttgcaccatctccatctgggtttcggaaggtgatattggcaactaatattgctgagacatcagtaacaattcccggaatcaagtatgtaattgatcctggatttgttaaagcacgttcttatgaccctggaaaaggcatggaatccttgattataatacctacatccaagtcccaagctctgcaaagaagtgggcgtgcagggcgtgaaggacctggaaaatgcttccgtctatatcctgaaagagaatttgagaaacttgaggactcaacaatgccagagattaagcgttgcaacctttctaatgtcattttgcagcttaaggctttgggtgttgatgacatactagggtttgatttcattgataaaccttcaagggcagctattataaaatcgttggagcagctatttttgttaggtgctctaacagatgaatgtcaactatctgatcctgttggtcatcaaatggctcgactgcccttggatcctctttattccaaagctcttattttagctagtcagtttaactgcctggaggagatgttgataactgtggcactgctgtctgtggaatccatattttatagtcctcgtgacaagttagaagaggcaagaactgcaacgaaatggttctcagcgagaagacgacagaagggcactttgataaatgtgtatcgagcatctaatgatttcttggagaagagatcaatggaaatgaatacggcaaagactgaaaaggtttatagaaaatggtgcaaagaaaattttattaatagccggtctcttagacatgctcgtgacattcacaggcagattcagggacatgttgaacaaatgggtctgaatctttcttcttgtggagatgatatgcttcaattccggagatgccttgcagcttctttcttcctcaatgcagctgtaaagcagccagatgggacatacaggactttggcaagcggtcaggtggtgcagatccacccttcttctgtattattccggcaaaaaccagagtgtgtgatatttaacgaattggtccaaactaatcacaagtatgtccgaaatttaaccagagttgattacctatggttaaccgagctggctcctcaatattatgctatgcacaattaaattattgatgttgccactaaacaggtgattaacattacattattttaatcttttttcttgatcttgtttgaatgatttaaatacttttatcatgtgcaaaattgatggtttacttccacaattctatgtaatcccccattactgtcttcattattgggggtcggctgcaatgcaatccaggatttaaaacgcacaattcccttagtagtgctaatatgttnatgatcatggcttaaacttttagaatatg

SEQ ID NO: 117897 - DNA, 2357 bp, Glycine max
  Clone ID: PAT_MRT3847_7746C.1
ggctcgagtgccacttcaaaatctcttcattttcttaagtatttatacactgtgggtccccgcaattaaattagttttcggctacataaacagccagtaatctttatatttttctcaaatatatatgaccgtcatcatgatcgttgtggtttgaaactgccgaatcccggtaaataggaacaagagtttatttcagtttggaacattaagcttggttcatcaaaaggcctcatcacttgaagggttactatatactacttctgtgactgaaaagtgagctgaggtgtataactgcaaatgggtgtttggtggtggaagctgttttttgctgctcttgctgggattctcttctcaacccaacattgtgcttcccaaaaagttccaaactacacatttatgcacaatgcaacgacagcaccagacgtatcatactacgactacatcgtaattggcggcggcaccgcagggtgccctttagctgcaacactgtcccaaaattacagcgtattgctccttgaacgtggtgggtcgccctacggcaaccctaacatctccgacttagctgctttcggtgctgccctctccgacacctcccctacctcccccgctcagcgtttcatctccgaagacggtgtcatcaactcaagagcccgcgtcctcggtggtggaagttgcttgaacgctggcttttacactcgcgctagccctcaatatgtaagggaagcggggtgggatggaagggtagtgaatgagtcgtacgaatgggtggagaagatagtggcatttgagccacaattgaagcagtggcagtcatctgtgcgggatggactaatagagataggtgtggtgcctaataatggcttcacttatgaccatattgatgggactaaagtagggggcaccatctttgaccagaatggcttcaggcacactgctgctgatcttctgcaatatgccaaacccactggaattaccctgcttttggatgccactgtgcataggatcttgtttagagtcaaagatagatcaaaaccaatggcccatggagtggtgtttagagattcattgggtcgtaggcacaaggcgtacctgaagcccgatccaaggaacgagataatcgtttcggccggtgcacttggaagcccacaacttctaatgttgagtggaattgggccggaagagcaccttaaagcccacaacatcagaataacattggatcagccattagtaggacaaggaatgtcagataaccccatgaacgccatctttgtcccatctcctgtccccgtagagatctctctgattgaggtggtgggcatcaccacttttggcacctacattgaagctgccagtggtgaaaactttgccggtggttccccaaaagactacggaatgttctcccccaagattgggcaactctcaacggtgcctccgaagcaaagaactccggaggccctagccaaggcaatagaagtgatggaaactctggaccaagcagccttcagaggaggattcatattggaaaaaatcatgggtccaatctcaagcgggcatttggagctccgaacccgtgatccgaacgacaacccatcagtgaccttcaactacttccaggaccctcgagacttgcagcgatgcgtgcagggcctgagcaccgtggagaagataatcgagtccaaagcattctctcccttcagataccccaacatgcctgttcctgtgctgctcaacatgaccgcaagtgcccccgttaacttgttgcccaagcacaccaattcttcactttctttggaacagtattgcagagacactgtcatgaccatttggcactaccatggaggctgccaagtagctaaggttcttgatagggactacaagcttcttggtgtggatgcactgcgtgttattgatggctccacctttaactactctcctggaactaatcctcaggccactgttatgatgcttggcaggtatatgggagtgaaaatattgagcgagagactaggtggtgcggctgctgctgctgaaacagagcaataagttgtatagttttcctttcaacaaagtgtcttcgtgtcactgaggaaaaacaaattcttgtgagaatgatttgtgaagtaacctttcaatgagaaaaataacaaattaaacattgttcctgtaatcgatgaagtgaaactagaagagggacggagggatcttctcttgttttgattacgaccgtggtgtggatgagttatttttgtaagaataaaatttaggtataacattttaagtatttcctgaggttttaaaattaaaattagaattttattttgataaaaaaaaaaaaaaaggggcgcccccggtcaaga

SEQ ID NO: 117898 - DNA, 485 bp, Glycine max
  Clone ID: PAT_MRT3847_77470C.1
aaaaaaaaaaaaacagggggttttcaaacacaataggagttttcttattttgcgcaaagaaaccggagaaaaaaatgaaggcacaatttggcgcgtgcttttaggagcccaatatacaaaatttttacctgcccggggggaaaaaggggtatttttaaaaaaaaaataaacgcacccgcgggcgcccgcccgggccccccccggaaaacccggccccgtcttggggggggacacactttttctatagggggaggcaaaaaagggggggggaaaaacagggatatccgctgcccgtgggaaaaagtttttcgccctcaatttcccacaaaatatccggggggaaaaaaaaaagtgaaacccggggggcccaaagggggtcacacacattttttggggggggcaaacggggccctttaagagaaagaaaaatgtggggccccttttttaataagaaaccccccccgcggggggagggggtttttttt

SEQ ID NO: 117899 - DNA, 2300 bp, Glycine max
  Clone ID: PAT_MRT3847_77471C.1
ggctcgtgtgtctgtcagtcccattttatttcacctctctttcctaacccccaacgccacgccactgtcactttctttctctcacaaatcacaatgtgctccgataactacaatctctcaattccccattaattaaaatcaaaatcaaaatctaatctgggtttctcccatcagaggacaaagcttccgactttgcgggattcgttcgtatttgtttcagtgctgtgatggggaaggtcgcggtgggagctgccgttgtctgcgccgccgccgtatgcgctgcggcggcgctggtggtgcgccaccgcatgattagttcccggaagtggagtcgcgccatggcgatactgaaggagtttgaggagaagtgtggcaccccaattgtgaagctaagacaagtggctgatgccatggatgttgagatgcacgcaggtctcgcatctgaaggtggtagcaagctcaatatgttgatcagttttgtcgataatctcccaactggggatgaggaaggcctctattatgcatctggatcttggcggcacagaactttcgtggctccttcgtgtacatttatgggggaaaaagacaaggggtgttaacggtcgggatcttgcaagaagtttcaattcctccaaatttgatgactggctcttcagaagcattgttcgattttatagcagcagctcttgcaaaatttgttggttctgaaccttgagagtcttcatcctccccctgagtagacaaagtgaactgggttttacattctcattaccagtgcgtcaaacatcgattgcatctgggactctaataaagtggactaaaggtttcaatattgacgatgccataggtgaagatgtggtgggagaactaaccaagtacatggaaaaaattggcctggatatgcgcgttgctgctctagttaatgataccattggaacattggctggaggcagattcgacaatcaggatgtcattgctgctgtgattcttggtactgggacaaatgcagcatatgtagaacgagcacatgctattccaaaatggccatgggcttataccaaaatcaggagatatggttataaacatggagtggggtaatttccgatcatcacatcttcctctaacagaatatgatctagctctggatgctcagagcttaaaccctggagaacagatttttgagaaattgatttctggcatgtatttgggggaagttgtaaggagagctttattgaagatggccgaagaagctgacttttttggagatactgttacccccaaattgaaagttcctttcatacttaggacgcctgacatgtcagccatgcaccatgacacaagttctgatctgaaagtggttggaaacaaattaaaggatatattagagatctcaaacacatcccttaaaatgaggaagatcgttgttgaactgtgtgacattgttgctactcgcggagctcggcttgctgctgctggtattttgggcatccttaagaaaataggaagagacacagttaaggttggggagaagcaaaagtcagtgatagcgttggatggggggttgtttgaacactacaccaaatttagagaatgcttggagagtgcactgaaggaattgctgggagatgaggctgctgagaccattgtcattgagcatgctaatgatggctctggcattggtgcagccctcctggcagcttctcactcccaatatttgggagtggaggagtcttaaattttattgccaaacaagggaaagacgtgtaatactagtttcattttttgcataggtggtagatcaacacattgaagcaatggtgccttgcagctggtgactgggggggcattcattattttggtttcagtgtttgtttctccttcgttaaggaataatatcaaagatataaacttcatcttgagtgactagacaccttttgcggaatgtagccaacgagaataaagcaggacttaatgtattgacaagcctaaatttgtttttatttcaaagcttttctgagttatcaatgaagactaaagcattgtttctgttattgttgttgttgcagtcatttgcatgacttagaaaccctccattttgattaccctgtctgaaacataatgaaacttgattattatatgggtgattaatggatgttttcatatcttttctagaggacgagcaaagtaaacatattttttggtaattgccatgagaggagagggtgtattacagtgtattttatgataattgccgcatttatggaaataaataaatggcagacttcaaaaaaaaacaaaaa

SEQ ID NO: 117900 - DNA, 312 bp, Glycine max
  Clone ID: PAT_MRT3847_77472C.1
gaccgacgcgtccggagatatatgatccgtctttagaccctaatttatctggagatccatacaagacactgttagttgcatttcttagggatgagaggactgatcaccgactcaaaagggagtttgaagcatatgggccaataaaacggttaaggatgattactgataaggagactaataaaccaagaggatatgccttcatagaatactttcatacactatacatgaaatctgcatacaagcaatctgattgacggaaaatggatatttaaatatttctttgagatatctacccgtgtcataactgttcct

SEQ ID NO: 117901 - DNA, 491 bp, Glycine max
  Clone ID: PAT_MRT3847_77473C.1
ttcaaagaaatacttgattgaaatttttaagcttttaagcatgagcctaagaattgattctaacttacacttagaaaacatattctggaaagtgagataaatcctgcaatacaattttttgttgcataatgctcagattatagtgtaggccagggagttaatctatggtgctcacttttgtatatgccatttgataggaacccaataataaatagtgaaaagcaaaggatattctgttgttttttatacacgcttcaaagcataaagggattacagaagaagaaaaagaacccttggcacgtgagacaattggtctactgtcggtcatttaagggccatcttttatattttggttattaacatcattttagtagtatccttacaagtagctaaaaatgataagtataattgctatatatccctgttatgttccaagtcattacttgtttgttgatgcagagttgatgaaattttattaccataactgttct

SEQ ID NO: 117902 - DNA, 260 bp, Glycine max
  unsure (1)..(260): unsure at all n locations
  Clone ID: PAT_MRT3847_77474C.1
ctccgagagaganactcacgacttcatgaacgtcgactcgttctcccaactccccttcatccgcccggctcctcttgtcagagagaagtcaggcattcgcctctttggcatcgaatttgccggcggannnnnnnnnnnnnnnnnnnnnnntaacaattttgttgttgtctcggccgaggattctgagtcggccgaaataacaacagcagccaacaccaacaccaacatcaatancaacaaatcaacattcgacctcgatc

SEQ ID NO: 117903 - DNA, 577 bp, Glycine max
  Clone ID: PAT_MRT3847_77475C.1
atataatatccagcatattcttataaacctttactcactgttaccataaatacatacccatgtcctacactaagactacaaaactttcagtttaagacaatatcaaaaagaatattacaacaattactttttcacacactggattggatcgaccatttatggtaccctcaccagctaataaataatcacccacattttctctccatgcatgacattaatcgaccagcaatcctttcttataggggagtagtgagtagatatttgatagaacatctgtctgtagaaaagcacatatgcctgatcatgcagcaccttatttgttccaatagcaaagacagattggtcatcaaatcgtagccatcgaccattgggatattgggcatcagctgtgtagtgcccctttgaaggctccgttccatggtgagttattgtagcaacaagttcatactttcgaccctcagtagatggtgaaacaagcaattcacgacccaaataccaactcaagaggaaagtggacaggcttatgcaacttggtgcttccctggctttcataaccaaaacgcatcaagtgcaatat

SEQ ID NO: 117904 - DNA, 465 bp, Glycine max
  Clone ID: PAT_MRT3847_77476C.1
actagtggaaagcacgaactatatttgaagtatacctgacacgggagggcaaattgcaacataaacaaatgacagggtgtgtacctataaccacattgtgtgtaccaggcgcaaaataagagaagggactgtgaacaaatggggaactgccaaggtatggggaggaaaatggactgaggaagcattaaaacatggaacccacttgggcatggaacattggggggacaccaacaagactgaacaactgcatgaatggccttgtagatgaactggtgagaaaactgtggagggggatgaccctggtggacatgaccaaggtggagtgtgagactgtgagaagggggcggagactgggggggggggggggtgggtggctggtggtgggggggggggggggggggggggtggggcggggggcggggggggggggggggggggggggggggggggggtgggggggggggg

SEQ ID NO: 117905 - DNA, 723 bp, Glycine max
  Clone ID: PAT_MRT3847_77477C.1
actgcaagaaaatctgttcgaatagtgacactcccgaaaataatgatattgcacttgatgcgttttggttatggaagccagggaagcaccaagttgcataagcctgtccactttcctcttgagttggtattgggtcgtgaattgcttgtttcaccatctactgagggtcgaaagtatgaacttgttgctacaattactcaccatggaacggagccttcaaaggggcactacacagctgatgcccaatatcccaatggtcgatggctacgatttgatgaccaatctgtctttgctattggaacaaataaggtgctgcatgatcaggcatatgtgcttttctacagacagatgtgaacatataaatattgttctatcaaatatctactccctacagaaaaaacactactcccctataagaaaggattgctggtcgattaatgtcatgcatggagagaaaatgtgggtgattatttattagctggtgagggtaccataaatggtcgatccaatccagtgtgtgaaaaagtaattgttgtaatattctttttgatattgtcttaaactgaaagttttgtagtcttagtgtaggacatgggtatgtatttatggtaacagtgagtaaaggtttataagaatatgctggatattatatagtcccgctgacttggaagagattgggatctaaagttattaattaagcttaagtttgttctgtttctcgtt

SEQ ID NO: 117906 - DNA, 2478 bp, Glycine max
  Clone ID: PAT_MRT3847_77478C.1
ccgctctttaaggcaagaagggacaaagtggcgttttttacttaccctttgcttcatttcattccataacctaaccctaaaccaaaattcagagagaggcttttgtgttaacctttctgtcgatgctccgtgttggtgctaccaaggctcagtcggagaggagggttccattgttaaatgctctctctcttcactctctgctctcccttttcccctttcatgtcttcaatcaccgcctctccttcagggtctccaaaaaccctactttttgatttccatcccaacccttttttttttcctactgggaatttaatattcaattttagcctcctggatttccaacctctatctcctcaccaacacgagtgattcaaagatgtttctatttgggtcatttactgaagatgaaactcaatcattgctgtcaaagcagtcttctgggaaaaaggaaaagcctgtggagaagaatcagctgcaatttggttctctgaattctgttactgttgagtcaaacaatctgctaaattcatcaaaagcatcttataatgctccaccctctgattctcggaaatgtaatggagtgaaaagtgccattgataattcacctgaagtgtcagggacagttaaagagaatggcagcattacgaatatctcccctaggtccaccagtaccattagtgtaaatgaagttgaagaaaaaaatgtgaatttttttacattacgttgtgaagatggtcccttaaacaagtttacaaagttgagcctagatgcttctgaggctgaaagcttgaagaatgtacatacaactggcagtggggatgattctgcaccaaagttacctgatcgagagccccaaaaggcacctaatgggcatgctgttatgcatgttaaggatatactgcctcgaggccttatcaactctgggaatctatgttttcttaatgcaaccatgcaggctctcttgtcatgctcacccttcgttcatcttttacagcaattaagaacttgcaaccttcctaaggttggatatcccacattgacggcatttgctgagttcataacccaatttgatatgccaagcacaactaaagtaaagaagcaagatgcagatacgtttgagtctggaaggccatttcgccctgttatgtttgaaggtgtcctaaaaaattttactccggatgtgccaaatagcatttcaggaagaccaagacaggaagatgctcaggaatttctgagctttgtaatggatcaaatgcatgatgaattactgaagcttgaaggacagtcttcaagtcttaatggtagcaaatcttctctggtttcttcggtggaagatgatgaatgggaaacagtggggccgaagaataaatctgctgttacaaggactcaaagctttctcccatcagaattaagtggtatttttggaggacaacttagaagtttggtgagagctaaaggaaatagagcttctgctactgttcaaccatatctcttgctccatctttagagcttctgctactgttcaaccacaactgatgatccattttcacttgttttctgcaccagtgcacccaattgggtaccgaacatcactcactgcaaaggctggatgttgtgactgcaagaaaatctgttcaaatagtgacacttcctaaaataatgatattgcaccttatgcgttttggctacggaagccagggtagcaccaagttgcataagcctgtgcacttccctcttgagttggtattgggtcgtgacttgcttgtttcaccatctactgagggtcgaaagtatgaacttgttgctacaattactcaccatggaatggagccttcaaaggggcactacacagctgatgcccaatatcccaatggtcggtggctacgatttgatgaccaatctgtctttgctattggaacaaataaggtgctgcatgatcaggcatatgtccttttctacagacagatttgaacatatacatattgttctgtcaaatatctactcccttctgctcctaacagaaaaaacactactcccctataagaaaggattgctggtcgattaatgtgggtgattatttattagctggtcaagctcaatatctattgttcatggctcagattgttaaggtataccataaatggtcgatccaatccagtgtgtgataagagtcattgttgtaatattctttttcctattatcttaaactgaaaaagttttgtagtcctagtgtaggacatgggtatgtatttatggtaatagtgagtaaaggtttataagaatacgctggatattataaagttccaccagacttgaaagagattgggatctaaagttattaagcttaagctttgttctgtttcagattttttaaaaattgattaaagattaaaaaaaaaaaaaaaaaaaaaaaaaaaaaaaaaaaataaaaaaaaaaaaaaaaaaacaatcaaaaaaaaaaaaaaaaaaaaaaaaaaa

SEQ ID NO: 117907 - DNA, 324 bp, Glycine max
  Clone ID: PAT_MRT3847_77479C.1
gcacccctacgtaaccttggatgctactagaccacacactgggggctttaattgcaatcaaattagttcaggcaacaaagcagcagttccctacctctgctcattagatgccaactcttaccaaacaccctcttcaagagggaccatcacaccctgaagaggaaagctttgtctccataaagttcggggaaagtccttacttcggacagggaaagaattcccccggatcattaacccctcatctaagacgcaaagccggttgaggacgggccttcccttggcgactacaacatccagagggaccctaccctctatcttggtctt

SEQ ID NO: 117908 - DNA, 379 bp, Glycine max
  Clone ID: PAT_MRT3847_7747C.1
aaatattagtaccatattttatttttacaggcttgagaaaccacatttgtttggcggcaaacttgcaataattatgacgcccatttccactaagaaatggttggcaccgcattctataaacatattaccatcagtttttccttttaaaccggcgggcatacataaccactgtattattctgaaaccagccaacaggatttgaattaagaattaaaggacaggtccttattttaccataggattgatgcgagaccaataaagcttgaaacccaacacacatgccaattgacatactgcacaagggacgaaaaatagctatgttatgatctgtgaccacaacctgaaaccatgtgttttgagagtgttgtaaaaactggct

SEQ ID NO: 117909 - DNA, 260 bp, Glycine max
  Clone ID: PAT_MRT3847_77480C.1
tgctgggaactgaataacaaaccacccatgttgactaatgactgatttattaaaccatagacattcatcccaaacagtcctggccgtccccctcctaaggcccgataatgcttatccacactcaaataagcccgtggggaagctagctacaagtttttccaactgattagctccattaagcggtccaattggacctaacgtacgctccgggcaagtaaatttttccaccagctgcaccatgtgggtccccactgatggat

SEQ ID NO: 117910 - DNA, 410 bp, Glycine max
  Clone ID: PAT_MRT3847_77481C.1
ctctgtcgtacggtgtatgtgagtgggtttgcgagtgagccacgcctcaagaactcaatcagatggtatgcaggaaagcatacgaccaacctcctgatcaacttgcgttgcgacgtgtgtcaaggggcgtaccaagctgccttcaacagaggcttcttcaacaagctctccctagacgactacctcctgcgccacaccgtatgccaccgctgctgcatggtccgaagtgagatctagtacatcaatgacggcgttcatggggacgctcccacagctcatacggtcgcatatacatgtatatttctattacgcctcagtggacgccaatgagagcgtcatagagtgactggaggattctgtcgtcgggcacaacatcgcattcagggtcatgatgaggctggtgtgccgtc

SEQ ID NO: 117911 - DNA, 351 bp, Glycine max
  Clone ID: PAT_MRT3847_77482C.1
ccttcgcgaccgcggacgtatgggcggacgcgcgggcaaattcaaggaggcggctatccgacgcccacctcccgacttaaccggcagatattgggccggttcctcacacgagatcaggaacgatgcccgccgagtgcgcacgtaggacaactacacaatgcttcgtatatgaagtaccagcgaaaagaatcatgagatgcatcggctggcgggaggaggaggaccaccaaaagaccgcggaaagtggaggacagcgagcggtaaaaaactcaccaggaaaggatggaaacagccgcgcgagcgaaactgcaaagaaggggactcaagctgataaaaggcaggccacagaag

SEQ ID NO: 117912 - DNA, 1140 bp, Glycine max
  Clone ID: PAT_MRT3847_77483C.1
tttcggctcatcgtccccctgactacctcaacaccacagaccaactcataaaggatttggactattacgacattgttttccacatagaagatatgccttatgcaaatggatacacctcacagggagaccaattcacagctcaagtgcaagaaatttcgtcaacagtaccatacataatcgcaagtggaaatcatgaacgtgactggccaaacacaggatcactttttgatactccagattcaggtggagaatgtggagtttttgcagaaaccatgtattattttcctgctgagaatagagccaaattctgatagtgagcacgactggagagaaggatcagaacaatacaaattcattgagcattgtcttgcaactatagatagaaagcatcaaccatggctaatcttttcggctcatcgtccccttgactactcatctaatgattggtatggcaaggaaggctcatttgaagagccaatgggaagggaaagtttgcagaagctttggcaaaagtacaaagtagaaattccattttatggtcacgtccataactatgaaagaatgtgccccatttatcagaatcaatgtgtgaatcaagaaaagcatcaattactctggcactgtgaacggaacaattcatgtggttgttggtggtgggggaagtcacttgtcagacttcacaccaacaccccctatttggagtctttacagggatctctcgactatgggtttggcaaattgactggcattcaatcattcatatctcttgtttgagtacaagagaagtagtgatggaaaggtctatgattcctttaccatttcaagagactacagagatgttttggcctgtgtgcacgatggttgtgagaaaaccactctagcaacctgagttatgtctctgtgtagacccgatatgaacttgaagtgaaataaaatgtccaaataaataaacgttagtttgtttactttccaggcaagatttaggaaccacggatatagatacatatcaaagatgacatgattctgattatgtgaacaatgtgaattctaaaaactatgtcactgcatggctaagcattgttgttaaatggcggtgccacggtggaatggcctagcggatcttttgccaactgcaatagg

SEQ ID NO: 117913 - DNA, 669 bp, Glycine max
  Clone ID: PAT_MRT3847_77484C.1
ctcgttacaagataagcatggtgaagatgtatcaaatatcaatattcaagcagaaaaaagcctggttaaagattacttggttgaccagaatgcaagatctcagaaaagaattataccagttcccagcccagcatccattgaggatatgaggacactgatcacagaaaataataagtccacagaaaacccattgaaattgatccaaacagaaagcaaaatcccacgtctggctgcatctccaaatagaactcctttcgcggacgtgaattcagtcaattgactattacatcagtttgggtatgagtatgaaactacacaaagctgctcatcacttgatgagcaaaccttacgttttccttcctagtgtaaaataactactatatgagttttctacttaattgaggagtgtttctgcacgcaaaaaaaaaaaaaaaaattaaaatgaatagtatgggaagtcaacaaacaaagagaattaaatataaaatcttgtgacgtaaacacaatagagcgggggggacgccatatatcgaactaacaaccccgaaaataattcttacctggtggctatatcgactaactgttccaataatgagggtgaaaaaaagactgccataatttggtttagggatgcttacgggaaaaagatttattccctaaaaaattgat

SEQ ID NO: 117914 - DNA, 329 bp, Glycine max
  Clone ID: PAT_MRT3847_77485C.1
tctgtccctcgttctgcttttttgcatctctctctctctctctggaatgttgaactgagccagccaagcttgttgctttgcaagtggaaacagagatagatacatacatacaagggcttcaaaatgaggggtcctttgggtgcagtcataggaaggtacccttcaagtgatggaaccactcatttgggtggcatcataaggcacaacaaaaaatgcagagacatagccgttcttgtcatctttgatgcattctggattgccttgattgtcaactccagctttgctttcaaccgaggaaacccattgaggcttacttatgggctggacta

SEQ ID NO: 117915 - DNA, 262 bp, Glycine max
  Clone ID: PAT_MRT3847_77486C.1
cccacgcgtccgcacacgcgtacgtccacgcgtgcgcacacacagtcggatgcctctgtcgcggaagtaagatctgagcatgcaactctcgatctctggcttcaataacactcgccatatgatgctcgaagatagcagcagacggcagacactgacgatatgcgacctgaggatcgtgacagtggaccacgaatgggcactgctggatgagctgagagacaatccccacgagctgcgtggacgcagaacgaacgacgatctc

SEQ ID NO: 117916 - DNA, 410 bp, Glycine max
  Clone ID: PAT_MRT3847_77487C.1
ccaccccatcaaagatttttaactcgttaaacaatgaataagttgttataaacttccaagtcccaaaattgtttcttaaaaaaaaaatacccctcatcaattcggtttgtgccatcttatcttcaattataattggatggtatgcccaaacttttctttttttgacggtcccattcaaccaaggttcttccttccctcatcaatcttcccttattttatcttccctttaatcatattttctttcctttcggggccccagatggcatcttctttccaggaggatcttcttcgggatatttttcctcggaggggaattcagccttgattttttgcccccttccttgttgcgtgtgttctttggcggtttggggttgggggggcgcttagtggtccctgcttttttttctggg

SEQ ID NO: 117917 - DNA, 370 bp, Glycine max
  Clone ID: PAT_MRT3847_77488C.1
attcttcagcatgtcgccgaccccgtcagcgcgtccacctggtcccggccgaccgccaggccgcgtggcgcatcttcagttcgcaggcgggactatggctcatccatggcgccggctggtgggctgtcgaggacaaggagacgggtcgactcgtcggaaatgtcggcgcgttctttcgcgaggattccaccgtgatggaacttggctggaatacctatcgtgccttctggggccggggatacgcgaacgaagcagcggcggcagtcgtgaaccatgcactcgagatccggcgcgaaccgaaagtccgggcgctcatcgctgcggccaacgaatcatcgctgcgcgtcgcaaagcgccttggcctcaccgg

SEQ ID NO: 117918 - DNA, 212 bp, Glycine max
  Clone ID: PAT_MRT3847_77489C.1
ggcaaacgggcccagaacacgagggtagaacaggcaatttataaccgggacctgaaggggtacatgaaaaaaataaaaaagagacagattggaacttgagacgaaaaaaagaggagaaccggttcactgagggaaactgaatcccggtcaaaattacaaaacaaattcaaaccggaaggcaaaaaataaaacactcgggggtagaaaggggg

SEQ ID NO: 117919 - DNA, 206 bp, Glycine max
  Clone ID: PAT_MRT3847_7748C.1
aacaaacatccgtaaaaaaaaaaacaaaaaatttataaaatacaaaaaaaaaaagcgcaacagggtataaaaaagcccgcccgaactacacaatcataccttacgtaaactttcatgcaacgtcaaattctattcaatttagtggccgtgcttctataaagtggtcgcatgtttaaaccctcgcgttttccaaatatatcttcttt

SEQ ID NO: 117920 - DNA, 363 bp, Glycine max
  Clone ID: PAT_MRT3847_77490C.1
tacggctgcgagaagacgacagaaggggcaattaattttttttaaataagtgttacataaaaattagttaggaccatatgtctagagttacctaataatttcccactcgcaacaatatatatgttttgatcgtttcattggtttttaaattttggcataaaaaagacgaaactgattattcagagtggcagaattcactacagaggagggtggtttgtcggaggaaggtataaagaaggcgttcgaggcaacggaagatgagtttttgcgtgtagtgagggaatcatggattgcgcggccacagatagctttcgggggttcgtgttgtccttttggagcggattcataggggagtttttatgt

SEQ ID NO: 117921 - DNA, 1483 bp, Glycine max
  Clone ID: PAT_MRT3847_77491C.1
aataataatgataatgataataataataataataataatacacttgagtacatgtcatactttggttatgttaatttttacaaatggttataatatcttgaggtatgacattgaaataatagaatgaataatgtaaaagtgtaatggttaaaataaaaagtgatataaaatatctaaataaaaagaatatataaaataaatgaatgatgctacacattaacatcaattctctaagatgtctacaaacatctgatccagcctgtgtttagatgccatgtagaaatattccttacttcatttcgtttcttttaatgcgagtgtatgtgattgacacatgaaattgtaccttgatcctctctttaagtttttcatatgatagggatcgttcaagtgatactattggctgtctctggaaaatatgctgagtgctggttaagtcctatttctttaaaatctaaacaaatggacctgcttctgatattattcaaacagcttcatttcatcacataggcatgaaatatcaggcattatccctccatcacaatacctatatatcccgtctcctgctagatcattcaacaatgcagcaggttctctggctcctccatgctgtaagaattttgttcttaaagcaaatcctgtagtgggtgaaagtggatcctcctggcacagcttcttccatatggttgcagcaaaacactttgcatacaaatagctataataacctgcaccataattaagtagatgactaaatcgggcctcccaatgtgtgccttccacatgttcacaactagtgtgctctcttttcagttttgcaacaacagaactaatatcaccatgagggaatggctgctctccaaagagtgtctggtcaacaagagcatagaagatctgacgttgcagatctgttgcagcaaacatatctctggcaccctgcattgactcaaccaacttctgtggtatttcttcaccagttgaatggtgtctcgcaaattttttcaaaactcgataatcccatgcatagtattcaaagaggttggatggtatttctgcaaaatcaagaaccgttctggtgcccgaaaaatgctggtagtccgtccatgcgaccggggagcgacgaccgtgtccgcacgcagcatttgccgccgctccctccctgtcgctgcgccttgccgctgatgccttcccaggacccgagaacttacaaacaagagctacaattggaagttggtattctgtttgagaaattctgcgagcccctctaattgcaaagtgagcacaaccaggatactttccctttcttgagtacaaatcgaggtagagatatcccaagtcaccctcttcaggatgacccgggcacagtttaagtacatgtggatcccaagattcaccaggtgctagagggatgatacgaaaggttgcaccaaacaatgactgcaccagaaccttcaaaccctcaatacagtttgacagagaaaaatat

SEQ ID NO: 117922 - DNA, 385 bp, Glycine max
  Clone ID: PAT_MRT3847_77492C.1
gggtcgtgaatatatttttcatggagtacaagtgagagcgactacactttatcctatagtaatggagcaacagagtgggttaccacatgtgaggaatttggtcgcaagtgacaaccctgatatcatgataattattgaggattttttaactctatatacaacaaaaaagaataacgatgaacgaattgcacaaagtaaaaagaatgaggggcgtctatgcggaaccgatacaacactcatcttccctccggggctgtgctatgaaaatgatttgtgtagggggaatgccaaaaccaaaatgatcaatcatataatcacacaaccaaaactgtataattggcttcatggttatggtccttgcttccggcacgaatttaccgggggg

SEQ ID NO: 117923 - DNA, 229 bp, Glycine max
  Clone ID: PAT_MRT3847_77493C.1
gggggaggccccttgggggaaacttatttttttcccaaagggcgcttaaccaaaaaggtttctgtaaaccttcaaacaacattacaataaaccctaaattttcccccccgaaaaaaaaacgccccacttaaaattggttgacaaaaccgcgaccaaccccggaagctacgaatgggggcatcctccttcaataactcggggctcccccaaccggatgaaaaaaccaaaa

SEQ ID NO: 117924 - DNA, 583 bp, Glycine max
  Clone ID: PAT_MRT3847_77494C.1
atttctctggcaaagataaaaccgaaccctccaattcctctgaattaaggaacaaaccaacacaaggatggctagcaagaactcccttgttgaagaaattgagagtagccagggagacttaactcagccttctgcaatccctcgtaggacaattcccactgcacaagttaatccacataggcttaacttaacccatccatcaaaacatgttccacagtttcggtgtctcatcccacacaaagagcacataaagctcgtttgagattggtctccagcccgttatgcataatcagggctttgtattgtgaggataccaagaaatacaagtcatggacaatgtcagcaaaatgacgaatgcaacttgattttatccattttcaattagttttctaacgtccatccttaaatttattgtaattaaaagataaaatctattaaaatattgtaattaatagataaaatttatatcaactgtaataaaaatattttttaaaaatattatatatttacttttaaaattataaaaattatttttttaaaactgtaaatttttttaaattaaattaaaatatttaatatttaa

SEQ ID NO: 117925 - DNA, 241 bp, Glycine max
  Clone ID: PAT_MRT3847_77495C.1
tgttcacgcgttcgcggtcacgtgggtcgacgcaggggtttcaaatgctacctactaaactggcggtctggataagatttgtgccaccacctataattttgtacctgcttgagttctcttggaagccacggattgttcatgatatattaacacttacttggatttcaacatttatcccatcatagttgatgaagaacttgccatggattgataagtgacatctattctcttccagaaagac

SEQ ID NO: 117926 - DNA, 736 bp, Glycine max
  Clone ID: PAT_MRT3847_77496C.1
atgactctttctcaaattctgcagcagcatttccgacccagactccttcacagtctactacctcatcacccactgcggcttctctccgaacaccgccatcagcacctcccgcaagctccgcctcgacacccccaactccgtccttgccttcctcgccacgctgctctcctccgacttacccgacacgcttcaggaactcaagcaattagggatgtgacggttagggtttacaagaagtgggggtggtcccacgaacacgttcttctcgcgtttaagaattgtccttattgtatgctgacggaacctgatgagattgatgccgtgttcagttattgggttaggattttaggtgggagttctctggagcttgtcaagtatcctattggaaaggcgcggcagcatggtcacgccctttgttatgtctgagaaaagattcctggacgagtttctgagtccttataagaaacattcttctcatttgttgaacatgtataaggaaagtatgaatgcgaatgttgccaatagcaaggagaataagaagaaaacttgcttctagttgtaacagccttgttgtgttgtgtctactgaaaatctgagtaacaatcatgctagcatagcttgtttatgggatttgttattctgcatgtggaaatttgttgaatgttttcctgcagaagctaaataaattaaaattagtcctttgatgaaagtgaggattgatcatatttgtgagttt

SEQ ID NO: 117927 - DNA, 1000 bp, Glycine max
  Clone ID: PAT_MRT3847_77497C.1
gattaatagggattattaaatgaaagcaggatcatgaataatctgcataatcctacacactcttatatttattaggacttgggagaaatcatacatatgtatttacttccaaacccgatcattattcatccactgctttctattttctcaacttaagtaaaaataaaatcaaccctaagagcaatcaatgcaacagaaaaatgcaggttgaaaaaggcatcctcaccggggcttgtctggctgatttgctattagcattttagtactccctcatgactaatgcctccaccttaaaacttgatagcaatgccctccactgctttcatattcaagattcagctgggggaagatacgacacagaatgaggtccacgcgtttccagtaccattgcctccattgcttccaaaacagaaggggatcaataacaagggcaaggccaaaaacaaatcccaattcaaccataatgatattccaaccaaatgggcatggcagcccatatgtttcattactgcagtttttaggcaaaggtgctccacacaattctgcattaccaacaaaggaagatgcatcaaatgtttgaagctggttacctccggggatttttcccgccagacaattagaggaaacgtttaggtacgagaggaaatttaaatttgcaagctgtgtgggaatttctccatcaaaatggttgcttgacaggtccaatgattcaagctgttttagattccctatagatgaagggatatgccctgctaaagcattattagataagttgagcaaatgaagtcttgcaaaattcataagctcttccggtattgttccttcaaaattgttggatgagaagtcaacagatgttaagacagttaggattttaacaaactccatccgtaaacctttgcttgtaagtgtcaccgaatcctgataatatataccaccaaacgaaaggaccagagatccaatgatattgaacattgatccatcaagctcttcatctagcatc

SEQ ID NO: 117928 - DNA, 581 bp, Glycine max
  Clone ID: PAT_MRT3847_77499C.1
gaatatttcaagcaggctggtcagaagatggatatgggtactggtttcagacaccagaggcatggacaatggatgggcactacaggtcccttatgtatatgaggcccctagctatttggggcatgcaatatgcaataaatcggcccaaggcaattctagaggcccctaaaatcaatatcatggacagaatccacttatctcctgttattggaggatactctcataatgaaacaggtgtgaggaagattgcaacaaaagcaggatgctttagcaattctgtatttaattgtgcttgctgatcgttaacatgtaagaagtaagaaaacataacttttgtataggtaactttttccccattgttccttacccaaccctcacctagagaagctgttaataatggcggtcaaggtctggagggaaatgttttggaaataagcagagttcgattataacttataatttatatagccacttagtttaaaacaacataggttacccgtcctttggcctttactataactgttgtactgtacattcttatttgtttgagctcttaagatataatattaatttatagcaca

SEQ ID NO: 117929 - DNA, 3010 bp, Glycine max
  Clone ID: PAT_MRT3847_7749C.1
aattcggcaccagcttgtctcgcactctctctcccctgcccctcgcgatgcttctcgtttctccggctgatcaagttgaggacgaggttgatgcagcagactgttacaattacaaaaacatggattatgacaaatgggggctcaaaaaattcctcgagagttgggacttgtctgatgtgttattcatcgttggtaaagaggaaaaacccgttcccggcccgagggcaattttagctgcatctggaaagttttctctgtgctcctcctcctttgtcatcaacctacccactgtatcttatctacttttccgtgcactgcttcactacatctatgttggctggacccagattccccaggaacaactcggttctttgagggatttaagtctacagtttgaagtgacaccactggtgaagcagtgtgaagagactatggaacggtttaagctagataagaagttgtttgacacgggcaagaatgtggagttaacatatccatctatccgacctcattgttcaactttgccctcacttcctgtcagcactcagcaactgaaacaattgaaattaacaggccagtacagtgatgtaaacatctacattgagggttatgggctcattgcacgagctcataaaattgttcttagcttatggagtatcccctttgctcggatgttcacaaatggaatgagtgaaagcatgtcctcggaggttactttaagggatgtcccaccggaagctttcaaggctatgcttaactttttatatgatgggcaattgaatgacaaagttatagattctggtgtgggacttgtctgatgtgttattcatcgttggtaaagaggaaaaacccgttcccgctcacaaggcaatattagctgcatcgcatgagtctcagaggactcagtatgtccactcctccaagtggtttcttcaatgccatcatgtagacttattaaagaatcattgcagaggagaatttccatgaactttgactattatatcagtgcgagtactgactttgtgttattagatgagacaactttaatcaatatcattaagcatccagatctgacagtaacgtctgaagagaaagtccttaatgcaattctaatgtttggcatgaatgcaaaacagttgtttgggtgggaagtggtggatcagttaatggaaaattcaaaaccagaactcctttttggtaagaggcttcagttaatctatgacttgttgccatttgtgcgatttccactactacaatattccttacttaagaagttaaattgttcttcgcttgggaagcatccccttgcttcgaaaagtcacaaaaaggaggctatcaattttgttaaatgtgggctggcagagtcagaaaatgaagagaatgttagattccaacatagacggtccagttacagggaactccagtacatctgtgatggggatgaccatggagttctgtactttgctggaacatcctatggtgaacacccgtgggttaatcctcttttggcagagccaaggaaaattaccatcacagctagcagcccccactcaagatacactgatcccaactctttggtctcaagaacctacctgggaacatcaatttcatgggcctcgattggaaaatggacagaactgtagatggtggatgggggatctttggccaatatcagtgcgagtactgactttgtgttattagatgagacaactttaatcaatatcattaagcatccagatctgacagtaacgtctgaaaagaaagtccttaatgcaattctaatgtttggcatgaatgcaaaacagttgtttgggtgggaagtggtggatcagttaatggaaaattcaaaaccagaactcctttttggtgagaggcttcagttaatctatgacttgttgccatttgtgcgatttccactactacaatattccttacttgagaagttgcagcatagcagcattggccggcatattcctgttttccaaaatcttgttaacgaggctatcaattttgttaaatgtgggctggcagagtcagaaaatgaagagaatgttagattccaacatagacggtccagttacagggaactccagtacatctgtgatggggatgaccatggagttctgtactttgctggaacatcctatggtgaacacccgtgggttaatcctcttttggcagagccaaggaaaattaccatcacagctagcagcccccactcaagatacactgatcccaaggttttggtctcaagaacctaccagggaacatgttttgctgggcctcgattggaaaatggacagaactgtagctggtggatggtggatcttggccaagatcatcagcttatgtgcaactactatacctcggggcagaactattctaaggcagttcccggattttggcatgttcagggcccacgtgacgcatcgatccgggtattttcgggtttcgatcaaagtaatcggattatatgtaaccctggccagtttgccttgcagttgataattggccttatagctctacttcccttcatggattaacaatatgaataccatacaatccaaattatttgcaccaactcctgcatgtacggtattggttccttgttaacttaaagattttaaactgttcatggatcaagggtcgtagttctaagatcatatataagtatttatgtagattgtagtatcttatgtattcctaaaaaattaatctattggcccataattggccccaacgctctgcttcccttcaggtatttccgggttgtgctcacaggaaccaccaccgatgccaccaatccctggaatttctgcatttgttacttggaattgtatggctacttcctttaaaagcctagccatgccaataccataccttcctaaaatacaattccagctccttcatgtacattatggtttgcttattgactaaattatttgaatcaagtcatggataaagggttgtggttctaagagaagatatagtaaaacgaacgcgtgggcgc

SEQ ID NO: 117930 - DNA, 672 bp, Glycine max
  Clone ID: PAT_MRT3847_774C.1
tgacggcgcacgcacgcaagacttgaatccggaagagcggacgcccttgcccttttttttttttttttttttggtcttattgtcataatcaaattgtcatataataataatgaaaatgaaaacaaccaagttaaaaaaaaattgtttattttttttgactgttttctgaccttttataaaaaaaaaaaaaaaccggggggggggggcaaaaaagaaattgggaacggggcctgggggggacaaaatgtttccctataaggaaaacggaaaaaagggggggaaaaaagggggaaaaatggtctcccggggaaaaattttttggcttaaaaaaccccaacaaaaaagaggccggaataaaaaaagggaaagccggggggcccctggggggggcctccccccaatttgggggggggggaaaaagggcccctttcaaaagggaaaaccgggggcgccccgggaaaaaaaaaagggccacccggggggggaaagggggtttgctatttggcccccagggggtttttttttttccccagggaaagggggaaaaaggggttgcccttcccccctgggccaaaaaaaaaagcgcaagggggggccccctgggttttccccaacagggaaaaattttttttggggggggaaaaaggggggaaaaaaaaaggccttttttgg

SEQ ID NO: 117931 - DNA, 177 bp, Glycine max
  Clone ID: PAT_MRT3847_77500C.1
cgatttggggcttttagattggtatcaggtggctagatgtgcaagttatttatatagcttaccatgttgttctataatgtatcaatgaatttatgggtttagggagacattggaggtattgtcaatgatttttttgttttttagtccttttttcttgaattatgatggtttgtgtat

SEQ ID NO: 117932 - DNA, 261 bp, Glycine max
  Clone ID: PAT_MRT3847_77501C.1
cgatcttgtgggcaagaatcttcatgttctcagtcagatagaggatgttcgaccatatcatgtacagagatgtggtgctgcccatagtactggagcatatttgtcagccatctgtggacatcaagacagtactgtcccaggtaatggaaaggctttcaaattatgctgcttcaagttcagacgtgttgccagagtttgtacaagtggaagcattttccaaattaagcaatgccattggcaaggtgatagaggcacagcctg

SEQ ID NO: 117933 - DNA, 1202 bp, Glycine max
  Clone ID: PAT_MRT3847_77502C.1
gacacattcttggaccttcttgaccacatttttccttcactcactcccatcacaataatttcttccctccttccttcccacaatggtcatggaagaatctaaccctttagacaatgaagttcaaccaaccacttcatcatcctctttcaccattactactccctctacctcctcttcctcctccatagaagaagccactaacactactactaaggagaaaaagaagaagagagccattagtaatattgaagggaagcaccctacgtatagaggagtacgtatgcgtcaatggggcaaatgggtatccgaaattagagagccaaggaagaaatcaagaatttggcttggaacttttcccactcccgatatggcggctcgagcccatgatgtggcggctctcacgatcaaaggcagctcggcttacctcaatttccccgaattagccgccaagctgccccgccccgccagcacctcccccaaggacatccaagctgcggcggctaaagcctccgccttggatttcggtcaccaaagccatgaagccgaatccgagctgagccaagccgtttcctcctcaatccaaacacaatcatcatcatcatcatccaattcatcgttgaagggtgtggatgacacattcttggaccttcctgatctctctcttgacttgagccatggagccgatgagtttcattattcatcggcttggcttgtagccggagccgaacatatagagctgggtttccggcttgaggaaccttttctttgggaatcatattaagttaccttcctcaagtaggccaatttccctttttttgatgtttgtgctgcctctcttttttctttgttcctttcacttttgagctacttgcaagaaccttgaagaatccaatatgctctatggcagcatgacgtgggggtgtcaaacttcagtgtccatgacaaataaagaagttttactaaacccactccatagctttttttattcaagaatttatgtaaatattaaaatatcatctgtcattttcagataaggtaattaattaagttgccttgcatcatattcctcaatttgttgtaaatttcctcgcttgtcatctgtatatcctcccctttgtcaaaattcagtttaatttgtgtatgggtgaatgtggaataaagttcagctgggtaaatttgattaaaaaaaaaaaaaaaaaaaa

SEQ ID NO: 117934 - DNA, 298 bp, Glycine max
  Clone ID: PAT_MRT3847_77503C.1
cgtccatggccacgttcttagaccgaaccttattcctcttccactatctttccaaaacatttgatgcgcattgagaccctgccccgtaagtgaaggtatttgtgaacttcatggcgaggaggcacgtatgggagcgaggatcttacgcgctgatctaaccaaaaggagggaagcatcatgtgcttgtggagacagattgtgggagggatgttaagaagggtgaggctctttcgttgtcgttgatgaacgctctctacgagcgaccccgcgtgggttcatgtgctgagcgaaagatggg

SEQ ID NO: 117935 - DNA, 557 bp, Glycine max
  Clone ID: PAT_MRT3847_77504C.1
ctcgagccgctcgagccgttcagccactaatacttcttcccttactgaactctttgtgtgagtttcttattgaaatttgagtcaagcgagcgagacacagttttgaagatgctaagaaacatggatgaaggagaaatcatgacaaatattgctttccctcagaacttaactgcttccgctgcatccagtgatcacaacaatcctcctccttctttgaagaggaaaagaaacctcccaggaaacccagatcctgaagcacaagtcatagccttatcaccaaagaccctgatggctacaaacaggttcttgtgtgaaacttgtgggaagggtttccagagggatcaaaatctccaacttcatagacgtggacacaaccttccatggaagcttaagcagaggacgggaaaggaagcaagaaaaagggtttatgtgtgccctgagaagagttgtgtccaccatgacccttcaagggctcttggagacttaactgggataaagaaacacttttgcagaaagcacggtgagaagaagtggaagtgcgagaagtgctcgaagcg

SEQ ID NO: 117936 - DNA, 402 bp, Glycine max
  Clone ID: PAT_MRT3847_77505C.1
atgacttctagtgtcaggctgggtgatattggatactcctgtttgtagacctggccctccttactatggggtgtgatgatatcctatgggctgatgccatgatcctattcttattgctcctatatcgaagtcaagggcctcatgactatgatcctttgcgactttcttatctcgattactagaggggagcgttaaaacaaggagttatttgggccacaggattttctactggctgttccaaaggttgggttactgacaaaactatgtcttccgaacattgctcaccttggcaggacatgtcttgacattctgaaagaacaccgcatcactggcctttggattcgcactagtcttatcattgtgctggctattctaacggtgcctcacataaatcacacactt

SEQ ID NO: 117937 - DNA, 271 bp, Glycine max
  unsure (1)..(271): unsure at all n locations
  Clone ID: PAT_MRT3847_77506C.1
atatgatgaaactactccaatgttggcttccgttgccgttccccattcttcttggagtaatgaacccggttcaaccaacccgccttgggccggttttcgttgcaggtccttgttgaaaaggaaacattggcgccctctcctcctcactattcccgaataatctgttcgatcaatttcatcctatcacttccatttccattttttcccatagttctgttcgntatcaaagttttgttgcttttctatttaagtctccttaaatataattgca

SEQ ID NO: 117938 - DNA, 311 bp, Glycine max
  Clone ID: PAT_MRT3847_77507C.1
ggaagttcagaccacttcaaaattcaaatttgaaaacagcgatatacaaatacagaaatggcattattgtccggaaacatcaacggtttgtaccgggagaacaaaaccaccgccactaacaaatctccgattctctcccaggccatcatctccctcggcggcaaacccgacctacaacatgagcacacggacaccgacgtggtgctcccgcaattccacctgaccatggcgtactggccttgcacccggactaccaggctcgcacggtgggagcgcgcacacatgctccacttcaaccctccgcaggaact

SEQ ID NO: 117939 - DNA, 800 bp, Glycine max
  unsure (1)..(800): unsure at all n locations
  Clone ID: PAT_MRT3847_77508C.1
tacatgaaagacgttatccggttatcgaaccggttgggagggaaaccggagaaggaggttggggatttgagacgaaacctctttccgacgccgtttttgttttttgttgggagcacctttgagggagcgcccagggagcaacaagcgctgcttgaattggaggaccctgcagccagattgaagagggagaaggaaacgttgaagaacacgcttaattacctcaccgctgcttttgctgttaaagacgtttttccgtcttcttccaattcttcttgattggtgtttaaggtttatactctacccaaggtattgttgcttttaagtgtaacttcgtctcaacatattgagaaaatagatgtaaattatttttgtgcgtaaatgttagttttgtttttgtgaagcattttatatactgtggtatttgatagataaaaaccgtagatacatacaattttgcggatatagtacaaatactggtggtggctaataggattctgttgttgaatattgctggaaacttttcatttgtttaatattgctgctacatgatgatgctgacagttagaagcatattctgttttaagataaaaaatacacacagcatgattttgatatccgttactgaagagctatgttgatgatgtttgtagtcggtaatacctgttaataattagctctttatgtgctctgtgcatgtgaattgttatggatgctaattggctttagcataggcaaatttatttggatnttgctttgtcgcaattttcggtatgtgtgagacaatttttaatttaaggatt

SEQ ID NO: 117940 - DNA, 265 bp, Glycine max
  Clone ID: PAT_MRT3847_77509C.1
ttccacgcgtgcgcccacgcgtccgcccacggggtactttttaaacgtccgggccgagcaactcacataaaatctgatgacaaaatgagtacccaatctgacacccctaacaattagaggtaaaacggaatggtccgaatgaggatgtctttcttgacaagacaacgttacgcgtcaaaaagctgtgttatgggcttaacatgcaatttatcgacccgtttaaagtgaccttcaaaggccgaaaaggcatttacaaaggggtgac

SEQ ID NO: 117941 - DNA, 496 bp, Glycine max
  Clone ID: PAT_MRT3847_7750C.1
gggagtatagacatgtgaacaaacccaagtagtgggtggtgcccaacattgttaaggttggaatgcttgttttcaatttataagttggaaacagtttcagttctatttttcagattcacggaataaaaagagtggatacaagaatattattccttaaatgtataaaacagtagagctttataacaagattttcaacaattggtttctatttcataattttcaatgtcgtataatatttaaacatcacaaacaatattaaaataggtgtcgtagcaagtcaatcatcccatatgtagtttccaatgtctgcatctattttgtacaaaattctgagttgctcgctctccactctgtaacatgctcgaatacctgaaaactccaatgtcaaaaatgacaattaaggttatgaatatttttggaaaactacagcttagtttcatgtaatacgatgtggacaaaactttaccagtcatacgtaaatgttgctcaatacaac

SEQ ID NO: 117942 - DNA, 1425 bp, Glycine max
  unsure (1)..(1425): unsure at all n locations
  Clone ID: PAT_MRT3847_77510C.1
tccaatagtaaccacacaccaaaacttcgtctctccgattcactacttgtattcttccttctcttttattctattctaaatttcgcattggacatggctttcacacagcttatcccttcaccttcttcttcctccttaaaccctatcacactctccctaaaccctaaatccccaacctctccgccgcagcagcatttcaatctcgatattctccggcaccggcgccggaggcctaattccactcttcggtgctccgcctcctcgttctcggagaagcaccacacgaactcctcgaactccgacgacgtggtggagctccccctgttccctctccctctggtcctcttccctggcgccatcctccccttgcagatcttcgagttccgctaccgcatcatgatgcacacgctcctccacaccgacctacgcttcggcatcatctacaccgacgccgtctctggaaccgccgaggtcggctgcgtcggcgaagtcatcaagcacgagcgcctcgtcgacgaccggttcttcctcatctgcaaggggcaagagcggttccgcgtgaatggtgttgtccgcaccaaaccctacctcgtcgcgcaggtgacgtggctcgaggaccgcccttctccctccaccgacctcgatctcgacggtctcgccaccgaagtggagacctatatgaaagacgttatccggttatcgaaccggttgggagggaaaccggagaaggaggttggggatttgagacgaaacctctttcccacgccgttttcgtttttcgttgggagcacctttgagggcgcgcctagggagcaacaagcgctgcttgaattggaggacactgcggccagattgaagagggagaaggaaacgttgaagaacacgcttaattacctcactgctgcttctgctgttaaagacgtttttccctcttcttccaattcttcttgattggggcttatactttacctaaggtattgttgcttttaagtgtaacctcgtctcaatatattcagaaaatagatgtaaattatttttgtgcctaaacgctagttgttgtttttttttttcatttgtgatacattttatatactgtgctacttgataaataaaaaatccgacacatacaattttgcggataaaatgcttcatttgtttaatattgctgctacatgatgatgctgacagttagaagcatattctgttttaagataaaaaatacacacagcatgatttgatatccggtactgaagagctatgttgatgatgtttgtagtcggtaatacctgttaataattagctctttatgtgctctgtgcatgtgaattgttatggatgctaattggctttagcataggcaaatttatntggattttgctttgtcgcatttttcggtatgtttgagacaatttttaatttaaggat

SEQ ID NO: 117943 - DNA, 398 bp, Glycine max
  unsure (1)..(398): unsure at all n locations
  Clone ID: PAT_MRT3847_77511C.1
ttatgaanaaacatcagggatgccagggttttatgaaataaggatttcaccatgccttaagggtcgaaggaacatcaagattcatcaaatgtgaacgtggcaaagtggggaactaaactacacaaggtatatctaacatattcaatttgggaaaagggaatatctgactatacatccatatgggcaaaattttacacaataaatggtttgggactggtaaggattggtacaagggagaccttttggcatgcacaagaaccaccctgggttcaaccggtagggatcttttttttgttcttgaaagcaagaagcgactttttctctctctaggggagggggtcatagcaaccatttggtaaaagcaagctctcccatgcccagaggctgggcaagggggc

SEQ ID NO: 117944 - DNA, 497 bp, Glycine max
  Clone ID: PAT_MRT3847_77512C.1
gccaattagaataagcaagcatgtgcaggtgcaacaatacgacaccgttccacgaactcctaaacctgttgacgaagatctctataagatccctcccgaactcctccacactaccaacaaacggaagaaattgctggggttcatttccaagtgtcttgtactacttgtgtgtcacgagcattgctaaactggaagaactcctatccaatatcaatctataacgccgtcattcgaaggagtttttaataatgatgacagtgatgtgtcaagctaaatatgaagtttagatttgaagcatgatttgatgaatggatgtattttcctttttattgggcatagtttccttcattcaggtcaagtcaatttactattatatcattctagtactgtttgtaatttgtaagtggagtgaatgtctaacgttaattaatagtcaaggcacctgttggtggcgactggctgtggtgaagttccttgtcgtgtctatttttttgttg

SEQ ID NO: 117945 - DNA, 152 bp, Glycine max
  Clone ID: PAT_MRT3847_77513C.1
acgtacaggtagcctaagcgaccttcgtcattacaaagacttgaattaaacttcctaaggcttatcccgaatgccaagacccagcaacatgtcctcgtggcccaaagtttgaaccaccagggctactcttctggttactctgttggtaatac

SEQ ID NO: 117946 - DNA, 411 bp, Glycine max
  Clone ID: PAT_MRT3847_77514C.1
gaaaaaaaggggtgttttaccaatttcatttataaaatcttaatacaagatcgaaatgggtccttcacaaatcacaattttttactaaaacagaataaccgggcaaaccaatccttctttaaatattcaaccatcctgccaatacaagggtaaaattttaaactttttaattgggcttacatttcactggttaaaaagtaccgtttgctttttgccatacagaccacagaagaaatttttccccattcatcttaaactgggggggccttaatcgaagaccccaaatttttttaccagggtttttggcctaaacactgaaagtaaaaattgcttttttttttatgtcaattagcccatgggatatttttgggtccaccttcttgcaggtgactcgcacttgttcctggctgt

SEQ ID NO: 117947 - DNA, 373 bp, Glycine max
  Clone ID: PAT_MRT3847_77515C.1
gaaaacaatacactgattgcaacatacattcaacttatccaaacaaacatgttcctataaagattacaagctccacacttactaatattcaaggtcgcttcataaggtattatagttgaaacaagtgtaacacaaacaaaagaccacgactctcttatgatacttgtaaccatagacaacatcttgaatagcagctaaccatcaaaacccggcattcaggcatttatatcataagttcctggtacattgtataatttgttagatctaccttcctcaaatagggagcgccatccatgctgacctttacaaagagtgccgctgcacccggttttccatctactggatcattattctttgaagcggggggccatga

SEQ ID NO: 117948 - DNA, 421 bp, Glycine max
  Clone ID: PAT_MRT3847_77516C.1
ccccaaaccatataaaaaacttgaaatcttccccggatggaaggggaacattttagattcctcaaaatatattttcaaactttggggaagctattaaaaaaaaacctcaggctgaaaaattgttcctaaggggccaaaaaaggaagtttgacctacaaacccattcaacaactacttgtttttttcccagttaaggaaggaaaagtttcaaactttccgacccagggccctctgttttgtcccatgctgcactaccttttcctccaaaggagggcccttaccccggcggacgggataaaaaaatttttttgccggtttgggaagaacactaaaaccttctccaaatttttaaatttcccttttccgtttaagggacaaagaagggaccctaaggaggggcttcccaggggttaaggacaaa

SEQ ID NO: 117949 - DNA, 469 bp, Glycine max
  Clone ID: PAT_MRT3847_77517C.1
ctaacgagcacccaacttacagaattatctactggcgggctattaaaacactattaaaggagaaagaaagaggtcatatacgaacttaacacacggagtgagcatcacgagcaaaacgcttactcggagctaagcatatcgactgactcaactcctaaatacgttctaaatctataggtggctgccttgacgacaccctggggtccggataaccattcttgggatccataatggcccaatcaataagggcataagctccggccaaagacactagccacaccactaggagctatatagcgccaccatataacctgaagcttgtaaaattcaccgccggcaactattacttacctagaaatggccaaacagagcttctaaacactgcgaaagaacaactatactacatgactacatctaagccaactgtgtacccactggatcgtgcccttgcctgccgattgaattctag

SEQ ID NO: 117950 - DNA, 478 bp, Glycine max
  Clone ID: PAT_MRT3847_77518C.1
ggaatccgttgcaaaattatgtttgaggcaaaactaattttgctaacggatcatgacccttgcttttgcgttcattttgtttttaactgttggatttatcttgaaacgtgcatcgcagcgttttcaactgcaaatcaaacattcattgtaatgtagttgaggtttgttctaagttgaaagtaattagttttgtcttttgattagttctttggttggttttcagatactgggtttgtgttcacttgtggggatggctcctttggtcaactggggcatggggataatgcctcacactgctctcctgtcaaagtgtcatgctttgttgatctgcatgtggcacaggtggcatgtggaatgcgccattcccttgtcttgttaaaagattgctcaggaaatcaagtttatggatttggctctgggaagcgtggtcaactgggtgtcagcaacgatagggtcaaatctgttaatgttcctaaag

SEQ ID NO: 117951 - DNA, 444 bp, Glycine max
  unsure (1)..(444): unsure at all n locations
  Clone ID: PAT_MRT3847_77519C.1
ctcatgcattctcaccactcacatgcgcactccctattgaacttgctgctctctttctcaaaccnnncacgttataagagtcctgcaccccgttacaacgaggttctctcgcgtcacaaccactgcgcaggctcatgcgttcgagccaccctcaggctcactctcccagccaacaccgaatcccttagggttaactttcgcagcatacgagctagacgcgacggaattggataggcgaccttctcaccgatgtgcctaacggataaagacgacgcgagacacgtggaatcgagatgcgagaacgcgattctacagcagcgtccgactccaagctgggcgggttgttgggccgggtctggtacgaagaggacttcaccggcatacttgggcaggccacagttgtatgaatcagttacggactacgattcaagcgcgtcgcctagc

SEQ ID NO: 117952 - DNA, 448 bp, Glycine max
  Clone ID: PAT_MRT3847_7751C.1
taccactcccagtttctttaactatcccgctcttctgttacttgatagcttgaacgggttaacaagtcattcggagttatgtgcttgctttattggacgcatatgcactggtgaaaacaaaggtcctcacacagcgcccgactggttaagcctctttgttgtttgagattgggtaacagcaacactgtctctagcgcgactgtcgtttctcggctggcatcacagttttgtacttgaatgatctgggacactgccattttggcgaggactgccatacgtacgtgattttagtagcatcagcgatcttgagctggttgccgccttccatatcatacctaattatgctctggctattagctgctggggagcagactgtacattccggccgagttctgccatgtatcacatgtacattatattggcaccgttcttatggagtgtctctatg

SEQ ID NO: 117953 - DNA, 2909 bp, Glycine max
  unsure (1)..(2909): unsure at all n locations
  Clone ID: PAT_MRT3847_77520C.1
acgagtatatgctcgctaaggaaagcttttaaggaacttgtttaatgaaagcactaagggttttgatattacccaaatactgatagtctatgattcatgaaaatatgaagtcttgcagaaagctcatattaagctagacgaaaggtataagcttttcaaggcagctctgacacgtgtgaagggaatacggccaaatatttacgaggagttcatgccaactggagggacagatgttaaggtatatacagttggccctgaatatgctcatgctgaggcaaggaagtctcctgtggttgatggtgttgtgatgagaaatcctgatgggaaggaagttaggtatccagtcctcctgactcctgctgagaaagaaatggcaagagaagtttgcattgcattcaggcaagcggtttgtgggtttgatctcttgagatgcgagggacgatcctatgtttgtgacgtgaatggatggagctttgttaaaaattcacacaagtattatgatgatgctgcctgtgtgctgggaaagatgttcttagatgtaaaagcacctcatctttcttatgctattaccaacctactttaccatggaaagtaaatgaaccggtccaaccttctgagggactcactcgtcaaggtagtggtattattggcacttttggacaatcaggatgactacgttgtctaattgctgttatgcatcttggtaaaagaactgcctaacgcagacctacagtaaaagttaccgatttatctcccctggagcagatgtggagatacaatacttcatgacatcaagaggcacacactccctataatgcgtccagagagcctgcaagaaataatgtcatatgagacattagaaactatggaggagatgattcggccatttactatgcccgcagaagactttcctccagcaacacctgcagcattctctggctatttctctaaatccgtgcttgaccgtctcgttatcctttggccgttccatagacaagccagttctctaggaaaatagtatgcaacggtgaaggtgaagaagaacgacctgttcaagctctgatggttcttaaatatgggggcgttcttacacatgctggcagaaagcaggctgaagaactaggaagatatttccgcaataatatgtatccagatgtctgcagctgcttttgccaaaggtcttcttgaccttgaagggcagctcacaccaatcctggtttcacttgttagtaaagactcctccatgttggatggtcttgacaatgccagtattgaaatggaagaagccaaggctcggctaaatgaaatcataacttctagttcaaagacaatctatagcaatggatcacctgaattttcttggatggttgatggtgctggactgccacctaatgcgtcagaattgcttcccaagttggtaagtttgattaagaaggttactgaacaagtaagactgctagccaccgatgaagatgagaaacttgcagaaaagagcttatatgatgtaattcctccttatgaccaagcgaaagcacttngggaagacaaatatcgatgttgatcgtatagctgccggattaccttgtggtagtgaagggtttctattaatgtatgctcggtggaaaaagctggaaagggacctgtataacgaacgcaaggagcgctttgacatcacccaaattcctgatgtctatgattcatgcaaatatgatctcttgcataatgcccatcttaatctagaaggattggatgagcttttcaaggttgctcaggcacttgctgatggtgtaattccaaatgaatatggaattaatccgaagcagaagctaaagattggctcaaagattgcacgtcgattattgggtaaaattttaattgatctgaggaacactcgcgaggaagccattagtgttgctgagttaaagagtaaccaagaccatgattcattctctgtgaaaactgaaaaggaagatacagaggccaagtcaaaacttctcaacaagaatgatgaaataaggaaatccagcacattgaatgatatatcaatggatcaagaggacgatgatgataaagagaccaaatatcgtttggatccaaagtatgcaaatgtaaagtcgcctgaacgccatgtgcgaacacgcctatacttcacatcagaatcacatatccattctctcatgaatgttcttcgttattgtaattgggatgaatctcttctagatgaagagagcctcgtttgctataatgctctagagcgcctctataaaacaaaggagcttgattatatgagctacattgtgctgaggatgtttgaaaacacagaggtggccttagaagatccaaaaaggttccgcattgagctgacctttagccgtggtgctgatttatcccccttgcagaaaaatgatagcgaggctgcttcgttgcatcaggagcacacactgcctataatgggtcctgaaaggctacaagaaataggatcatatctcacattggaaaaaatggagatgatgattcgtccatttgccatgcctgcagaagacttccctccaccagcaacccctgcgggattctctggctatttctcaaaaagcgtacttgaacgtctagtaaatctttggcctttccataagcatggcaattcaaatgggaaatagttaacttgttcaatactttctccctctgcttcaatgttccaacttcgtgtttcttattgtacatgggaaaattctgatacaaccaaagtgacctttggctcctttggaattttttttcaagcaaacttcttccagccaaaaaaatgttggaacttgtacaaaatagcagctattgtagttaaagcagactattgtccatctcttttctattattaaggtttataaaaaaaactaacaggaatactggaagta

SEQ ID NO: 117954 - DNA, 676 bp, Glycine max
  unsure (1)..(676): unsure at all n locations
  Clone ID: PAT_MRT3847_77521C.1
tatggggtttcggtgagtacgagatatgaagggaaggatgatgttttgtttgccaacattctgcgatcgaggaacaaatttgtggatgctcttgcactatacgaacgcgtgctggagagtgatggcgggaatgtggaggctcttgttgggaaagggatatgtttgcagatgcagaatatgggtaggcttgcttttgagagttttgcggaggctatcaggatggatcctcagaatgcctgcgctctcacacattgcggtattctttacaaagacgaaggttgccttgtggaggctgctgagtcatatcaaaaggctttacaagtggatccttcatacaaagcagctgctgagtgcctggccattgttttaacggatattggtaccaacataaaagcttgcaggaaatactcaggaaggaattcaaaaatactttgaagctctcaaaatagatccacactatgctcctgcatattataatcttggtgtggtctattctgaaatgatgcaatatgacacagccctcagtttctatgaaaaggctgcatcagagaggccagtctatgccgaggcttattgcaatatgggtgtgatgtttaaaaatcgcggtgatttggaatcggctattacttgttatgagaggtgtntaactgtgtcacctaactttgagatgcagaga

SEQ ID NO: 117955 - DNA, 391 bp, Glycine max
  Clone ID: PAT_MRT3847_77522C.1
tcgcgatctaggtgagggaatttatgcaaattcttaagcatatgtatggctgcgtattggatattacgctggataatttccttcctctttatgagggtgcgctttattttggagtggagacacttctcttgaagtgtgagacgtggctttctgagttactctcacccaaaaggtttcaatctactcaaatacaaatggaggacttgatccaaatttgggaatttggctctgattgtgctagtgactttatcctgcacttatgtatgggctatctagcaagaaattttatgtgggcaaagcatagcaagtcttttgggaaacttccatatgacctgctattatctttagtaaagcatcctcatttgactgttgacagtgagttgcatctttc

SEQ ID NO: 117956 - DNA, 314 bp, Glycine max
  unsure (1)..(314): unsure at all n locations
  Clone ID: PAT_MRT3847_77523C.1
agatccnngggggggggaacggannnggaaaaggaaaccattggaatccatttggatccccattcagcacatcccaggcagggcacatggccggggattcacagccggttttttgaaaaagagacccttcgccaaaaaaaagtccgccctcccgcctagaaaaaagggttcccacgtataaaccccattcagggtcggagggggagctcatttttaaggtgaacccccccatggataaaggaaagactttcttcccccatgaacgttgtccatggaattgcaaacaatttttttttttccggcggcctttcccc

SEQ ID NO: 117957 - DNA, 164 bp, Glycine max
  unsure (1)..(164): unsure at all n locations
  Clone ID: PAT_MRT3847_77524C.1
aagttgangaagagtacgtaagctnggaattaggntcnaggcaaagtgattgattccagttcnaanggacnnngganaaanangntttgatcgnnaggaaggttnnnntntcacccnnaacnagnaaaanaaagaaatnnatcnagtnagntanaattnntnta

SEQ ID NO: 117958 - DNA, 438 bp, Glycine max
  unsure (1)..(438): unsure at all n locations
  Clone ID: PAT_MRT3847_77525C.1
gaattcaaataaaatatctaaatccaccgttgttagagtaactaatgaattggtaaatttagctatctccagccaaacatctcaaaatgatttttgcaaaaatgaagaatattctatggatcttgacaataaaggagacatgggccagccctctctttcattcaatggatgtacagattcaatggagcagactgatatttcattcaatggatgtacagattcagtagtagcaagggattctttgtcatcttctctttccccagattcagaagcaattttgccttataatgggcttaattatgcccattgtcagcaatttgaaacagttaatagggaacagttcacatgggaacctcagctggatgacaatntcttcagcactttccaaatgtttgaccttgactctgcatatgaaactgggtntcccattgatgggct

SEQ ID NO: 117959 - DNA, 1407 bp, Glycine max
  Clone ID: PAT_MRT3847_77526C.1
ctcgggccgttcacattgcgcagcgacgagcaccgcccctgcgatggattacccaaagtggttttgacgcaccagcgtttatgttgaccttttgtgttggcaaagggtgatgacgcagtgaagtgaaagcagcaacagcaatgggcgatcacatagcgaagggacaagaactggccaagagcagcggagaacaagctccatgcttgttgccccttgttcgggtccaacttggaagacgctgccgaattgttccacaaatccgccacttccttcaaactcgccaaatcatgggacaaggcggcctcactcttcgtcaaatccgctaaatgtcacttgaagttggatagcaagtatgatgctgcaaatgcttatgtggatgctgcacattgctacaagaaaacttccacatcaggagctatttcctgcttaaataaagctgtgactatcttcactgagattggtaggcacatcatggctgctaagtattcaaaggaaattggcgagttatatgagcttgatcaagacatagaacatgctagatcttattatgagagggctgctgaactttttgaaattggggatgcagcaacttctgtgatccagtgcaaagttaaagttgcacaattttgtgcccagcttcaacaatatcagaaggcaattaagatttatgaagatattgcccggcaatcactggatagtaacttgttgaaatatggagttagagggcatcttcttaattctggcctttgccagcttgtccaaggggattttgttgcaattaccaactctttggagcgctatcaggacttggatctgacattctccagaacccgtgaatacaaatttttggctgatttgtctgcttcaattgatgagggagatgttgaaaagtttactagagtagtgaaggagtttaatagcataaccccattggaatcttggaagtcaacccttttgttgagagtaaaggatgctatgaaagtaaaagagatggaagatgatgatttgacatgaatcaatgacaactgaattttctgccaattaagttactctcagctttgtaaatgccactggtatggatattatttttgccatggtttgatggtttttcttattactatttgtaatttgtattactaaaagcagaaggttatctgtgcatcatgcctgtatatgcccaaaaattgacaaaatttgttctcgaaacctttattcctgagctttagaagggataagatctaatttgcaatgttcattggctgttgtatttttgtatactatgtcctgaaattcacaatggaaatttatcaagtgcttttaagaaaaaaaaaaaaaaaaaaaaaaaaaaaaaaaaaaaaaaaaaaaaaaaaaaaaaaaaaaaaaaaaaaaaaaaaaaaaaaaaaaaaa

SEQ ID NO: 117960 - DNA, 388 bp, Glycine max
  Clone ID: PAT_MRT3847_77527C.1
ctattgaatgaggcactatgaaaggtgatcatcccctcctgcagatcattagcgttctacgatacgctttctaagagtgaggtcgcgagggatcgcagcccaacatgggaggtgaatccctcctaactgctcactcacggagagagaccgacagcgaacaagccccgcgagggatagactgcaagaactacgataagagagtttaacaggctctggggcaggggatgaaaaattgctgcagcagagaggacacacctgctgttggatagtcgcccatagatggcaatttgtaagatagatgctaggagagctgaatgctgactccctactagattcccactcacagcctcttggcaatagcatttgtaatgagatgctcactagatat

SEQ ID NO: 117961 - DNA, 499 bp, Glycine max
  unsure (1)..(499): unsure at all n locations
  Clone ID: PAT_MRT3847_77528C.1
gctctcttggactcagttcagttatttcaaaacattttaatctcaacaccaagacgacaatgatcaagtccaaggagttaaaaatcgaagacaccaaccttgctggaatcggatctgagactgacaagaagcttagagaggaggctgctaagactgaacaagcctacaaagatgctggaaagcaagttggtcttcaaatctggagaattgagcaattccatatcaaaagcgttcctaaggatacttacggtagcttctattctggagactcctacgtcgttttgaacacatacaaaaagaagggaagcgaggctctcgcctgggatgttcatttctggttgggaaaatacactactcaagatgaagctgcaactgctgcttacgcgaccgtcatgcttgacgatctcttgggaggagctcctgttcaacatagagaggttcaagagaatgaatctgctcttnttctctcctactntaagaactaccttagaantttaga

SEQ ID NO: 117962 - DNA, 433 bp, Glycine max
  Clone ID: PAT_MRT3847_77529C.1
atcggaacctctttttcggcgtagcattgggacacttcaacgtttggaattctcacgcaaaaaacgacagtcctggggctcgcacttgcctagtgtgtgggaatccacatggattgatcaggaagtatcgccttatcgtctttaggcagtgcttatctttttatgcctagggaatacacctacttttttattgctacaggagcatctgatacttattgttatatcatatattaccccacttggatatctactgatcgtttctttaatttctactatatttttgtcttttttatctatttacttttgttccatatttcattgtctttttttgatttctatcttaactttgaaatattttttattttttgtcacatttgctttttttgttattctttattttttttgtcaatttttcctattttttatttttttt

SEQ ID NO: 117963 - DNA, 291 bp, Glycine max
  unsure (1)..(291): unsure at all n locations
  Clone ID: PAT_MRT3847_7752C.1
acaacacataccctttttcgaatcaacgccactcgcccaaagaccaaactnnnnnnnnnnnnnnnnnnnnnnnnnnnnnnnnntcaacatttcacaactcaattttgcaatttcccctttcctttttctactgcccctcctctccctccctcttcgtttaacatcttccattcccttcctctctctgtgtattctagggttagggttcttctgactccacaatggccgtttcaaccactttctccgctcccaaattggaggccctattcctcaaatgctcttcctcctctt

SEQ ID NO: 117964 - DNA, 292 bp, Glycine max
  Clone ID: PAT_MRT3847_77530C.1
aaaaaaaatgtagctccgctctttttttttaagctttttttaaaaatctatctcttccttttattattcttggaaaggtataaatattgcctctacattatttgtttttaattttttctctctaccaatttccccagacaatttttgccttcttttaccttgtaatggagaaacctttactttttttaacctatctttcccgaaccccattgatattttaatataaaattgtgtttacaattaaagcattcataatttgttttatatagcttttcccctcctaaattgtttt

SEQ ID NO: 117965 - DNA, 296 bp, Glycine max
  Clone ID: PAT_MRT3847_77531C.1
tcgcggacgtgtgggccgtccgttctccgcccgccagtctctccgggtctgaccttcaccaccaatcccagcagaatgtgccctcctccgttccctcctcgtcgcttgcttgtgcacagcgtgccaaacacttttccagtcaattcggccttttccaacaccaattgatcgcttacatcggcggcaccgatgcgccccagcagcagcaacagtcgaccggcagcaacgacactcagccgactgttaacgcattggcaatgttagcagctgcgggaattaacggcggaagtgggacg

SEQ ID NO: 117966 - DNA, 367 bp, Glycine max
  Clone ID: PAT_MRT3847_77532C.1
tccaagacccttcaagcattgagcgacgcttcatccagatgcgtatcaactctaagatccaaacagcacatcgcgcaatcaacaatgtcgctgtccaacttgatcagctcgcggaccaggtatgtatgcaacttcattttccactttctagtacttgaaaagtaagtaactatagttagacatcaaatgcatcgaacttactactgtatgtttgagttgctgttgggggacctcagaacggcgtttccaaaagaattaggggtgtgtgtctttggcgttcgtccgttccatcggcttagaaacgtgtgctacgcacaatgaaggccaacacaaacacgcccctactagttactgtagaaagaagtat

SEQ ID NO: 117967 - DNA, 772 bp, Glycine max
  Clone ID: PAT_MRT3847_77533C.1
gtttgattatgagatggtggatgcttcgaattcagattcaggttcttctctgaactttcccctgcttcttataaatagaaaccaaagactaccacatgtgcattttcatacaggaaaaataaactatatctcattgtcatgtgcatttatatatcttcaatcaaatattgatatacaattacgaattgtctccattctcttcagatcatacggtttcgttgataataaaaaaataacttagtatggttcttgatatcttggagattatgcatataatttgagcacatgatggagaagtgataccatgaatttgattgcaaagatgtcatgtttattctttttagcttatatttttatttaattgatataacagtgaaacaacttgtgtttccaggtttgtttacattttcaatgaggtgcatggttttcctttagaatttttaaaaaaaattatacttttagttttggggattttcagaatagtacgtagagtggtggtagcagtaagtagtaaccttgatgatggtaggaatgataaagcgtgaatgtttaatttccaaagaaaggaaagtggatagttttaataattaaaataaaataagaaaaatgttttcttttaggtttaaaattataaagaatgaacatactatgtaaaaattttcaaatctgagtaatatttatgacattttcagacaactaatttatgttgattaatgttacttccaattgagtaacagtggattaggtaaatggtttctacatgtttaggggt

SEQ ID NO: 117968 - DNA, 379 bp, Glycine max
  unsure (1)..(379): unsure at all n locations
  Clone ID: PAT_MRT3847_77534C.1
gagagaggtgcatacgggtagagaggttgctgtacgagataagatattgaagtagtgcggggtgcggaggaggtgcantgaacaagggcctctggatcancatcgcgtctcaagtcggtcacttgttcgtgggaggtgtgagtgggtggggggagaaacaggtcgccaaccttctgcggcagcagttgtgaggagggaggggaccagggcatggggcctcacaatcagagcgggttccgatgctgatgaggtcgttaggagggcgaggggagtggggtcgagagggaggggtattttgggcagtggatggtcgaatgcgagctgtgtgaagcgtttgggggcgattgggctagagaacagtgaagctaaccgccaggcg

SEQ ID NO: 117969 - DNA, 527 bp, Glycine max
  Clone ID: PAT_MRT3847_77535C.1
gggcccccctataaggaaaactggtacgccccccagggcccggtccgagattcccggggtgtcgccccgcccgtccgaaattggagagagatcaagaaacaaaaggggttcttagattacatagtttttgtgagagtgagtgatagttttttttttttttttatatacaaatataacgaattgagtgctgaggaaaaaaaatgtctgccatggtagaggggtggaagggggagctgacaaagctcagagagaaagttgtcatggcccggaagagcctcttttccaaaggcaaagaggggtcagaagaagaagaaagagtcgtggagaaggaggctcacaaggctatcatggctgttcagagagacagcactcatgaaaccatgtcagaggcaacagtgtgtttgcttatggatagatttgtgccatgctgacgcatgtgcatgtgtgtgctaggtgctcaaaatgtgttgtttattatatattgtgtacgatttagttgataattaaaagaaggaggtttgtaatgg

SEQ ID NO: 117970 - DNA, 644 bp, Glycine max
  Clone ID: PAT_MRT3847_77536C.1
gaaacacaagtattttcataaatttcagttctccgaaccagtcataagtttaatcctcgatctgaaacatggggggaatagggcacaaaaattaagaggcgagtctagctttgtcacgttatgaactttagtagggaaagagaaagtgaacttgcttcagatcacttatatattcggtctaatttgatccgcacgaccaatccatatgataatgttcatactacataacaagtgagtctgtctattcagtatatagcacgaacaaaccacgttttttcgattggggctaccatgtacatatacttgcttggtggaatttctaaaataagacacacaagggctgctgcttgggaacttgactggtaacagatctttaatgctatactaaacaacctttgaagccttttttaagggcagtttcatccaaattccttccaatgaagacaagcttggttatccttttctcggtagggtcccatgtttttcctggacaggcggccaacatggaatgcaccccctgaaacacatatttttgatcagaactatccactggcaggacaccctttattttggaaagggcattttctttttcttaaaacaattttttaaggcaagcggaaaccttaataaagacaaggggtccc

SEQ ID NO: 117971 - DNA, 110 bp, Glycine max
  Clone ID: PAT_MRT3847_77537C.1
ggtactaatgaagattcattgttaataactgaatacaaatgaacataacggaacatatgaatattccactttatgaaatttatctaaccaattatacaagagcatagtac

SEQ ID NO: 117972 - DNA, 393 bp, Glycine max
  Clone ID: PAT_MRT3847_77538C.1
aattcggctcgaggacaaaactcaaagaagtgatatcaaatgctgctgctaccacttcagagggaaggagtgttttccaagtgtatatagatgctgctgaagttatgcttgaggatgatgttgcgtcaaatagagctattggttcttatggagctagtattattcaacaacaaacagagaaacaaaagctttctgttttgactcattgcaacactggaagtctagccacagctggatatggtactgctctgggtgtcatccgtgcacttcatagtgccggagttctaaaaagggcttattgcacagaaacacgcccatttaatcaaggatctagacttactgcctttgagttggtgcatgaaaaaataccaggaactcttattgccgattctg

SEQ ID NO: 117973 - DNA, 2262 bp, Glycine max
  Clone ID: PAT_MRT3847_77539C.1
tgtacggctgcgagaagacgacagaaggggattgcacgcagttcctggaaagtagcaaagtaaagctctcttggttttgggaaccgaaacctaagaaaaacgcagaatctgtttcggaaagcgaaggaggcatggcatttgagtccaacgaagttgcagccacaacgctccaagccatatgctacaagcgcggttccctccagcttctcgatcggagaaagctccctctggagacagtttacttggaaattcgggattcaacggatggctggaatgccatacgggaaatggtggtccggggagcacctgctattgcaattgcagcggcactctctttggctgtggaggtgttcaatttagattttaatgggtcagctactgatgctgtatccttgctgcagaagaaattagaatatcttgtcacaagtcggccaactgcagtgaacctatcagatgctgcgacaaaactcaaagaagtgatatcaaatgctgctgctaccacttcagagggaaggagtgttttccaagtgtatatagatgctgctgaagttatgcttgaggatgatgttgcgtcaaatagagctattggttcttatggagctagtattattcaacaacaaacagagaaacaaaagctttctgttttgactcattgcaacactggaagtctagccacagctggatatggtactgctctgggtgtcatccgttctattcatatgactttaaatacgcacgacagaaggggacagaacgaagctgctatcgataacatatttcacttgagatcagttatctttatctacgcaagagaagaatagaaaatggatatcaggttgatggatttggactctccattgttcaacactctgcaccgaatcatggatctgacagaggacgcagagaagaacttgaacgctccgacgcggacatacgtgcgcgacgcgaaggcaatggctgcgactcctgcggacgtgaaggagtaccctaactactacgtgttcgtgatcgacatgccaggcctgaaatccggggacattaaggtgcaggtggaggatgataacgtgcttctgataagcggcgagaggaagagggaggaggataaagagaaagaaggggctaagtatttgaggatggagagaagggttggcaagttcatgaggaagttcacgcttcccgagaatgccaacaccgatgctatctctgccgtctgccaagacggtgtgctcactgtcactgtcaacaagctgcctcctcctcagcccaaaaagcccaagaccatagaggttaagatcgcctgaattaatttcttcgtttgcactgagacctgctatcatttcctcttttccttttgtgtgtgccaatgcttttctatctttccgtctctgcttatggtcatgatatgacactgtagtttgatcatggatgatataatgcatgcttttctatgaatttttaatttcctgtgccggagttctaaaaagggcttattgcacagaaacacgcccatttaatcaaggatctagacttactgcctttgagttggtgcatgaaaaaataccaggaactcttattgccgattctgctgcagctgcattaatgaaggcaggacatgtggatgctgttgttgttggggcagatcgggttgcatcaaatggtgacacagccaacaaaattggaacctacagcgttgccttgtccgctaagtttcataatgtacctttttatgtggctgcacccctaacttccattgatctatcactttcttctggacaagaaattgtcattgaggagaggtctcccaaggaattgctgaacacacatggaggacttggagagcagattgctgcctcaggaatttctgtgtggaacccagcttttgatgttactcctgctaatctaatatcggggatcatcactgagaagggtgtcattacgaagacatctgctggtgatgcatttgacatcaaagccttcgtacagaaaacaggttaaggtagagtgagatttttatcacacgttacaacattgtaggcttgaaaagtattggagtggtagggttctttaagagcctctttggtacgcaagttagataagacttattaactttgagacctaattgtataagatgataacatcaatatattatgcaatgtttggtatggcatggaaaaatatattatattgcatgagataattatgtcatatgtgtagtgatccattgtataaacattagatatgataaaaattgaccccttgtcc

SEQ ID NO: 117974 - DNA, 273 bp, Glycine max
  unsure (1)..(273): unsure at all n locations
  Clone ID: PAT_MRT3847_7753C.1
accggcccggaacggcccgggccgacccacgcacgccgactgcctggcagaagacaaacgacagagggggcgcagcggaaataaagcacaagggacgaccaaacacaaccaccacaaaacaccaaagngnggacaagcaagcaagcacccagcaccagcgccaaaccacgcaaagcaccaaaaagcccccccgggccgcacccaggaccaaacagaggaaacacacngaagccagaaaaccaagcccaccaagcaccggccaaacaaacacaa

SEQ ID NO: 117975 - DNA, 261 bp, Glycine max
  Clone ID: PAT_MRT3847_77540C.1
attcggctcgagcgagctcaaagtgcggaatgagccactactatagacggcgtatgcatgttcactgctctgacaagcttcaacttctgcgtgctatgaccatacggcgagggtcatcaatggacagagacagctactagattatcgctgcatacactgccccccaagcacccctgagatgcggccccatctaagacacatagcagctgaacgacgtctggctctcattcaaccctatgttatctggaatgcacatcaacc

SEQ ID NO: 117976 - DNA, 779 bp, Glycine max
  Clone ID: PAT_MRT3847_77541C.1
attgtcaagtctacaaatatgaagtgcctgactccaccatcggcattggaaggggattgtggattccttgctgcaaacctttatgctaagagtgtttttggggaagatgctttggtgaatgtgagcattgaaaagcaagcagatggtaagttgagtggatacatcagaataagaagtaaaactcagggaattgccctcagtcttggggataagataactttgaaacagaagggagccgcttaataggagcaaatgccctgttttctcttatgtttccttcgtttgtatgtcttatcaacttcgtgtagcttccggtggcggctaacttcaaggttggttattgcttcaaattctgaggcttttggtggcagcccgcttgttagtattattttttttttccttttgaattttcaattttgtctgtattctttccttggatattgcttaagaaaaatccttattacccatcttttatttttctacacatggggacggacaccgtatattgatatgagaatcaatctagtgactattgttctggttggccttgcatacatatgttcggataataatcattaatgataaatgatacctccagtttcgattataagttccttattagttattacccatcttttatttttctacacatgggaagggaccccgtctattgatatgagaatcaatctagtgactatttgttctggttggccttgcatacatatgttcgcgtgtcttaggataataatcattaatgataaatggtagttgtcacgtgg

SEQ ID NO: 117977 - DNA, 1002 bp, Glycine max
  Clone ID: PAT_MRT3847_77542C.1
agggcagtggattaatgacatgataggatatgtatctttcttttgagaatgcatatctaacctttaatgtagccatgtaggctatctgtgttaagaattacatttccattccgcatatcaaatcaaagctaaaatgatttggagtatgcgcttaccaatcataatgtttaattgcagggatctagactcactgcttttgagttggtgcatgaaaaattatcaggaactcttatttccaattctgctgcagctgcattaatgaaagcaggacatgtggatgctgttgttgttggggcagatcgtgttgcatcaaacggtactttgagttacaatgaaaataagctatagtttgcttgagcataaaaactataatcaaatttgtcttcctctatatggcattgcaggtgacacagccaacaaaataggaaccgacagcgttgccttgtctgctaagtttcataatgtacctttctatgtggctgcaccccttacttccaatgatctatcactttcttctggacaagaaattgtcattgaggagaggtctccaaggaattgttgaacacacatggaggacttggagagcagattgctgcctcaggaatttccgtctggaacccagcttttgatgttactcctgctaatctaatatccgggatcatcactgagaaggtctttcactctcttgacttgcataatttgtatggggttcagttgcattttattctctaaccatttcatgttctttgagcagggtgtcgttacaaagacaactgctggtggtgcatttgacatcaaagctttcgtacagaaaactggttaaggtggagtgagatttttctcacccattacaacattgtagacttgaaaagtattgaagctgtagggttctttaagagcctctttggtacgcaagttagataagacttattaacttgagacctaattgtataagatgataacatttcaatattatgcgcccacgcgtccgcggacgcgtgg

SEQ ID NO: 117978 - DNA, 3753 bp, Glycine max
  Clone ID: PAT_MRT3847_77543C.1
atactttctaccatttccgttctgcgagggtgtgctcatgtgcgctctggataattggtgagtattgcctgtcactttcggaggttgagagtggcattgcaaccattaagcagtgtcttggtgacctcccgttttatactgttactgaggaaggagacggtcaggaggcatcgaaacccatacagcaggtgaactcaaccactgtgtcttctaggaggcctgctattcttgcagatgggacctatgccacccagagtgctgctctggaaactgccatgtcaccacccacccttgtacagggttctctgtcctcaattgggaacttgagatcactcattctttcaggtgatttctttcttggggctgtagttgcatgtacactgacaaaacttgtgttaaggttggaagaggttcagacttcaaaagccgaagttaacaaggcaactacacaggccttgttgatcattgtttcaatgctgcagctgggtcaatcttcaattcttccacatccaattgataatgattcttatgacaggattgtcctctgcattagattgttgtgcaatactggtgatgaaataaggaagatatggctgcaatcttgcagacagagctttgtgaaaatgcttgcagataagcagcgtcgtgagactgaggagattaaagctaaggctcaaatttctaatgcacagcctgatgatcttattgatttttaccatctgaagagcaggaagggtatgagccaacttgagctggaagatgaggttcaagacgatctcaaacgtgctactggggagtttaccaaggatgcagatgatgcaaataagctcaatcgcattcttcagctcactggattcagtgatcctgtttatgctgaagcatatgtcacagtgcatcactatgacattgtccttgatgttactgtcatcaaccgaaccaaggaaactcttcagaatttatgtttggagttagcaaccatgggtgatctcaaacttgttgagcgttcacaaaactatacgcttgctccagaatcaagcaaacaaattaaagccaacgttaaggtttcatcaaccgtggagatagtacctgttccctgccgcagcactgatgacttcaatttaagtataacttcaatcgagagaaccttcaatcaagcaaagatgcgtggtcaaaaagttcgcggaattataataaacaacccctcaaatcctgctggcaaactattggatagggaaacactgttggatcttttggactttgctagagagaagaacattcacataatctctaatgaaatgtttgccagctcttcttatggaaacgaagagtttgtgagcatggcagaaatcatggaggcagaagatcatgaccgggacagagttcatgtagtgtttggtttgtcaaatgagctctcggttccaggtttaaaggtgggtgttatctactcttataatgacaatgtcgtggctgcttctagcaaattggcaaggttctccactgtttctgccccaacccaaagattgctcatctccatgctctcagatacaagttttgtgcaaaaatttattgaggttaacaggttgaggctgcggaaaatgtataatacatttgttgcagggctgaagcagttggggattgagtgcactaggagcagtggtggtttttgctgctgggctgacatgagcaggttgattcgctcttacagtgaaaagggggagcttgagctctgggatagattgttgaatgttgctaagatcaatgttaccccgggatcatcatgtcactgcattgaacctggatggtttcgtttttgctttgctacatccactgaaaaggctgtttctgtagtaatggaacggcttcggagaattgttgaggccacaaatggacatagttgatgtgggtggcgtcaattagttctgcaaatttagttggtttattgattctttattcttttggagaagccagcatcatcctaggaggaataaatactcaccaacgggttgttggatgacatggacatggtgttatgcaatggagttgctttaaaatgatgtttctgtcatcaaacgaaccaaagaaacgcttcaggatttatgtttggagttagcaaacatgggagatctcaaacttgttgagcttccacaaaactatatccttgctccagtttctagcaaacacattaaagacagtgtaaaactatgaccatgtacaagaggtggcactactgatgctatcaagttaaactcttctgattttatttttggggtaagcgacaatgggttaaatcaaacttatatagccttcacaaaactctacgcttgttcaagaatcaagcaaacaaatttaagccataattaaggtgacatcaactgaaacagaattatttctggtaaatagtatatgagacatcttcgaatgttcttgagagaacagtattgtcctaaatgatatccatattgcatcatggactacatttctactgcatcttgtgccgatgtggcattcagaactatgtgggctgagtttgagtgggaaaacaaggttgccgtaaatacagtattacaagatgagagggacttcctgaaccacattatcaagtctacaaatatgaagtgcctgactccaccatcggcattggaaggggattgtggattccttgctgcaaacctttatgctaagaggtttttggggaagatgctttggtgaatgtgagcattgaaaagcaatcagatggtaagttgagtggatacatcagaataagaagtaaatccagggaaggtcgcttacaatgacaaaagtgtatgaaaagaaaggaaagataaaaagaaaaaactcactgcaagaacctaatttggttaaaaacatgatggcagtttttattttttattcttcaccttcatttttagcatttgcttttatttcataaacttatattagagattagagaatcacatatccttcaagctttgtatatttcagcaggaaggtcctattgtattatatataacatttggtgtgataattgacaaacccgagggcagaatttgataagtgttcttgattgctcagctgttgaagtttaatgagcttttggatgacatgctctttctaaggaattcctgaagaccctttatcagggtgctcctccttcacgaggattgatcaaatttaatgttgatagcaacttccctagacaacactttgtaagaagaaaagccagttttgtggggtagaatatgggtaataacaggcattcatttgctttttggggggaaaaggcaaagaaagaagaaaaagataaagattagaaacagagccgtcgtatggtatcatgctttctcaacgttttctcgtatcatcgtttgtattgtacctcgtgacatttctggaaagccaaaagagaaaaaaagttggaaatgaatcataggaatcttttgtatttcccttgtaaacacgcgtagtaatggaataaacaaatgcctttatttgcaaatgttacaaattttatggaaaaaaaataatggcaaggttggtaagtacttcaaattctgaggcttttggtggcagaccgcttgttagtaataactttttttttttccttttgaattttcaattttgtctgtattctttccttggatattgcttaagaaaaatccttattacccatcttttatttttctacacatggggacggacaccgtatattgatatgagaatcaatctagtgactattgttctggttggacatgc

SEQ ID NO: 117979 - DNA, 735 bp, Glycine max
  Clone ID: PAT_MRT3847_77544C.1
gtccgcgcgtccggatagaaaagagaaggcaatggatatgaggttgatggatttggactctccattcttcaacactctgcacagaatcatggatctgacggaggacgccgagaagaacttgaacgctccgactcggacatacgtgcgcgacgccaaggcaatggctgcgactcctgctgacgtgaaggagtaccctaactcgtacgttttcgtgatcgacatgcctggcctcaaatctggggacattaaagtgcaggtggaggacgacaacgtgcttctgataagcggcgagaggaagagggaggaggaaaaagagaaagaagggggaaagtatttgaggatggagagaaggcttggcaagttgatgaggaagtttactctccctgagaatgccaacaccgatgctatctctgctgtctgccaagacggtgtgctcactgtcactgtcaataagctgcctcctcctcagcccaagaagcccaagactatagaggtcaacatagcctgaattccaacttccaacgctatctatccctgtttttgttttctgtgtgccaatgcttttctatctttccgtctctgcttcatgcttatcacactgtaatttgatcatggatgataaaatgcatgcttttgtatgagttttaatttccttcaaaaaaaaaaaaaaaaaaaaaagagggcggccgcttctaagaaggatcccaaagtcttacgtagcgcgtgcaagtgcga

SEQ ID NO: 117980 - DNA, 2049 bp, Glycine max
  Clone ID: PAT_MRT3847_77545C.1
ctcggtttctaacaaatccgtgctgcgagggtgtgctcaagtgcgctctggataattggtgagtattgcctgtcactttcggaggttgagagtggcattgcaaccattaagcagtgtcttggtgacctcccgttttatacctgttactgaggaaggagacggtcaggaggcatcgaaacccctaccgcaggtgaactcaaccacttgtgtcttctaggaggcctgcttattcttgcagatgggacctatgccacccaaaatgctgctctggaaactgccatgtcaccacccacccttgtacagggttctctgtcctcaattgggaacttgagatcactcattctttcaggtgaatttctttcttggggctgtagttgcatgtacactgacaaaacttgtgttaaggttggaagaggttcagacttcaaaagccgaagttaacaaggcaactacacaggccttgttgatcattgtttcaatgctgcagctgggtcaatcttcaattcttccacatccaattgataatgattcttatgacaggattgtcctctgcattagattgctgtgcaatactggtgatgaaataaggaaaaatggctgctatcttgcagacagagctttgtgaaaatgcttgcagataagcagcgtcgtgagactgaggagattaaagctaaggctcaaatttctaatgcacagcctgatgatcttattgatttttaccatctgaagagcaggaagggtatgagccaacttgagctggaagatgaggttcaagacgatctcaaacgtgctactgggccaaggacgcgtggatgcaaataagctcaatcgcattcttcagctcactggattcagtgatcctgtttatgctgaagcatatgtcacagtgcatcactatgacattgtccttgatgttactgtcatcaaccgaaccaaggaaactcttcagaatttatgtttggagttagcaaccatgggtgatctcaaacttgttgagcgtccacaaaactatacgcttgctccagaatcaagcaaacaaattaaagccaacattaaggtttcatcaactgaaacaggagttatatttggtaacatagtctatgagacatcttctaatgttcttgagagaacagttattgttctaaatgatatccatattgacatcatggactacatttctcctgcatcttgtgccgatgtggcattcagaactatgtgggctgagtttgagtgggaaaacaaggttgccgtaaatacagtattacaagatgagagggacttcctgaaccacattatcaagtctacaaatatgaagtgcctgactccaccatcggcattggaaggggattgtggattccttgctgcaaacctttatgctaagagtgtttttggggaagatgctttggtgaatgtgagcattgaaaagcaatcagatggtaagttgagtggatacatcagaataagaagtaaaactcagggaattgccctcagtcttggggataagataactttgaaacagaagggagccgcttaataggagtaaatgcccgttttctctgatgtttcttcgcttatatcaactttgtgtagcttcttgtggcggctaacttcaagcttggttattgcttcaaattctgcggcttttggtggcagcccgcttgttagtattaatttttttttcccttttgaatttccaattttgtctgtattctttccttggatattgcttaagaaaaatccttattagttattacccatcttttatttttctacacatggggagggacaccgtctattgatatgagaatcaatctagtgactatttgttctggttggccttgcatacatatgttcgcgtgtcttaggataataatcattaatgataaatggtagttgtcacgtgaaaaaattgtgccataactatcattaataatttataattttaggttcgtggtttcccttctttcccagtggttccttttttgttgttttcaaaaatattttgttcatatatcattagttattttaaataaaaagggggcccccccc

SEQ ID NO: 117981 - DNA, 360 bp, Glycine max
  Clone ID: PAT_MRT3847_77546C.1
gccagcacaaaataagaaaatttccttgcttcaacatcaagaattttctatagggcacccacacactttggtctaacctctaacaacaacgctatattgccacaaacataaaatagtcaaaacactcatggatcggtggtcaattaaaatttcaccgacaaaactcatccttgaattcttaactctcatttttacccatatactaaacctaacttcacagttgaattggatacgtttgtgagatacaagttagtaacattttgttgttggaatgtctctgagttgcttttttttcagttttcacctacaactaaggatggattgagctgggagcccgaaagaaaacaaactaaacaaaca

SEQ ID NO: 117982 - DNA, 220 bp, Glycine max
  Clone ID: PAT_MRT3847_77547C.1
tacggctgcgacaagacgacagaaggggaaaattctaatcagaagaagataaactcataaggaagacaaaccggctcccggttaatctcttgctcaacagggcaatcatctcagagacggaacgcacagggtcatcctgttaccaaagatgggtcgtactcagagcctcaggatgtcacggaaatcactcttacaagcccaaatttggaagcggcccaaa

SEQ ID NO: 117983 - DNA, 571 bp, Glycine max
  Clone ID: PAT_MRT3847_77548C.1
atttcgcttgttccattccattcattcgttcattcccaggtacgtttttctcgcccagatctcattcccactcctcaatccaaaacttctcattccagatctgtgtaaacgctattctcttccatttccatttctcaattgtctttctgtattccattatcgatgttgcaattttcattcaaaattacactctcattaactaattttagaacatgtatgcaagttgttttcagctctttctgtgttgtatgctatggcatcttaattggttcgattgaataatctgttaggtctaccctagcaaaacaaaccttatactttcttatttccttggtgctttttgtagctttcagataggtttctgtgtgttaatcgaatagacctgaattatttattgtatcacaggttgtgatggcagcagcaccagcagctaccttcgctattggaaccaccggttccctcggccaaagaggaagctcgcttcctcaatcaaagtcctttgggttgaaattcaactctctgaatcatttgaagagcttctgtggcctcaaggccatgccctccgtgagat

SEQ ID NO: 117984 - DNA, 250 bp, Glycine max
  Clone ID: PAT_MRT3847_77549C.1
ctgcgcacaaacacactaccagtctttcctacatgcaaaatccatcggatactcaccatcttcgacttaattacaaccttaccccttcttaaaaccttcctatactacaaactcttttctataagatcttccacacgaacacccaaatacatttctaacaatgaatctccacttagtcatgatcctaattctcaattactgacttaaaactatcaatcaaagactcaattatacctcataaattcaccta

SEQ ID NO: 117985 - DNA, 332 bp, Glycine max
  unsure (1)..(332): unsure at all n locations
  Clone ID: PAT_MRT3847_7754C.1
ccggaaaaattcccgttcgacagcttatagacggcggccgcccaaaaaaaaanngggaaaaataaaaaacaattgcgttnaaacccccccagcaaaaaacaaaggcgaaccaaaatnaacaatcaacaataaactacaaaatgacagaaaacagcccgacaaatcagtaaaagaattaagaataaacctcacataggcggaaagacatttaaaatggtctctgaggggcaacccacccaaagatggccccgcaaacagagggagaaaagggcgctatctagaccaaaaactgtccaacagcggtcccattaacaacaaaaaccctgaaaagg

SEQ ID NO: 117986 - DNA, 604 bp, Glycine max
  unsure (1)..(604): unsure at all n locations
  Clone ID: PAT_MRT3847_77550C.1
gaattcggctcgaggaaaaagcaaaaatcaatgctaggcagagcagagacaccaaccccaacttttcaaatcttcttttgcatcactaacttctttacagcataaagctaagcaaaaaagagactccctttgttatgcttgcccttctatttcaatttcaacgtgtaatcatggcttttgtaacctcaggtagacgaggatgagatttattggagacgcagaaaggaagatgaagagttggaatggacacctaattccactcacttaatatctcagtttactcaatgttttatgttgatcaatattttgttacacgtagctaatgctatggttggatcacgatcatcgataggagaactctttcaccgcacaaccaccatgcgagatgacaaattcattgattactgatttgagtcctattgaggaggaaagacttcaaaggcttcaagaacggctgcaagttccttatgatgagactcgacctgatcatcaagaatcactaagagctttgtggcattgttcctttcctaatgtatctctggaaggcctaatatctgaccaatgnaaaaatatgggatggcaaggtcctaatccatcgactgac

SEQ ID NO: 117987 - DNA, 493 bp, Glycine max
  unsure (1)..(493): unsure at all n locations
  Clone ID: PAT_MRT3847_77551C.1
gtgctaggcatcaaaacacacaccatgctcattcattcagccacaacaaaaaagtaactccctttgatttcacactttgctcattttcgttttctgattttcccacataaataaatctctcccttcttcttctcttacactcttctgtttcagcaatcaatcaatttccccactattagggtttttcatttgaaatgtggagagccaacaatggagccccttgaatccgaatcggttagctcctccgccaaggacccgctattgggtgaaccatcttcctctgttcaccccctcgatcatgatcctcaaccctcagatctcaatcacgttaccccggttgatgatgcacttggtgaggagcttcaggggaagttagatttgaaggatgagggtgaaagtgataataaaggttcgaacttggaagacgggggtgaaaaattgagcgaggataaaggttcgaacttggaagatgagagtggaaaatngagtgatg

SEQ ID NO: 117988 - DNA, 145 bp, Glycine max
  unsure (1)..(145): unsure at all n locations
  Clone ID: PAT_MRT3847_77552C.1
nngctgcgcagtctncgagcgatagnacactaatgataattaganactgtnnctncatagacnaaactcngggattncccgatactncaggtaagnatccggttgcagganncatgggataccttttctatgcagataggaaggg

SEQ ID NO: 117989 - DNA, 616 bp, Glycine max
  Clone ID: PAT_MRT3847_77553C.1
gccgcccttttttttttttttggtttttttttttttggttccgactaaaactgatcatgaagttttgggaaagagttaagaaactatctacatttatccacaatgactccaaactcagtataatttgatctgttatgcagcaaagggtcagcaacaaacttgcaatgaatctccacgataacgttattcaggtccaattcatatatccgcgttaaagcatgcaaaagtaatgctgcagcctcagcctcttgaacagatgaaaaaccataattccaccacattttctatttgatataatgaccctcattatttctcgagcaagcaccagaataggtataggactccctgaatatggcagcaccaacattgcatttgataaatccctccattcggtttgtccattgagaatcaggtggggaaaattagctgctggattcaaatgtggttcgcaaactttctgccactgcataatattttcacgagctaaatggatggaaagcaagggaggattttcaacattttccgatgccttctcgtttctcctgtgccataagcaccataaaatagtggaaaattcaacttgctcaggtggtgataatgattgaaggattttgag

SEQ ID NO: 117990 - DNA, 474 bp, Glycine max
  Clone ID: PAT_MRT3847_77554C.1
tgatgagtacgtttttcttcaaatttattttcatcttttgggagcggtttttcttcaagccactcaaaagcctccgaagaagtgttagcaacatcacatatgcaacccatcaattcaaataccagaggtaccactctctacttcatcgtaattcagatctcaatgaccacactctcatctttgacgtagaaggtgcgttgttgaaatcctcttcagtgttcccatttttcatgctcgttgcgtttgaagcatgagggttattaagagctattgttctgcttttagtgtacccttttgtttgtttagttggagatgaaatggggttgaagatgatggttatgatatgcttctttgggatcaaagaagagagtttcagagtgggaagaaccgttttgccgaagtttttgttggaagatgttgggtcaaaaatgtattaagtggttaaaagaagttgccaaaaagtgggggttaacc

SEQ ID NO: 117991 - DNA, 184 bp, Glycine max
  unsure (1)..(184): unsure at all n locations
  Clone ID: PAT_MRT3847_77555C.1
agtaaagtgagttaggggagtgggaagttgggagcacattgtgatcaattaatatactacatattgacagagtagttacaactgtttgttcagttaaagctttggtgtgacataatttgacattggtgtaaaaaaattaatttacattcaggtgggaagtgaaattgtaacttanttgcaggct

SEQ ID NO: 117992 - DNA, 429 bp, Glycine max
  Clone ID: PAT_MRT3847_77556C.1
ctcgagccgattcggctcgagattctgtatctggagggagccatgagtgcacttgcagcatcctgcgctactccttccgccgcccaaaccctctccctcttccgctccctcctccgcgccgcgcgcgagtttcccgattacaacatcagggagtacaccaaactacgcaccgccgatgcgtttcgccacaacgccactctctccgacccaaattcaatttccaccgccttcgcccacggcaagtcacagctcgccgtcgttaaacgacaggccgtcgcgtactctctctacgccccgccgctccgcaacgtcatggaactccaacaaacccccttctaatcacggttctgagtatgactctctgggaagatcagaattgctatttgattcccagtactcattttttaaggacaagtttatgtttttttt

SEQ ID NO: 117993 - DNA, 315 bp, Glycine max
  unsure (1)..(315): unsure at all n locations
  Clone ID: PAT_MRT3847_77557C.1
cgacaaaanaatatattctcaatactcacgtgaatttcttaatcaaacaaatacgttagagtccatatgggggtgggattatggacggggggtggccctaacatttatatcaattccttactactttataaattatggccagccacgatcttctattctactgatcgaacacaggcgctaatataccttcctttggtttgcgaacatggctcgctcaacctggcttagttgctcacgccttggccactgcaataaacgttggatatcgtcatatatatagtgctcatattcatggcattgtaatatatattggtt

SEQ ID NO: 117994 - DNA, 674 bp, Glycine max
  Clone ID: PAT_MRT3847_77558C.1
ggctcgagaaggtactcagaagaagtgaggttagaaagaattctccgatatttgaagaaaagaaatcaaagaaactttaacaaaaccatcaagtacgcatgtcggaaaaccttagctgataggcgagtcagggttaggggaaggtttgcaagaaacaatgagctttgtgaagaagacatggcaaccaaaaagcatgagaatcatcatcaccacaaagaagacttttatggtggcgattcaatccagtttcagttaaagaacgatgaggaggattggcttcaagaggccatggcaagtctagtgtatttatctcattcttcaccggaagatatgtaacacttagcatcatagattatttcacatgggaagctcttgttcaagcagatgtgggtttcaaactagtagtgcaaggtgaataggaggaggacagagactttaccacagttaatttccaaaattgtatgctaatttgtcttctttaaaaaaaaaaaattaagcacgtagctagatgtaaactctaattgcatggcggtgtgaccagcggatgtagattgttgatgttaattttataggcatctttgttaaggaattcgatgggcctggtttgactggatacttgggttgattgaaagatataatattccattgaagggactttatgtttgagtagacac

SEQ ID NO: 117995 - DNA, 1025 bp, Glycine max
  Clone ID: PAT_MRT3847_77559C.1
atagcatgacaaataatctaaaatatatttcttctttcaccatgtttacacaagtgacacactcacatgaaattagtaaggaggcatctggttccagactaattttctttcttatcagtttaacttccaaaacccatacataaaaaaaaaacttccaaaaccagagtttgatctccttgtgtatgctgcaacttattgagcaagagatgaagatttgttcttaagcaatttctttggtgaatcatactcatcaataagcccttaattttagaaacagaacgatgttatgcaatccaagattgaagttctattagcaatggtaatgattctgcgttctgaaaaatgttgcttcactgtttgctgaatagtattatctacctttgacccatactccaattttttccattctcattaaccgcaaaaactcatgatgataactgataagaataccctgtaaatcctggatatgaacctctccagatgacggccacgaataatctggttggttgtcctttactactagaggagcttcacttgagatggaggtatgctgaagtattctttaatcggattaattttgttccccaaattgcaaagacaccacatttaactaaattgtagtccatttagactagattaagcccatctgttatagccaatccaggagcagtaattgaatttggaaaagatataacgacaaccaaatagaaggcaaatgtgatagtgcataaaatatccaatctgaaattcagccattcttgcaattgcactagcactgtaaaatcggggttaggaatatctatctatgttggccttttggctcaactgaagatctgacatatcacgatgctcatcctacttctcacttttggctcaagttctaaatccctcagtgaatctgtgtcctttgtggtgatactcaatgttttaaatgtgggcattctctttgaggacatgactgaagacaaatcttctctatgtgcacctacaagttccataatatcagtgtctgacctgagaatgac

SEQ ID NO: 117996 - DNA, 1103 bp, Glycine max
  Clone ID: PAT_MRT3847_7755C.1
tgagattataaagcataatattttaaattatttcctttccctttaccatttttcttcgtacatgctaattgccaataattggaattacaaacagaataatgaacttttttaaaaagaaaaaagaaaatcaaaatttcatcattgctattctatttacaagttctaacaggtaaaattaaattaagagctccgtaaagtcccctacacttcgaaaatgtggctacccgattcaactgaacaattccacaaccttgcaatttgcattgagcacggaaaatgagactattattcgagaagcgagaaacgaggagcaaagcagatccaaccaaaataaataaataactgagcctcgagaataaagtctataaaccctgaaccatctattaacatgcagggtaaggttggttagtttcagaaactcatgataaatcaaaggatccccggccctcgttgattgcatagagtagcttcttgtacataatttccttggtagagtaaggaggaagtttcaggtaattagcacatgtcatcacactaggcaagtcatcatctgctgattctgaaggtccattcccattagatgaagtattaactgcggttgacgaaagcttcctcacaatcgttagttttggatttagaactgccagccctccaggtggcagcctaggtgcaccagtaacaaattgacagaaggcacgttgctgctctggtgtgaaccctcccataatttcaagtaaattaataatggcagggctctttgcattgtacccatggtcgaattttatatgatcagcaagtgtctcagactcccacaactccctgcagccgcaaagcaaattatctagttcttgaggagtaaaaatttgtaaagacgagatgtcaaaaacctggttaaaccctgctctaaatgcttctatttgccgcatgattccagtcttgacagttgcatctgccaccaaggatatatactcctccaaattgttgatatcaacaatttcatctcctggcttcaaggtgtattcaggataaccagggagtgtaaaatctaagcaaagatcttcgattggcaccccatgaaaatgcaagttaacaattgtatctgt

SEQ ID NO: 117997 - DNA, 397 bp, Glycine max
  Clone ID: PAT_MRT3847_77560C.1
ggttgttggaagcgtggaagctagttcctgatgtttcggatgaagtttctccacctcctaaatcgcaatcttcatccaaaggtaattatttgattttggttgtttagtgtttgatcagagaatttgagatgatgggtgatgttagatttctttacagtaatggaaatactgatcgtgttatctttgatgttgtatctttaaaaataaagcatgattagttaaagtaaggataagggaaaaaaggtgatggtcaatttgccattgatcaattttagatgaattcagaatttttgtatgcctaaattttagtgcgtatttggaaagttgttgagaaataagaaatcacgtctcaaatgtgaaagctattactattagcttctcaaacgtgaaaaatcac

SEQ ID NO: 117998 - DNA, 248 bp, Glycine max
  Clone ID: PAT_MRT3847_77561C.1
ctgttaaaaaaggggggaccggggaaagccacccccaaatggggggggccgggtcctttggcttttttttttctggggggaaaacaaaccaaaagcaaaaaaacaggggaaaaatgcaaaaaccccccccaaaaggcaacttttcccaaccaaaggggaccaaaccttaggggtttgtgctaaaaaaacccaagcttgttatagacaacagatgaggggcaagcagccctcccctcctcgcacaaaat

SEQ ID NO: 117999 - DNA, 412 bp, Glycine max
  Clone ID: PAT_MRT3847_77562C.1
cgacgcgtgcgtacaggcgtccgaacaggtgagtattgacctcttataatgagatacgtactaacgagggtgaatgtgctgtgtcaccagtactacgacattcattatctagaagactcgcatttttgcaagcacattagctataacgtctattgcaacatttatatggattcactcaggttgaacttaattgacgctgcgcagtttcatacgcttctatagttgaaacaactaagttttaccaacaaggtttatccacgtgctgtgcatttcatattggagcattttctttgaacatattgtcttgccaaaccatgtgtgtaaaaccctttaacttattaaggcttgaagctttgtataaattgatttgatattcaaactatgaaactttgaagactttatggattatttg

SEQ ID NO: 118000 - DNA, 336 bp, Glycine max
  Clone ID: PAT_MRT3847_77563C.1
acccactcgtacgcatgacaattattaaccactttcaacccctatatttacggttaataatccagtccttagagaaactacaccatttatgacacttccttccacatctaaactaccaaacgataaccaaaaccctaagaatcatgaatccagcataatacattctgttactagacaacaccttcaagctaatcatcttctacttactcactaacatctaaaaccttcttttcattctgctgaacaactgcttaccactcctgtcaacatacgtactgaccttctcaatgcccaatccagaaacttaggcaaagcttcgaataataaacaattgga

SEQ ID NO: 118001 - DNA, 402 bp, Glycine max
  unsure (1)..(402): unsure at all n locations
  Clone ID: PAT_MRT3847_77564C.1
gattttaaataaatagtcattttcgttcctgaatgtgtagagcactgataaatttgttcctaaatgtgtcacataaactctctcattaacggacaaaagttaacggataaataaatatgttacatttactaaaatttaaattttcgtctttcggaaatgaatttatctgtgctttatacattcagaaacgaaaatgtctatctatcctttttttaatgacttaattatattgggtataaaatgaaatttgttatataaaatantttttcaaaaataacattctttattttgatatcaactttgttaaccattattagagtagtgttggaaattcattccctaaacacacttcttcaggcaaggacaaagccatgatggaataataagggagggggggggggg

SEQ ID NO: 118002 - DNA, 158 bp, Glycine max
  Clone ID: PAT_MRT3847_77565C.1
aaaacccaccaatttttctaattgcttgaaatggtcctaaatctttcactgtatatttttaaaaatttccatgctttacctcataccatcacccgtcccttttttatcccccctccctttaaactaaatccggagaccgacctaatcaacttaagccc

SEQ ID NO: 118003 - DNA, 369 bp, Glycine max
  unsure (1)..(369): unsure at all n locations
  Clone ID: PAT_MRT3847_77566C.1
gggagcaacatggatttgcgaggaacaaaatctggtttattgagaaagatcctccatcgcttgctggagatttcaatggaaaagtttatattgacttgcttctcaaaccatcagaagacgatatgaaaatatggccacatagattcgagtttcgcctaagggtctctttggccgcagatggaaatttgactttgacatctcgcatcaggaatgtcaatggcaagaattttagtttctccattgcatatcatacatatttttccgtctcagatatcagtgaagtgagggtagaagggttggaaactcttgactatcttgacaatctgcaccagaaagaacgtttcacggaacanggagatgctttgacat

SEQ ID NO: 118004 - DNA, 353 bp, Glycine max
  Clone ID: PAT_MRT3847_77567C.1
tttattcctcagccatggtagctatctccacattgtgtgcaaagcttcagtgttaagacttaattcagccatgtgaactcacaatactatggttcttattaatatttgtttatctttgaggcatgcaaatagtccaaaaatgatgctgcattcccattcatttgcttaaatgtctttttacaatgtaggatttgaaagctgaggctgtaggctgaggctgatgctaacgttggagatgttgagcaccaagcaaggaagacttgctgacaaggaggatatagagacacatatcttatctttggtgagtaaaatatatatgttcccctcactaacaaatattttacctacttttt

SEQ ID NO: 118005 - DNA, 409 bp, Glycine max
  Clone ID: PAT_MRT3847_77568C.1
ctaaactcctccaaacagtactatggctctccatctcagacgcaagtgcctcttactcttctggagaattggctttttgatgatggagctgctcagtgccatgaagatctgatgaacatgtccctcgaagaaagtaccgcaggtttgttttagaaaaaattgcatctttaagctaaggtcctttattatgcctttttttatgaaagccctctcttccaagtctattgagctattgcaaattaaatggaaaacttttctagagctgtgtacgtacgagaagggtaattaatagcctctcacatctacaaacaagaattgtacattacaagtacatctgtatcctttgttaatttgctatgtatgtaccgattaataagagttttaatgtgtgtgtgtaaaaaaaaaaaaa

SEQ ID NO: 118006 - DNA, 801 bp, Glycine max
  unsure (1)..(801): unsure at all n locations
  Clone ID: PAT_MRT3847_77569C.1
cttgattatttttaatatttaatcatatcatattaatatataaaaaatagaaagtatgtattgaatggcaagatttgtaaattgctcactctccagttgagaaaaactggagaggatacgtgcactgttgttaatagcagacggccgaaagcccaaaatccaccatatgaagccatggtggaccaatatatatgggtttttctgtgtgtataaacagtagatataaatttaacagcagatatagatactaaaaaacagtagataccaatgacaatggattgcattcctagcaaacattacaaattttatgagttcacaataaccaatgcctaacaaagagtctctaatcctcttcctcaaccccaacataatcctcttcattgttatcatcaagtagtgaagcatatccctctccctcttcctcatcggactcctcaaaattaatcatgacctcttctttggattccacatcctccaaactccacatccttgtcattttcttggactgctacttgcttcttttttgaagatgcacccactgcnctgtgtttttaagatgtttgggcaacaatggagagtaacactaccacttgnntggntcctttcttttctttgntttgcacctaatatatattctaggctctccaactcccgaagcctcatggcgtagntgccccaatttagtgcatcatcatctttcaataccaactcattaccagcaccattantcatgatcatccatctcttccacctaccattcgcacatcaatcacattgagagaaaatgatcaattaatttct

SEQ ID NO: 118007 - DNA, 283 bp, Glycine max
  unsure (1)..(283): unsure at all n locations
  Clone ID: PAT_MRT3847_7756C.1
aacagacccacgccttaactttccttgcccggaagaacgagaacgggggaggggtgaaataaaaaaaccgacacgaccccncccccgaaggaaaaaaaaaaacacaagtccccagccaaaaacgcgaaagaggcaaaccacaggacaagggaaacagcggagacaagcggaccaacgacgaaagggccaacaagaccggcaaaagagaaaaaacggaagacccaaaggggagagaaaacaagacaaggcggacaacaacgccaacgggggaaagcaaaccgga

SEQ ID NO: 118008 - DNA, 548 bp, Glycine max
  Clone ID: PAT_MRT3847_77570C.1
tcgccctcgcgtccgactcaatatagtgcaacctttgctgtggtagtggaagcacacaaagagcacaacgttacatatagtaactatggcgagagtgggtagaatgaaacttggttcagaagggtttgaagtgtctatgcagggacttgggtgcatgggcatgtctgcattctatggtcctcctaagccagagcccgatatgattgcactcatccaccacgccgtccaaagcggtgtcacttttcttgacacttctgatgtctatggccctcacaccaatgaactccttctgggaaaggctttgaagggaggggttagaaagaaggttgaattggctaccaagtttggaatcagctatcctgaagggaaatgggagatccgtggtgatccagcatacgtgagggatgcttgtgagggcagcttaaagaggcttggtatcgattgcatcgatctctattaccaacatcgtattgatactcgtgtgcctattgaagtcacgattggggagcttaaaaaacttgtcgaggaaggcaaaataaaatacattg

SEQ ID NO: 118009 - DNA, 488 bp, Glycine max
  Clone ID: PAT_MRT3847_77571C.1
cggccgctcgaggcggcaggccggggttgtacgaaagaaaggacgaaattgagtttaagatctgattgggcggcgacgatggagaacaacgacagtatcatatcgcgggagaagatcgaccaggcggccgtgtggctcggctccgccgtctcttccgctttcttttcctctttggaacgcttttcctgcgtcaacgtcgccacctctgaccccgacaacgacgaagacgacgacgattattactccaccaccaccgccactcccaccgccgcatccaccaccaccactagccctccctccattcagatcgacgggaaaaaaacaaacgacgtctccaacctccccgtttgagacaatataacgacgacgtcgttgctgcgctgtgtatagacctttttccttttccttctttcgtgtgtgttatgtaaggaatcccgattttcatttcttcatactttcgacgtcgtgaaaaagaaaagatgtgatgc

SEQ ID NO: 118010 - DNA, 395 bp, Glycine max
  Clone ID: PAT_MRT3847_77572C.1
aaaaaaataaatcctttttgggttacccaaaaataggtaattatcacttaattaaaaggggaacatggccactaggaaacacccaaggcaaaagggggggggaaaaatttttttttttaacggaaacaattatgggcaaacaaaaaggttcttcatccccccccttatgggagggggtctcacaaagcccccaaggggggtaagggccaatttcaaatcccccaaggggtggccaggcaccaccggttgggacaaaaagctataaaagggaatttttggcacaaactcataagaacacatttccacaaacgcttcccttggagggggggacctaaaaaacaccttttgaagaaaatccaagaccttggaagggggccaaaaaggtttggcccact

SEQ ID NO: 118011 - DNA, 229 bp, Glycine max
  Clone ID: PAT_MRT3847_77573C.1
tattcaatttgaaacttgaactaccatgttatagatttcaccttcattgatttgtgtcttggcataatcgccttatgcatgttgctttaaaggcgttccgacaaaataggtagctattattgcgtcaaaggagggggatgctcggtgtctttagcattaaaacccttgattgaaaagacttttatctgcttttcttttatcttaccatataatgaacgcagctgcgtag

SEQ ID NO: 118012 - DNA, 784 bp, Glycine max
  Clone ID: PAT_MRT3847_77574C.1
agggtactgtggaaatcttgtgtttacatcatcacagttggaatgctggttgctttacttctaggtttaaatatgtcatggactgcaattactgctgcacttgctctcatagttcttgatttcaaagatgctacaccatgtttagagaaggtttcgtattcacttttgatattcttttgtggaatgtttattacagtggatggcctcaataaaactggaattccaagtgctctgtgggacataatggagccctattctcatgttgatcgtgctagtggaattgcaatacttgcaattgtcatacttgtcctatcaaatttggcttcaaatgtaccaacagttctcttgcttggaggaagggtagcagcctcagctgctgcaatttccaaagcagatgagaagaaggcatggctgatattggcttgggccagcaccatatcagggaatctctcattgttgggatcagctgctaacttgatagtgtgtgaacaggcgatccgtgcgccaaacctaccatacacattaaccttctggagtcacctgaaatttggccttccttccacaatcatagtcactgctattggtttgacattcataagatgatatggcatttggctgaaaaggggtcttgttgaagatatttgaacaacatgaaagaatgaaaaaccagtgttcatgtcaatatgtttcaacttatggatacactattaagaaaatgaatgttgatgttctttgttattgatagtttgtgtaaaataaaatatctgcagctagttgccaagtg

SEQ ID NO: 118013 - DNA, 248 bp, Glycine max
  Clone ID: PAT_MRT3847_77575C.1
ccattccggaatatcaagttataaaccacgatttacaaacttatgttaaaattaacggtaacgacgagatctattatcaggtttcgcatgtccaccgaaattcatagtacgcgaaaaggtctcctaatttatggcctaccatacgatctggcatataactaggtcagtgctcttttccagtggggagcagcaacggtatggccaatcattgttggtataacggcaggggctatggaccaagctattat

SEQ ID NO: 118014 - DNA, 962 bp, Glycine max
  unsure (1)..(962): unsure at all n locations
  Clone ID: PAT_MRT3847_77576C.1
gacatgatcatcgtcgggtgtgagaacgctggtgtccttgtcggcatagatcctgtacgcgagcacgtaagcattccactgctcgaggtcgaactgcgcgctctggctcggcgacatgggtagcatgtagtggaaaagaggccacaggtaatgcttgcaaaaaccatggtagaatttgctgtgaacttctgaaggaataaacgttgggacgcagcggaacttatcgaggagtaactgagcgacttcttcttgtttgcagggttcgatctctgctttaagcgaaccgacgtacaacacttccacgtcggaaggaaatccgtctttgagctaattcggctcgagtacggctgcgagaagacgacagaagggcttcccctcgcgaaacgcgcgtatcggtaactgattcgcgaccacgatcctccgctcgagcggcgccggcgcaacggcgtcgtcggatcccgaattctccatgccgtcgatgtctaactccggcaagtctccggccgccgtattcaccagccgcggagcgcgactagccagcgcgtggtaatcatccactgataccaaattcaatagccccaagcaagatcttgatagcattgtccagaaacaagaaaagaataaaaaaaagaaaaaaaaaagaggttttctcgttttttgttttattttatggaggatggagtgcttttctgttttttgtgatggtggttttagaggaagataaatctattagtgatgaaaatcttaggtactgatgcaccttccataatggaagagcgtggggtggcgtttttgtctgcgagaaaactaaactatgacactggcgtggataagaacccaacccaaccggtttttttatgttgtgaatgctttcatccgacggttcacgtttcttgttctcacatcagtattctacttctctcttctcgctgctaactgtagccgnctagcccacgctaccg

SEQ ID NO: 118015 - DNA, 2755 bp, Glycine max
  Clone ID: PAT_MRT3847_77577C.1
cggacgcgtgggcggacgcgtgggcgctcgcgcaaggcacggtcacgaaatcacactttggccaattcgatgccggccgttcacattcgaacccacgacatgctgaacccgttggagcgtcaattcctcgatgcagccgaaaaaggcaatcggccggtgctggaagcgtgtttggccaagcaattgagaaaagcgccgctgaatatcaatgcggtggacacaatgggacggacggcgatcgaaatagcggtggacaacgaaaatttggaaattgtgcaacttttgctgcgacagcccgacgttcgcatcggaaacgcccttttgtgtgccattcgcgagggtgtctatgaattggtcgaagtactcgtcaaccacccgtccatcacaagggatatgctcggcgaagggtgggccaaatatttggatccgacggagacggccacttcggagtactcgagtgacatttcgcccgttattatggctgcccatttgaaccaattcgaaattctgcaaatgcttctccgaaaggatgccaacattgagaagccgcacaagcattactgcgcttgtgaaatgtgcgactctgaacggatcaacgacggactgcaccggtcgttgaagcgaatcaacaagtacagggctttggcgagtccggcatggatttcgctgacgagttcggacccaattctgtccgcatttaagctgagcagagagctgcaaaagcgagcgaaagtggaggacgagttcaaggaccaatacttgcagttggccgagcaatgcaagcagtacgcgtgcgatttgctcagtcagtgccgaagcaccgaagaagtgatggcggtgctgaacaaagaggacaacttctgcaacgaggaggtcgacctgaacgcggcaaagtgttcattggcacgactgaaattggccatcaaatacgaacagaaaacgttcgttgctcacccccattgccaacaactgctcacttccatttggtacgaaggctttcccctgaagcgtcaccgttcctcctcccttcgcactttgctcatcgctcttttgctggtgctcgggtggcctttgatggccatttgttacattgcctttcccaaaagtcgcgtgggcgaaatcgtccggtcgcccttcatgaaattcctttactacagcacttcctttggctgttttcttgctcttcttacgatggtcacttttgaggtgcaccgtgaacaaaccggcgaagtgaaaggcggcacggcgacgcgtgccgctgaccgtggcccaacgcccacactgatcgaatggttggtgttcatttgggtaattgggatgttgtggtccgaaatcaaacaaatgtggttggagggcttcaccaaatacatccaccagtggtggaattggctcgacttcgtcatggtctgtctgtacttgtgcaccatttccattcgattttctgcctattcgatttacgtgatgcacaacgttggcgagcagttcacaccccgccacgtcatccgcacgcattggaatgcgtttgagcccgtgttggtcagtgaggcgctgttcgctgtcggcaacgtgttcagaccaatccctacttgggacccttgcagatctccttgggctgcatgctggtcgatgtggccaagttctgcttcattttcgtgctgatcatctccagcttctcgatcggattggctcagctttattggtattacgactcgcagacgccggtctgtttgagttccgatcggtgtaaaatcgtgccgaatgccttttcgtccattgcctcctcctacatgacccttctgtggtctttgttttccatcacaaaagtggaggacaccgaggtggtcgaagcgcatcacttcaccgtttgggtgggcagaggtctgttcatcctttatcacatgacgtcaatcattgttctgctcaacatgttaatcgcaatgatgtcgcactccttcgaaaggatcaatgaccatgccgacttggaatggaagttccaccggtccaaactgtggatggcacattttgacgagggctccactctgccgcctccgttcaacatcttcccaactccgaaggcatttatccacacgtgccgtgccatcattaacgttgtcaattggtgtttcggacggtataattatatggcggcaaaggaaggcacgcgggcgaccattcggaggcccggctacagcaaaagatggcacgacatggagggcggcttaagcggtgccccaaacggcgccggagggacagagccacggaagccaatcacttacacggagatcatccaacgccttgtgtcccgcttcatccacgaacagaaaaagtcgatgaaaatggacggcgtcaacgaggacgacctgctggagatcaagcaggacatcagcagtcttcgctatgagttgcgggacgaccgccgcaaggaaattgtgcgttcgttgtctcatattgacgcggtcaaacgggagattatgcgaagtatgagcacaacgacacgaatcttcgggaacacaccgcgacggcaactgtccgtaaaagagcgaagcgtcgcggaagaggccgactcggagttgggcgactcgtccgcaacggaggaaggcggcaccgagtcgatcaggagttcgttgccgttcttcgattcgcttcgctccgccactctctcgccccatccgtttataacaatcgcagcgagcggagacaaacagttccaatacgcggaacgagacgcagtcgcggaacccttgcgctaccgcac

SEQ ID NO: 118016 - DNA, 408 bp, Glycine max
  unsure (1)..(408): unsure at all n locations
  Clone ID: PAT_MRT3847_77578C.1
aaaaaaaacccacgcggccgcgaccccnccgncacccccttccttcaagatctcctttccaagatcctacgccaccaccacctgcctgcttttctataccaaccccaacccccaccacaccatcaaaattctccccttcaagttcttaacccttgangcctttctgtaatccccttttatcttcttgtaaaactatgctaaaactttttatcaggaagctcatcctcccttttacaaactcaccttcaaatcaatactctcaatttttaactctttcttcaaattaataacccattagtctccatcactttcccttttcataaattcatggactaattttaacaccttctctactaccacgatgattttgcttaaatttatctctcttaaaaactaccctaacaaaat

SEQ ID NO: 118017 - DNA, 1212 bp, Glycine max
  unsure (1)..(1212): unsure at all n locations
  Clone ID: PAT_MRT3847_77579C.1
cagccttattcttgcttctctagaaacttatggaaaaggtttagctggtttttcccgatactcgatacatgcagttaggaatattcatctccttcaaaacaatgatagacatattgggaaggaagtctcaactactactactacaaaggaaggaactcaaacaaggcaccaagtcttgtttctatttgagtagcttccaagagttattccttcccttttctctcttctctggtgtcttcacagaaacaaccaccccatcatgatggaaagtcctcctaaatgcaaactcacattcacattaatcttcttcatcgttgtctcccactctcttggcttagtttccttcaccttgtgcatagcctccgagactaagaggaacaagaagggggatctcagatggaatgggaaactatgtcatttaccatcaagtcctgcatttggattgggtattgcatctttggtttgtttggttttaacccaaatcgttggggaattctatattattcaagacttattgttcaggaggaaaaagaaaccctaaagtttgagatttcggctgtagccaggattctgcttttgatctcttggctaagctttggaattgcagttattttattaatcgttgccacaagcatgagcagaaggcaggcctatggggaagggtggttgaatggtgagtgctaccttgtcaaaggagggatttacgttggttcagccatattgatcctagtttcagtagaatcgttaatgggttcagctttgttaacaatgaagaccaatgaagaagcagagtcagggtaacaaaatacacgcacaaacggaacggggtgacacttgagattaaagaataattttatacattgaaatcataaagtagaatgcagagtgggagttttgatgcaaatcaagaaagctataacatcaactactcctaaaagaggcctcacaagttggcatagggaaagactcaagcctacaatacaatctgttttgtcataatgtgctgaggaataactatttttttctacttacattatacgtaagagacattttcttttgtacacattctctccgaggtagtaactgcctcatataggaactcattttggatccacccgcataatcaataattgttttgtattttattttgntctgataggtctgaactgctctgttgcagaaatagtggtgtttaatttttaaggggggggg

SEQ ID NO: 118018 - DNA, 260 bp, Glycine max
  Clone ID: PAT_MRT3847_7757C.1
ataatcttccccttctctctcctctccccatctccctgatcgggttctcatggattcaagtactgacatcaagctatgatcaagccttatggggctccgctttaccatctatgtgtgctacttcagcacttgagaattaccaccatgtcgaccatgagtaacaatttcatagaccgcgaccatctctactcctcatggagcttctcaaagctcatggctatcttcttactcgtaatctccatctcctacctcatctactc

SEQ ID NO: 118019 - DNA, 251 bp, Glycine max
  Clone ID: PAT_MRT3847_77580C.1
attgagaatgaaaattttcattttgtttctattatcagaagaaaaaacttttcatgtttttttgcagcgcaaggccggaaatgcacactataacggtgtacttacccgattgattagcacgcgacccaaaaggctatattgatttgttctccaatgtgctgcctctaggcgcgagcatcgagcccaaactatcaggcaatatgggctcttgaatagcctaatatcatagaaaacgcttaggtttggatgcc

SEQ ID NO: 118020 - DNA, 196 bp, Glycine max
  Clone ID: PAT_MRT3847_77581C.1
gtggtttcagtgagtgatcggtgttcacttgatccttcataagtcatcatcatcatcatcaccgttgattgaagaagatgccgatcagaaacatccccatcgtaaggcctgaagaggctactgaccccgacacgtctaatgcggggttggctgcgttcatgtccgccttgatcttcaacttcgccggttcaggttc

SEQ ID NO: 118021 - DNA, 777 bp, Glycine max
  unsure (1)..(777): unsure at all n locations
  Clone ID: PAT_MRT3847_77582C.1
ttcccttattctctcttctctagtgttttcacagaaacaaccaccccaccatggtggaaactcctcctaaatgcaaactcacattcacattaatcttctgcatcgttatctcccactctcttggcttagtttccttcaccttgtgcatagcctccgagactaagaggaacaaggtgcatgatgtctacactactttaatttattaagactctgcagttaggattttctgaattatgatgctttaatttgtttgttttgtagaagggggatctcagatggaatgggaaactatgtcatttaccatcaagtcctgcatttggattgggtgttgcatctttggtttgtttggttttgtcccaaatcgttgggaattctatattattcaggacttattgttcaggagggaaaagaaacgcaaagtttgagatacctttcgttgcaaggattctgcttttgatatcttggtgagttaacaatcttttgcatatctgttgttagttgttagcacatcacattcaacaatcacactttgcttgcttaattattggcttctacattgtcgtcatcatttttcctgttggttggaattgacatattttgctctaaaaacaagtttgatttttgtaaccacatcatagaaagtggatacaccaccatccaatcttgttatcaaacccgaattttctttcttcangttgtgttgattttggcgattaaataaagtctatatcattttcagaaactgtgtgccattattggccaaggttggcaagcttg

SEQ ID NO: 118022 - DNA, 216 bp, Glycine max
  Clone ID: PAT_MRT3847_77583C.1
ggccgcacacactaaatagttaatttggaataaaacacgtgttttgtacataataaactggaacctgatttggggactcacgacaacgattaatgttctcacacttgttacaataacaattaaatttctcaagataaactttaaattggataattaataatttattaactaatttctccgatgaagcctcaccccaggaataatcaccagcaaaag

SEQ ID NO: 118023 - DNA, 192 bp, Glycine max
  Clone ID: PAT_MRT3847_77584C.1
ctctctgctctcattactctttttctgtgctctgtctctttctctggacaaggagtcaattaccctgttcacgtttgtgttctcactaccacaaacacaaagcctacaaaccgagcgaatcatccccttcttcttcgatcatgcccgcgtcataacacatcgacatactagacaacctagcttccatggcag

SEQ ID NO: 118024 - DNA, 288 bp, Glycine max
  Clone ID: PAT_MRT3847_77585C.1
aaaaataaaattcataattttttttaaatcatttctccttttatttccacaaaataaatatactctactggtgcaatttttccccacctttggggttcaactttttaaccaataactattaaaactcatttctaaggcaactataaaaatcgatttacattacattcttcactcactccatttcctttaaagcttttatacaacttcttatatcatacatactatacccatattctaaaccactatcctcttctcaaatttctcataacatataaatactcacccttc

SEQ ID NO: 118025 - DNA, 221 bp, Glycine max
  Clone ID: PAT_MRT3847_77586C.1
ctgccttattactctgattggagccttcaaggccacgctgccatgtctgatatattcctgcgaggcggaatgctatgcctccattacattcgtacaatccataggagtctgctatcgagagattgctgataatgtaccatcaaagccagacgttgcggacttatataaaacaaatggccccgtcaaaatgcgtatatcctacccagatgaacaggcactcc

SEQ ID NO: 118026 - DNA, 275 bp, Glycine max
  Clone ID: PAT_MRT3847_77587C.1
agggcacaaaatagttctttcatccttataattaagctgttttcatcttcatcaaagcattaaaaaaccacatggcctactcgacgacatgttattttattatgatctgcggagcagaacacacacggcccaaaatcgtgccaataatgtttgaggaaaaaaaatattaacctaggccggaggaagaacatccatcacctgttaccttgacattattgtaaaaaatcttggaaataagacatatgcttcataacaatgggctgtgtctgggccat

SEQ ID NO: 118027 - DNA, 245 bp, Glycine max
  Clone ID: PAT_MRT3847_77588C.1
ggcttcttcaagcattcttagaacgcggttcaaacacaatagcaagtgctgcagctgacaaaattcctgggttactaggtgtctttcagaagctgattgcatccaaagcaaatgaccaacaaggttttaatcttctaaacagtataatagagcacatgcctcctgaatcagttgaccaatataggaaacaaatcttcattctgctattccagagacttcagaattccaaaacaaccaagtttatc

SEQ ID NO: 118028 - DNA, 379 bp, Glycine max
  Clone ID: PAT_MRT3847_77589C.1
tcttattttggcaccatgtcgattatggattataaaggtgggactgtcctagccatggctgggaagaattgtgttgtcggtggatctgataaacgcctaggagtgcaaaatcttacattatcgactgaattccaaaaagtatttccggttacagaaaaatgttatattgcactttctggtttagcttctgatgttcaaactttatcggaattattctcgttaaaatgtaacatgtataaattacgtgaaggaacggaaatcgaaccactttcattgggaaatatgatatccttaacattgtacggaagaaggtttggcccgtatttttgggaaccaataattgcccggtcttgtcaatattattataccacatttctat

SEQ ID NO: 118029 - DNA, 1256 bp, Glycine max
  Clone ID: PAT_MRT3847_7758C.1
gttaggttgagccacttgtgagtagaagcaagggtgagaggaagactcactatggtaagggtggaagtgatgggttgaagaagagattttcgttgagactgcggccaaggttacggttattggctatgagaatgaaaagggcttccattaggtccattttgaatgaggtggggatctttattcgtaagaacattagagcagtgacattttctgcttcaatttctaccgtgttctgcctttgtttcttgtttctgaaattgactgcactcccccctcctaaaagtgttccgtattctgacttgatcatcagccttcagaatggacatgttgaaaaggttttagttgaagaggggtcgcgacgcatatattacaatatgaagtcccagcatattgaaaatgatggggtttctggggaagaatctgaagtggcagatgtttcaattgataaggatgttgataagattgggagtgagggtacttctggagctggccaaactccagtggggaatgtactaaagaaattctccaagactcgagcttcaatccctgagtggcagtattccacaagaaaaatagatcatgatgaaaagttccttgttagtttgatgagagaaaaaggggttacatatagctctgcccctcaatctgtactaaggtcaatgaggagtactttgatcactgtgataacactgtggatacctttaattccattgatgtggcttctagtatcgccaacttttggctgctaatagtcccgcaaggaagcagagaccaaatggtcagacagttggatttgatgatgtggaaggtgttgattctgcaaaagtagagctcgtggagatagtttcatgtctgcaaggggatataaattaccgaaagctaggggcaaagttacctaaaggtgtgttgctggtgggtcctcctggaactgggaagacactacttgcgcgtgcagtggcaggggaagcaggtgtaccctttttcactgtatctgccagtgagtttgtggagttgtttgttggaagaagggcagctagaatcagagaccttttcaatgcagcaagaaaatttgcaccatcaatcatattcattgatgaacttgatgcagttggaggcaagcgtggaagaagtttcaatgatgaacgtgaccagacgttaaatcagttgctgacagaaatggatggatttgaatccgagatgagagtggttgtcattgcagcaactaatcggcccgaaaccttggatccagccctatg

SEQ ID NO: 118030 - DNA, 502 bp, Glycine max
  Clone ID: PAT_MRT3847_77590C.1
catattgggaggtgaagatggagaaaattctcgtatgcaggagcaagaagcccctgaagtgtggcaagaggatggtggctttcaagaagctgtggaaatttggttaggaggaccatctgataatgaagtagctccagttggtagaattcatggattttattttcctgaagatgacaatgtatacagtgttgagctcagggaattgctaagtaggagaagtgtctcaaacctccttggcagcagttttcgtgaaagtcttgaccagttaatacaatcatatgttgaaaggcaaggtcatgctcacgttgaatgggagctgcaagagacaaccccttcccccttggcagaacaagtctcacggcaacacagtagggatccaatagttagtcctcaggctactgttaatagctcacttgaccgacccttgccaccaacacctccgcctcagcctttatgggatcggcactcacgtcatgacaattggtcacagagtgccttaaat

SEQ ID NO: 118031 - DNA, 302 bp, Glycine max
  Clone ID: PAT_MRT3847_77591C.1
aagctactaatcggaggacgacctttttttttttttttaatgtataaaaatgttcatgtagcgttgctcagaaattaaattattcgcactggaaggaatgagctatctctggatacatagggtggaaaaggaaagcatcatacaggggagaaaacaaacagaacagaggaagaaaaagaagctgggaactgtgtgcgagaaatgcaaccaatacataataatggagtaaaaaggaataaggcccgcccgccctatccactctggcactgaaaagtgggtgggtggcggccgagccgtgggtg

SEQ ID NO: 118032 - DNA, 747 bp, Glycine max
  Clone ID: PAT_MRT3847_77592C.1
ctgcgcgttgaatgtgaagctgttgatccagttgatgtggaaaagttagcaactactgtaaagagagcccttggaacctatggtaccccagccatgacacagatgatccagaactgcatgtcccaagacttttcatggaagggaccagccaaacattgggaaaaggtgctgttgagcctagaggttgctggcagtgaacctggaattgatggtgatgagattgctcctcttgcaaaggaaaacgttgccactccttgagcatcatcattgataacctggttttgaatatggtcaattggtcatcgtggtcaagaacacttgccagcatctgattgtagacacctacgcataattggattaataagttctaacgagggaatggaacttcaatttcaagcaaagtataaagctaattttcataagcaaggtcttgcaatcagtgaaatttgaagcatcttagttgcaaaatacatcataaatgaataaatgtcaatctaaatgtatgcttccaaatcataaggggcatggcatattttttattttcttatgttattggcattagggctcgctctttatgtactctggaaaaagttttaaagatgtacaccatttcgtgagttcagcctagtgcaaatcaaataagttgtatgcaagcatcgagatttaacatatttatatggatgctgatttccttgcagtttattttaggatgccccctaaagaatttgaccataaattttaaccggt

SEQ ID NO: 118033 - DNA, 367 bp, Glycine max
  unsure (1)..(367): unsure at all n locations
  Clone ID: PAT_MRT3847_77593C.1
ccaaattatcccaactcaacctccctcctaaaaacccaatctcttcactatcntaatgattgataaacaccaatatattattcacccaaaacaacatcttactgttcagatgttaaaaagtactaatgttaataataagattaccttacacaaagttttactaattaacactaatacatcttactacattaaaaaaccaattataacaaatactttactatatacaacagtacaagaacaaagtctagaccgcagantaatgttcttcaaatatgaaaataaaanacactatcgcaaaaacatatgacacagacgaccaaatacacatatacgaataaatagcattataagctatgataactaccca

SEQ ID NO: 118034 - DNA, 780 bp, Glycine max
  Clone ID: PAT_MRT3847_77594C.1
atgaccaattcttttgaatccaaactgagaccaggaggctatggtcaagtatataaaggaaatctaagcaacaactctcctgtggccgtggcagtgaaggtactgaatgcttccaaagggaacggggaagaatttatcaacgaggttataagcatcagtagaaagtcccatgtaaatattgttaatctccttggtttttgtcttgaaggccagaagaaagcacttgtctacgattacatgcccaatggatcccttgaaaagtttatacacaacaggaatttggaaaccaatccacctttgagttgggaaagattacaccgcattgctgaagggatagctaaaggactggagtacttgcatagagggtgcaacactcggatattacattttgacataaaaccaagcaacatccttttggacaaaaatttctgtcccaaaaccgaagtgaatatttgcaccactacgaacacacttcccattccggttttacaaggcgtttccattagtgagccgattgatgagctggggaaagttctgaattgtgaaaatgaagcagagtgttcattcagtacaaaacatgcagagcatagggagtatttgggactcggattgatgatacctcttcatttagccttacataaaaaacttgcaaaaggaaagaggaaggatcaaggagagatgacggttgacatcccaactatgttggtacctcaacccctaacctctcaaaaaatcctcctccaaatatattcattagaagcgaaattgcaaaacacttga

SEQ ID NO: 118035 - DNA, 122 bp, Glycine max
  Clone ID: PAT_MRT3847_77595C.1
ggaaaccttaagtaaccagtggctaaacagaaaagccggttgcccaactgcattaatgaactctaattcgggagtctgttcccttttagtgccacgcgttgaatagttccacatactttcag

SEQ ID NO: 118036 - DNA, 1420 bp, Glycine max
  Clone ID: PAT_MRT3847_77596C.1
cacgcgtccgcccaaaaccaagcaagaacaattttcattcattcgattcccaataataatgtctcagaccccaccccaaaccctcgattccgatgaggcgccgcaaaccacccacgccacccaaaccccttccctcctccacctctccttcaatcaggactccgggtgcttcgccgccgccaccgaccgcggcttccgcatctacaactgcgaccccttccgcgagatcttccgccgcgacttcggccccggcggcggcgtcggcctcgtccacatgctcttccgctgcaacatcctcgccttcgtcggcggcggctcctcccccgcctgacccccgctaccctcccaacaaggtcatgatctgggacgaccaccagtcccgctgcatcggcgagctctccttccgctccgaggtcaagggcgtccgcctccgccgcgaccgaatcgtcgtcgtcctcgcccacaagatcttcgtctacaacttcgccgatctcaaggtgctgcaccaaattgagaccattgcaaaccctaagggcctatgcgacctttcacatgtttccgccaccatggtgttggtgtgccccgggttgcaaaaggggcaggttagggttgagcactacgcctctaaaagaaccaagttcatcatggctcatgattcccgaatcgcgtgttttgcactcacgcacgatggcaggttgcttgcaaccgccagctccaagggcacacttcatgtcttcaacctcaaggttgattccggactgttggggcatgatagatcgcacagtacttctgaggcaaatcttgctagccccaccgcgatgtcatctctttccttttttaaaggtgtgctacccaagtattttagctcagagtggtctgtggctcaatttcgcttgcaagaaggtttgcaatatgttgttgcatttggccatcaaaagaatacagttgtaatactaggcatggatggcagcttctatcgatgtcagtttgattctgcagccggtggagagatgacccaacttgaatattacaatttcctaaaggcagaggagacattctagtctagtatggatgcatcatgtatagatcttcagtggcagttgctgtgaatactatttgaattttctgtttacctcgtatttataacgtgtaaactgtaaatatgagtattgctaaatccaccaatattatcctgttcactctgttggcttgtatagattaacaccttattataaattagaatgaattgtcagcagcattcgctccaaattcatcacttagttaggcttatgtaaatatgcatactgaagtaacactgaccccattattagtaactcagggtcgacctcgttgcttccattgtaatatttgtgattatatagttttctattttttaataataaatattgagagctatggt

SEQ ID NO: 118037 - DNA, 412 bp, Glycine max
  Clone ID: PAT_MRT3847_77597C.1
agacggagcggcgtggacgcttaggcttaaggaagagttctaggctctgctagcgtacacgcagatgacctagtccaacgacaacgattgggtccgtctctccgccgcccctccggaaggcgctctctggaccggtcactgctggtacgttcgcatcctcctcaagtgccaattccacctccacttcgatgtccccgtcacttccctctttcccgcccccgagctcgcactccctcgattggatggcacaacccgcgagatgtataggggtggtgcgatctgtttgactgtgcacttcttgcctctctgggcctaaaattgccccagatctggtcttgcacatgcgctctgcttacgtcttgctccttggcttgcggcagaggttcccatcctcgttgtttctggtgtgatc

SEQ ID NO: 118038 - DNA, 1347 bp, Glycine max
  Clone ID: PAT_MRT3847_77598C.1
gggtcgaccccgcgtccggttgttcacttaactgacgaccgtgattctgggcggaaaacaaataattcagttgcattcatccttgtatataacacatcccttgcaaagcacgaagccaaagccaatccaacccaactcaacctccaaacacaaaaaccttccttcaaaaccaagcaattcattcccaataataatgtctcaaaccctcggttccgatgagccaccccaaaccaccgattcccacaccccctccctcctccacctctccttcaaccaggactccggttgcttcgccgccgccaccgaccgcggcttccgcatctataactgcgaccccttccgcgagatcttccgccacgacttcggctccggcggcggtggcgtcgccctcgtccacatgctcttccgctgcaacatcctcgccttcgtcggcgcctcctcctcctcctcctcctccgaaccccgctatcctcccaacaaggtcatgatctgggacgaccaccagtcccgctgcatcggcgagctctccttccgctccgaagttaaaggcgtccgtctccgccgcgaccgaatcgtcgtcgtcctcgcccacaagatcttcgtctacaacttctccgatctcaaggtgctgcaccaaattgagacgattgtaaaccctaagggcctttgcgacctttcacatgtttccgccacgatggtgttggtctgccccgggttgcaaaaggggcaggttagggttgagcactacgcctctaaaagaaccaagttcatcatggctcatgattcccgaatcgcgtgttttgcactcacgcacgatggcaggttgcttgcaaccgccagctccaagggcacactcattaggctcttcaataccctcgacggttcactgctccaagaggtacggaggggtgcagacagagcagagatatacagccttgctttttctcctactgcacagtggctggctgtctcaagtgacaaggggaccgttcatgtcttcaacctcaaggttgattccggactgttggggcatgatagatcgcacagtacttctgaggcaaatcttgctagccccaccgcgatgtcgtctctttccttttttaaaggtgtgctacccaagtattttagctcagagtggtctgtggctcaatttcgcttgcaagaaggtttgcaatatgttgttgcatttggccatcaaaagaatacagttgtaatactaggcatggatggcagcttctatcgatgtcagtttgattctgcagctggtggagagatgacccaacttgaatattacaatttcctaaaggcagaggagacattctagtctagtatgggtgcatcatgtat

SEQ ID NO: 118039 - DNA, 376 bp, Glycine max
  Clone ID: PAT_MRT3847_77599C.1
aggcgtgcgaagaggtgagaggggacgaccgttggggggcgtggtatgaccgcatctgactcgttcgctgaccggcgggtgctttcacacactatgttcaggaaacaccaaaacattctaactgcttacgctagtgattatctagccattcactaattcacgtccctaaagacgcaatattcattctgagatcgacactgtataatgccggtcccatgtgccaaattgcatagatgcagccagccgcacaattagatgttttatacacgctcctgtgtatttaaattatgaaactcttggttatgtcctcttctctactcctgtacagacgctgacgcacaaatctttacaaccttggatgatgtgactgaccaat

SEQ ID NO: 118040 - DNA, 384 bp, Glycine max
  Clone ID: PAT_MRT3847_7759C.1
gtgggcgtccttttttttttttttttaagaataaattcatttttttgttaaatggggggggattaaaaatcccaaaattcgaaccttaaaattttgacaacaatgctcggggaggtatttaacggtttctctggttcttaaaaggaaccttaaaagagtttttagaattaaatctttcttcaaggggccccgtcaaaaagatctttattttgttgagaaattttatttgaacagaagagcttgttttttcctttgcgtgagagacacgactgtggctgctatctgctttgatgaaagccctggtgattctatctgaacttggggtgagccatgctcaacgctcctatcaagaagcatcattgttctttactttagagggccccc

SEQ ID NO: 118041 - DNA, 802 bp, Glycine max
  Clone ID: PAT_MRT3847_775C.1
aagtcgacttgatatattgaaactttaaaaaatgatctgattacaatgtccctaattctttagtagctacataaatcatacgtttacttggcttaaatagattcctacaatagaaggttgagtagatgatatctgaccataatgaaaattgcaaacctatatatagaagcaatggtagacatgcaagtactgcaattatatcaggaaccgccttcaaaccatagtagtacgttatgaagaaggcactgccaaatgctaccatcatgcatgctatggagatgaatagagttaccagtccacatattaacttcaagggcagtgacttgtaaaagtcatactccgcataacgtgagatgagaatagacaagaatatcaatattgcagttgcagatgagacaaatgcagctgcatctgatattgcaaatacttggaatgatgttttgtccaagtaatttggtttctttgttccatcatcgataccgcctggtatgttaactgcagcagcgaacactgctgtggcaataacagttgaaataagcatacaaaactcagcagtgcgtttcatccattcctctccttttcgcaatccctcatgctcctttgtaaataattcttgagcagttaggccatcagaatttttaaacattataaaggatggtggcattatcttcctcacctcctgtgctcatattaactcgaggcacatttggactggtgctccagaaactaatccaagtcgacctggtggggctaattttgctgccaaatgcaatatagtgttggttttcttgcacaatatatg

SEQ ID NO: 118042 - DNA, 193 bp, Glycine max
  Clone ID: PAT_MRT3847_77600C.1
cgactagacgacagacgggatcagcggtgcccgccagtataacaacatattgctgaggaaatgctgtcatatttggttctgatgatactccatgggatggaggcacgttcatattgactctctagctcactgaggattatccaaataaaccaccaattgtgcgattcgtatctcgcatgtatcatccaaatat

SEQ ID NO: 118043 - DNA, 342 bp, Glycine max
  Clone ID: PAT_MRT3847_77601C.1
cccacgcgtccgttgcgagacgacagaagggaagaacggcgtgcagagaagctgaaaatgaagagtaaaacagacgatatttcagatgatgaggaagctaaacaaatgggttatcatcaaagtgatagtgaagattagcaaaagaagcttgagattgaattgcggaacaaggctcttgaatccctcaaagcaaagaggggcgtgaataactaaatgcatcaaatccaagttttaagttgttttatgctttaaaaacttattgagaaatatcttagcttgttaaggaacttggctttacaaatgttatgtttttttattcattggtaagtgtttgatgccgaa

SEQ ID NO: 118044 - DNA, 360 bp, Glycine max
  Clone ID: PAT_MRT3847_77602C.1
gacataaacaatgaaagtcatattgaattaacaatactaaaatgaacataatcatgatcattcatgggaaagtttacaagatgctgacctgaacagatcatgttatggagatgaccatccaaatctgaatgcacctgcgttgagtaaggctcggagacattcatatgaaggatgaacaggcaccgacttaataggtacatggggaaccgtccgcttggatccttgataatgcaaaacggtttgatcattggagggaggcacagacttaagatgagcttcatgaaccaatggagaatgaggctggggaacagggctgtcgtctaacacgggtacatgctatgattttccggacggtgagga

SEQ ID NO: 118045 - DNA, 675 bp, Glycine max
  Clone ID: PAT_MRT3847_77603C.1
gtggagtaaaagaaaacatctttccaggtgttggaaaacctggtggaaaattcattgccttatctcaagtgtaggtataaaaagtacagggtggggcgcaagaagaatgagaaaggagaagcaagagaaaagttccagtttagttctagagtacagaaagaatacctgaagccctcttactctgctagcattggtgaggagcttgaagatgggctatttgatgatttcttagaattggccttgcagtttggaatgattttgatgtttgcttgcgcattcccacctgcatttgcttttgctgctgtgaacaaccttatggagatcaggacagatgcattgaagctgctagtaattttgaggcggcatgttcctcgtgccgctgcaacagtaggagcctggcttaacatatttcagattcttatactgatgtctatatgcaccaactgtgctattttagcatggctatatgatgaggagggaaaatggaaaatagagcctggacttgcaacaattttaatcatggagcatgtcctcttgttgactaagtttggtttctctcgcttctctcctgaggtgattgatttgcttcccacaatgctggcgccacaagagcaaaatctacgttcctcaggtggaagccgcaatatgaatttcaagagtggaccacttttcata

SEQ ID NO: 118046 - DNA, 364 bp, Glycine max
  Clone ID: PAT_MRT3847_77604C.1
aaaccctggattcccttccaaggtatttttttccaaatgaaaaatttaaattttttggggtttattattctttaaggccaaattggttccaaaccagcttttaggggggattccattccagccaaaaccaaaatttaagagttccaaccgggccttaacaaaaggggttaaaaggggggctttttttttccaaaattttaaagcccgttcccaacttaaggggataagttaatccttgcaaacaaaggatcccaaaggtttttttgccacaagattttcaagaatttttgttaagctaataaccccttttccaaaaatcttcgggttcgggttggacaacacccgcctttcctatgatgttgtt

SEQ ID NO: 118047 - DNA, 235 bp, Glycine max
  Clone ID: PAT_MRT3847_77605C.1
cttcaacatccaagcaagtgttaaaacagggaaccatatatggtgaataacaaagacatgcaagctcaggcatacctcctccaatatccatgtaagtgttaattcctcttataattccagtaacagtcaccacatctccaggtatgcacgcatcaacgagatcttgggtaagctcgcattccactgttcgaggcacccgtccttcttcatggtcttcaggctttaataattcttg

SEQ ID NO: 118048 - DNA, 383 bp, Glycine max
  Clone ID: PAT_MRT3847_77606C.1
tactgctacaagacaacacaatatgactacaccctctccatatctttccccctaatactcattcgtgccgatccttcataattcaacgtagtcgtcaaacctcatcctcatatcccactcccttgctactaactacaaaccatttaaaaacccaccatcatacaagcctctcagagtacaacttccctttgtacaaaccaccttcctattacccaaaccctccctatacaagctcataccactcttttactaaccaccatataccaaaccaccatacatgaaaccaccttatttatagtacctcttcataaatgacatcacccaatcctaaatcacacaattatctctattctctacttacaaaattataataacttcctttc

SEQ ID NO: 118049 - DNA, 2143 bp, Glycine max
  Clone ID: PAT_MRT3847_77607C.1
aaaaaaaaagacctgagtagaaaatagtaaataagaatataggaaagaacgaaaagttcacacaaaaatagtagacagtggaatgcagcaataaattatacatatccagaccttgatacaatcattaaaaatatccactaaactatgtttttccctttaaagatcttgtcttgacacaattttgagtcaagcgaacaggttctaacaactaggtggatctgccaagcaaacaccagggtcaggagaaaaactgaaagagcccttttcaagacccaacgaccttcttttcactttactctgcagcagtttcgtcactgtcatctccttcatttctgatatcaggcagtgtatcaagatcggttcgagcctcggccacatcctcgtggatatgagtatcagaagaatcgattgcatcttgttcagctgaatccatagtttcgttggcagaggaagagtctgatgtttcatcagtttcacctgtttgtgtgtcacctttgaacatctcatcctctgtggcatcaacatttggattttcatctgtttcacttgtttcagagttaccgttgaacttgccactttcagaaatatcagattcagacctctcatttctgtatgcgttctcggttacatttgaagctactagattagatgattctccagcatcctcacctccattttcagttttgacagagatcgtcgaattggtatcatgcaggttttcatctgaagttctattgccactctgctctaatccctctgtctgcacattttttatatctccagggattgttgtgttcatcgtgctgctttgagcttggtcagattcagataacatcacttttttattttgttcagatgaacttgatgtgtcattaccagctccggtcaagttattgcttgcttcagtggtcactactgttaggttactgcttgattccaagtggctgtcagagtttgttgcagttgttttatttagtaatgagctatcatccacagggttggacaaagtgttatttccagtctcttgaacagcagttgtgtttgaagaaataccatctatcatgtcaccttctgaaaccttcaaatctgaatcattttgcttcccgacactttcgtctgaataagttgtctcattttcaggttttggaatattcatttctaagtttacatcagagttttccaaactaagtgtctcagtttcagtgctagttgcatgagtatcatgagccacagcactagaagcatcatcccccttgtaatgttcctcccgggcctcatgattgttgtggttttcaactaaactctccttttcttcatcttcgttttcgtctccttctcatcaacctcttctttctctttctcttcatccaagaactcatcatcacgatcaatagtatccatctctgatttctcttgatcattttcatcgatatcatcgtctcctcctcctcttcctacatcttccacatcttcctcctggtcttctgctccatgcttattttcttctcccctttgtagtctgccttcatgcttgttctcttcacgttcttcagtttcattcttgtttccatcttgttgttcttcatgatcatgcttagtttcttcatcctcttcaatatgttcatcttcctcttcttcctcatgtttttcattctgaatttcttcatgcttacctggatgaaggtctctcctaccaagtttcaggatcagatctgtctgtgtactgactgacagttttgcatccttggcaaattcattctttttatcatgattgtgcttaacctggtagatcaaccagaagcaaacaccaagcaacagaacaatttgcagaacatgctttaccttgatgcctttggacctctggttgttcctacttggaaaccgttttatcatgtttaacttatttggaaacccctgatttgtgttgtccaaatagcaagggcaggcaacctgagtgagcagagagagtgttgagaagacgagggtgggctaagacaaaagtgtgtgtcatttaaggattttaggtgtcaaagagatttcattccaagtatgagtggtagccagcaacacggcgatctaaaacgaggtagctctcccgtgccttgtcctttgaccgcattcggagtcttaataaacctccccc

SEQ ID NO: 118050 - DNA, 437 bp, Glycine max
  Clone ID: PAT_MRT3847_77608C.1
cgttcgcgtgggcgtaaatgtgttacgagaattgtctttgcacagtccagaggaagctcgccaatcgagatggaaagccctctctcgccttgacatggctgcaaatagctgatgtgcctaccatagcacagattgaagagttacactcgatgcaaaggatgatgaatgctcctgattcaaatgataatattgatctactgctgagcattgatcagttgggtttacaacggagcattggacaagctttcccaaacaagactgtttttaacgataagctagtgctggctaacacacaagaactctttgatggaaattttccagcggattcttggataccaatatttgagaattggctttatcctgtgagacaattaccttcagaagccagctcgtgaaatagcacatgtggtaccggacctgctggttcacccaccact

SEQ ID NO: 118051 - DNA, 1638 bp, Glycine max
  Clone ID: PAT_MRT3847_77609C.1
aaaaaacatgaacgatcgatgagatatttcgaaatatagtgttggacacccagttagcaattagcatagctatgactgtgattttaccaaccccgaccaaaaatctcataaatttcgcggtcagcattttctgctacggttttgcattcctaaccttgaactttaggtctcattgttgaatttttcattttcagctttcaccacaaccctttgaagctctgcatcctctaatggctctctccacaacatttatgcccccttcatccccaaaattgaacctttactccaaaattcgaagacccttttaccctcactctgtcagattccttaaccccctaaagattcgggcttcaactactctggattattccaacgtctctacgaacgacaaatccccccctttgaagactagcaattggcaatggaaattcaaggacaaccttataaacatttattatgaggagcatgtaaaggagagtccggagccttcccaaaatatcttgatgatgccaaccatttctgatgttagcactgttgaggaatggagactagtggctggagacattgctcaacgtaatggcaacaccaattggcgggcaactattgttgattggcctggcctgggttattctgatcggccaaagatggactacaacgctgatgtggctcgagagtttctggttgatttcatcaattcacccaatggtccaatgaaacaaccagaaaatgatttgataatttttgggggaggacatgctgcatctatagtagcccgtgctgcaaaaaagggtctggtgaagcccaaagctatagctgctgttgcaccaacttgggctggtccactccctatcgtgtttggtcgagactctagcatggaaacaagatatggtcttctaagaggcacattaaaggcccctgcagttggctggatgatgtataacatgcttgttagcaacgagaatgctatccaatcacagtacaaatcccatgtatatgccaaccctgacaatgtgactccaggaattgtggaaagcagatatgcattgaccaaacgaaaaggagcacgttacttgcctgctgcgttcctgaccggtcaattagatcctgtaacatctcgcgaggagttccttgagctcttcgcggctttggagggaaagacacctgtgctggttgtatcaaccaaaggatctcccaagaggtctaaggctgagatggaagctctcaagggagctaaaggggttagcaagtttgtggaagtgccaggtgctcttcttccccaagaggagtatcctgctttggtggcagaagagctttatcagttcttgcaagaatattttggcactgttgcttagaattgacattttcttttggcaatttatctatcaaacggggaatatcaatctcattgatgttctgcagcttttcccttcagtatgttggtgtagcttttggaggcacaaatactaattgatggaaaaagtttgtccaagggtgtatacatgtttatgtagtgtgattttatttgattattatagaaaccctagtgtatataaggcttacaattatcatgtccgactgggctgatgacttgaacataacttctcagttgaaagatattaaggcccctttgatttgaac

SEQ ID NO: 118052 - DNA, 416 bp, Glycine max
  Clone ID: PAT_MRT3847_7760C.1
tcgccctttcgtccgcccacgcgtccgcggacgcgtgggtaaaaacttgaagtgcctaatgattgatgaagctgacaggatattggaagcaaattttgaggaggagatgaagcagattattaacatacttccaaagaaaaggcaaacagctttgttctcagctacccaaacaaagaaggtcgaggatcttgcccgcttatcatttcaggcaactcctatctatattgatgtagatgatgggagaaaaaaggtcacaaatgaaggattgcagcaaggctatgttggtgcttcctgtgctacaacgttctggagctctctattcattcttgaggagataccaatcaaaaaagcgatgggttttttctctttatgcacctctgtcaattccatgcagatcttcttaagtgcactgggtt

SEQ ID NO: 118053 - DNA, 225 bp, Glycine max
  Clone ID: PAT_MRT3847_77610C.1
cgtacgcgtgggcggacgcgtgggccgcccaggcattcttgttccagtgccggcagatgtgaatgcctccttgtcagtgagacgcaccaagaggaaggcgttaccaaatgaatgccagaggatcggaacaagtgccggagccatggcacaagctagacgacaaagccgttttggcgactaggtgcttcctcggggcttgggcgagatttctagatcgacctcacc

SEQ ID NO: 118054 - DNA, 466 bp, Glycine max
  Clone ID: PAT_MRT3847_77611C.1
gccctttattttggggttttagttatagggaattgggctcctaaaggagaaggggaattcactttggcagttggttggatatatgttaagggcttgttcctttttttaaaaaaaaaaaaaaaaaaaaaaaaaaaaaaaaaaaaaaaaaaaaaaaaaaaaaaaaaaaaaaaaaaaaaaaaaaaaaaaaaaaaaaaaaaaaaaaaaaaaaaaacaaaaaaaaaaaaaaaaaaatgggggcgcccccccataaaagaccttttaaccccgaaaataatttcggacccggaccctaaaaggtaccaacttttcctattaggaagcaaattaaacacctgggaaaaaaaaggtaaaaacgttttcctgggaaaaaattgttacccgctaaaattccaaaaaaaaaacaaccccgaaaaataaaagggaaaacccggggggcccaattaggggccctaccccaaataaaggg

SEQ ID NO: 118055 - DNA, 664 bp, Glycine max
  Clone ID: PAT_MRT3847_77612C.1
gcgcttacctctcaaaagggtttaaagacctttcctttacctaactttgtctctttctacttcagccatctcttctctgcctcaaccagcgatggtggaattttgagcctttcccttgaaatcaatgcatgtaaagactaaagctttgatgatgcatattggtttttcgttagcacattcatgtgggtcattgcgtgcttctattagtttcagcaaagtggcaaaagggtctgtgtttgtttgacttgaggagggttcttctttttattaagtgcaaaggtagctgcgttgtgtgtgtgagtgtgtgtgtgttttttttttttttttttttcattttgaggcatgaactaccttgtggggtagattttgattttcaaaccttaagtgatagcaccccatttggcaaaagtgaggatttttgttttttggagaacgcaaaaggatgattcagttgttgttcatggtgatttttgtcgagggggttctggcatttcttttgttggttaagataggacctttgagagatcttgtgataaagagcctggatcagttgaagatggggaagggtccagctacagtgaaaaccattgctggtaccatgtcggtgattctcctttcaagtctcatgagcattgtcaagatccagaacaaaggtgctaaactt

SEQ ID NO: 118056 - DNA, 228 bp, Glycine max
  unsure (1)..(228): unsure at all n locations
  Clone ID: PAT_MRT3847_77613C.1
aaaaagcccttgttcctttttgccangttgttggtagcagnntgcaatgcaaataatcttntttgactttgaccgtctatttttttttttttggaaggcaaattatatatatgtattaatatagncagaaaacagtacaaggggtactggataaagatgatataaagcacctctggngctgccctccaaaaacccaagctaacccaaccaaaaggctatcccacacgg

SEQ ID NO: 118057 - DNA, 1249 bp, Glycine max
  Clone ID: PAT_MRT3847_77614C.1
tcctcgagccgattcggctcccagattagagtagtagtttgtgttgcgattgacgacgacgataacgacaacgacgaagcatcatgtcttccggcggcggcggaggcggagcaaagccgttcttctgccacgtgtgcagtcagaggatcacgtgctccgatgagtcggaacccttctgcccgatctgtatggaaagtttcgtagaagaatgcaaccctaacaaccctaaccctaatcttttcaccgagaatgaggaatcttctgattccgaaatctccttctccctgctccctctctttctctcctccgtatccaggtcccgacccgaacccgacatgttcgacccgatggttttcctccaaaaccacattcagggccttcgcgccgacggcgccaacatccaagttgactttggccacccttccgagcagcaagggtttcgcctccctgcgaacatcggcgactacttcatgggccccggccttgagcagttcattcagcagctcgccgacaatgatcccaaccgctacggcacgcctcctgccgccaaggacgccgtcgagaatctccccaccatcaccgtcgacgacgagttgttgaactccgagctgaaccagtgcgcggtctgccaggacgagttcgagaagggctctctggtgacgcagatgccctgcaagcacgcgtaccacggcgactgcttgattccgtggcttcgactgcataactcatgtcctgtgtgccggtatgaattgcccaccgacgacgcggaattcggctcgagtgaggttcgcgggaatggcggtgacggcgggtcgaggactggtgggagtggcgacagtggtggtggaagctgcggtggaggcggaggggggagtaatagacctgttcgcaggactgttagaatatatttgcggcatcctgatgctgctgactccgcgcaggacagtgctgaaaggggatgggagtggggaagttgggattgaaatttatgttttgttgttgtaaaactggaaactatcttgtgcagctcagagtttccgtgaatagattgctagcattgccatgtttacaatagtccttgtgaggaatgtaagagatgttatttcccgtgacaagaactttgttcgatcagaggtccttttttatgtagtagatagctggaacatgggattgcatgaaaacacccaactattgagattttaggtgctgttattgagcgttgataagaaacttctcgttacttttgtac

SEQ ID NO: 118058 - DNA, 1741 bp, Glycine max
  Clone ID: PAT_MRT3847_77615C.1
agaaacatttgataatgacgttactggaaatgaagaagtcagaagaagtcaacacattagtacagatataggtcaagtgttggatttgttttccgccaaagacgatggaaacattccaagtggagtcaagaaaggaaatgaagttgtcaaacaaaaagatgttagctcagatgattttagacctgcaattggcgtcaaggggagggaagagtatcccgattcgagcttaggtacttcacaacaaaaaagtggacctgaatctcctgatcactctgattggatgaaattatcagaaacatctgataataaagttgctggaaatgatgttgaaagaagccaactcaatgatacagatataggtcaaatcttggatgtgttttctgctgaagacaacgaaaatattccaagtgaagcccagaaagaaaatgaatttgtcaaagatgttagctcagatgattccagacctgcaactgacatcaaagtgaggaaaaagtatcctaattccagattagctacttcacctcaacgaaaatgtagaaattctaatttagacaaaaagctatgtgatattgctccaaaaactgcacggaaggcctacaagaaacagtccaaggttgctccagataaagatttgaactccatggatttacctttacaagtattttatcctcaaacattttgtagcgccaatactgaattttgctcctttccgggaagtaatgggattcaaaccaagagtgccctgtatactgatttacagctgatagatgaagatgaagaggaacaagaagcacaagaccttaagtcccaaattacttctgaattcagaaaattgaacatgagtttcccttcaaagctaaaagctcgggaaaagcagaaactggaactagaggcattttcttccagagaaccatatgacagttgtacagaagttattccaagtacacccataattgtatcaaccaagaggcagcgaagatcgaaaccctgtactgatgttgccattttaaatgagcccatgaaccggaagattattactagaagagcagtgcaacccgacaagcatgaaactgaaggtcgtgctcttgttccttatgatagcaacttctctgaattacaaaagagaagaaaagctttaaagttgccaatcactgtggacatggaaacaaattcagacagggtttctatggacagcagaagccagttagttcttcatactagcaagttgcattccttggtggattcccatgatgggacctcatctttgctgcctggtgacttgaatagcttgtcattgactgatttgagggccatggcaaaggaccacaaagtaaaacagtactataagcttcgaaaaggagctttggttgaacaattagctaagcagttcagaagctgctgaacttattactggtggtaacccatttttctgccatgcttttttgggtatccctcttggttggttttggtaatgtccagtggttccctggaatttggtataggattctgacatagttatgaatgatacataggcaaaccaaaatgggttttgtaacaggaaattgtacagcctatatagatagaattcttaacagtttgtaaatgaaaggaagtataggttttcttccttgcaactggttagtcattgactgcagagaagactttaaacttaactgttgtgccgcattcacatgctgctgagtttcattgttaaatatgaagcgcgggttacagcattaac

SEQ ID NO: 118059 - DNA, 493 bp, Glycine max
  Clone ID: PAT_MRT3847_77616C.1
agcacaatataaagagctactccatttaatagaggccagagaattcgtggtgactacgggaaaaaatgatagcgtacaatctactgctaatggacggtcattcaaccacgagctgcaacttatacatccaatgatcaatggagcatttgtaggataatccgttcttaaaacacaaacgttcttaccatgattaccatgcctgacttgacgatggtacctttgatagctgaaatcggtatttacattcaccatgtttagcatgagaaatctttggtccagatattgacggacacaagatacatcctatataaactcatatatagcgagggataggaaaacgctaagaacctccgaaaatgggctgagggctccactcgacatgcagattgaaaagagcaaatttggctccatgtaaaacaaaacgctcgttgaaatccccttacagttttacgctgggaagcgtccttatgcatctgcccatataaaactttcc

SEQ ID NO: 118060 - DNA, 694 bp, Glycine max
  unsure (1)..(694): unsure at all n locations
  Clone ID: PAT_MRT3847_77617C.1
cttcaataacttctctctcgtcggactcgaccacaaacaaagctcgaccgtcgattactgcaacgttcgcgacagcgcgcacatcgtaaccttacaacacacaccgaccgccaaacatggcagaggctcaggcgactcccactttcaagctcgtgcttgtcggtgacggaggtactggaaagaccacattcgtcaagcgccatttgaccggagagttcgaaaagaagtacattgcaacacttggtgtcgaggtccacccacttggcttcaccacaaacctcggccagatccagttcgatgtgtgggacaccgccggtcaagagaagtttggtggtctccgtgatggatactacatcaacggtcaatgcggtatcattatgttcgatgtcacatctcgcattacctacaagaacgtgccaaactggcaccgcgatctcgtgcgtgtttgcgaaaacatcccgatcgttctcactggaaacaaggtcgatgtgaaggagcgaaaggtcaaggccaagactatcactttccaccgcaagaagaacctccagtactacgacatctcggccaagtccaactacaacttcgagaagccattcctgtggctcgctcgcaagctcgtcggcaaccaatctctggaattcgtcgcagcaccggctcttgcaccaccggnagtttcggtcgacccagccgccat

SEQ ID NO: 118061 - DNA, 645 bp, Glycine max
  Clone ID: PAT_MRT3847_77618C.1
cacacccctttttttctttctttatgggcgggtttttttttgatttattttttgtttcctttttggccggaacggaaaaaggaaaccctttttttaaaactaaaaaaccccgctgctaaaaaaatccacccccccaactttttaaaaacccccttaacctaaaaaccaaaaaacccttccccaaataaagtcacccggggggaaaatttttcactgcccataagactaaaaaatcgtgcggggcccccaaaatatttttggcgcacaattttgattaaccccgggggggaccccaccgggggggcccgccccacggggttttacctccaaaacccaacacccttgggtgcttgggtcctaaagggcgagaaggggacccccaaggggggtctaaccaaaggggaagggggtgttaaaccaaaacccccccccccaaaaagcttggggggggccacaaagaacaaggcccccctaaaaaaaaaggacaccctgggctgttggagggaaaaaaacccccgaaaagaaaacttcgtggaaaaaaaacccccccccctggttttaagaggggggggggggggggggaaaattctcccccccaactgtaaaacatctctttttttttttaaaaaacacaaagcttttcgc

SEQ ID NO: 118062 - DNA, 264 bp, Glycine max
  Clone ID: PAT_MRT3847_77619C.1
gggcaagaagatcttcgaatcagtcaaacaagttcaaaggtcagatataaatagacatatatggggactgtctcagtatttttaatgaaattttggcactgctgaatgctgatccttatataagttgtataaaataaaatttaacttctgtctgctgtaatttttttaaacatatgcagcaactgattgtgaagggaacacgactacaacatgagtccagttgtcatgtggtaataagtctccacaattaaattagtcttattt

SEQ ID NO: 118063 - DNA, 346 bp, Glycine max
  Clone ID: PAT_MRT3847_7761C.1
ggaaaaccaccaaaaccacatgggagaaccagaacctgacatagagaagaaccatagccacagccaacaacagcgacaacactgaaacgaagcgtggggcacctgagaggagctgttgcttgcgtacgccgtgaaccgtcatgggtaaagagactgggacgcagttgtcatggatgtagagacacgcaccacacgcatcctaagcactgagcgccactattagcagaatttacatgatttcatccgactatttgccgctcaatgcaaggacgaaaatcttcctccacgccagaatggagatggcgctgctatctctgaacacgtgccgtggctctaccaattgcgc

SEQ ID NO: 118064 - DNA, 395 bp, Glycine max
  Clone ID: PAT_MRT3847_77620C.1
ctccttttttttttcggggtacctaatatattatgggacaagctggtgaggctacaacagcgggttttgtggggcggaggcttaggacacaacaagattgcttgggtaaactgggattcagcgtgcctaccaaaggagaaagaggggctggggaacagggattagaggaaacctaattatgctcttcttggaaaaaggcgatggaatttattccatcaccaaggggaattgggggctcgggtgtcggattcaaaatataaaagatggaggaacttggatgaggaaagaagagcccaaagtgaatcctttaggtggcaggagatcagcttcattactcattctactgaggatggcagttggttagaaaaaaggacaaaatggaagatggggggcag

SEQ ID NO: 118065 - DNA, 223 bp, Glycine max
  unsure (1)..(223): unsure at all n locations
  Clone ID: PAT_MRT3847_77621C.1
ggccgccctttttttgtgtttttttttttttttttttttttnatgctctaaatacaacttgcgtgctgtttttgttattgcnaattgcaaaacttgntcgagttgcggtcatgggcaaatgttnaaaccattttaagtgttgaatgaaaaggggttactgggttgacgaggtataaaggctaatttcctcnttttttggggaaggggggcggctcatacaaac

SEQ ID NO: 118066 - DNA, 746 bp, Glycine max
  unsure (1)..(746): unsure at all n locations
  Clone ID: PAT_MRT3847_77622C.1
gtaccgcccctgcaggctacccggntcccggnacatttcccgggctccgacccccacgccgttcccggtctctcgtcttctcaagtgtcttcaggacgccaacttcggctctcttgcttctcaagtgaaatgaagaagccttgtctatctcttcctctcaacaaagctaataacggtcaaggctgaaagacatggtgtcactctgcaagtctgaagcccagcttgcttgcttgcttgcttgccactccccaggccgaagccaaacgggactatcactgaccttgcctctacaaactttggtggttcaagaaaaactctcttagctttactgggtaggtctatgtccgcggtgagccctttcactgaaagggtgccaaaaaagttgaattggagaatagcactgccttgcaccaaacttcttgtagtttctttgccagatagaccttggtgaccccagcccttgacctactgtttaaaaccttggttaaagggcccctttttgtgccaaaaccaacaaatgtttagccctgcttgaccagtctcccgaagtgccaaaagaacccttttggaagaaatgggccttggttttgtgccaagaattgatttcccgaaaggaaaagcaaggnnaaggttacctggttgcttcccttgtgtgggtttgtgaaaggatttttcngntgaaggagcattgaagcctattaacccgtcgttctgcaancattgtgaaatctcaaatgagttgcaag

SEQ ID NO: 118067 - DNA, 696 bp, Glycine max
  Clone ID: PAT_MRT3847_77623C.1
tttttttttatattaatagcacttacatttggaaaaataatatgttgtgttacattgtattcctttataaggttacattcatcttacatgattattgtttttttcaatagatttgatgacaagctaacgatgcaacattaactgagggaaacttggatgcttgaagaaagacatctcccctttgcctctagatttgtaagtcttctgatctatctactgcagcaaaatcatcctagataaaaaaatatagatttatagacaagatgaaactttaagcttcccttttgggtctattgcgagcttgtgtaagggcaggcttttcttgcacattagtttccatactatcctcttcgctgctgacatcatcgttatcatcattgtcatcgtcatcatatgtttcaagttccattaaagcttcatttcttgccatctcttcaagccagtctcggtcgagcttatcgcccattcgaagtgcagctaaaatggtgacgccgaggagagaggacgggagcgcaatggcaaagaggatgctgctagtgctgggacccgcacgagtcgccaccgccgagccccgccgttcccggccgccggcgtggatgcgaagcgccggagagttgaagaagaagggcggggccctcaaggaagcaaatgcggagaggtgagagattggattggagacgcagaacaaggtcgtca

SEQ ID NO: 118068 - DNA, 282 bp, Glycine max
  Clone ID: PAT_MRT3847_77624C.1
tccggattcccgggtcgacccacgcgtccagtaagcggccgccgtagtttttaacatttttttttttggttctagttctgatcatcaagagggtgttaattatgcattattatgagacaagaacagtacagaagagggcctgctgtctattggattaggacatgcaaaactaaaagctggccgatctgtattcaaaccttacattaagtgatcagaggaagccaaagaaaacatattgttttacactggctgtcaaagtgaatagaaacgtcctaagagggt

SEQ ID NO: 118069 - DNA, 259 bp, Glycine max
  Clone ID: PAT_MRT3847_77625C.1
cccgaatcagcagtcagcagcagaaaccatcaaaatgtatgaatctccgctttattgttctttccccaattttccatcttcgtttcctcaaattcctcttcacagtgcttctttcttccagaaaatgaaccccaacgatttccccctccgaagagaggcttgtcgaggcctctgctgaatcggtgaagaggtgagcgaaggagtggttgggattttgaagaaagcggagaggggagtgtaagttgaaagggttgatctc

SEQ ID NO: 118070 - DNA, 487 bp, Glycine max
  Clone ID: PAT_MRT3847_77626C.1
gcagcacacaaaatggcagaagtccaagctaaagctcccgctgtccaaagagtcgccaagaagggtaagaagaagggtgatgacgaagaaggtgccggcaagcaagtcgtccaattgggtccccaagtcagtgaaaccgaactcgtcttcggtgtcgctcacatcctcgccacctggaacgatactttcctccacattactgatatatccggtagagaaacttactgcagaatcactggtggtatgaaagtcaaggctgatagagaagaatcctccccttatgctgccatgctcgccgccgctgatgttgtaatgagactccaagaactcagagtcaacgccatccacatcaagatcagagctagaggtggtactgacactaaaacccccggccccggtgctcaagctgccctcagagctttggcaagattcggtcgtaggatcgagcagtatcgaacatgttgcccccatccactccgatagtacc

SEQ ID NO: 118071 - DNA, 845 bp, Glycine max
  unsure (1)..(845): unsure at all n locations
  Clone ID: PAT_MRT3847_77627C.1
nnnnnnnnnnnngnnnnnngngcccgcgtccggaacttttcagcctcaaaattttcttaagcaaaaaaatttggaaaattcttataatttcaaactcgtgtatatatattctcacccacaattatccaaaatccagccatctcttttcttcttttgctccaaccaccagagaaacactcaattttaattttcagctcattagctatttgctgaaaactaggagtgagaaagatggcatcttcaaaaccgcatggtgtagaaaacgttggaagttgtttgagaaacaccaaaggcttcaccctccaagtccttaccggttgttggttcatggagttctcctcattcatgatcatgtcagtgtcaggagcaagctacatgtttagtctttactcaagggatatcaagtcagttttggggtatgaccaatccaccctcaatttcttaagcttcttcaaagacttggggtccaacataggcatcatttcaggcctaatcaacgaggtaacacccccttgggtggtcctaacaattggtggggttctcaatttttttgggtatttcataatttggcttgcagtggccagaaaaattgctaagccccaagtttggaacatgtgcttgtacatcttcattggagccaattctcactgttccaccaacactggagtcattgtcaccagtgtaaagaacttccctggcacaaggggcattgtaattggcctcttgagtgggtatcttggcttgagtgcagctatcatcactcagatatactatgccttctatggaaatgattcccagntttctaattttgctcatggcatggctaccaactgctgtaactttcg

SEQ ID NO: 118072 - DNA, 236 bp, Glycine max
  Clone ID: PAT_MRT3847_77628C.1
acagaaggagaccaccaggttatgtcataaatcgtaacctcggacttagaaggggaagggcccagccttgatgtctatcgaaaacggtaggtctgtataccgaccaagctgaccgtgaagatcatacattcactctacaaacgtgcttgcttatgtctatcacaacactgatcgctgctgacattcctatggtgacatccatgggtggatgcggttctccgggcgtggactgctcc

SEQ ID NO: 118073 - DNA, 694 bp, Glycine max
  unsure (1)..(694): unsure at all n locations
  Clone ID: PAT_MRT3847_77629C.1
ctccatgcaattatagtgcagtgccatcttacaaatgataacaattataacaatggtagtttacctaacatttgaaactttgaatgatggtagaaattctggaatgacaggaatctacactgttttattattattcgatttgttttctgtgctcgctcaaaagaagggggagaaggagatcttttaacttgtttactgcactaatgagttcattggtgcaatattatagtgctgatatgctaggggtggcagcttggaagcatatgcacacaacagggttgacatggtacatttgtagtagtataggatttggcatagctgaacatgctatatagtaaaaattattaatatgtataatcattcaatgacatattatgaacgtgaaactataaaatccttaacaaggttatgaattcattttaaaattttacaatcagtcaatcattaaaaaaatattctattttcctgatcctctatattcaatttctatctatctagttggttgttgtctttcaattattgcctgaactggttatattggttttgctctctggtcttgtaagtttattaattaatggcgtgctatattttgtaatttgtatatggcttcctcaaggtttgaataatgaaagacacacacacactctctaaagacaacagaagcatgtttagagttgannnccttctggaaata

SEQ ID NO: 118074 - DNA, 559 bp, Glycine max
  Clone ID: PAT_MRT3847_7762C.1
ccgggattttatctgcgacttggaggctagggtttccggattcttgcgttttaatctttgcaattcaaaagcatggggcactccaatgtgtggaactctcatccaaagaactacggacctggttctcgcacctgccgtgtgtgtgggaatcctcatggattgatcaggaagtatgggcttatgtgttgcaggcagtgcttccgtagcaatgccaaggaaattggcttcattaagtatcgctgaaggattagtgtccaactgccccattcggtttggattcttgcattaggctgggttgattttactgtctgaagaacctaagaatttttgtgacatttagtgaagttaattatcaaaactcaatttgtggaactaagaatatttttgttttttatataattgttttgagctatctacatctttctccgtgagccatcattctgcagttcttttccttgtgtatgctctctcactttgaccatgatgggaaagccatcatcgactcgactccatacaatgctatacttttaaatgttaggtctgattgtttctcaacctg

SEQ ID NO: 118075 - DNA, 571 bp, Glycine max
  unsure (1)..(571): unsure at all n locations
  Clone ID: PAT_MRT3847_77630C.1
ggctcgagggcaactgcaggtttttggcaattggaaggggatgcttctgataggatattgcaggcggtaaatacttataattacagcttatgatgccgtgctccactactttaattagcacctatatccaatattttaactttttgtagctttcactttcatacatgaacaaaggtcagtgacatgctcaagaacagaagcacactgaacgttggggccgatgcagtttcagtgttgagtggaaaccaagaaggagcttatcaatgggtatgaatgtcattcataagtttggattaggaaaaaagtgcacttaattaccgaacaaataactcatatttaacaaaagaagtaaaagaagaaaatcttcagcataacaatacaatttttttttcaacatatttaatatatatttttttaaaatatgactataaagtatttaattcttttgataaaatacaatacattaaattgcaaaaattgcatacttgcctctttctatatattctgtnttatatgagacattgtatttgcttgcctttntttataagcaaataaagttaatttcattcaa

SEQ ID NO: 118076 - DNA, 569 bp, Glycine max
  Clone ID: PAT_MRT3847_77631C.1
aattcggctcgagtcttaatggaggagagaaagaagcacccttcttttccctccaactatctcactctcgctcaactccaagaacgatggctcaagcagcaaaaccaaatcaaccaaccacaaccacaaccacaaccacaagaacaacacaaccaccaccaccgccaacaaccacaccaagagcaggtactcgttcccagaaacggaaacgcttataggtctcgtcctcagtttcagtatgttgcgaagaatcggaacgattccgaaactcgccgccgcgctaccaaggttgcggtggcctccgatgacaactgcaaatcggaggccgtcgccggaatcggtgacgaaaccgccgatctgaatggaaaatccagcgaatcgaagaagaatcagaataataggaggaatgggaaaggaaaatggaaaactaagacggagaagagaggagcgcgtggagatggctctggaacaggagcacaggggaaagaagaggcagagaagaaagccacaatcgagaagaagatgagttggagaagaacgtggttcggcatcggtggatgaggtggaca

SEQ ID NO: 118077 - DNA, 1279 bp, Glycine max
  Clone ID: PAT_MRT3847_77632C.1
ccagaaatgctcaagttaaaagactgccccctcccgataatttgaagatctttggcccggccattgtgatgagtttattcgctccttgccatttcaagagtacagcgatcctcggactggaattctcaatcttgctgtgaagttgccagcccacgtcctgaaacctgacatgggtccaaaaacatatattgcatatgggattaaagaagagcttggtagaggagactctgtaacaaagcttcattgtgatatgtcagatgcggtgaatattttgacccatacagctgaggtgatattaactgatgagcagcactttactatatcaaagttgaaagaagcacacagggcacaaaatgagagagaacagtgtgcccaagagagggttgctgaccacctggaggatcgaccttacaaagacaacaaagaacatatagaaaataaggaagttcttgaagccaaaagcatgaagaaacaacctattgaaattgatggaaacatctttccaaataatgtgcttgagtgattgtacatccaattcatgaccgatgtttttatttgacatgggaacataataagaagctgaacaaggagcttggtgtagagccatggacttttgaacagaaacttggggaggcagtatttattcctgctggatgtccacatcaagtcaggaatctcaagtcatgcacaaaagttgctgtagactttgtgtccccagaaaatatccatgagtgcctgcgttttaactaaaaagttccgccagcttcccaagaaccacaaggctagagaagataagctggagataaagaagatgatagtttatgccgttgatcaagctgtcaaagacttaaaagatttactgaagtgttcttgattggcttgcagaaagctcattttgccgtggttgatgatacactagatttctgtgaatataaacagtgtccagatagaaaattgtgaagtgtgaatgtttattgtaggattagagtccggatagaaaattgtgaagtaggaatctttattggaagatcagaggcactcataattgagtgttttccattttggtattaacatagtgatttaattgttaatacttacattttagacaacagtttcagaaagttcggtaaacagataacggccacaagaattaatgaaaatattgtattcatggccaaagagataaaaaaaaaaaaaaaaacacgtgtattttttatattataacatttcagtatttagggaaaaaagactctgagttcagttagaaaggaagtaaagt

SEQ ID NO: 118078 - DNA, 678 bp, Glycine max
  Clone ID: PAT_MRT3847_77633C.1
aatttccaacacaaaattgatcaccaaaaaaatgatgcactgcaagtttgaactgctccatgccactaaaaatatctggggccaataaaaagcaaagaggaaaaactacgctctgttgtatatcctgaatccctgtgtaggcagaatattagagaacatacctgttagtatcctgctgtatgcacagctacactcacatttgtgcttcttcacttggaagccaaacacactctcgaaacattgattgcgccttggtcttgcacataattatccggaattgaagggaaagaatattaggattgaaaggaggggaagaggaaaaaaaaagagatgctgcccatccagaaaccaaatacggtctactgccaagccaggaatttgaaaacagccacttcgggatcctttttctaaaagctctctgaagggcacttcaaaagagagagtcaatagcgtatacgtatcctccaccccattgtgggtggggagatgggaaaagaaaaaaccttctccacagggttccgatgtgaccatgcagacacgcatcgcgcctttaatcatgtttctttacgcatatttcgtgtacatgctatttggcagggcacaagcatttgaaatctcactggggacccatgctaagtgcagggactgggtgtgaaatcaaaagaatccccattagca

SEQ ID NO: 118079 - DNA, 3794 bp, Glycine max
  Clone ID: PAT_MRT3847_77634C.1
ctatatgtcgattcatcctcttggtccaagggttccataatctgggcattaaacccatttcatatgatgggagttgctggtgtatgggtcgctgcactactatgcggtattcatggtgccaccgtagaaaatactttatttgaagatggtgatggcgcaaatacattccgtgcttttaacccaacccaagctgaagaaacttattcaatggttactgctaatcgcttttggtcccaaatctttggggttgctttttccaataaacgttggttacatttctttatgttatttgtaccagtaactggtttatggatgagtgctcttggggtagtcggtttggccctgaacctacgtgcctatgacttcgtttctcaagaaatccgcgcagcggaagatcctgaatttgagactttctacaccaaaaatattctcttaaacgaaggtattcgtgcgtggatggcggctcaagatcagcctcatgaaaaccttatattccctgaggaggttctaccacgtggaaacgctctttaatggaactttagctttaactggtcgtgaccaggaaactaccggtttcgcttggtgggccgggaatgcccgacttatcaatttatccggcaaactactaggagcccatgtagcccatgctggattaatagtattctgggccggagcaatgaacctttttgaagtggctcatttcgtacccgagaagcccatgtatgaacaaggtttaattttacttccccatctagctactctaggttggggggtaggtcctgggggggaagttatagacacctttccatactttgtgtctggagtacttcacttaatttcctctgcagtattgggctttggcggtatttatcatgcacttttgggacctgagactcttgaagaatcttttccattcttcggttatgtatggaaagatagaaataaaatgactacaattttgggtattcacttaatcttgttaggtataggtgcgtttcttctagtattcaaggctctttattttggaggtatatatgatacgtgggctccggggggcggagatgtaagaaaaataaccaatttgacccttagtccaagtattatatttggatatttattaaaatcaccttttgggggagaagggtggattgttagtgtggacgatttggaagatataattggggggcatgtatggttgggttccatttgtatacttggtggaatctggcatatcttaaccaaaccttttgcatgggctcggcgtgcacttgtatggtctggagaagcttacttatcttatagtttaggtgctttatctgtttttggttttattgcttgttgctttgtctggtttaataataccgcttatcctagtgagttttacgggcccactgggccagaagcttctcaagctcaagcatttacttttctagttagagaccaacgtcttggggctaatgtaggatctgctcaaggacctacaggtttaggtaaatatctaatgcgttccccgacaggagaagttatttttgggggagaaactatgcgtttttgggatttgcgtgctccttggttagaacctctaaggggtccgaatggtttagacttgagtagactgaaaaaagatatacagccttggcaagaacgccgttctgcggaatatatgactcatgctcctttaggttccttaaattccgtgggtggcgtagctacagagattaatgcagtcaattatgtttctcctagaagttggttagctacttctcattttgttctaggattcttcctatttgtaggccatttatggcacgcgggaagagctcgcgcagctgccgcaggatttgaaaaaggaattgatcgagattttgaaccagttctttccatgactcctcttaattgagacatgagatcctatgaagtagaaatcacttttattttactataaatattactataaatattgggttgaattgagcgggtcgtatttaaataagaatttcttttccttttttcttagtttctatcgaaaaaaaaaagattcgatagaaactaagaaaataaacaaattgattcgccgagaaagaggagagagagggattcgaaccctcgatagttctttgttccgaactataccggttttcaagaccggggctatcaaccactcagccatctctccaaaagctaatttatattttatctttattccactgaatagaacatgagcatataaatggataccctttatattatctatctttatattatctataaagggtaaagatatccgatgtgaatctatttgtttagttttctatcggtatgtatataggtgaataatccaacatgcctttttgtgaagtaaaaaaactaccctcgatccatgcctcaaaagggttgataataagtaaaaaaaatcaatgaattcatgataaaacccttctgcgtttttttattataaatttttttgtcaataaagggatcaaggggttgggggatcaaatggtaaagttcttttgttggtaaattggaggattagaaacatgactattgctttccaattagctgtttttgcattaattgctatttcatttattttattgattagtgtacctgttgtatttgcttctcctgaaggttggtcgaataacaaaaatgttgtattttccggtacatcattatggattggattagtgtttctcgtgggtattcttaattctctcatttcttgaagctctatttattctagatcaaaaacgaaatgacccctcccccagaattctttcggattgtcgggcacattaaaaaaggaatggataagttcctaaaaataaagaaaactataacacattataaggaggggtcaaatattaattaagataaaagatatagaatatctatctgtatatatatatatatagatataatttattaataattagaactttcttttttcttaaaaaaaaaaaaaagtaaataaaaagatttgatagaatcgtaatttcaattcgattatatagatacatagaaaaaaagaatatataataatagaagtaggaattattgatagaaattcattcaaaaatgaattcttaattaatagtaatagtaatataaaagattttatttagaagagcaaattaagatcaccaaagtacttgtgagtgtatacccaacacaaactaagatcaacatggactactacacccgcgtttcagaagttgagagggaacctatcatggagtattccacaccacgaccaatgatgggcaactaccaccaccctaatgctcaccgtgtcctcaacgagaagattgtttatgaggaggatgtgattggaggatcccgccacaaccacatgcatcaccaccaccctgagactcatgagagagtcaaggtggtggagtatgaacaagttcctgagaggcgcgttgtctatgaagagaaagttgcttatgacaacgatcgttactactctccaaggtattgaaattggacaaatggaagaacacctataacgtgttatcatgtggctttttattaggcaggctacctagtataccaaaagcaccactgtgcttgtactaaataaattcctgcttatatatactggccattatgttatatataaaaatcatatgcatgccgtttatataaataaagctatgttgaataatatatctattttgtaaaaaaaaaaaaaaaaaaaaaaaaaaaaaaaaaaaaaaaaaaaaaaaaaaaaaaaaaaaaaaaaaaaaaaaaaaaaaaaaaaaagggggggccgttttaaaggatcc

SEQ ID NO: 118080 - DNA, 2072 bp, Glycine max
  Clone ID: PAT_MRT3847_77635C.1
gtttacttcccccactcattcattatccatcctttcatgtgatgccattatttactctctaaatacatttcattcctgctaggactttgctgtttatcatttgcatttattttttgttggtcctcaaaaaagtgtccccctttctatgtattctatcttcccttaaagcccctctgtgttttgtcacagctattattgctgctttcaatagtaatttattacctaagtagaaaacttgcttatttatcttgtcattgccattctgtgattcaagtttgacaatttcacagcctttggaagaaaaaagcttgcattttttgtcccccccaaaggaatatacttgctctccaatctcttctttccctccaacttcactctcttgaactcttccttttcatgctttaagttaaatattctgcaacccttttagttgccattgtgtgtttctgttggcaatgtgccaaagaagcatgagtggtggtggcatgaagctgctgaggatgtttgtgtttgtggggttggtgattgtgaaatgggtggaaggctttgaggatgctaatgtgacagacctaggcatgcaatatgtcagtggaagaggtttctacagacctttgatggttggttttactcatattaatggtgctgctgctaaaggagctgtctgcctggatggatctttaccggggtaccacttccaccgtggatatggttcaggatcaaacagttggctcatacaattggagggaggaggctggtgtggaactgtaaaaaattgtctttatagtaagaaaacacgtcatggttcatcattttttatggaaaaacaaataccatttattgggatattgagcaacaaagctgaggaaaatccagattttttcagttggaatagaataaaaatccgttattgcgacggtgcatcatttagtggggacagtcaaaatgcgggagcagggttgtatttcagagggcagcgcatttggcaagctgctatggaagatttaatgtcaaaagggatgcgctatgccaaacaggctcttctatctggatgttctgcgggaggtttagctactattatacattgtgatgaatttcgggaattgtttcctagaaccacaagagtaaaatgcttaagtgatgctggattattccttgattctgttgatgtttctggtcgtcgcagcttaaggaatttgttcggaggtgtggttaccttgcagggagtgcaaagaagtcttccaaggagttgtactagtcgcctcaatccaattttgtgctattttcctcagcacttaattgctggtgtcaggacaccactgtttcttctcaatgcagcttatgatacttggcagattcaagccagtcttgctccaccatctgctgactaccactggaactggtatgaatgcagaaaaaaattatgcacgttgcagtgcaccacagatacagtatcttcaaggttttcgaaatcagatgcttagatctacaagagccttctcacggtcttttaaaaatgggttgttcataaattcttgtttcgcccattgccaatcagaaagacaggatacatggtttgctcgtgattcccctcgtattggaaatagggggattgcggagtcggttgggaactggtattttgatcgagttagtgtccaggccattggctgtccttacccttgtgacaaaacatgccataatttggtatttaagagatagatcgctcaagtatcatcattctttcaataattttcttctgctcctacattgcacatgtgattgggttctgaaaatggaaaagacattgccagaaaaagctagctccaatatagcactgaaccagtttattgccataaattataatattcattcttgtaaaacattggctgagcttattcagttttcatttaattattttttgcaagtacattcagttcctgtctctggaactttgaaccatggactgtaatccaaatgattaagttttgctttctgtctcttcccttctcattacacattattgtacttatgagttcaatcgatgaaaccacatttcatcttttactttctttgag

SEQ ID NO: 118081 - DNA, 214 bp, Glycine max
  Clone ID: PAT_MRT3847_77636C.1
caggttcgttcttcctgttccagttttccctctcactttctccactgccgatattaaaatttagaatactgatgcaacgacgtcgtattactttcttgttcatatctattttttgttctttttctttttctattaatccctattcatatctctacttctccattttctgtataagaaatattgctgacatttttttcgcacgtttattgtatgt

SEQ ID NO: 118082 - DNA, 391 bp, Glycine max
  Clone ID: PAT_MRT3847_77637C.1
ttcggtcgcgagaagacgacagaaggggaaggattcaaagtgaagtgaagtgccccctgtcctacttcacttttagttttctctctcctctctctccttctctctccttggtccttggagttacaagaagttgtttgttcctgtccttaatttcttcaaccttctcaacacgtttaatatcactaaccacttcctcgttgaatcatagcataaccacttggtctgtgtttgtttttgcaacttcatattgtacataaaaacatggatgatgaatatgctaagcttattagaaggatgaacccaccaagggttgtgattgacaacaatgcctgtgaaaacgcaactgttattcaggttgacagtgtcaacaaacatgggattctccttgatg

SEQ ID NO: 118083 - DNA, 397 bp, Glycine max
  unsure (1)..(397): unsure at all n locations
  Clone ID: PAT_MRT3847_77638C.1
gaaaaggtgcagacaaggggcgcataataatagtgcccttcttcttccggtcttagcgctccactcccgtattaaccgtcaccggggtctctgagtccagcgtngggttcccatatancacaanacatanagcgctgtgagggggggagatgcgnngggattntgccgaatacccaggcgcttnggggctcctttaccaacccccaccgcggcgttaattatttttctcttngggtcngggaaaggggccactgagagtgagactttttaaggggaaaaaaatgcgcnagttcgggtcttctggggcgtttcttncggtgcgttnggcgtggcggggggtttatcntgtacagtggcgttctatggggcccgactaccgggcncgaccaacccccca

SEQ ID NO: 118084 - DNA, 265 bp, Glycine max
  Clone ID: PAT_MRT3847_77639C.1
acgactcacatgtctttttccaatttctagtctctcacttactcattatcttacgctctataaacaaacttcatcatcatatacaaatggtatttttatgccatcattacactctatgatcctagatccttactcacttatacttcacaatactctcacactcaccctataataactacactcttactctctagcaaaataccttacatagttacaacatcttacacctatatcctaactatcttatactatcaatacccgacac

SEQ ID NO: 118085 - DNA, 183 bp, Glycine max
  Clone ID: PAT_MRT3847_7763C.1
atcatatctttctcaaactagaagaaatattcttccatacataatcggaaatttcacattggtggaggtgaaaaactgggctgtgcctccacctactctttacaatgccctaattacatatgccctctacgtcattccaaatgctcttgattccaacaacattgtttaaaacgtttatgtaaa

SEQ ID NO: 118086 - DNA, 295 bp, Glycine max
  Clone ID: PAT_MRT3847_77640C.1
gcggtcacctctcaacattgaactgctttatggatttaaatgatgtccgtcgcttcatgaagcgagatgactttgaacaactaagtcttccaatattggacacttgtgaaccgacctttatacaacgcactcagctgaaccaggtcttaacgctgtaaatctacacacaccataagctactgattcaggttctcacatacctgccattaacaaaatattcacagaaattttcaacttggagccatagcggacaatgaatgctaatcagtctgatgatttcatctgctcgttaaaa

SEQ ID NO: 118087 - DNA, 353 bp, Glycine max
  Clone ID: PAT_MRT3847_77641C.1
tttttataaacgaaactgccattcctcttcgagacattgcagagaagtgattaatgttcacaaggaaactaaaacgtgtatctttgactcaaaaaagaagaaccacacgagagaatgaaagggtgaagttaaacccaccttttcccttgaaaacacattcactgagcccacagcgccccaaatgcttactccaatgaaactaacaaaccttatgaccaaccctttcttctgatcgccgccaccatcaccgtcctgaccagcctcaaccttaccgggaccggcgctgctacagctactcttcggcaccgatttcggcggcgaagagggaaactcggagcgagttaaacccggaa

SEQ ID NO: 118088 - DNA, 205 bp, Glycine max
  Clone ID: PAT_MRT3847_77642C.1
tgacgggtgacggagaattagggttcgactcccctctccgacccggacaagtatatctatatatatatatgtgtgtgtgtgtgtgtgtgtgttggatcttcactttaattgttacttattgtgttatatttctcgaattctagttgaaagattcttttctgactacgttagtattttgattccatcacaaagaagaacgatataa

SEQ ID NO: 118089 - DNA, 427 bp, Glycine max
  Clone ID: PAT_MRT3847_77643C.1
gatgctagaacatatatcaaattctactttgttaggcccagactcagtgggttatataagtaactaaaggctatcccgagacaatgccaacttatgaaaacctgcatacagcatacgtaatagaggaagaaatgcaaagctaacaaatacaacctagaccgcggtataggatacttaagcacaacagattcgcgtgaaagatacctgtgtactggaacgcaagtctccaacttgaacttagatttggttcaatgcttgggggccaaagagaccttaatagtcttggaaccatcaatcgtatacctaacacgctctccgacaatctggacgggcattacaagatgcttcagcactggctcatgtacagcaacgagagccctggtgcgggggcgctgaacagcataaccgctcgctggtggccttacta

SEQ ID NO: 118090 - DNA, 483 bp, Glycine max
  Clone ID: PAT_MRT3847_77644C.1
tcgtgtacgcgtgggttagacttgaggagcaagcatcccatgttgcacaaagagctgcagaagctttacgtcagtcacgaatgctcctaagccatgatagcgtatctgtttcgacatggacaggaaggtcaggaactgctggtgcaccatcgtctgtcaagcggaagtttggatcaactgcgaattcccagctgggaaataatagcaaagcatctgacgaattacccaacaagggaactaacaagatcaatggatttgctgctgctggggcatctgctggtaaagcattatcttcagccgaactatgggctcaaattcgaggtcaccaagagaaagccattggggctgggcttgaacatcaagattggtgtgtcgtgaagctccactaaataaccaagatctggagatgttagatctttcagggctactgaaaatttatctgttcaacctggaggattgagtcgggaaatttgacttttattc

SEQ ID NO: 118091 - DNA, 142 bp, Glycine max
  Clone ID: PAT_MRT3847_77645C.1
ggcaggtacatcagtaatttctacaggataaagacgagattcttgagagtgaattctttgacccctagccaggcttttttaatcctttgccagggaaacaatttatcagttgaacctttaaggcgggccaagcattcctata

SEQ ID NO: 118092 - DNA, 489 bp, Glycine max
  Clone ID: PAT_MRT3847_77646C.1
ccccctaaataatttcccccttgccttgggaaacaaggggggtcttttataaatttaggcggtttttaaccccccaccccgacgaacatatagttttttactcacaaaccaactaaaaccaaaaaataaacccactaacaacaaaaaaagaaagccatgcactcaccacgaaaaaaaacaaagtaacccaaaccctgaaaaaaaaaccccacaaaagcataaacaaaccccccccaatctgggggggggggaaacccctttcccaacaaaaaaacccacccccccgaaaaaccacacaagaaaaaaaaaagctccaaacaaacccccccaacaaagcccacaccaaaccctcgccaccccaagaaaaaaaaaaacccccgatcccccccaagaaacccaaaaagctacccccccaaagggaggccccccatatccccgccaaaaacataaacccccttcacccggggagttcccccccccaaagcaaaa

SEQ ID NO: 118093 - DNA, 315 bp, Glycine max
  unsure (1)..(315): unsure at all n locations
  Clone ID: PAT_MRT3847_77647C.1
ccacgcgtccgtgaaaggacaacttttcagtgtggcatgcaattgccactacatctaatcagaagcccttctggccgaccatggcctataatcaaatggtccttggtaggactgttggctttctgttcagttgtagtggtacttgtttgcgctgctgcgaagttctgcaaggactgtcgcgtccgttctctngaggtgtttgacgcggaagcctgatgtgtaccagactaacaagaatcgactagccggtgtggagagggggaagccccaaaattttttttatagggcgnnnnggggggcggccgctctagagga

SEQ ID NO: 118094 - DNA, 576 bp, Glycine max
  Clone ID: PAT_MRT3847_77648C.1
cccgcgtccggcgtttgttggccgaaacgatcccacaggggctgccgtgttctctgtcgatactggtggctggatcatcggcggtctttgacccggagacgcgtcatggatgtttctgcccgtatgcaacctgtcttggtaggatagaggcctaccgtgggagagacccactgacagaaaattagggggctctttccgttacggatcccgcatatcaggtgcctcatctcaatgacacagcatgaacactctcaaactaccattactcgtgctccggaggaggctgggacaataaatcacactaccatcctcatcgcatactgtgctgtgatattagcaacttcatagattcttaccgacgatccttggatggacagacttacaagcactcacacgctgcacctctgcttctatactgtatcattgagatagatgcatatttataagctaaaccgagtacctatgagaatggtgcatcagcacggctaaaccatgcacttgcttgcttgttccttgagactgcactgcgactgctgccttaacggttcttaatatgcctgctgtgctagtgctcag

SEQ ID NO: 118095 - DNA, 523 bp, Glycine max
  Clone ID: PAT_MRT3847_77649C.1
ttgccgtgctacatgtgtaggagtgccgcctgcttgggggggggggggggggggtatgaaaacattaaccaagaaggacggtgatgtaggtatagttagagtggaccacaagttagagtatataagcctggggtaacgaaatgaacagctagcgtaaagagtagtataagaggtagtagtgggaaaaaaagcaccacgcctacaaacgcaacacataggaataggataatttgggggggccagaaaaggataacataaatgaacaaccggtacggttatgatacttgacgactaccatggcttatgaaggcataggggaaccggccaggtaaaaattagtaaagaaaaagcgaccaacaacaaaccgtaaccatgatgatagtatgcggagattatttaaatttggccttggttgttgattttgggggggcgtcgggttggggaagtaatagggtggtagggaccgggggcgccttagaagcgcagcagtatggccttagtagtattggaatcaatgctgtcg

SEQ ID NO: 118096 - DNA, 283 bp, Glycine max
  Clone ID: PAT_MRT3847_7764C.1
cagcctattacgccccttccttctacaacaaacacacactccctctcgagccgtgttatcttctcgagatgcaacacttgcaacgcctacaaacggcactaccagcaccatacctagagtaagcacctccatcgatagaacctgacgccctgctacaagcacatcatggataatatccaatgccagtcatgatcacaaatgatcataatgactaccacaaccacattctcatgaccatgcactgaagaatcaactacctcacgagcaactaacgaaaagacca

SEQ ID NO: 118097 - DNA, 423 bp, Glycine max
  Clone ID: PAT_MRT3847_77650C.1
taatattactgtagccattacctggtttagtgaagtgtgatcattataatattgcagggattctattatttcaatattttttgtttacatcaaattttagctctgatttggtacaggaagcatgctgagaatgatacttctgttcctgatgctgcaaataaagctgaaaattttgctcaaaggtgggtctcttactacctcctttttttggtccactttgagaggtttgttgcatgacaacgacctatatatatatatatatataaaataaccaaattagacaggaataatgttcttgtgaatcttaagcttgtactgtttttatccacctcttgttatgtttgcgtgatatcttaattcaagtaattcaaattaatatggaagttgttgagtggaattaatattgcatcttttgctgataca

SEQ ID NO: 118098 - DNA, 219 bp, Glycine max
  Clone ID: PAT_MRT3847_77651C.1
atgatgtcgttcatgctattttgtggtgccatagtcttgtttggcgtcatagaccaaggcttgataatcaaactcattcccggtcacgacaaagaacttggccggagatgtgatcggaatgaggacggaagcggtggacatgaaagcatgccatcgtttcatcttatagtgaagagttttagggatacgtcagagaagagagaaatgagtttcttttaa

SEQ ID NO: 118099 - DNA, 485 bp, Glycine max
  Clone ID: PAT_MRT3847_77652C.1
tcagctttcgccatccccggtcatcgttaccgaaagcttctcgtcggtagcatcggcttggcggtctcaatagcactgtatgcgtcccctttggttgcaatgaagaaagtgatacaaaccaagagtgtggaattcatgccattgcctttatctttgagctccttgttggccagtttgctgtggatgacttatggactcctcattggcgatattttcgttgcggggccaaatgtggttggaactccattgggaatactccagatcgttctttactgcaaatactggaagaagatagcgacggaagagcctaacaaggtggaattgcataatgtgaacaccatataatagggacttggaaatttggcaaggaaaaaaagaatgagtaacagttcctaataactgtaactcgagacccatgacaacctaagttgaacgaattcaattggtttttatcggattctaatgtctatggccttttcatttat

SEQ ID NO: 118100 - DNA, 329 bp, Glycine max
  unsure (1)..(329): unsure at all n locations
  Clone ID: PAT_MRT3847_77653C.1
ccggnccggaanncccgggtcggcccacgcgtacgcccacgcgtccgaacacctgcgaagacgacccaaggcgactattccctcctacttcctttgggtgtttcgcttacgctttgtagggtcttttttttttctattgctctttccctgtgtcaaaagccgacaaaggaggtcaggtgcttgtgaccacaaaaacctccgcatcgaacaaggacacagacagggataagaaaaggcctacctctcattcatccccagctgcgatccactttccagaatgtcctgaccataaacagtcgaaccaacgggtgcacagcaataaacctttg

SEQ ID NO: 118101 - DNA, 417 bp, Glycine max
  Clone ID: PAT_MRT3847_77654C.1
agatttctgttatgcaccatatcaaatatcgtcagcgtatttcaatggctgtgagggaccatccaccgcgattgcggagaccggtccttaatctttgagggggagcgtccggtcttgaacaccactatcatgctgttcctggtgcaggacggcatccccaatggcgcgatctatgcgctgctcggcctcgcgctggtgctggtgttcgccgttacccgcgtgatcctcattccccagggcgagttcgttacctatggcgcgctgacctatgcctcgctggccgcgggccagatgccgggcacggcaaagctcgcgctcgccctcggcatcggcgccttcggcttcgacctgttcgtggcccgcaaggcgctgcatggccggctgatcctgcgcagcgtcctcaccaatatcgtgctg

SEQ ID NO: 118102 - DNA, 212 bp, Glycine max
  Clone ID: PAT_MRT3847_77655C.1
attttaagcttggcaggtctagtatgtgttatatacataataataataatatataataaaaacttgcatgttacccattaaaatattatttagttctactgggcctacaggattacatgtgaagaaaataatattttaagcttggcaggtctagtatgtgttatatacataataataataatatataataaaaacttgcatgttacccatta

SEQ ID NO: 118103 - DNA, 388 bp, Glycine max
  Clone ID: PAT_MRT3847_77656C.1
gaacaaagcaccaagatgaataatagcttcatttgcattgctaactgattcttgtctgaaaaaaggctgttctaaatggatttgaagtgtggtcgaattttgcccactgaaaaatgtagttccacagagagaatgccaaatgccaaaggtcttaattgacctgtagtgaactatgtatattagatagtgcttgtgcagcctcaatacttatattttcaaggacatcgtgatatctacaatcgaatttgtacttgtgacggaaattaaccccggagaaagtgagttgcaataagggttttgaaacccgacggctgagtttttgtttgttcttttttcagtgcttcgcaacagttaataaaacacgagccaattgagtttcggcccttgt

SEQ ID NO: 118104 - DNA, 1012 bp, Glycine max
  Clone ID: PAT_MRT3847_77657C.1
aacaaatctaaatttataagtttttataatatatccttacaattaaagcattaaaaaaacaggggaaaatatattagaaaaatcccccctctcccctccattcccataaggaactaagaaacatgcatttttcaaaaggatcacttatgcattatttaaacacactttctagtaaacaacatatatagctgcgagaattcatatagctagtttgataaaatttgatattgtaattggaaatatcataagctggctagttgattaatttgttgatatatttatagacacactgatttagatttatatcatgctaattaatttagaaatgaataaagggtaatcttcaatggcctaaacccatgctgaagacttgcttgccatattttctcaacgctaaacatgacatttccgcactcattgaccttccaacattctaaggcatgcaatattccagccacacgccatgcactcatcactcttcttggcagccagttctcacaagagtccacattcactaaagaagggggagctatcatggctggtgtgctatggtagaagcagtctttgcgaagtttctttggagggaattgggaaataggtatgaacaatgatccttttggtgcctttttttgttcgacctcatcacactgatctcctactaaccatatcttagcagaataggatcctggaaaaacaaggttgtttttggactcattggagatccttaattgaagtttgtcatattcatccttatacatagtggtaaccttagtacccctttcacataaagcactcgcaatggcatatgaaaccttattaggtttgccacaaagaagcacttgccttgcttctttaggaatactgttaacaacaatagctacgactaagctactgccatccacaatttttatcttaagctcgggatatcttttgatgtaaagttcaccatatttattgaatgaatctccctgatttgaaagtcctagacttaaaacctttactttgcttaact

SEQ ID NO: 118105 - DNA, 2141 bp, Glycine max
  Clone ID: PAT_MRT3847_77658C.1
ctggccagcctccccctgccgaacggggtgtgggggttggaacgcgcttgtcttttctgggaagtgcttcggcagcttaagcctctgtgtctgcgggagaagggggaaacaaacggggttttgggaattgaacgagaaaatctaaactgggaaatgaaatgaaacgctgcgcatttgtaactcgccgagtcgtgactcgttagctttttaataacattttcatatatgtcaagttgaggttttttttttttcaaggtttaaaaaaaaaaaaccattgtttgactcagaaagcagagaagagtgtggactggagaatagggagtgatggcgaagtagatctgaaaggtgaagaatttgagtaggtgaagcccaaagttttcaactttgaattaaagggtcatcaaatgctttaacgttttggtttttttctgccttccgacactctcagaaaatgccgcacccttctttccacaagcttcttctaccctccactgtccaacccaaccaacaactgaggcttccagataattttatgaggaaatatgggggtgaactctctccaattgttaccctctctgttcctgatggtagtgtctggcatgtaggattgaaaaaagcagacaacaagtattgtttccttgatggttggaaagagtttgttcaacgctattccattggtgttggatccttgtgcgtccgcacacgcgtcggaaagtccgttcgcactgtcgttatttttaatttggctacttctgagataaactatcaatcagtcacacgaagcagtaatgaagggcttcacttcacaaattgtcttaaattttttgaagaaatggaaggtgaagattccattgaaatctcggattcatcaccctcccacctttcacccagttcattgcaaaatcaagctcttgctggatcagtagataaaatgatgcccggaaagagttataatacacctccagcattgcagaatctgttcaatggatctaaacttaatagcataaactggggagaaggtggtaatgcccattcttcaagaagtgccaattcactagataatcgattgaccagagacataggacttcagtttaatgcagtcgagtttaaaagatctactgaagaattgaaattgcgtgcttccatcgaggaaaggatgaaaaaaactacaagaaagaagcgaaaatcagatggccaggaaccctctgctgggcacgaagaggaggtagaaatgcgctttagattttatgaaagtgcttctgcaagaaaaagaactgtgacagctgaagaaagagagagggtcatcaacgaagcaaaagcatttgaaccatctaatcctttctgtcgagttgtcctgcggccctcatatttatataggggatgcataatgtatctgccatcatgctttgcagagaagcatttgaatggagtttcagggtttattaaacttcagatctctaatggtagacagtggccggttcgctgcctttataaaggaggtagagccaagttaagccaggggtggtttgaattttcattagagaacaatttaggggaaggtgatgtctgtgtgtttgagctgcttagaatgaaagaagtagtgctgcaagttaccatctttcatgttaccgaggatgtgggactgttgagccctcctttgcagcataaccaaaacatgacctcagctaaactgttaagcactcccttgcagcaacacctcacttcaactaaaatggttagaaattagcagcaggttcattctcgatagctcaactgtatcaaaataaccccttgcttctgtgtggaacttagatgctttttctgtccaaaatttcagggtgacttgagtggaacatagttatagtttttataccttttctttcccttttgacttgggttgtaaatagattgttcaatctagctgattaggaaccgagtcaatgcttgtcctattgtgtatcttggttttaatttttttttttttttctgtttgaagataaattatatagctttttctgccttacaactcggttcccggtttttgtttattgctggaagtaactagtaagctgtgtctaataattccctttcatgttcatcttttttatgatatggatggatggatacatggatatttggcg

SEQ ID NO: 118106 - DNA, 567 bp, Glycine max
  unsure (1)..(567): unsure at all n locations
  Clone ID: PAT_MRT3847_77659C.1
ggctcgaggttgaaaacgttagagagtccgggagctttgcaacaagcatggagacagcctcagactatggagcattcatggagaaattcactttaccaccaaattctgcaccctctcttcctcttaattcactcacctttgcagtcaaagagatttttgacgcggaaggatatgtgaccggtttcggtaatcctgactgggcaaggactcatacagtggctacctctactgctccaacagttttggctctcctcagagcaggtgccacttgtgttggtaaaactgtcatggatgaaatggcttacagtataaatggagagaatatacattatggaacacctagaaatccttgtgcacctgaccgggttcctggaggatcttctagtggctctgctgttgcagttggtgctgagcttgtggacttctcattaggaaccgatactggaggaagtgtaagagtgcctgcatcatactgtgggatttnttggttttcgcccttctcatggtgctatctcagaatcaggagttatccctatgtgcganagttttgacaccgtggcatggctg

SEQ ID NO: 118107 - DNA, 292 bp, Glycine max
  Clone ID: PAT_MRT3847_7765C.1
ccatgccagcccttcctgctgcctccctcctgtctggctcctggggcccatgcttagagcccaggctccagccctgagtgcttccgagctggcggactgcccaggggccatcagaggatggtggtgctgctgctgatccggggaccgctgtcttccctcccatacgcctttcatccctccttctagggcctatggcagttctcccaggatgtgtggcgagacctgggccagcccacagcgttcctagtcaggcagccacaccttggtcctcatcttggtcccttccaatctg

SEQ ID NO: 118108 - DNA, 2781 bp, Glycine max
  unsure (1)..(2781): unsure at all n locations
  Clone ID: PAT_MRT3847_77660C.1
ggctcgaggaggaactttgcaacaagcatggagacagcctcagactatggagcattcacagagaaattcactttaccaccaaattctgcaccagctcttcctctcaaatcactcacctttgcagtgaaagagatgtatgtacttcacttttctttttgtaccacaatattctgattgtcaaaaactctcctttgctgacatcaaagtcgtcaactagtctttgaatccatgcttctgcatcttgaacttgttttggaagtgtttgtgtcaaacagtttcgacacggaaggatacgtgaccggcttcgggaatcctgactgggcaaggactcatccggtggctacctctactgctccaacagctctggctctcctcagagcaggtgccacttgtgttggtaaaactgtcatggatgaaatggcttacagtataaatggagagaatatacattatggcacacctagaaatccttgtgcaccagaccgggttcctggaggatcttctagtggctctgctgttgcagttggtgcaaagcttgtggatttctcattaggaactgatactggaggaagtgtaagagtacctgcatcatactgtgggattnttggttttcgtccttctcatggtgctgtctcagaatcaggagtaatccctatgtcgcanagttttgataccgatccacgcgtccggtttgccagggatccaatgattttgagcagagtaggaggtgtaattctacagttaccagatgtagctccaccaattagacctacttccattatcattgcagaggactgtttccagctttcaagcactccatttgatgtagttacaggaactgtcatcaaagcggtagagaagttatatggaggggatgtattgaagcctgaaatccttggagactatgtgaaaaccaatgttccaagtttgaaacatttcatgagtaaagataatacagaccaaatatataacattccatcactggctgcactttcaagtgccatgcggttgcttcaaaggtgtagctcaccatttaatccttagctttcagtaaggataattgtaattttccagcgggtcgtggattgcctttgattgaaatttgattctagttttatttgtcatttgtaatgtaggtttgaattctagaataaccatggtgaatggatcagtgcagttaaacctgatttaggtcctggaatatcagaacgtgtatcagatgccttaaggacaacaggggagaacattgatatctgttattctataaaaaaggaactacacgatgctcttgcggctcttcttggggattttggagctctcatgatccccacagttccagggcctcccccaaaactacaaacaaatacatctgacttggaaatttttcgtgcaagggcttttagcctgctgtccattgctggagtttctggattttgtcaggttgtccctttctttgtgtttttatgaagcacttagattcctctattttccttaatttagtaaacttcagtttaaaattgtcatataccaatgtagtttccctgacattctgtagcgggcgctttccagcatgcatggagacagcctcagactatggagcattctcacagaaactcagtagtgaacccagatttaggtcatggattaacagaacgtgtatcagctgcctaatggacgacatgtgtgtccgttgctatatgttttagtaggataaaaacgttagagaagaactttgcaactcgcctggagacagcctcagactttggagcactcacagagcaattgcctttaccacaaaattctgcaccggcttttcccatcaaatttctccctgtaggagttcatgggcttttcgacattgcaggatatgctagaagctccccggttgctgccttcgttgtgttttaatctatgactaggattcctccagttgccttttttgctatacttcagtttttaattgcttatatcaatccgattccccgacattctctaggtaagcataccactagggatgtataataaccttcccctatcaatttctctggtggccagacatggtgcagatagatttttacttcaccttgttgagagtctttatgacagcattaaagatagccatcagctaatcatactgcacgaagtgtaatatgactcccatcattttgtgggtcttttagtttaggtccttaaggtgggatggaagaaataaggagaatatcttatggcacatcattttatggatgtggtatgatgtaccagcgatctaatcagtatcatcattctaggaggtgtgattgaacagttttatgatgtagctcctcccattcgacttattctcgttatcattgcagaggactatttcacgctttcaagcacaccatttgatgtagttacaggatctgtcctcaaagcggtagagaagctatatggaggggatgtattaaagcagcatatcacagagcacaaactttaatctgactgcaaggatgtagatatgctttgagtatatatgccaaaggtgggagagaagcacaacctgaattatatggacacaaatcaaaggagggatatagtatgaaggaaattcttgcttatctgaatcctgtttctctcagatattatagagttcaattattcattaggtcatatcattctgattatgctagcttggctatgaaatcaaaaagtcacattgaaatttatactatagtacttcaatattacctttgtactatcgaagattgtacagctgctttcaaaatatttatagatagtttc

SEQ ID NO: 118109 - DNA, 1529 bp, Glycine max
  unsure (1)..(1529): unsure at all n locations
  Clone ID: PAT_MRT3847_77661C.1
acgtaagnctcggtatgntcggctcgagtagagtttggaaaacagaaggctaagagagaatatggagagtagtgagggaattaggtgtaaggtatgcgtgaccggcggtgctagttacataggctcttgccttgtcaagaagcttctgcaaaagggctacaccgtccactccaccctcagaaactttaaggacgagtcaaagataggccttctgagagggttgcctcatgctaatgatgagagactggtgttatttgaagcagacatatataaaccagacgagtacgagccagcaattcaaggctgtgagattgtctttcacgttgctactccctatgaacatcaatcggattctctgctgtttaagaacacaagtgaagctgcaatagcgggggtgaaaagcatagctaagtattgcattaaatcgggaacggtgagacggctaatttacactgcctcggtggttgctgcttctccgcttaaagatgacggctctggttttaaagatttcattgatgaaacttgttggacgcctctcaacctttcaatggggactcttcatcagtggtacactgattcgaagacacaggctgagagagagttgctgagttatggaagcggtgaaaatggtgggggattggaggtggtgagtttggcttgtggcctggtgggaggggatactcttctgagttacacacccttgagtgttacattgctttcctctcaggtacaagacaatgaagccgcataccagtctttgaagttcttagaagaattggatggaaaaatcccaatagttcacgttgaagatgtctgtgaagctcacatcttctgcgcggagaatccatcaattaatggcagattcttggttgcaagctcatatgcatcatccgcagaaattgcaaattattatcttcaagcctatcccgaattcaatttgaaccacaagtatttggaagggccaaaaagggatataaaatgggcgtcaaggaagctgacagacaacgggtttgtgtacaaaaatgacctgaagatgatattggatgattgtatcagatgcgcaagaaggatgggcgacctctagtttttttaattctgaaagcttgcatgcggatcctctcaagtttggagtccttctacaatctgcatcctttcttttgcaaattccatccactgcattaatgacatttacggttattaataaatttgtcccttccaatattattttaaatgtatctattatttactttgacagtggagaaacagattttttttttaatcaattgataaattatgatatatattaggatgaaaatttgaaatagaaaggatccagattgttatcggactcgaaccttgaaaatacttgtggtgcaaattgaattcttgataggcttgtagatattaatttgcaatttctgcggatgatgcatatgacctttcaaccaagaatctgccattaatttattgattttactggcagaaaattgtagctttacaagcatcttcaacgtgaactattcggattt

SEQ ID NO: 118110 - DNA, 614 bp, Glycine max
  Clone ID: PAT_MRT3847_77662C.1
tttctttccacgcgtccgagagtttggaaaacagaaggctaagagagaatatggagagtagtgagggaattaggtgtaaggtatgcgtgaccggcggtgctagttacataggctcttgccttgtcaagaagcttctgcaaaagggctacaccgtccactccaccctcagaaactttaaggacgagtcaaagataggccttctgagagggttgcctcatgctaatgatgagagactggtgttatttgaagcagacatatataaaccagacgagtacgagccagcaattcaaggctgtgagattgtctttcacgttgctactccctatgaacatcaatcggattctctgctggttggttaaataaacatcaatatcaatgcaattggagtatactatatattttgaccaatttttcttaggaatttaatcacctatatatgttgtgctaatttaatcaccatatctgtattattaattgaagtgaggattaattaaatattgatggcatacatgcatccatagtttaagaacacaagtgaagctgcaatagcgggggtgaaaagcatagctaagtattgcattaaatcgggaacggtgagacggctaatttacact

SEQ ID NO: 118111 - DNA, 1189 bp, Glycine max
  unsure (1)..(1189): unsure at all n locations
  Clone ID: PAT_MRT3847_77663C.1
tacggctgcaagaagacgacagaaggggggggttcctgaggtttgttgtcgtttgagaggattcgatcggcgaatcttgttttcgacctcaaattgaattcaacagtgaattgctggaaggaaaagggaacgaaccaaaaaatgggagacacaaaccacgcgtccaccgtcgatgacgatttgctcctcaaaaacttcttcgccgaagttagcgaagttgaaagggataacgaagtgcttaggattctctcttgttttaagttgaatccttttgagtatctaaacttatcatttgattcatcaattgatgatgtgaaaaagcagtaccgcaagttatcattgatggttcaccctgacaaatgtaagcatccgcaagcaaaggaggcttttggagcattagcgaaagctcaacagttattactggatcaaaatgaaagagattatattcttagccaagttaattcagctaaagaagaacttagagcaaagaggaagaagcagctgaagaaagatacagcttcaaaaatgaagtctttggttgaagagggaaaatatgacaaacaatatgaacaatcagaggagttccggcaggagctcaaagtcaaagttcgcgaactattaacagaacaagaatggaggagaagaaaaatgcaaatgaggatatctgaggaggaaggccgattaaaaagggatgaagaggaacagaaagaaatgtggaaaagaaagcgtgaacatgaggaggaatgggaaggaacacgagaaaagagggttagttttctgtgacttaatctttaaatgaaattttatacatcaaactgcaatttgtgatgtactgattgtgaaatttataatgaagctatgaagtcataccagaatatggccaaaatgctgttcttgttctacatatactttctgggtatctgtatacatttagtgtcagtgtggcagcatatcaggagaaaatattttgttaagaaaaatatttgaactgaagacacatcactttggtangggcaaagcaaactaatctactaccgtttgcaaaggctgatttcaattccatggtattggaatgggtactaacccacctaggggggaatacttggggcctttggcctatgcatctttggttaaaaaccttgggaaatcattttttgggggggtcattgaatttaatgaaaggtttttt

SEQ ID NO: 118112 - DNA, 260 bp, Glycine max
  Clone ID: PAT_MRT3847_77664C.1
tcgctaacagtaacagggtaaagagtaagcgaaaccctacgcgcgtgttccttccggtgaaactatcttatcctctccgggatctgaatctgagaaatttaatgcactactacttcttctcgagaaggatccagaagaagaagaagaagaagagccacactcaccgccaatgagcaacatccgtcgctgccagaggattctcatcctctctctcttctttctctccgtcgtcgctcctctcgtcttcgtctctcaccggc

SEQ ID NO: 118113 - DNA, 341 bp, Glycine max
  Clone ID: PAT_MRT3847_77665C.1
ttcatatgcacgttcttattcactctaataccatctctaacaactcccaacaaaaataaataatggtttaaatttgggggaacaataagggggaataaacattgggggaagcgtgctaaaaagagagggtagaaaatatggtggcggatgatatgatgctgggcattagaggcggctatggtggttgcttttcttatgcttattccaaagcgtattcaataaggtcagaaaaaatcttcgaagatctatccctataaatatgttcagaaaaccgttcttttctcttttatggactcgatgatggaggtgaagggcttggcccatggctttggccgtgattt

SEQ ID NO: 118114 - DNA, 281 bp, Glycine max
  unsure (1)..(281): unsure at all n locations
  Clone ID: PAT_MRT3847_77666C.1
acaagccccccagcgagcagnccacnaccgaacccancacgagcgcgaagcnggnggcggaggcggcgcagncggcncngaagagcgacagcgacaaaggggacaaggccaagggggcngacgcngccggcgancnncncgacgcggcggggaagnanggaaaacggggggacaaacaaggcaaagggcaanangnngacaaggcngcngannancngcanaannaccagggnganaanaccacggcnnccccacagccggcagaggncaaaggggaagaa

SEQ ID NO: 118115 - DNA, 1454 bp, Glycine max
  Clone ID: PAT_MRT3847_77667C.1
gctccccaatgtccacattacctccagtaactgccaagcctgtagcatttcatcttggccaacttcctccatcgggcagtgttgctcaaaggttttcatatgtgggtgatgaacaagtacaagtacaccagtttccccaaactgtggatggcctgttacatgcattggggcttcaaaaatatgccattttttttaaggctgaggaagtggatatgactgcattgaagcagatgggagaaaatgccctcaaagagcttgggattcctatgggtccaaggaaaaaaattttttttgcttttttgccccgtaccaagggtcaacaatgatcgatgtttatcctgcatgatgctgaaactgccattattggaaccccagtctttacatttaattttattttttataatttggatgatggtaaagcccagatttgagaatgttttcgaatataaccccccttgtcccttgtagggttcaagtaatatccacagcaaaaacatcagaaaccctattctgaatcaacagtgccaagaccttcctcccttggagccacaatttgtgagcaatcctatgagcctgacatgccaaaaaacccttgaaattcagcaagcaatgcacataacttatgcaagcagggtccctctccttaacagctatcaaatcatccttcacagcacctacgatgtcatcatctccatcatcaaccaaaacacccatgaaaaggtcaaaaagggtgctgcttggaaggctcaagctgctcaaatttgtggagaggtggttggccaaggcactctccaaagatttgtgagacaaaatggaactgaaatagtagctggataaaattggttcttgatcaacatctaaccttgcctcctcttgaatcttcaaccaaagatcaacaccctccacaacctcaacctcaatatcatcattatcctccacacatgtgtcaaactcctccacgcgtgtgaaggcagtgtcacgattcttgcaaatgggtatgcagggaacgcgatcagagaaagtgggtcggcagaatttcatgtaattgaaggaatgatcatcggattgggacccgttaggcttccgagaaagaggggttggggcatcaacacaagtggccatggagagagagaaagggtgaattgaatacaaagattgaaactttgggggatgaagaaaaatgggtgtgaattggattggggagggagtgagaggggaagacttatataagggggaagtgaggaagcgccctagagccagaacattcatggaaaataggaaaattttccgggaaaaataatagtaatagattagaaattggagaaagggaaaaatgatttttatatgtgttgatggatgattgaatttgattgatgagttagtgaatgaatgggattcgtgttcggaaaggaagggctggttatagtcctggtcttaaggagattttggtttgt

SEQ ID NO: 118116 - DNA, 590 bp, Glycine max
  Clone ID: PAT_MRT3847_77668C.1
cacgcgtccggtggtcttcgatttaaaaaaaaaaaaaaaaaaaaaaaaaaaaaaaaaaaaaaaaaaaaaaaaaaaaaaaaaaaaaaaaaaaaaaaaaaaaaaaaaaaaaaaaaaaaaaaaaaaaaaaaaaaaaaaaaaaaaaaaaaaaaaaaaaaaaaaaaaaaaaaggggggggccgtttttaagggtcccatttttccttccggggcctggcaaaaacatcctttttttttggggcccccaaatttcatttcttggcccggggtttacccccattggacggggaaaacccctggcttcccccacttaaacccctttggagaccacccccttttcgccggtgggcataaaaacaaagggcccccccccggtcccctttccaaactgtctccaagctgaatttgaaatggggcccccccttttccccgccccttaagcccggggggcgggggggtttccccccagtcggcccgtttcctttccccccccctttgcgccgcgccttttccttttttcccctccttttccccacaccctgggggttttccccgtggacgttttaagcgggggcccccctttggggtcccggt

SEQ ID NO: 118117 - DNA, 444 bp, Glycine max
  Clone ID: PAT_MRT3847_77669C.1
gcacacgtacgcaagcattgaatttggctggagctttatcatgacaacattgttttaagcggtggaagtcaagagaagttgccagatgaaagacaggggtaatgctcataatggctgacataggagccactgcaggaagccctatgcaacgagtaactggaaagggacaaactattggactctgagactgatgctgtttgtgatgcacactcaacggacgccatttaattttgccagataatcttaggcacagggcaaagattccaaggctgcatgacttgtccaacctttacaggacatgcttcggctgggggtgcagatgcttcctcgctcgccaagtctggatctttggagtggaacaagttgtccccacttttcaacgctcagtaatgcttactatgggcaatatttcgaactaccgcagtgggtcggtttccgacagca

SEQ ID NO: 118118 - DNA, 366 bp, Glycine max
  Clone ID: PAT_MRT3847_7766C.1
ataccgacatagacgaaaatggctcgagggaccagacgaccctttctcgtaaccgggaaatggtccggctatcgagcgtcccatggaccgatgagtgtattcacttactactagagaaacacgggccggtgattgtatgcattcatggtcttgtgacgctaacagatataattactcatacctatgctattcgcgaggtgatgtacctaaaactattgtagtaggctgaagttagagaatacagtatatgtgcaaataggtgcatagatctgtataattgacatgatgaacaactgcgtctcgtctgtgtaacaaatataggttgcgcgagaataatcagagccattggacatatatacatatctt

SEQ ID NO: 118119 - DNA, 860 bp, Glycine max
  Clone ID: PAT_MRT3847_77670C.1
tattcattgattcttagagttcttccttccttccttccttatttgtttgtttctttcttaatgctccaagagatcaataggtctaaacaaaaatgagttattgcaacaactttcatcatttaacttcaaggaattaatgagttattacatgcatgcgtaaataagaaaaatgagcatgcaaaaggagagtcctcttattagactccacagtttcgaccaaggccatgcatggctagctctactgcaccttctcattcacatctcaccggcagtaaccggtcagccggtaaccccgccggtgcaacccgacagcaacaaatccgtgatcgccatcatggccatcgtggtcatcatgttcctcatctcagccttcctctccctctactcccgcaagtgctccgaccggccggtccagacacgtggcatcctcgacctcgcgggccccacgggcgcagccggtaacccgttgcaagccgaatccaacggcctcaatcaagccaccatagaaacgttcccaactttcctctacgccgacgtgaagggtctcaagattggaaaagacacgcttgcatgcgcggtgtgcttgaacgagttcgaagacaacgacaccctccgcatgatccccaaatgctgccacgtgtaccaccccgattgcattggtgcgtggttagcctctcattccacgtgcccggtgtgtcgtgccaaccttgttccacaaccagaagacatgaacacgaacacgaacacgaacatgccttcaatcttgtccattcagatacccaatgaagaagaacgtgaacatgaacatgaacatgaatacgaggctgttattgttggtgagcacataagaggatgttgac

SEQ ID NO: 118120 - DNA, 380 bp, Glycine max
  unsure (1)..(380): unsure at all n locations
  Clone ID: PAT_MRT3847_77671C.1
agggcttttcaaagtttgagtttaccatctacacatattccctacaatangataattctgaagctttattccaagtttttgccttctccttcttgtgctcatatcaaacccagaataatttctacctcaactcttccaatggattcctccgcttcttcccactcccagtcacaatatgcacacagcgataaatcttaagcacgcactgatactattgactataaatctttaaccaatgaacagtgtcataaacctctcacaaatgaacatttctatattactcttcagaagggaacttaaacagctttcactgtcgaatactggaatactaaaacccccgtgatttaccattgtatatgattccacacacctttattcca

SEQ ID NO: 118121 - DNA, 176 bp, Glycine max
  Clone ID: PAT_MRT3847_77672C.1
cattacgcatagttgttaagtttcgttcagagtcacactcagatcctatcctgggttgggcttcaaactgtttagcattccagaggcggcaccttttattgcctttctcagattcaccacccactaattcaatttctcgccccatatcagcgctttcatcaccaactatggtgttt

SEQ ID NO: 118122 - DNA, 354 bp, Glycine max
  Clone ID: PAT_MRT3847_77673C.1
aaatttggatggaccccccctcccccccagggacaaaggatttaccctaacaaatttgattttaaaaagctggctatcatccctggttattgggatgcccctccaccgtcgggaaaactttaaaaggttttttcatttttaagcaagggctaaaaaagacccggggttggtcaaacagacactgcttggttgggctgggactttccatacccaacccctggcctccttgattggggaaactgtaaaattttttttcttagcctttaaaaaaaacctcaaaacccttctcaaagggatttacagacctgggctccaaaatattgaaaagggtgggccccggttccaaccggggac

SEQ ID NO: 118123 - DNA, 424 bp, Glycine max
  Clone ID: PAT_MRT3847_77674C.1
gaaaaaaaagcccatcacatgggtgggggttccatttttacaacttaaaaaatatggcccctttctttagttggggaaactaaccttacgtagttgcaaatttaagttttgaacaagtcccccaactgccaaaatcccgattttttacaatttccagagaaattttccccctggccttgaggggaaaaagctttttgacctttttgccaggcgttaacttaaatttacccccggggcctcctttgaaggctttggttttggaccctaaaaaaggcccctatgctgggggattccctaaatccgcaaggagccccttgaggattgcccccaccttggctcctcaaagctttgggtggggcaagcttttacacataattccccccaaaaaggcaacctccgttgaactggatcaatttttttgtca

SEQ ID NO: 118124 - DNA, 1418 bp, Glycine max
  unsure (1)..(1418): unsure at all n locations
  Clone ID: PAT_MRT3847_77675C.1
ggctcgagctctaagctctgaccccaatttctgtggcggctctctctctacttatttttctcttctgagattgagattgagatttggatccaccctcttctccttctcctttttctctgatttgatcttttccttcttcttcttttcattgggttgggttggggtcttcagcttcaacttcaacaacaacaacagctatggttacccaacaacagccacagccacagcttcaggtccagcccacaccaccctcttcgcaagatgaggccttgaagaggaacaccgattgtgtctacttccttgcatctcctttgacatgcaaaaagggaaatgaatgtgagtaccgccatagtgagtatgcacgtgttaatcctagggactgtcggtattggttgagtggcaattgcttgaatcccaaatgtccatttcgacatccgcctcttgatggcttgttaggaacacaggcaacagcggctggtggaccatctgtacccccatcacagattccaacagcatctgcagcacatgcaccttataattccagtaaacaagctgtaccttgctttttcttccaaaaaggactttgcttaaaaggtgacagatgtgccttcttgcatggaccacccactcctacttctagcacgggtaataaagtagctgctcaggttccagtgactatccaaggagttgagaatccatgttttaagaagccttttgtcagcaatgaaaagtatactcaggaaaggaaaacttcccaaggaaattttgcaaagtcaggtggaatttctgaagctaaaccttccccaaaaattgaaactgctcctcaaagaaatatgtttgaattggagaagaaagtgccaccaccatctgcagaattcaataatgaggcttctagatttaagacaatttctccaccagtgaccaatgggcccattgtggcccggtcaaaccgtctgcaccaagctcgtgtgccagatgatcacaatttccagagtggcaaggacagtgatgagtttctcagagaatcatctcctgggtttgatgttcttgtagctgatgaacttaggaattctgattactaccatggggaagatgaattcggtaaagcaagaggtcaagatgaaaggaacttagactctttgaatgaatatgatttaggacattctggtgattatagtttagcagctgatattgatcgagaaagattccgtgggcctcaaggttatgagtcatatgatcacatgcaggagccatatgcttgggagcagcataggaagccctcatcccatttaggcaggaggactcgtcgcagatctgacagtcctgaaaatgctgaggtctcagatctacgacatcatttatccaagcgcangaaggggtatggttgaagtcgttatcagcatgatcatgcccatggg

SEQ ID NO: 118125 - DNA, 334 bp, Glycine max
  Clone ID: PAT_MRT3847_77676C.1
gagaagtgtccttgtgtgctacatgcacttgcagtcttacatcctgacatcgaatattcagggatcaaccaacaaccacatctcattaagatatactatctgtggtagatatcttgatagaggatccattcatctacatatgatgagctctagaatagcagatctatcttgagacacatgtacatatccaactgtaccaatgtgcacttctatggcacgtgctgctgatgataactatgtattatgctatgatcacaacgcttgaacctgaccagcagatatagcttgtacaataagctaaacatctagtctataggaaccatctggcactatg

SEQ ID NO: 118126 - DNA, 750 bp, Glycine max
  Clone ID: PAT_MRT3847_77677C.1
atgtcagaacaagaaaagaatcaacaccactatcgtaattcttcacagaagcgacacacttttccatggattaaaacaattattgttgcaataatcgctggaattattggagcacttctcgtcttaggtattggtaaactcctaaataaaaatggttttaacaatgaaagtgctactgttcatcaagtttcaaatagtcatggtggcaatcagttagatggtaaaagtaatcaatacaaatcagtacatgacatgattaaagacgtttctcccgcaattgtcggcgtgataaacatgcaaaaatctacaaaccttgatgatttattcaacggtaaggcatctaaatcaaaagaagcgggaattggttccggtgtgatttatcaaataagtgaaggttccgcatatatcgttacaaataatcacgttgttgatggtgcttcggaaattaaagttcaactacataattcaaaacaagtagatgccaaattaataggtaaagacgccctaacagatattgctgttctaaaaataaaagatacaaaaggaataaaagcaattcaatttgctaattcgtcaaaagttcaaacaggagatagtgtttttgcaatgggtaatcctctaggattagaatttgcaaattctgttacatcaggaattatttcagctagcgaacgtacaattgacgccaatacttctgctggtaatactaaaagtaatggtttacaaaacagacgctggcataaatccccg

SEQ ID NO: 118127 - DNA, 338 bp, Glycine max
  Clone ID: PAT_MRT3847_77678C.1
acggaacaggggcccataatttattaaagcccccaaagaaaaaaccacatccgggaagttttttacatgaacttgtcgtcccccagttgaaacaccttaaagggaaattctggccctttttggaacccattttattccatattgctcgatagccgccacctacattgttcaaaggtgaaagatccactttatgtgttacaggggattaggaattttaagggtcctgttttcgcctctggggcctccaagaaaatccttccattggcctccaatgaacccaacaatgtggtacacctgccttatcagtttttttatcggtgacgctttttataaaaccc

SEQ ID NO: 118128 - DNA, 358 bp, Glycine max
  Clone ID: PAT_MRT3847_77679C.1
atttattctgtttgtggtctcactagctagaaacaacatcactacacacaaatggcacaagtgagtttgttgatcgagataactagaaacagtgtgatgaaaatgaaggtccttgttttcttcgttgctacaattttggtagcatggcaatgccatgcgtacgatatgttccctctccgaatgaacaccatgggaaattaaagagtgtgagagtgaatacaagatgaggtttgatatgcctgggatgaacaaggaggatgtgaaagtgtgggtggaggagaagatgcttgtggtcaaggctgagaaggcacaaaagaagaagccagagaatgagattgtggaattacaacaagaaaag

SEQ ID NO: 118129 - DNA, 765 bp, Glycine max
  Clone ID: PAT_MRT3847_7767C.1
atttttccaatagaggagccaaatgtgtgttgctgattatcagctcactaaatgattatggcttcgcacctccggctagtgctacttgatgtatgaacaaagctgctttgtcggggtcaagtcggttgatgtggtcaaacacctcgctgacatctacaagggtgatcgtgtgcttgacgtttgctctgagatcaacgtagtcacattccacgtccctagtgaccccatcttgatagccttgagggtcgagactcgtttgcagatgccgcagacggtgacattgttggatcagaccccttataagtcgaatacctttgctcaacttgtctggaatgaccagacaatcttttcatacatcgaacgtcgtatagatgtacgaccttcccgacggtgaggtcactcttcatctcctacaagaggttcctgtgctcctatgccctattattgacatcttccttggtgatggatgctgatgctatccaatataccacctacaactcattcttgaagtgtgatgcccagatgcgtaaggatctctacgaaaacgtcgacctctccgatggaacaaccatgttccctggcattgctgtcgacatgcagaaggagatcattgccatctgtccctcgactgtgaagatattgatcttggatcccccggagagaagtactcacgactggatcttgggatcaatgctgaactccttctactagcttgagcaaatgtggatctccactgaggactacgacgagactggcgcgtccatt

SEQ ID NO: 118130 - DNA, 178 bp, Glycine max
  Clone ID: PAT_MRT3847_77680C.1
gtcttctcaaactgatgtcctcaaagtggggatgtcatgtcaagggagtgctggaccacagaacagggttttggaacaaatgcacggtggtgagacctttgacattgatctcaaggaacagaacgtgaccatgaaatgaaatgtggagccagatgaagttctgcaagccgtttccaag

SEQ ID NO: 118131 - DNA, 352 bp, Glycine max
  Clone ID: PAT_MRT3847_77681C.1
ggaatggctcgagctcagcagacacacttttgaaccgactttatttttcggggaaaaatgtgtttacaatttacaggcgaatagtctaacagagagcgggtataaggcaagcttggctggtcgaacctgatgggttggcgccaaaacgaggttttgtggtcggggagaaaaacggaggcatgatgctatgctgattggaaggaggctggaaagtacgatgctgcacagatggtcggttcaccagagcgagcgtgatgtggtgtcttgagactttctaaagttatacatctgcgatgtgaccgtgaaaatgaaactcttattaaattggtggttttgtgctgcttttgtgtgt

SEQ ID NO: 118132 - DNA, 261 bp, Glycine max
  Clone ID: PAT_MRT3847_77682C.1
tcgcgatctcgtcggcgatcgagcaaggcagtcgctggtggggggttttttggacatttcggggcccgaccccccccaaaaaaatttttccccaccaaccgagggcatgctcgccacgacagttctcagccggactggatcccaatggggcccggccccctttttttgttcccctccgggccgggcccattgaaacggcaccttccttttccaccagctgacctgggaggacccccaccatcactccccccatggttgaaa

SEQ ID NO: 118133 - DNA, 285 bp, Glycine max
  unsure (1)..(285): unsure at all n locations
  Clone ID: PAT_MRT3847_77683C.1
gattttctttttttttatggaacaacaactttagggccaatctaggtttatatcgaaatcctaacttgctattatgagctattctttgctttacttgaaaaaaaaacctggtaaaatagtcataccaaaactctattnggaatatcttttatctaaggggggaggatctttgnttatatgacagcctctaaaggactcaactgaaagttcccatggggggaataacattcctagagtgggaccaccccttgaagaatttgagagaccaagcggggggtccccccc

SEQ ID NO: 118134 - DNA, 405 bp, Glycine max
  Clone ID: PAT_MRT3847_77684C.1
aaaaggtacgaaaaaacggggcgggccacaaccttcgtccggtttaaaaaaacaacaaaaatttgacaccaacaccaaaacaaacccactgggatggtttaatttgtattctttctaatactgctttttgcataccttattctcatgccttaatggcttgctacttactacaaaccaattaagaagccaccattgtataagtttttagtgttacaagccaacagtgtacaaatcacctttttattagtcaaattcaccgttttacaatccgtaactcatttgtttacaatctattatataagatgccattatataataaaccatcttatggaaagtacccttacatttgaggacattttctatgttttaagcaaagcaatgaggtttattatctactttataaat

SEQ ID NO: 118135 - DNA, 1079 bp, Glycine max
  unsure (1)..(1079): unsure at all n locations
  Clone ID: PAT_MRT3847_77685C.1
ggaagtaaattactctctacttgtaaatggctctcatagtgtcactttcagcagaggttttgttctcaaacttttcattttgacttatgttctagtaattttagatgcacgagacttggcttctgaacagttttaagtcttgagtttgtggaaatcggtctccgagcttccagacttgctgtgtttcgatctgtttatccatccaccttcatcgaccttagcatctagagagatagtaaatttccactcgtatggtaggagattttcaagtgactatggagaaacagagcagttttcgggcatctacaatggaaaaacagaagagttttcgtggatttatggaaaaacagaaaagttttcgcattgttatggagaagcagctcagcttcatgggaagtgaaaggaagaagaacaaggaatcacctgggaaacgtggtgacttaccaattcatttagcagctcgggcagggaacttgagtagagtgaaagagataattcaaaactattctaataatgagacaaaagatttgttggcaaagcagaacctagagggggagacccctctttatgtcgcttcagagaatgggcatgctttggttgttagtgagatacttaactacttggacctgcaaactgcttctattgcagccagaaatggctatgatccattccatattgctgcaaagcagggtcatcttgatagttttgtttaaatttcagccaactaccatgggtgagaagcctggaggtgctgagagaactactgcactcctttcccaacttggccatgaccacagatttgtccaactcaactgctttacacacagctgcgactcaaggtcatattgatgtggttaatcttcttctggaatcagattctaaccttgctaaaatagccaggaataatggtaaaactgtccttcactctgcggctagaatggggcatttggaagttgtgaaagccttactcaaggatcgaacactggattaggatgatagaaggcaactgcctacacatgcttggaaggcaaaatgagaattttgctgaatggaaactgaccacanttggttgagatata

SEQ ID NO: 118136 - DNA, 369 bp, Glycine max
  Clone ID: PAT_MRT3847_77686C.1
tttctactttttttttttttttttttttttggggcaataccctttacccctccattttttgcctctcccaaaagaaagctatggcttaaaacaacgaggaaacggtggttaccaagcctccaacataaaaacttgttaggtaagcgcggacctatactttatttaaaagctgacacatgtgcatcatgcgttaaaaagctgggccgggggacaccttctgggaatgaaaacttggggaccttcctacctttgaaggggacctttgagctgtttcccgaggaaccaatgaccgaacaaactagctcatgaaaggccttatatatgcctttggctgcacacacattgaaaaaattgatctcctctggacaa

SEQ ID NO: 118137 - DNA, 228 bp, Glycine max
  Clone ID: PAT_MRT3847_77687C.1
agacttgcaagcccaaatctacagacggggtagtgtcacaaaaggattttaaaacaggggggggggttacctgcttttcccctatccagtgaaagaagggtggtttttatataacaacgagagttgtgcagggggggatcgcaagaaaaaaaaaacttaaacttgtaagattgcgcaaaatgaacctaattttgcagacctacgtgggtgcaaccatgccagaatttt

SEQ ID NO: 118138 - DNA, 264 bp, Glycine max
  Clone ID: PAT_MRT3847_77688C.1
ctgctccatcatccgtcaacccataatgttggcgctcaagcctctcccctcagatctctccctccgcccatctccggcgaccctcgccatcaaccgccgccggaggatccagttcccagcctccgtgcggcgaacgtaggatgttacaccggcggtcagcggcggagacaagagccagacgacatcgacgacgacgacgtctccttcgttggacagcaaagagaggaaagggaagagttcagtggcatcatctggctctggcat

SEQ ID NO: 118139 - DNA, 349 bp, Glycine max
  Clone ID: PAT_MRT3847_77689C.1
aatatatcaatttacaggggaggcttataaattatattacataatgagggtagatccaaatatgtgcaatgttcaagaggccagtgtccatagacaaaatgcaatacgtgttgtcaataaatgcctgaatgtctggccataaaatacaaccaattatcatataaaacccttcaagacagcaccaatggaatgtataattattataacatatgctaaaacttctgtcttacagaagcaattacaagaatgccctgtactgatgaaacaaattgatataattggaaaatacctcagggtgagaaacattactaactaaccgatatggcatggcatattttcctgaggaaat

SEQ ID NO: 118140 - DNA, 254 bp, Glycine max
  Clone ID: PAT_MRT3847_7768C.1
gggagattcagctgggatcccgagtcaaaaactccaaccattgatgaaatagagttcaatgtcaagaggggaatgaaggtggcagtttgtggatctgtaggttctggaaagtctagtttgctatcaggaattttgggagaaatatataaacaatctgggacagtgaagaccagtggaacaaaggcttatgtgccacaagcagcatggatcctgactggcaacataagggacaacattacctttggaaaagagta

SEQ ID NO: 118141 - DNA, 370 bp, Glycine max
  Clone ID: PAT_MRT3847_77690C.1
ttggaggcagaacaggatgcaaaattcatattgacagggcacagcttgggaggagccttggcaattctgtttgctgcagtgctcacaatgcatgatgaggaatggctgttggaaaagttagaaggggtttatacctttgggcagccacgagttggggacaataagtttggggagttcatgaaggacaagttgagaaagtatgatgtgaggtatatgacgtatgtttactgcaatgatgtggtgcctagggtcccttatgatgaccaaaccctcttctttaagcactttggttcttgcctctacttcaacagcttgtaccatgggcaggtatgaacagtgtgaaaatagtgtatgatttcatatttgtgtt

SEQ ID NO: 118142 - DNA, 1028 bp, Glycine max
  Clone ID: PAT_MRT3847_77691C.1
acggctgcgagaagacgacagaagggggtcttggtgttggtgtaattgcacctccaaaaccaaaaccaaaaccaatttcgttacccttttctaaccacccgaaacaacaaacggcctttggcagatttaccttcttcttggtaatttcttcttctctccaaaataattaaccaaaccattattaatggggatattgtatggaatggtggcaagggggcaggtggttctggctgagttcagcgccacccagagtaatgctagtgtagtagccaaacagatactcagcaagatcaatcaagggagtgataacaataatgattccaatgtttccttttcccacgatcgctatgtttttcatgtcaagaggacagatggcctcactgttctttgcatggctgatgatgcatttggaagaatagccccttttgcatttcttgaagatattcataaaaaatttgtgaagacgtatgcccgtgctattctttcagctcctgcctatgccatgaatgatgagttctcaagggtcttgaaccaacagatggaatattactccaatgacccaaatgctgacagattaaaccgtctcaaaggtgaaatgactcaggtgagaacggtgatgatagacaacattgacaaagtgttggagagaggtggtcggttggagctgctggtggagaaaacttcagcaatgaatagcaattcgattcgtttcaaaaggcagtcccgccgttataaaaataacctgtggtggagtaatgttaggctaacggttgcacttgttataattttcgtcattgtcgtttacattatactcgccttcatctgccatggtcccttgttgtcttcgtgctggagataagatctgaaggctaatagtaaaaaaaaattgcactattttttgagaccattgaactacttatttaagttattcagaatataatttattgggtcaaccaaaaagggaatataatttattgatatgcgatcatttatcagatgttaccaatctaggcttgtgcatgttttag

SEQ ID NO: 118143 - DNA, 1816 bp, Glycine max
  Clone ID: PAT_MRT3847_77692C.1
ctcaacaacaacaaacaccaacgctgtccgaatccaacaagctccacctaaatccacgtccaatctcaccgacccatctcgttttttcttatcagtcttcaccgatccacacttggctacactacttaggtgattgtagcgaagaagtggacgtaaatttgcatgcagtgataggaggattcatatatacgtgggtgaaggacgttgatgatgacgatgaagaggttggtgagagtgaacagggatgcgattgcagcatgcatgacttgcccgctttgcaaaaagttcctcaaagaagccactgctatttccctttgcctgcatacgttttgcaggaagtgcatttatgacaaaattacagatgaagaattggaaaattgtccagtatgcaacattgatttgggcattgttccgcttgagaaaatgaggccagataacattttgcaagatttaaggaacaagattttccctttcaaaaaaagaaaggagaaggcacctgtatctgtctcttcagtactattaccagctagaagaaaggagagatcactgtcgtctttggttgtcagcactccaagggtatgtacacagtcaaccatgacaggaagaagaacaaaacctgcaagaaaggctagtggcctgcagggatctagtttatccattgagaagttcattaaaaaagaagaggaattactgtcgtttatccaaaatttattaatgaagaaactaggcctgaatagtgaggatgaggttgagattaaatgcatgggacatccagtgcttccttcactgcaggtgcaaaacttggttgactcgtggcttgatatggcggcttcaggacatagaattccagcaaccatgggatcctcagggaaagattttgtcatgatcctaacctatggtcggaaggtcctacacccttgattgtggttcccagttcttcccctttcacatttttatgctaaagtgctgaaagccaaaattaaggaaaagaagcgcaaggcaaaagttgaagaagaaaagattagcactgatcatgcctcttcagatacatcaaaacccaacaaattgcgaagagttcgccaaaaaaaggaacctgtttttggagaatctagaatatcacctcaggctgttctggatgctaccgacagaaatctcttatggaatgattcaatttggttctccttagcagcttctgaaaaccaggaaggagatgcacctttaccacaaattccttcaaattatgtaagaataaagaacggaagcatacctgtttcctttatccaaaaattattaatgaagaaactaggcctgaaaagtgaggatgaggttgagattaaatgcatgggacatccagtgcttccttcactgcaggtgcaaaatttggttgacctgtggggggttgatacagcgtctttgggacatagaatttcagcaaccattggatcctcagggaaagattttgtcatgatcctaacctatggtcggaaggtcctgcacccttgatcgtggttcccaattctgccctttctcatttttattatagcatgataaataaataaaaaaacgtcagagaataatcgcttcctcgtcaacgggcgtttttatgtagctgttgccaataagcacgcagttatgaggaaatctcctctcctgctagactgttgaatgtagagtagcatgctgttctgttggtcattgtagtgatcattggtctctgatttttctatagcatgtttttttgttttcatacttgttgctacagatggtttcttggatatttgacatttcaatttagatcgccttttcgtattaaaaa

SEQ ID NO: 118144 - DNA, 252 bp, Glycine max
  Clone ID: PAT_MRT3847_77693C.1
ttcttttaatgcatatggcgttcaaatcattatggaagcaatcggtacgcgttgatagacacagacggtgatctactgatgtaaaacgtgacttgtgaagatgggcttacattatatccatacaagtttcacatacgatagagtattataaagcagagaatggctcagctttttatttccaaggtaacgtcctaatcgagggcagcggaagatgagagcaggagcagccctaactgtgcaaggcacttgaaa

SEQ ID NO: 118145 - DNA, 309 bp, Glycine max
  Clone ID: PAT_MRT3847_77694C.1
tgagcagtggctgggtagaaaagcagataaatactgggacgataattttgattctcttacgttggacaaacaaaattgtgtcttcaaacctgaccatgagtgggtgcaatgtgacaagtgcagaaagtggagaatattaccttctgattttgatagcagaaaattacctgtgcaatggttttgttatatggatcctttcaaaggtcaatgtgcagatgctgaacagaagatggaacctggcatagttaatgtttccacgaagcggtcaggttatgattgcttgctgaaggattctgataatgaaaagat

SEQ ID NO: 118146 - DNA, 282 bp, Glycine max
  Clone ID: PAT_MRT3847_77695C.1
atccttcgtttccatgctccgcccgcggtacccgacgccgtttttaggatcgagagctcggccgcaaagactgaagacgtatcgcctatcgggggttacggcactaaaattgtggcggaggacttgataaggacggcggagcgcgtgattgtaatggtgggcaaagcggccgttcctaccgttgcacaggttgaggtgtttgattgaacggcggggaagaagactactacttcgacaagtgataataaagatggtagtcccgagctttgagttggtgtgttt

SEQ ID NO: 118147 - DNA, 588 bp, Glycine max
  unsure (1)..(588): unsure at all n locations
  Clone ID: PAT_MRT3847_77696C.1
attaaaaataaaacattgtaaaaaatattatcaataccctttgagtgaccctgacctcggatccaagattcccagttaaatttcatagatgaaaataaaagatattttattaaagatgatctgacaaaaattaatcatctatatggggatgatgaaaaaatatcattaatacattttgtgataattttttattaatttcttttatttattagtttattaatttcgtgttgttaatacctaaaggacaaattaacttttcttagagaaataatttgaaaaaatgaggtttaatgtggagtatggaatatggatgttggtgcgagcagttgggaggaccaagcattgaaatgaagacagggagaaaggacagcaaagaaagctatgcaatggaggtggaagacttgattccaaaccacaatgattccatgtcctcagtgctgtctcgttntcaagccattggcattgacgttgaagccacagtcgctcttttaggagctcactcagtgggaagaagtcactgncagaatctggtgcacagattataccccaccatagattcaacactggaccctgcacatgctgagtacc

SEQ ID NO: 118148 - DNA, 1961 bp, Glycine max
  Clone ID: PAT_MRT3847_77697C.1
attaaaaataaaacattgtaaaaaatattatcaataccctttgagtgaccctgacctcggatccaagattcccagttaaatttcatagatgaaaataaaagatattttattaaagatgatctgacaaaaattaatcatctatatggggatgatgaaaaaatatcattaatacattttgtgataattttttattaatttcttttatttattagtttattaatttcgcgttgttaatacctaaaggacaaattaacttttcttagagaaataatttgaaaaaatgaggcttaatgtggagtatggaatatggatgttggtgcgagcaaagacgacagaaggggatcacgattgccaaagagacaattcaacttaagagatcaatatggccaccaccactacccagcctccctctaatatctgttttttccttctgttgttgcttctagcacactttcatttgggcataagccaacttgagctgaattactactctaaaagctgcccaaaagctgaagagatcatcaaggaacaagtcacacaactatataacaagcatggaaacactgccgtttcgtgggtcagaaatctcttccacgattgcgtggttaagtcatgcgatgcatcattactgttagcgacggtgagcgatgtagtgtcggagcagacatcggatagaagttttgggatgagaaacttcaagtacgtaaacactatcaaagcagcggttgagaaagaatgccccttcacagtgtcatgcgctgacattgttgctctttctgccagagatgccattgctttgttgggaggaccaagcattgaaatgaagacagggagaaaggacagcaaagaaagctatgcaatggaggtggaagacttgattccaaaccacaatgattccatgtcctcagtgctgtctcgttttcaagccattggcattgacgttgaagccacagtcgctcttttaggagctcactcagtgggaagagttcactgcaagaatctggtgcacagattataccccaccatagattcaacactggaccctgcacatgctgagtacctaagacgtcggtgcccaacacccaatcccgatccaaaagctgttctgtattcaaggaatgaccttaaaacgccaatgatcattgacaacaactactacaagaacatcttgcaacacaagggtcttctcactgtggatgaagagcttgccactgacccaagaaccgcatcttatgtccaaaagatggccaatgacaatgaatatttcaaccaacagttctcaagggccataattttgttatcggagacaaatcctttaacaggagatgaaggagaaatcagaaaggattgtcgctacctcaatgccaattagatatataatataagcttgcatttgtgcatgataatatgtataattagcataagattataatgcacgagtgtgtcaaaataaagagggtgtggaacgtactgggcctgggttaccatacatattcagtgcaaaaagctattgggcctagccttatatatacccttgtgtttgctttgttcatagatgtgaatgttacttgacttcagctgacaaagcctcaaacatcttaaaggtttatgaagtactttgttcttcgctgtcgatctataatggaaaatgtttgatcaacatttcaaaaaaaaaaaaaaaaaaaaaaaaaaaaaaaaaaaaaaaaaaaaaaaaaaaaaaaaaaaaaaaaaaaaaggacggacgatataaaaaaaaaaaaaataaaataaaaaaacagggggcggccgttttaaaggattaaagtttacgggcgcgggtttgcaaggctttagtttttatttgggggccctaaaaaaaaattacctggccgtggtttaacaaagttgaaattgaaaaacctttggttttacccaatttaatcgaataggcccgcatcccccttttttcaattggggtaaaa

SEQ ID NO: 118149 - DNA, 292 bp, Glycine max
  Clone ID: PAT_MRT3847_77698C.1
tttttatatctaaatgatgcgcgcataaacagatctaaagaacgtgacgagttaaagcccaggcaaggtcaccattttttacccaccaacagttaagggtgctacacaagacttgcgatcaaaaattaacataacaaccaattgatcgcccactgaccatatcaaaggaaagcacgcatactactgccctaaaatgagtacactgctttgtgccacaaagcacaataccaataccctaagccagcccccccccaataaaattgaaaggcgtgatgatgattacctaactacc

SEQ ID NO: 118150 - DNA, 684 bp, Glycine max
  unsure (1)..(684): unsure at all n locations
  Clone ID: PAT_MRT3847_77699C.1
gatcatattgtattcttataatttaagaataacagtatccaaatttatttctatttcaatccatgacatcatgatattaaatcctaacagtgtatcgcatagattaaatgagtatagtggaaggggacagttttgattatatcctcaaactgtgtcatatatgcgattttatttcattaaggttgtgatcatgtgcttggtttatggcttcaatttaaacaaaaaaattcatatctagaacctgctctttgttgctatcaaccatagaagaaaagcagagaaatagttttgcaaaatttcatacaactaaagtacaagaaaagtggagcaggagaaaagaaaaagagaaagacctaacaaataactaggcctccctaagaaagaaaaaaagaagaccatgattgttactaaatcaaaccatgactaattgcctttgagcttcaattcttagatcttccttcatctttctaatgaaatcttcaaactttttgttcaactcctctgtgctcaacatacagctttcttcttcctcttctattctttcttcaatcagaatgtaatcagtttctgaccctttatcttcctcttcatcacctacatcnnntagctcagtttcttcatctagctcctccttcttctcttccttcaaaaccaagctacttcctttttcttctccttcatcta

SEQ ID NO: 118151 - DNA, 382 bp, Glycine max
  Clone ID: PAT_MRT3847_7769C.1
actatgcgagcgactatctgaggcgcagtctattgtgcaggccaagctacaggcgcaggcagatcaccacgcacaacagactcctgctatggcttctactgctgtttcgatggccttttcgatgaactacgacatgaacaactacaaagccttattcaaagccttattcataccgctaccaatacggacactattgacgacactggtcacgacaaacgccaaggctaacttcaatgcttatatgaatgcatatgcaaatgcaaaagtcacagcaggacttacaacagcttctatgacagcatctgaggtggctcatgctgctggatatgctgtttgatatgacctctagaactttctgatgaacattcttgttagcatgttt

SEQ ID NO: 118152 - DNA, 208 bp, Glycine max
  Clone ID: PAT_MRT3847_776C.1
atatattttttttccaaattttacaacaacaagcattaagatttagggacggagatcccccacccaacaggtcccactcatctaggataaaaaccaaatacaatgaaaaaagacacacgtacatagaactcgcatattagacaagggtcaaaaaatcaggccttcaattgaagaacctagcctccataagagggccgccataaaatgg

SEQ ID NO: 118153 - DNA, 764 bp, Glycine max
  unsure (1)..(764): unsure at all n locations
  Clone ID: PAT_MRT3847_77700C.1
cagtcacgcaaaagctgtggtgagagccaaggacagctaggaattggatcagtagtcactggctctgttcaaaggcatanaacncatatggtgccttcattgacattggtggaatcagtggcctccttcatgtcagtcagatcagtcatgaccgtataactgatattaaactgttcttcaacctggtgatattctgaaggtgatgatcttaagtcatgaccgagagagaggaagggtaagtctttccacaaagaagttggaacccacacctggtgacatgattcgcaatccaaagcttgtctttgagaaggcggaggagatggctcagacattcagacagagaattgctcaagcagaagctatggctcgtgctgatatgcttagattccagccagagagtggattaactctcagcggtgaaggaatcttaggaccactaacttcagacttgcctccagagggagtggatctgagtgaggtacccccagctgaagattcgtgattgagagaattgagaactgagtcctcttttcctcccctcccccccttttttttctttcttttatctattttttctttttacaccttactccaaatattgttgtagaaagatgaactaatgtagcggttctttttagcaactcagttttgtagtaaaggcaattgtataactctttattttctgtccaaattattgtgagaggttgtccctgttatctttagtcagattgacaatagtgaaaccagttcaaaaccagatttat

SEQ ID NO: 118154 - DNA, 328 bp, Glycine max
  Clone ID: PAT_MRT3847_77701C.1
ataagaatctgggaaacagatctggggtggatttctcaatgctgccttacaaaacatgcattcaagatcaatagacagtgcctggctaatggggcactaaaaatcaatgtgaagatgggaggaagaaacacagtacttttggatgctttaagacggaggattccacttgctagtgatatcccaacaataatattcggagccgatgcaactcatccaaaatcaggagaggattcttgtacatccattggtgctgatgtagccttccaagactggtctgaagtaacataatatgcaggactggtttgcgctcagcctcatcgagaagaac

SEQ ID NO: 118155 - DNA, 352 bp, Glycine max
  Clone ID: PAT_MRT3847_77702C.1
aagagacaatcactggggactaggaaataccaaacgggtgattgaatagacaggctatgtatcaagctgcaagtggatacttttcggcggcgatcgggaagacattttaacaccgaggcctgaactacaaaatcgaaaaccaagctctgaccaataaaacggatcaaaccacactacaacgacgcttaacctttgaaagaaagaaaaacaactcgacataattcagccagctggttgctgcctttattattacattctagacattcaccctcttaaaagacatccagtgggccgcgcgcacgaaaggggttgcttttgtggccctgaaccaaatgcattggcaaaggatcgt

SEQ ID NO: 118156 - DNA, 141 bp, Glycine max
  Clone ID: PAT_MRT3847_77703C.1
cacgtcaccctcctaacaacctcctctgaccctttcaacaactacaacgctactatcgtcacataacgacaccaagaccacaacaccctgctagccaacgtcacccactccttcaaaacgactaagactaaagttcacagg

SEQ ID NO: 118157 - DNA, 253 bp, Glycine max
  Clone ID: PAT_MRT3847_77704C.1
aaacatatatcaaaaaacgtttatcggcggctgcttaagcacggtataaaaacagttggggatctattgaaggagaatgaaaccaatccatcatctttgcaagaggtactaaggaagaaaacacctgccattcttgttatagtttcatttacttctatataatatatatagcttaaaagtataattcaatattagtaaaaattcatctctgaatcttttgttcgatctgcaacgatagaaatttggcaagatt

SEQ ID NO: 118158 - DNA, 273 bp, Glycine max
  unsure (1)..(273): unsure at all n locations
  Clone ID: PAT_MRT3847_77705C.1
gngaaaccagnnccaanncaactncgaaaaggtagaaagaaagannacaaatgagtgagtgagttacaaaatgaagagtgacgaagccatttnngccattatcacncctctcgcaccaaaagcgatgaagctctagttgcgcnntnctcgntntgataggnnacatnttccctctgccgtnacgatccccgaagcngcgagantctactgcctcgattgcnttcntcangtgattctgcttctctctctaaccaagtttacatnttaggagta

SEQ ID NO: 118159 - DNA, 405 bp, Glycine max
  Clone ID: PAT_MRT3847_77706C.1
gaattgggctgcgagatttttcgctactttggaatggagttctttgaggacatgacgtgatgtaaaggaattggggcgtgagctattttacctacctgaggtcctcacaaatgaaaattcaattgattttggcacaacacaaatgggaggaaagcttgatactgtaaagcttcctgcttgggctgaaaatccaattgattttattcacaagcaccggaaggctctagagagcgagtatgtatctgctcatttgcatgagtggattgacctcatatttgggtataagcaacgaggcaaggaagctgttacagcaaataatgttttcttttatactacctatgaagggacagtggatcttgataaaatctctgacccagtacaacagcgtgccatacaagatcagat

SEQ ID NO: 118160 - DNA, 592 bp, Glycine max
  unsure (1)..(592): unsure at all n locations
  Clone ID: PAT_MRT3847_77707C.1
ccacgcgtccgtgacaaagcacaatctacaaggccaaaagggcattgtgtggctgtgcgagtaactagtgaggaccctgatgatggttttaagcctacaagtggcaaagtgcaggagcttaactttaaaagcaagccaaatgtgtgggcgtacttctctgtcaagtctggaggaggaattcatgaattctcagagtcacagtttgggcatgtttttgcttttggagaatctagggctttagcaattgcaaatatggttctggggctgaaggagattcagattcggggagaaatccgtaccaatgttgattacaccattgatcttctgaatgcttcagactacagagaaaacaaaattcacacaggttggctggacagtagaattgcaatgcgggttagagcagaaaggcctgcctggtatctttcggtcgttggaggggcactctataaagcttctgctagcagtgcagctntggtttcagattatgttggttatcttgaaaagggacaaatccctcccaagcacatatctcttgtccattctcaagtgtccttgaacattgaagggaagcaaatatacgattgacatgata

SEQ ID NO: 118161 - DNA, 535 bp, Glycine max
  Clone ID: PAT_MRT3847_77708C.1
ataagttaaagacattcgacctgaaaccttttattttttgggtcgaagaaattagacctgatatctagatcacttgccaaaatttggcaatgtttaacaacgagacgagtgaaagcttacctactaaaatgtacttaaacaaagctagctccaatattcctgcatcccattacagggaaatcttgtatagagccgtgcaggtgaggaaaactttacgaagaatagcatttttggaattgttgttctccattggaatgcatataaaacaatcattgtgtccaccaatactctccactttttccaccagatttatgcataagtcttacatctgtaatggctatatcttttgaagcagccttacacatatcatacacggttaagcctgcaatagagactgctgtcattgcttccatctcaaccccggttttaccggttgatgcagcttccccttctattgttacactgaagtcctcatgattcaatctcaagtccacttgcacgtgtgaaaggcttatattatggcacaacggaataa

SEQ ID NO: 118162 - DNA, 905 bp, Glycine max
  unsure (1)..(905): unsure at all n locations
  Clone ID: PAT_MRT3847_77709C.1
agaaaccataatgctaatccagtaatccacaacgattttacattttacttttcatgggaagacggaaacaggacattcccctcttgacgtgacatgataaactataaagcatgtgcctaactcaatccaataagtctgcattttcaagtgatgctccccacagtaaatcaccgagtaaacatgcaaaactgaaaatgcaaaaatgcttgctatgatatcattaactgaaggcgtccaattgatagaactgaaaactttacccacaagtcctatatctctacctgtagcaactaagaccagccgcattaccatcactctaacctaatgtaattgtatggatgaaaagaatttttagctctcactgttagcaccagtttaggaaagcataacatgtaatacaccatgctacttggagacaaaacttcaacgacatagcaagccaccaatcaatcattgacctgttagaaactctttatctaagtcagtactattcctcacttgaatcatgaggcttaatctgtacggagctcatcgtaatattgaggccgcagcgtcccaaaaatgaggcaagggattactaccatgcaagccataaatagtgtaaacagaagaggaagtgtcaagaaactccatattggccacaaagcaaaggagaacaagcagaaggagatgattccaaatactgtggcgaatggcaacacagagatgcttgttatttcccatttttttaatccccatttttcatcaaaccttcgagcactccaggnccaaggtagttgtataaatgaaaatcattatanttcaaaccaataccgatcatcccaagatataanaggcggtcttttaatttcggnntgtcatggcacaatagatatatcaaattgggaaatgttgatcacccaaag

SEQ ID NO: 118163 - DNA, 361 bp, Glycine max
  unsure (1)..(361): unsure at all n locations
  Clone ID: PAT_MRT3847_7770C.1
gcaagcgcggagccccagagcgcgcgcgcccaccccccgttttaaaaacgcaagcacgcnacaagggaagggggcacgagcaaaaaaaaacccagccaaacaccgacaggaacagagacagacgaccacacaggcacaaaaaggcgagacacacggggacagcccccaaaacaaacacaacgaggggaccaaacaggacccgggagaacaccaggggaggaccaagaaccgagaaccttgacccaccccgcaaacgccaaaagaagcacgaaaaggacaacgcaagccggagacggggtccaaaccaagggccaaaaccccccaacaacgccaaaaaaggcacaaggcaagaccacaccaa

SEQ ID NO: 118164 - DNA, 674 bp, Glycine max
  Clone ID: PAT_MRT3847_77710C.1
catttttcttggatttattgctagctcacaaggagtgcaggttgatccatcgaaggtgaaagccattcaagattggccaacccccaaaaatataagtgaggtaaggagctttcatggcttagcaagtttctatagaaggtttgttagaattttttgcactttggctacacctctaaatgaaattgttaagaaaaatgttgtttttgaatggggtgatcaacaagagaaggcttttattgctttgaaagaaaagttaactaatgctcatgttcttgctttgcctaattttgctaaattctttgagcttgaatgtgatgcatctggggtaggcataggggttatgttgatgcaaaagaggcatcccattgcatatttcagtgagaaactgaatgggactgctcttagttattctacatatgataaggaattgtatgccttaattagagctttgcatactgggcagcattatctcttgcccaaggaatttgttattcacagggatcatgagttttgaaatacttgaatggacaaggaaagctgaacaagaggcatgccaagtgggtcgaatttcttgagcaattcccctatgtgatcaggcacaaaaaaggtaagaataatatgggtctctgatgcaattctctgcatgtatgcattaattgtctacacttgaaact

SEQ ID NO: 118165 - DNA, 697 bp, Glycine max
  unsure (1)..(697): unsure at all n locations
  Clone ID: PAT_MRT3847_77711C.1
taggttttcttttcctccaactgtttcctccaacactacacctacttttctttacttctcttctctccaactcaaacatttatttcttccttctccgacaagttctatatcttccttcctttcattcatctctcgttaatcaatctttacccttccctctttggtttggtatcaaccgtttctttcgtgttttctctagtgctacggaacccaaccaagttagtttgaaggttattgtgattggttgagtatgacttctcagctgaggaatggaagtgggagttcgagctcaagtttgaacagcatatttctggaaacagaggatgaccaaacaattgcaagcatattagcagaggacgaaaatctcagggcagagaacaagcttggaaagagactttcacatttagattccattccgcacactccccgcgttaatggacaaattcctgatgtaaacgatgcaacagcagatcacgagaggctgtctgaaaggttagttacatatggtttggcagaactacagatggagggtgatgggaattgccagtttcgagctttagctgatcagctatttggcaatcctgattatcacangcatgtaaggcgacaaggttataagcagctaaagcattacaaaaaattgtatgaaggttatgtaccaatggatacaaaagctacttgaagaaaatgaaaaatc

SEQ ID NO: 118166 - DNA, 384 bp, Glycine max
  Clone ID: PAT_MRT3847_77712C.1
ccgccgtcggctggtagtaattctggtggagcgttgccttctcgcatagtgtttgtacgcgcaactatcccaatgccacagcagtggtatgctaaataccgtatgatcttctagaatccacaaatccaacaaggttctagagtgccaaacataatatgtaactctacattaactatatagccactctctttatgagctgctttaggcgcccttaaatatacatgacgctccattttcactttagtcggtattaaggcgagaaatacttgttcactgtgcatacgtgggctgggagcacctgaacgacattgacctcgaaggctgtggacgacctaaagtacatggccgagagacactatgctatcatggggaagacatgggatg

SEQ ID NO: 118167 - DNA, 1100 bp, Glycine max
  Clone ID: PAT_MRT3847_77713C.1
aattcggcaccaggattgcaaccactgatctggctcaacatacactagagcaaattgaacctattcgcaatctttttgctgccctttttcttgcctgcatccgtttgctgattcatgttcattttctctggaaaccatgttgatattttggtagcatctgtaatattggtgattgttataaaaacaatcataattgcatctgttgtgaaaggatttggttacaataacaagacttctatacttgttggaatgtcgatggcacagataggagaatttgcttttgttcttctcagtcgtgcttcaaaccttcatctagttgagggtaaattatatctgttgcttcttgggaccacagctcttagtctggtgacaactcctttacttttcaagctaattcctgctgtagtgcatcttggtgtcctactgagatggttctctactgatagttcaatggagattggatataagctagataacctccgctcagatagtggtaagcagcggataattttgatggaccaagaatctcatgattcttaatcactgcactgcacgaagggatttccatttttgcacgaccatagttttgacaaggttttctaagtgttgctgaaaagaatttgatctaactgcaatttttctcgaatcatgcaaacccattccatgatggatattgcataccaaactgaccaaatactaaccaaggcaactcatccgaacccccaaaatggaaagaacaggggagaggaacgataaaagattgaaagaaaactgacaagaagtcgtacacaagaaggtatgtagaagatattttccagatcgtcaatttactttcgttttttaaaaaaattttggttggggttgctcataaatgtatgatatggtttgtaatttgaatagtcactgtcgttatttctgcaagcgtagttttaatgtatcaaaagttttcctttctagcatctatgccatcagttgtggctgggctttgtatatcttaggcaagtttgcatttgtgttttggacaaaatcaattgatacgtttaagtgtgtataaattataatagatgtcatacaaagtatccctttcgagaaggaaaaag

SEQ ID NO: 118168 - DNA, 164 bp, Glycine max
  unsure (1)..(164): unsure at all n locations
  Clone ID: PAT_MRT3847_77714C.1
gaaggagagagagagagacatttgtaacgacaagaagcagtacgtatagagggagtggtcanatcacggatcaggactcatgaatgtccattctgagacacacagtagcacagagagaaactccttgtagatgctcaatttgcaagtcaagatctgacatcata

SEQ ID NO: 118169 - DNA, 147 bp, Glycine max
  Clone ID: PAT_MRT3847_77715C.1
tttgagaagaaacacgcatgcaagaatgtcatgtgatagccccaacaacaacaaccggtaacatcatcggtatctgtgggagtttggtcaagcgaaaattgggggcaaatggggtgtccgataatcctgtgagccctggaaaagaag

SEQ ID NO: 118170 - DNA, 352 bp, Glycine max
  Clone ID: PAT_MRT3847_77716C.1
acatatttcaagattgccgaacacatatattttgggaactatgcagaccgaacgggtgctaatactgtgcctaacgactgggtccatgctgctatttacttggctcagtgaggattgcattactgggaaaggtaacacctctagcactagaaggaggtccactgatgtaaatgcaggagatactcgtgcaggagcaaagtatgccacgctcgttggagcctctaaagggtagataatgatgaatgggatgagaggggaatgtcgcgaccacgaccacgaccacaacaaactggaagtgatcctatgtgtcccggtgagaaggatgaagacgatgatgagggtcggcgtccaa

SEQ ID NO: 118171 - DNA, 345 bp, Glycine max
  Clone ID: PAT_MRT3847_77717C.1
cataatcagtagcacatccgtagttcaggatgcggaagccgttcactccctctctgccctccctctgcttgctcgtcttgacatgtgcacgcatgacgtatatcataaggagttctcaacgaatgctggatcaggcatacctacacgattagtctccgcacacagcattgagtccgcctgtagttctgagcacgacggtgtggctactgtgagaagcctgctctggattaggagacaagtgcttagacctagactaatcaggattggccggtagttatggctgcagctgatgctgctgaggagaagatcattgaccatgcgaaccagatctgatgtgaggggata

SEQ ID NO: 118172 - DNA, 174 bp, Glycine max
  Clone ID: PAT_MRT3847_77718C.1
acgcatctataataaaatgccgccgtcttttaatattattgccaaatcaaaattctccatctcaaaataaattcaaccccgcactacaaactacattatcttaaagcaaacgtttacatctacttgctttatagattaactgcagtgaaaatgaaaaaacccatttctttctta

SEQ ID NO: 118173 - DNA, 531 bp, Glycine max
  Clone ID: PAT_MRT3847_77719C.1
ggttggagcagcttaactcattacaagataagaatggtgaagatgtatcaaatatcaatgttcaagcagaaaaaagcctggttaaagattacttggttgaccataatgcaagatctcagaaaagaattataccagttcccagcccagcatccattgaggatatgagggcaacgatcatagagaactcattaaaattgatccaaacagaaagcaaaatcacacgtctggcagcatctccaaatagaactcctttcgcagacgtgaattcagtcaatgacgactgtagttagaaagttagttcgagtatgagtctccacaaagctcatcacttgatgagcaacactctctctggcatgggtatgatgtaaaatccagagaattaggtattattagtaatatgtaccttacgtttttctacctagtgtaaaattaaccatatgaattttctagtagttgaggtgtgctttctgcacgcaaatatgtttccccatttctctagaatcctcaatgcacatgattcttctttcttat

SEQ ID NO: 118174 - DNA, 346 bp, Glycine max
  unsure (1)..(346): unsure at all n locations
  Clone ID: PAT_MRT3847_7771C.1
cgacttacgcgtccgnaaattttagagaatcccaacggctggggcgtgggggggatgtcgaagaatancaacaagaggtcctgctgctccttgcaaagcggagactgggagagaccttgagatggggacttaaccgtttcaccattcactttgtttgggcagagcccatccgttcctcttctttactaattgctatcaagggggggggctgcgncatcgnttcttctccttgttttggctttatctgctgacacagttaacactctgacaatttnccagtgctcctggctcctggtgtcnagccattnnctttcntgtcacaccttgcttccctncttactgatat

SEQ ID NO: 118175 - DNA, 344 bp, Glycine max
  unsure (1)..(344): unsure at all n locations
  Clone ID: PAT_MRT3847_77720C.1
ctaatcctgtaaggcaattaccttcagaacctggcgttttaaaaggtacatgggggagtagacccccaaaaannataacaaaaagacagacccaccaaattgtggaggatattccaaggacctcttacgcagctcaataacgttaatcagctccctaccgaaaaaaatccttggagggaaaactttcctatcaaataaaatatcccctctaaattggaaaaagtctcctctactacagaccaactcccctagtggaaaaaccctcaaatatgatataatcggtgctggttcaaactttacataaaaaactaccccaaaaggaagatcaagaaaaacccaaaaag

SEQ ID NO: 118176 - DNA, 432 bp, Glycine max
  unsure (1)..(432): unsure at all n locations
  Clone ID: PAT_MRT3847_77721C.1
atcaaacttgtatattactccaggtgcactgatgctggaccatgagaataagaaggcggttgattccatgactacaagatggttggagcagcttaactcattacaagataagaatggtgaagatgtatcaaatatcaatgttcaagcagaaaaaagcctggttaaagattacttggtaaaattttctttgtggagttttttcatgattccttagttttatttatcttgtgaatttagactagacacatattgtaaagcttgatcttttctttatgaaaaggttgaccataatgcaagatctcagaatagaattataccagttcccagcccagcatccattgaggatatgagggcaacgatcatagagaactcattaaaattgatccanacagaaagcaaaatcacacgtctggcagcatctccaaatagaac

SEQ ID NO: 118177 - DNA, 363 bp, Glycine max
  Clone ID: PAT_MRT3847_77722C.1
ggaaaaataaaatgcttggggtaacacgtggataataagccgtcccgcatccatatctccatgtgttataacaggacatgcgtccataccataaggaggacgtatgatgacaagttagtcacttgttcgggtccaaataacacattattcgatagcttggcaacacactaattcgctgatggaggctaaacatatcccccaaccattccataacaaaaatgtagtcctctttgcaaaataaagagatttaatttactaactaaatacttgacaagaatcttgagcacgaggccccatttagtgcctacaatacttacgaaatattatcactgttggtgaaagcaccccgtaattgaatgaaaa

SEQ ID NO: 118178 - DNA, 532 bp, Glycine max
  Clone ID: PAT_MRT3847_77723C.1
gcctgaggagatttcaagggaggagtgtgctgctttctacaatagtcttaccaatgactggtaagaacatctgtctgtctatcatttctctgttaaggggcagatggagtgtaaggctatactctttgatcccaagagggcaccttgtgacctctttgacacaaggaagatgcctatcgacataaagctctgtgtccgccgtgtctttattatggacatctgcgaggagtcgattcctgagtgtctgggctttgtcaaaggaatggttgattctgaagatctcccactcgacatcgcaagatatatgttgcagcagaacaagatcttgaacgtcattcgtacgaacttggtcgagaacggcctagcgctcttcttggagattgcatagaacacggaggattacaacgcgttctatgacgcttgatctaagaacttagagcttggtatccatgatgattcccagaaccgagcgaagatcgatgaattgctcacgcaccactccaccaagagtggttatgagctgtctaacctc

SEQ ID NO: 118179 - DNA, 504 bp, Glycine max
  Clone ID: PAT_MRT3847_77724C.1
gcaacgaagcaccggacaaaaataaaaccgtataaatagagaagatacaaagattgaagtaaaattcaacactgggaattcacatacacaccagagacaaccctgatttttgcatttatcgcagatttgattaaatacccgctataactcaggtggagcgctttgcgcgtccgacctatttgaagaaagagtgaaagaggtacttgacagactatcaaaaaacatattcctagtatctgatagcataaattggacatcactggacgttggatttccaaagagtaaaagttaattgttattcaacataggctactttgaaaaatagctctgctccccttaaaaaagacaaatgaggttactagtatctcgaccatagggagaggaaagacttgtttgttgtaaatcgctggttggtttaccaaccaagaaagggcaaggggagccccgcaacgggggtaggggatctttatcattcagcgcagttgtcgcttaaatcccttctgt

SEQ ID NO: 118180 - DNA, 360 bp, Glycine max
  Clone ID: PAT_MRT3847_77725C.1
cgagttttttttttttttttttccaaaactctctctttttcctgcatacacccaatcctgtcttagcaaaactacgatcccatatttgttaaccgttggatcatcatgaaatttgaacatcaggttcgaaactcattttcgcacatccccacctttgggatatgcgaaataatgtatgtggtgagagaaatatctctcgcatagaactctctttttcgcacatacattcaaacttatcccagtaaaactacgatcctggactcattaatcattggatcgtcgtaaaatttgaacaccaggtttggaactctcttttttgcacatacattcaaacctatcctagtaaaactatgatcttgg

SEQ ID NO: 118181 - DNA, 463 bp, Glycine max
  Clone ID: PAT_MRT3847_77726C.1
gttgatctgttcactaactaaacgattctggtcaagccctttattttgctttgtattctgcttggggtgatcctcatcactgcggtggtggctggtgagccatcgcaggatgaggtataatgcatcaatggaattcaccatgattttagtggatgcgatgacttgcagggaagccttttgatcggaatgacatcccaactaaatcatgataccgatcactgtggaaaaggaaaaggaaagggaaaggcaggatatggcggagagtggaagccaaggaccatgcgtccgcgccggatgaggtggtcctcgaaggatgaggggttcatgccttacgaggaggaagccatcgacgcggctaatactgtatgaaccctctgtagtgaaggaggatgctctaacggtctcggtggtcatgactgaggctgaataggaggtgcacgcttctgctgcggcgagcatacag

SEQ ID NO: 118182 - DNA, 329 bp, Glycine max
  Clone ID: PAT_MRT3847_77727C.1
ggtgggggtttttttttttttttaaaaagaaaaaaacaacctttttgttctttggtaaaaataaaatttccatagctaattttcctttttttttttccccccggggatttaaaaggttatttcttccaccagggtttaaaaaacctggtttacacgcttcccttacctttcccaatttttactcctatcccccaagtttaaaaaaatggtaaaatgcggggaacttgcccaatttttttttgaacaagttagccagttcaccttttttatacagggggggcaatttttcccaccccccaacctgttaaccatgcacaaaaatttggggg

SEQ ID NO: 118183 - DNA, 201 bp, Glycine max
  Clone ID: PAT_MRT3847_77728C.1
ccgaccttctatcactgcgtcacgctctaactttcacacttattatcaccctaatcctcggtgttctggctcagtcttgagagtccattgacacaactaatgtctaagaactctaaatcctggaactcgaggtcgcacgccaaactcaccttaaggattgaactgacagactacactacactcttgacttatacaatccat

SEQ ID NO: 118184 - DNA, 245 bp, Glycine max
  Clone ID: PAT_MRT3847_77729C.1
ctacccataccatagtctatgcactgctgcaagtgaagggttcgttgacaccaacatggtatgtgtagggtctatagcaatgttgctgagatatcaagaaggacccaaaggctaaactgtctaagagatattgatagcctaaatcctttagatactaatcaacgcactttcaacatcaacatcatacgtacgctcaactcagacattttcgaaccatgggtcaattcgaatattacacaaaagcc

SEQ ID NO: 118185 - DNA, 380 bp, Glycine max
  Clone ID: PAT_MRT3847_7772C.1
ctctagcctaaattcaagactagaatatcgggaggcatatgggttcccctcaagtgcatattgatgtggatatggcttaggggcaatggcaggatcagtgatgctattcaacgtgatgtttaatgctgcacttgaaactctagacccatttgttgagccacatgcaacaacagctgcagaagaatcacctaatgaagcaactcgtgcagtagtcgaatcaccactcatataaagactaggaagaggtgcttctgcaggggagtctagccatggaaagaaacatggaatgattctaggtttggagccacattctatgacatatgacgaaaccgtagactctgtcgacatctcacaggacatgaagcaacaaggggtacaac

SEQ ID NO: 118186 - DNA, 306 bp, Glycine max
  Clone ID: PAT_MRT3847_77730C.1
actatgcgtttcggggttgcagagtgagagatagagagatgtcattattttcagacctgtacaggtaaatagagcaattgaagagagtgtgatgcctcttaaggagtcttaatgtgaaggtgcttagttttaaagccatggaaattcctcgtcgaaaagagcaatgttaaaagggccaacgcccctgttaacatatgtggagatatttacggtcagttttatgacaagaaggagctttttaaagtatgatgggattgtcccaaaacaaacttatttgtttctgggggattatggtgataaagggtt

SEQ ID NO: 118187 - DNA, 327 bp, Glycine max
  Clone ID: PAT_MRT3847_77731C.1
agctcgcggttcggctcgagggtttgtagaacacagaatctctttttctttctcttcactgctgtgagtggtaacgcagctttaccatattggggggcgcaccatggaaaacgaacacactctggctgttgctgatagagagatgtggctgaacagtgaccaatactagttcctagaaatcaatgatgcttccatgttctactccaatttccctcctcttcctgattttccttgcatggcattatacatattttattctttagcactaccatttcctgttaataccataacatttttcatcaaaaccacatctacatctaccacttc

SEQ ID NO: 118188 - DNA, 1256 bp, Glycine max
  Clone ID: PAT_MRT3847_77732C.1
tgcccgcgtacgtaagctcggaattcggctcgagtttcattctctatttccatttttcggccgtccagaagacgccaacataccactaaagggtccacaggacgaccttcagaacgtgcctcaacaggccgccgaccaaaaacctcagaaactcagcccagatttctacataaaaacttgccccaatgcccaaaaaatcgtggccgatgcacttgcagacatcgttaagaagaatcccggcgctctcggaaacctacttcgccttcaattccatgactgcttcgttaatggatgcgatgcatcgatcttgctagattactcgccaagcggtgacaccgtggagaaaagttcaatggtgaatggtctactcctgaaaggagctgatatgatcgatgacataaagttgaagctggaggagcagtgtcctcaaactgtgtcatgtgctgacacattggcatttacagccaacgaggtaatgaccatggcgggtttgccccctcggaaacccctcggtggccgtagagacgcgctggtttccctttccagtgcggcagacgccgacaacctccctttgccagactggaccatggatcaaatggtaaaactcttcaccaaaaagggcttcaacatcgaagaaatggtgatcctactcggtgcacattctatcggcatggctcattgtgacttgttcatccaaagggcatacaacttccaaaacacagggaaacccgaccctacccttaccgtcgaagcggttgaggaattcaaaaaggcatgccccaatgttaatacacctaagtacaggaacccccctgtcaactttgatgcaacaccaactgtgcttgataacctcttctacatggaaatggtcgagagaaacagaacttttctcattacggattcccatttgttgacagatcagaggactttgccacttgtgcaacagtttgcacatgaccctagcttgttccccaggagatttcctgaggtcatgcttaagctcggttctttgaatgtcctcacagggaatgaaggcgagatcaggaagatttgtaggtcccccaattaaccatgacataaaattaataaatttatggagatcatgcacgcatgtttaactaaatttgttattcttttttttttttttttgagggggccattgtcctgatagtgattatgatcggtgcctccttgcttggtttcatttcatgtggaatttctgtcatgtaataacagccaacggcatttttttggtt

SEQ ID NO: 118189 - DNA, 603 bp, Glycine max
  Clone ID: PAT_MRT3847_77733C.1
ggagccaaagacaccataaccactgtggaccacattactacaccacttgatgtaaagaccaatcttaaatcagaagatatgacacaagacaatggccagaagggttatggtggagcaaagggcaccattggttctgtggaccacatcactacaccacttgctgtaaaggccaatcttaaatcagaagatgggtcgagagacaatgaccagaagggttatggtggagcaaaagacaccattggttctgtggaccacatcactacaccacttgttgtaaaggccaatcttaaatcagaagatgtgacacaagacaatggccacaagggttatggtggagcaaaggacaccattggttatgtggaccacatcactacaccacttgctgtaaaggccaatcttaaatcagaagatgtgacacaagacaatggcccgaagggttatggtggagcaaaggacaccattggttctgtggaccacatcactacaccacttgctgtaaaggccaatcttaaataataagatgtgacacaagacaatggccagaagggttattgtggagcaaaggacaccattggttctgtggatcacatcactacactactt

SEQ ID NO: 118190 - DNA, 349 bp, Glycine max
  unsure (1)..(349): unsure at all n locations
  Clone ID: PAT_MRT3847_77734C.1
gagagtgctcatcacagagacgntnagancgtcttctgantcgaaacaaggtgttcaggttgaaattttagagtaatatacttgcaatcatgagnnngaaganagggaataaggtggaagtgttaagcnnagttgaggtgccgngtggcttcctggctatatgcagagatcatttgtggtaatngacaccactatactgtganatatgatgggatatgaaagtgatgctggtgaggcaattgtggaacaggtgtccangnaagtcatnangncgtgtccgctgcaacttgaactcacagataattggaattcagtgatgttgtagaggcctccagaattctcctggaag

SEQ ID NO: 118191 - DNA, 236 bp, Glycine max
  Clone ID: PAT_MRT3847_77735C.1
gggctagttagaagacacagtaagcgattatctttgagtctctaccccacacagccatgaccacctgcaactgtctctatagtagaactccgtctacatagccaactttttggggatactaaccaagagccatctcgccacgataccgtgtgctttcaccttcagcacgtacaacccaatccaaccagacattaagctacaaacagacgctagtatttcatacctctggagcgtta

SEQ ID NO: 118192 - DNA, 164 bp, Glycine max
  Clone ID: PAT_MRT3847_77736C.1
aaaaaaaaattttttttttttcccccctttcgggaaccgaataaagaaaggttaaattccctcctttgaataccggagcagtagcagaagcgaaccccctggtacccttaggggagccttcaaaggtcatcatgggaatcatccctatcacggggatccggcct

SEQ ID NO: 118193 - DNA, 708 bp, Glycine max
  unsure (1)..(708): unsure at all n locations
  Clone ID: PAT_MRT3847_77737C.1
actgatctcacaaagcacttcatgtgtacgagcaatcttgattgcgcatatagccaattgagcacttacccaaatggaagatgtgcctgtgggtttgctatgaccactttagtttttgttgatgacaaagtctacaaaggatttgtaaatggtggtgccacttttatcgttacagatgatctggttgtccttccaaacactatgtatacaggtcttagtttctttcagagttgcggagtaaaatgtttgagttcagtacagacaattacattaactgtcaccaagaaaaaggtattggatctgctcaagtgttctttattgtccaagtcaactttgacagatttgttcttggtaaagaaaccatttctcgagaactcaagtttttctcctgctgttgttgaaaacagtagtactatccaaatcaaaataaagctagttatgagaaaatcatgggaagatattgtttgctgaaggagaagaagattttgctgactttcttttgagttttctcactttacctctggggggagtggtgcgtatgttaggaggatattcttcaatgggcagtgttgatgggttgtacaagagcatagctgatttaaatgaaaacaaatatttgatatcagagaaagtgaagaataggctttgttgatcctggccttgccccgnagttccaaacaaaaatagncaaccagatgttaccgattt

SEQ ID NO: 118194 - DNA, 807 bp, Glycine max
  unsure (1)..(807): unsure at all n locations
  Clone ID: PAT_MRT3847_77738C.1
cccacgcgtccgcccacgcgtccgcccacgcgtccgcccacgcgtccgtacggctgcgagaagacgacagaagggggtggtcgtgtttgttcaataatgctacaaaattcctccatgtcttccctcctcctccaccggatcaacggtggcggtggtgcaaccacggccaccaactgtcacgacaccgtctttatgctcgagccgaatcggctcgagcttagcgtgacggagatggttgctcggcaccacgctcacgcggtggggcccaaccagtgctgctccttcgtgatccaggcgatcgacgcgccggtctccgccgtgtggccggtggtgcggcgcttcgacaacccgcaggcctacaagcacttcgtaaagagcgaccaccgcctcaggaactaccggtccgtcaccacgctccacggcgacggaagcaacggagggacagttgtcatcgagtcgtacgtggttgacataccggccggtaacactaaagaagagacttgcgttttcgtggacacaatcgtacggtgcaatttgcagtccctggctcagatggctgaaaatatgggaagttaacactgaagattttgttttgtctctatctgttagtgttggaaattggtgggtagcaacagcattaggatttgttttaggaggagtcaaggtcagacgggcatggttgaaatgaagaatgtgacatantatatatgtagntctcttctcatctttntattttttcccattctaatagctgntgagtctgatcgagtgagtactgctgctgcttcttttgcaccgaatctttgg

SEQ ID NO: 118195 - DNA, 1191 bp, Glycine max
  Clone ID: PAT_MRT3847_77739C.1
ccacgcgtccgcaccctccaaatatatatgcttgctcattcaacaacaacatctctatatgcacaaaccactttaacggcacgagacaaaaccaatatcttagttttggtggagagaagagaaattgaaggaaacatacttatcattacatgaactagatatgacttgccctcttcaactccaccgattcagccctgcaacagacacatccaccgccatcgcaaacggcgtcaactgtccaaagccagcacaaacggcgccgtcaacgcgccgtttattggcgaaagtaggccttagcgtgacggagatggttgctcggcaccacgctcacgcggtggggcccaaccagtgctgctccttcgtgatccaggcgatcgacgcgccggtctccgccgtgtggccggtggtgcggcgcttcgacaacccgcaggcctacaagcacttcgtaaagagctgccacgtggtcgccgcagggctcgccgggggtgacggcggcattcatgtcggcgccctccgggaggtacgcgtggtctccgggctccccgccgtgtcgagcaccgagcggctcgagatcctcgacgacgagcgccacgtcatgagcttcagcgtcgtcggcggcgaccaccgcctaaggaactaccgctccgtcacgacgctccacggcgacggcaacggagggacagttgtaatcgagtcgtacgtggttgacgtaccgcccggtaacactaaagaagagacttgcgttttcgttgacacaatcgtacggtgcaatttgcagtccctggctcagatcgctgaaacctgaaaatatggcaagccaacaacactcaacattttattttctccgttagtttttttggttattgccttgggtgtttttttgtttcgaatacgggttcgggttcgaaattgatgattacagacaccattaggatttgtttttggaggacttatcaaggtcagacgacaatggttgaaatgaagaatgtgacatataatatatggtatatgattcatgtatatatacatataatatatgtagttctttctatctacctctcttttattttttccattctaatagctgttgagtctgatcgaatctattgttcttgtatccgtggtcaatttatcattaattcatcttgtttgtgactctgtaatgtagtagagaatgtttctatttgaatt

SEQ ID NO: 118196 - DNA, 208 bp, Glycine max
  Clone ID: PAT_MRT3847_7773C.1
gaaccaaacaaaatttagagtgatcccatacagtcttaatatatacgtctcctaatgcttgttaacttgacgctcattgatacttcccggccttactaaagtatctgttaagggtcatccggatagtattgtgaaagacatagacgatttggatcgctcttacattgagaagccgaactggggtaatttggctatttcaccacccaat

SEQ ID NO: 118197 - DNA, 1097 bp, Glycine max
  Clone ID: PAT_MRT3847_77740C.1
aaaatctctatatgacaaaccactttaacataacatcacaaaaccaatatcttagttttggtggagagaagagaaattgaaggaaacatacttatcattacatgaactagatatgacttgccctcttcaactccaccgattcagccctgcaacagacacatccaccgccatcgcaaacggcgtcaactgtccaaagccagcacaaacggcgccgtcaacgcgccgtttattggcgaaagtaggccttagcgtgacggagatggttgctcggcaccacgctcacgcggtggggcccaaccagtgctgctccttcgtgatccaggcgatcgacgcgccggtctccgccgtgtggccggtggtgcggcgcttcgacaacccgcaggcctacaagcacttcgtaaagagctgccacgtggtctccgggcttcccgccgtgtcgagcaccgagcgcctcgagatcctcgacgacgagcgccacgtcatgagcttcagcgtcgtcggcggcgaccaccgcctcaggaactaccggtccgtcaccacgctccacggcgacggaagcaacggagggacagttgtcatcgagtcgtacgtggttgacataccggccggtaacactaaagaagagacttgcgttttcgtggacacaatcgtacggtgcaatttgcagtccctggctcagatggctgaaaatatgggaagttaacactgaagattttgttttgtctctatctgttagtgttggaaattggtgggtagcaacagcatttggatttgtttttggaggagtcaaggtcagacggcaatggttgaaatgaagaatgtgacatataatatatgtagttctcttctcatctttttattttttcccattctaatagctgttgagtctgatcgagtgagtactgctgctgcttcttttgcaccgaatctttggttgttgtatccgtgctcaattagttttattaattcatcttgttcctgtaatattgtaattatatccttttttatgtagtagaagaggaagagaatgtttctatttgaattaatgccatacatatgttgatattagtttaaattataaaataaaatttaatttg

SEQ ID NO: 118198 - DNA, 233 bp, Glycine max
  unsure (1)..(233): unsure at all n locations
  Clone ID: PAT_MRT3847_77741C.1
gaggagcctagggacagcctgatgatgatgatgatgggcttgagaagacaaagaaaggatctagatagaagaagcggtattcgtcggatgaagactccgtgatttacacaactgaaagtgccagtgagaaagatganaagaagaggcggaggagagcgaaaaagaaaagggacgatggttcgtcacgtgattctggcgaaaggtcaaaaggaagatcacgatccaggagtggt

SEQ ID NO: 118199 - DNA, 520 bp, Glycine max
  Clone ID: PAT_MRT3847_77742C.1
gttgtcccctttcacacactgatcttgatcagttgagaaagggaatcagaggagagaaaaaaaaaaacattttctctctcttctccctttccatctctttatatgactttctcaccttaaatctttttctgaagagagatcattgaaccttgtatctttaatatacaaaatttggagtctcagggtcttctagacaggacttaaagttttgtgatgaagaaaatttccaagagcagctgcaagttagcatcacacaggctctttaaggacaaggcaaggaaccatgttgatgatctgcaggtgatgttcttggatctgcagtttgccagaaaggagagccgtactattgatgctgcacttctggaggagcaagtccatcagatgcttcgtgagtggaaggctgagcttaacgagccatctcctgcttcctctttgcagcaaggtggcagtcttgggtcattctctaccgatgtctataggctattgcagctctgtgaggaggaagatgatgccactagtc

SEQ ID NO: 118200 - DNA, 500 bp, Glycine max
  Clone ID: PAT_MRT3847_77743C.1
acaggatggacgtcttgcgaagtttccagcttccaggtgggaccgccatcgcgctcttcttcgccgctgtagccgtgtacaccatctcgcgcatcttctacaacatcttcctccaccccattcgcgccgtcccaggaccatggtggtggcgggccagcagtctgcccatcgactaccacaacttccgcggcacggcaatgcaccgtattctcgagctgcatcgaatctacggcaaagaagtccgaatcgcgcctgaccacgtcagttttgcttcgggtcaagtctggaaagagatctactctgcacgcccagagtttcccaaagacccaaagcaaatcgagttgggactagaacctgtgaagagtatattcctggcagaccaagaaaaccacgcgaggtttcggaggctgctggcgtatgccttctccgccaagggaatcaaggagcaagagccgagattcacgggctacattaatctcttgattcaaaggctgcatgag

SEQ ID NO: 118201 - DNA, 930 bp, Glycine max
  Clone ID: PAT_MRT3847_77744C.1
aaactctccgcgatggataataatactatctccgacttgatccagttcaacgatttgatacccaagttaccgagcgaactcggactcgagtgcctcactcgtttgccccactcagcgcaccgagtcgccctccgagtctgcagccagtggcactgcctcctccaaagcgacgcgttttactcccacaggaagaaaaccagccacacccgaaaagtcacgtgcctcgttcaggcgcgtgaggatcaaccgcttcaggagaaaaacaacgcttcggttgcgtcggtttacgggataagcgtgttcggcccggagagcatgacatgggaccgggtcgacccggttccggattacccgtccgggctgccgctgttctgccagctggcgagctgcgacgggaagcttgtgctgatgggagggtgggaccccgcaagttacgagcctctgacggcagtgtttgtgtacgattttcgcacgagcgagtggcggcgggggaaggacatgccggagaagcggtcttttttcgccatcggggcgggggtgggccgggtttatgtagcgggagggcatgatgagaataagaacgcgctgagtacggcgtgggcttatgacccgaggagtgatgaatgggccgggttggacccgatgggccgagagagggacgagtgccagggggtggtgattgggggcgggtgttgggttgtgagtggttattccacggagaggcaagggatgttcgatgggtcggcggaggtgttggatatcgggtcgggtgggtggagggaagaaaacgggttttgggaagagggtcagtgtcctcggtcatgtgttggggttgggaaagatgggagattggtgaattggagaggttgggatccggggctgagggttggggtatgtgtggttgcggttgggtccagggttgtgttgagc

SEQ ID NO: 118202 - DNA, 400 bp, Glycine max
  Clone ID: PAT_MRT3847_77745C.1
agagatctgtaggcacagaacatgtgggatatgacccttttctcggtggaatgcctaaacacgccactcccatgaggcccctagatgaagaaattctttctaaggttgcacaagacatggttgaggcatggtttgattgcgctggtgccgctgaatttttggaacatcttggtcctcacattctgggagtggaacttcccactgttgaccagttgtattctactaagggtaattaggctgcaaaaattatgaaccttatacaaagtgttgttggcgatgctttaatttcttaccgttgggaagttgttccagggtgggcacttttcttgtttctaccattagcgcagggggaaaaccatgttgttcaaataccccctatggtcccagggggaaatttctg

SEQ ID NO: 118203 - DNA, 1074 bp, Glycine max
  unsure (1)..(1074): unsure at all n locations
  Clone ID: PAT_MRT3847_77746C.1
cgccgtcgcacacattcggcgactcctcgacatcgtggcctgcaccacctccttcgcctccgcctccgccgccgcagcagcaaaaccccccgccggaaagtccaaagaccccaacgaacccggttcagaaaatggacccgaaacaaacccgaaacccaaacccgtggatccgaattcggacctggtcaatgccaaaagcgacaaagctgacgctgacatctctatgtgtccacctcccaggcttggacagttctacgatttcttttccttttggcatcttacaccgccgtttcaatacatacggagatcgaatcgtcctttccttgaggataaaacagaagatgatttctttcaaattgatgttagggtttgtagtggaaaacctactacaattgttgcttctagaataggattctatcccgctggaaaacgtccgctcgtgactcatactttggtgggtctccttcagcagataagcagggtgtttgatgcagcctacaaggcactaatgaagacattcacagaacacaataaatttggcaatcttccttacggttttcgtgcaaacacatgggttgtccctccagttgtttctgacaatccatcagtctttccgccacttcccatggaagatgaaacatggggaggaaatggngggtggacaaggcagagatggtaagcatgaaaatagacagtgggccagagattttgcaattctagctgcaatgccttgtcaaactgcagaggagagacaaattcgagataggaaagcttttctacttcatagtttatttgttgatgtatcagtcttcaaagcagtttctgcaataaagcatttaccacgcgtccggcaaaactctttcagtaattcagctttgccaacttcatatgaagaaagaattggagatttaactattaaagtgacaagagatgtatctgatgcaagtttgaagttggactgcaaaaatgatggaaatcgagttcttggattgtctgatgaagaactagctcagagaaacttgctgaaagcataactgctgatgagagtgccactgttcatgatactcctacttt

SEQ ID NO: 118204 - DNA, 563 bp, Glycine max
  unsure (1)..(563): unsure at all n locations
  Clone ID: PAT_MRT3847_77747C.1
attttccaagcaaaacttttcaaacccaaaaaaaatccaaaaaaagaaaaacaaaacgcttaacgcaatacaaaaaccacagtttcaatcacatctctctctctctttctcgcaaatttctactttctgggttttctatttgagattcgttgttccaatgagcgatcacttggtggtgttcgttgaccgtctcgcgcgccctgtccccgttgacccggtggcgcagccgccttccgagccgtctcctcctccggcccccgtgaatgctgacgcttccgggagctccggcaccgctccggtggaggattgtgacggagagggcggcggcgaggaggagccgctgatccagatggcggagtgccgcatctgccaggaggaggacggcgtttccaacttggagacgccctgcgcctgtagcggcagtcttaagtatgctcacagaaagtgtgtccagcattggtgtgatgagaaaggagacataacttgtgagatatgtcatcagccatatcaacctgngtatactgcccccccacctcgtcctaatcctgaagaaactactattg

SEQ ID NO: 118205 - DNA, 1411 bp, Glycine max
  Clone ID: PAT_MRT3847_77748C.1
aaaaaaatccaaaaaaagaaaaacaaaacgcttaacgcaatacaaaaaccacagtttcaatcacatcgccaagcaaacttttcaaacaaaaaaaataaataataaagaaaacaaaacaagaagaaggaaacgcgcaacgcaacacaaaaaaccacactttcaattgcatttctctctctttctcacaatttccactttccgggttttcgattcgatattcgttgttccaatgagcgatcacttggtggtgttcgttgaccgtctcgcgcgccctgtccccgttgatccggtggcgcagacggcgcaggtgccttccgaaccatctccacctccggccgccgtggatgccgacgccgccgggagctccggcacctcaccgtcggaggattgcgacggcgagggcggcgacgaggaggagccgctgatccagatggcagagtgccgcatctgccaggaggaggatggcgtttccaacttggagaccccctgcgcctgtagcggcagtcttaagtatgctcacagaaagtgtgtccagcattggtgtgatgagaaaggagacataacttgtgagatatgtcatcagccatatcaacctgggtatactgcccccccacctcgtcctaatcctgaagaaactaccattgatataggaggtggctggacaatatctggcacacccttggacttgcgtgatcctcgactcttggcaattgcagaagcagaacgtcagttcttggatgctgaatatgatgagtatgctgcttccaacgccagtggagctgcattttgccgctcagctgctttaattgtaaacggcttaaccttgcttttgtttttaccaaatttaattggtggccatgctacatgacaatgagataaatgtagacttaggtagtgtttgaccaaggtcttttttggatcacacaagttactacaaagttaaaattgtttgataattttattaactttagccttaaaattgcttttaaattaagagctgtttggtaatgtgttcttgggtcttgagatttgaaatcattttatagtgaaggagaagttcctaaaattagcttattttgagctttttttatgttttcttaattaaaaaagttccttatatttttaagagcttctgaagtattttgtttggcacagcttctaattttaaagaataaagaactccaaaataacttgtgccaaacattaccttaaaaatatcaagctgtagtttcacttttcatattatgtcgacaagctagctagtggacctgatttcaagcctaattcatattgtttggtgcagttaatggcccttttactcctgcggcatgcactttctgtctcaaatggtgataattctgatgatgatccatccagttttttctcccttttcttgcttcgagctgctgga

SEQ ID NO: 118206 - DNA, 222 bp, Glycine max
  unsure (1)..(222): unsure at all n locations
  Clone ID: PAT_MRT3847_77749C.1
ccacgccttccnnacacntnnnccacactttctnttctacttcaacacaccttcgcggacaccggggatcacatctgccatttaaatcttaccttttatttctatgcacacaccaaggccacgccaagcatgtaatggacaaatgtcacaaacgacattgtattattcagacacaaggagtttgactctgttttggccgcaccaatccattaagatctagct

SEQ ID NO: 118207 - DNA, 435 bp, Glycine max
  Clone ID: PAT_MRT3847_7774C.1
ggctcgaggccaaacccaaacacaacaacacaaagaaaaaaagagcacaaacagaccaatttcaacggttgaattttttggctgaagacaccccaccaacgctagacaaataaaacatgtcttgattcgcatccgcatgcaaactatcggggatatgttcttctttttttatattctgctacactcattccttctttttttgttccccagaatcgctctcgctttctttctcgcatcttagaccttacaactattctacaatgcaccttcgtcctttaccctctgttgttgtttcttcatcctcttcatctatagaatcccattggatcccacttaccaagcctgccaccgcgatatgtgctacctcttctgctacggataactatccgaaagggaccgtttcgaataggatagcgaacctctaggttggacata

SEQ ID NO: 118208 - DNA, 341 bp, Glycine max
  unsure (1)..(341): unsure at all n locations
  Clone ID: PAT_MRT3847_77750C.1
tttttattcattagttntaatncattaattttcattgaagtccgaatactgtaaaccaaaaatacaggatgatagaaatntaaaaaagcaaaaacaaatggaaatgtaattaaagtacaaacaattttttttttgaggcggntacaaatgctttggaaatttttcacacttaaaagcctgggggcttgtaagcgatgaagctgatgcactgcacttgncgaacgttgttaaaacccatgatacaaataaagccgaaagaaaaatcagttttaaactattgaaactaatttcgnacgcaagaaaaaaaaccaaaaataacagaccgtaacctgttnatcaaa

SEQ ID NO: 118209 - DNA, 430 bp, Glycine max
  Clone ID: PAT_MRT3847_77751C.1
ttgtcttcttggtgccagacaggacacacctgctgctggctcgcagttcaaggatccctattggtaagagagatgttgggagagttgaatgcggaatcccttctggatgcccgctcacagttatttgcaattccttttttaatgagatgctcataagatatagccacgaaaaatttctgtgccaggctaaagctccaagtgtgctgttacaatccttcaaaaattatggttctttccgtgtgtatggtgatcaccacttagttagaggacatgaatatgtcaagccttactttcgcggatctaaatacaatagcattctagctagacatgatatcaccatcactgatggtgtagataaaactagtgcccctatgcaattgagatagctagcagatcgctatttggtcatgcgacactatgcgcggatgtc

SEQ ID NO: 118210 - DNA, 1329 bp, Glycine max
  Clone ID: PAT_MRT3847_77752C.1
ggttcgatggagcaaagggtgccaatgcaaaaaatatgacctattacttttcaaattggttttccatggtgaaggagttgcagagttccatcaacatcttctctgatgccggtcctgatgttaggtgggtgggagatgaaacaggttctgcagggtacacatgctggtctaccattaatcgaacctctctatccattggaagtccagacatcattcagtatataaatactggtgatccaaaagggacagattggctaccggcggaatgtgatgtctccattcgaaatggatggttttggcacaagtcagaatcaccaaaaaagctaagcgagctacttgacatttattacaattcggttgggagaaattgtgtgttacttctcaatgtgcctcctaatacaagtggccttataactgaagttgatgccaatagattgaaagagtttagaagtgcaatcaagacaattttccatcagaatcttgctgaggattgttttgttaaagttagtagccaaagagggggtttcgggccagaaaagatgctagacagtgaccacttgtggtcatactgggccccaagggacgatgatgatgaaaaggaccattgggttgaaatttgggccaaggaagggagattgagattcaatgtggttagaatacaagaggcaattggtcttggtcaaaggatcaaacggcatgaaatctatgtggatggtaaattgatcatcaaagccacaacggttggttataagaggcttcataggcttgatgggggtgaagtgcacgctcgtggtgtgaggataagaattagaaaggcaagaggagtgcctcttatctcttctattggcttgcattatgatcctttctggcactcaaagtttactgtatcctgaagagttaagtaagtttaggtaaaggagcataactgcaataaattaagtagagccttaagaagaatattgaaatagtagtattgttctatcagtaaagaacaaaaaataaatttactttaaatttcgaggtgcacgctcgtgtggtgaggatcagaatcagaaaggcaagaggagtgcctcttatttcttccattggcttgcattatgatcctttctggcactcaaagtttactccaacctgaagagttaagtaagttttggtaaaggagcataactgcaataaaataaatagccttaagaagaatattgaaatagtagtattgttctatcagtaaagaacaaaaaaataaatttacttttaatttctacatccaatgtgttcattgttttatcgcaacgaggaactaaataaatattggatatgctgttttccatt

SEQ ID NO: 118211 - DNA, 458 bp, Glycine max
  Clone ID: PAT_MRT3847_77753C.1
ctcgagccgaatcggctcgagcggctcgagtacggctgcgagaagacgacagaagggcctgtgagaatccattctcatgttgcataactgtttggtgaaatcagcatccatcacttcttctctaggacaaaatcttatgcacttttcgtttccttttggggtgtagtaaaggtgttctgctcctagtactagagttggatcatgctcatcttcattgccagggtcacagcaattgaaattgaaacacttgaaggagttcattgagctttgagagctcgcatcatcattcataaatagttcatctgcaaaatagctcaatagagatgttgaaatcaaattctttaactgcactgaaaataacagtagtagctttccttgagagtaatacatcaacatagtccttgaaattgacatttctagtcaattgttgttattaaaaatcataaattttgataact

SEQ ID NO: 118212 - DNA, 1069 bp, Glycine max
  unsure (1)..(1069): unsure at all n locations
  Clone ID: PAT_MRT3847_77754C.1
cggacgcgtggggtatcctatacggactcatccgaatattgcattacaataattaataaataccccaaagcataacaagttaaaaaagaaaaaagagcattggaaccattggagattgctaaaatgattgaggaggagatatcagctttggtccctaaatggagggattggggcagtgctgagtatcaaaagcagcatagttttagctatgaagaagagtatgacatgagtaaccaccaccctttcttctcaacatcttctcgctcttcctctcatgcttctcttccagtgtttggttcttcctacaagaataattcccactatcgtgggaatcattacccttttgctcaggctcgagctcaagatgaactatttatgaatgatgatgcgagctctcaaagctcaatgaactccttcaagtgtttcaatttcaattgctgtgaccctggcaatgaagatgagcatgatccaactctagtactaggagcagaacacctttactacaccccaaaaggaaacgaaaagtgcataagattttgtcctagagaagaagtgatggatgctgatttcaccaaacagttatgcaacatgagaatggattctcacaggtgtcatggaatgcacaggctaaccaggatccgttccttcgtggacctgaggagacaacaactgcaacgatcactgatggaggagattcacaagaggagaatgttcaagacggttggtgccgttgagaacattgggtttcagaatccagaaggaggcggatgtttttcttattgaaactccaatctccataggttccaatgctctttttcttttttaacttgttatgctttggggtatttattaattattgtaatgccttatgaattaagatgtccgtgaatatttgtatcctatacggactcatccgaatattgcaaaataaaacttgtaatatagtttaatttatgcttttgttaggagatgtttgcttgtttgtaagacttctgttgtgatatttctctttttgtatgttgaaatatggaatttcttgaaaaaaaaaaaaaaaaaaaatagntcgcga

SEQ ID NO: 118213 - DNA, 768 bp, Glycine max
  Clone ID: PAT_MRT3847_77755C.1
cggctcaagcggctcgaggtgagagagaacactccttgagctccacacatcacaaaaaccctcttgtgaaaacccttctagcctaaagccttgctaataaacactaacatggcctcccaatttgctagggatgtaaaatgcaagagactaatgcactgtgcagcctcttatggagaaagaggaagccattgttcactgtctcgtcgccaaaactatggataccatccaatccaacccgaagaagagaacttcaatgaacatcataatcataataataataacttgggatgtgaaaatggtgcaaaacgtggcacaaaccgaggtagacaacaagcacaaaagcttcacaggttgggcttctcgtaccttgcatcatcttttctttacttagtcataaaggttaaagctttctacaatgggttccttggagatgttactggtgaagccaaaatgggcattgaagcacctactgaggcatatttctcagtgccagttcttccaaattaacaaagctcctcctttctagtagtggcaacatgttctcgatatgtgtctagttcactagtatattaatctgaatgtttatattattattaaaattgagtagaacttcgtaattatgttgctggctagagttgtacttctatgcgcaggtttcttaaaggaagtccctgctagcttttgaagttaaaatacattttttgggaactgttaacatgtaatgatgtaataataaactttgacataatgttactagtaaaacgtcct

SEQ ID NO: 118214 - DNA, 276 bp, Glycine max
  Clone ID: PAT_MRT3847_77756C.1
aaggtatggcttctagtagtcttcgttgcattgcttttgcacatgtagaagtagctgaggaggagcttgtagatgaagaagggaatgcaatggcgaaagtgaaagaaaatggtttaacattgttggggcttgtgggtattaaggatccatgtcgtcaaggggtgaagaatgccgtggaagcatgccaaaatgctggtgtgaatatcaaaatgatcacaggtgacaatgttttcactgcaaaggccatagcaaccgaatgcggcatacttcggccta

SEQ ID NO: 118215 - DNA, 686 bp, Glycine max
  Clone ID: PAT_MRT3847_77757C.1
ttcttttttttttttttttttttttttttttttttttttttttttttttttttttttttttttttttttttttttttttttgggttggaaaaaaacaaaaaaaaaatttttttttaaaaaagggggaaaggaaatatgaaaaaaaaccccaaatgacggccaaaagaaaaaatttttttgtccggctccggggaccaaaaaaaaaagggttaagaaaacccatctatttttttttttaaaaaaaaaaacaattatttttttgttttgaaacaaccccccctcctaaagcttaacgatcccaggaaaatcccccgggaaacaaaaaaggcaatcagcccaaggcccataaaccgggggttaaaggctttgggggccctcccacccaaccctggggctttaaaagccccccccaaacccttttggcccccccctatccccctttttaatccccccctgggacccaagggggggggccccaaccccccccgaaaaaaacaaagggtccccaaacccgggaaggggctttttaaaacccccaacgggttcaaaaaaaagctgaaaatttttttgaagctaataaaaaacaaaacgtcccccaagggggatgcaaaaaggctcaaaggcttgtttaaaaccagaaataaaaggcttccttttgggggggaaaatttccccccccggggggg

SEQ ID NO: 118216 - DNA, 915 bp, Glycine max
  unsure (1)..(915): unsure at all n locations
  Clone ID: PAT_MRT3847_77758C.1
ccacgcgtccgaaattgaggaaatttaaaattcatttacacgaaaccctaatttcctcaatcctggttttggttctctccaatttcccgaaaccctaatttcctcaatcctggttttggaattcgacaatggagcagaagaggagcagagcaagatgtacaacctgtttgtgaagcacttggacgggaaaaccctaaccctcctattcccctctccgatcctctacgcgagttccatcaaggatcgcctcttccaactcactggaatccccgcccaccaccagcgcctcgttaccggctgtcgccacctcaacgatgacaaatctgctatccaatgcctcccggaggacggcaacatgttcccctccgtgcgcctcctcctgcgcctcaagggcggcaagggaggcttcggctcgcttctccgtggcgccgccaccaaggccgggcagaagaagaccaacaatttcgacgcgtgccgcgacatgagtggccggaggctgaggcacgtcaacgcggagaagaggttggaggagtggaaggccggagaacaggagaggaagctcgagaaggtggccgaggagtttctcaagaagcagatgaagaagggaaagggtaagggtgaaggtgacggtggggctcaaaagtatgtcgccaaatatagggaggaatctgaacgttgtgttgccgaggttgccttgtccgttaaggaggctctcactgccaagcgcaagagcccttcacaacctcaccatgatgctaagaagttgaaaatatggatggggaagaggaaattgaatgaaagtgatagtgatgattctgatgaagagggggagatcgagaaatcggatttgntgaatggtccgaatgagtcgggctctaataagctgagggcagtttggggtcggtaaatgggggc

SEQ ID NO: 118217 - DNA, 239 bp, Glycine max
  Clone ID: PAT_MRT3847_77759C.1
tgacggtgctttcagtcgcgaacgatattgattaccatagtatatccagcacaagatagtgtgggtcatagccttcacttagtccccagggtcccaagagctccacatcgatgaagcttcatataccctaattcgatcacactagctactcatgggagtctacgccaatttccttaatagagtcaatacctttcacatgcaaggcttctactcgacttctaaggtcgccagtccttacc

SEQ ID NO: 118218 - DNA, 311 bp, Glycine max
  unsure (1)..(311): unsure at all n locations
  Clone ID: PAT_MRT3847_7775C.1
cccacctgtgtgnccgtgcaantgcaacgtgcttacccctnangtnccgaattccaatantagagaganagaaaacattggttaaaganangcggtgcaagnnngngnggaagaagagaagangatgcggtgcgcaccttagcatggattctctncgtnctcttctctctnctctctcgttcgtcccnacggnaccaanatcctctctccattngagaaagcaccgatgccattncattctcatctgcatcacatatgccaacccttgcttctttcttcatnctaccacgattnattcaacaataagacaa

SEQ ID NO: 118219 - DNA, 225 bp, Glycine max
  Clone ID: PAT_MRT3847_77760C.1
tacggctgcgagaagacgacagaagggggcacaaaaatacaatacgaaacaaaactgagcaaagagagagtttgtgaaaagttgaaccaaaaatcagaacaacaatggcgacacttaaggttctcagcttcttccccccggtgccagatgattttagcaactccgaaaaggccctctcaagttggggaactcacgaggagctgattgtatcgaatcttggctcat

SEQ ID NO: 118220 - DNA, 466 bp, Glycine max
  Clone ID: PAT_MRT3847_77761C.1
ggggcccaacccccggggggggccggaacaagagggcggggccaagctagtaatacactgcccaaccctaaaaaagcaaacccgggcccaacaaaaaaggggacggggccccctcggataaggggggcgccccacgccaagcgggggggaacccacacagaaaaggggaaatccaaaaagcacaaacccgggggaaaaaaaaaaccccctggggaagaaacacccccccggggaagccaaaactgggggggggaaccaagctggggggtaaaaccccccagggtccccccagaccaggctaagggagaaaaaaaacccggggtggacaaaaaaaggctagctttgatagaccaaggcaatgggactgggccccaaaaaaccgggggctcgaaacaaacccggggttttaacccattggtgggcaaatccaaaatcaaaaacccacccactcccgggaacccccccc

SEQ ID NO: 118221 - DNA, 757 bp, Glycine max
  Clone ID: PAT_MRT3847_77762C.1
attcgagctctgtacccggggatcctctagagtcgacctgcagacctcccagaaattgagatgctttatgattctggggaaggtcttgctcagccaaattttgcagtggatgagaagggtgcacacttactggcggtgacggagacctttgttgtaaaggtgactgccctgaagggttttcagctcccaaagaatgaaattggcctgcaattcctggcaatcctattgttgcatttgacaggaaaggctgattgaccatcctggcagcagaagaatttgcattggctggtatggcaccatgtgtggacacaaatctgtccgagtgacctgccttccgattcaattcatcaatagattgctgctcctgcaattgccatgatagtgatggatgatgatgagatgaaggtaattgtttcttttcagtggcttgagaatcaatggacatttctctatcaacattagcccgaaaaggatttctgatttcgaggcaatcttcagcttccaaattctcatcatcagcagtccaactatttttgctcaagttgctaacagtggatgcaccatgaacagtcaggccagagttcatctcatcccatgtgtactcctcttcctcagaatttttccagctcgcagagatcacactggtacgtgtgctacttatgttctgtgtaggctgatgatgcacatccaaaatcatggactttggtgcttcagtattcaaaaaactatacttaagacctaaaccatttccttgccc

SEQ ID NO: 118222 - DNA, 515 bp, Glycine max
  unsure (1)..(515): unsure at all n locations
  Clone ID: PAT_MRT3847_77763C.1
gcaataacacacacacccaatcgaagaatgtaagtacgcgatgcagagatagaaaagacaggcatggcataggataacgtagaaatgaatgggttatgtggtctatgagagtggttgtaatctccaccggcgatttatgcatgggcatgggtttgaaactcacactctgtttgctctggccttggctcctaaccagagcccctcacgtgtggaccttcctggttagcgtgctcanactcggccttacgcgtctgcatccttctaaactctattcatgctaagcatggtcgccttctacaagctcataaaccaccacctctgtacgggcggagaccaccaggacttctatccttccaccatgttatgaactccctactacgcggcacattgcactatctcgattgggaaaccgtctacatctgtgacccatgcctagactgactacgacgtgcgatacttctaaggaatacctatgcgctacctaaccgactatcaactacgacacctttactgaa

SEQ ID NO: 118223 - DNA, 358 bp, Glycine max
  Clone ID: PAT_MRT3847_77764C.1
acggctgcgagaagacgacagaagggggagagattataaaattttattggttttttttgtaaagtgaatcatccggtgatggtgcaatgccgtggaaattttcccccttaacccttctttaataatattcatattcattctgcctttctttttcaaattaataatcggttcattcacctattatgttactgcttgcttcctttggtattctggtgctattaacatatttcttcacctattttttatttggtgggttacaaggtggtttctctctggaagactgccacttaattgaactaccttgggaaattcgatttctcttttgccattttctttctttattaatctgattattatg

SEQ ID NO: 118224 - DNA, 575 bp, Glycine max
  Clone ID: PAT_MRT3847_77765C.1
cacttattcacccttcattaccaaaatggatattcatagtaatcatggtgcaacttctgaagggattcttgagaatgtgtgggccaaaattatgagcagtgatagagcagatggaagaaaaggtgatgccgcagaatgttctaactcttgggaagaacttcctaaccttgatggaagagaagggtccatggaaattctacaaaggcttccaagtttagggaggtggatatcaatgggagctgatttctgggaagaagttttagaaggtattattctacctaacacaagcaatacagaatattccggtagcaataacaacttggaaattggaagcgctaatgaaactcataacaaggtgggagatgctgtgagaatagagaagtcagttacaaaacactaccggggagttaggagaaggccatggggtaaatatgctgcagagattagagactcatcaaagaaaggtgctagagtttggcttggaacatttgacactgctgaagaagcagctttgtcttatgacaaggctgctttgaggattagaggtccaaaggcataccttaatttcccacttg

SEQ ID NO: 118225 - DNA, 485 bp, Glycine max
  unsure (1)..(485): unsure at all n locations
  Clone ID: PAT_MRT3847_77766C.1
ctgagcgccagcgccactgagctgctgcaggactacatgctgacgctgcgcaccaagctgtcatcacaggagagccagcagtttgcagcactgctgcacgagtaccgcaatggggcctctatccacgagttctgcatcaacctgcggcagctctacggggacagccgcaagttcctgctgcttggtctgaggcccttcatccctgagaaggacagccagcacttctagaacttcctggagaccattggcgtgaaggatggccgcggcatcatcactgacagctttggcaggcaccggcgggccctgagcaccacatccagttccaccaccaatgggaacagggccacgggcagctctgatgaccggtcggcaccctcagagggggatgagtgggaccgcatgatctncgacatcagcagcgacattgaggcgcntggctgncgcatggaccangactcagcatgatggacagtggatgggggggc

SEQ ID NO: 118226 - DNA, 833 bp, Glycine max
  Clone ID: PAT_MRT3847_77767C.1
ggtttcttgaaggccattgtcagttttgtcacaatgcaattccagctttgcactgtctttttcacattttccttgggtacaagaacacattattttggtcggacaattcttcatggtggtgcaaggtatcaagcaactggccgcgggtttgttgttcgccatatcaaattttcagagaactacagactctactctcgtagtcattttgttaaagggttggaggttgcgcttttgttgatagtatatcttgcttatggctataatgaaggtggtgcactctcatatattcttttgagtataagcagttggtttatggctctatcctggttgtttgctccatatttattcaacccatctggatttgagtggcaaaaggtggtggaagatttcagagattggacaaattggctactttaccgatgtggaattggtgttaagggagaagaaagctgggaagcttggtgggaagaagaactggctcatatcaggagcttgggttcaaggatagcagaaaccattctgagtcttagatttttcatctttcaatatggtatcgtgtacaagcttaacgtgaaagggtacttcactgaccgtttatggactctcatgggtagttctgattcttctggctggctataatcaaggtattcacctttagccagaagatatcggccaatttccagcttcttttgcgctttatacaaggaatctcccttttagttgcactggctggtttagttgtagcaggtatatcgactgaactgtctttaccggacatatatgcttctatgttggctgtcattcctactggttggagaattctgtcaattgct

SEQ ID NO: 118227 - DNA, 268 bp, Glycine max
  Clone ID: PAT_MRT3847_77768C.1
gactccgaagtccccaataaagtccaaattggaagccgaaggaaatctcatcgtgtgattgaaatttgcccagtgtgacgatggcgatggaactggaccagaatcaggaacatcaattaaggtttcccttctggaaatcgctccgtcgcaggttcagagcccagtcacctttcctcgctcatagcaacctcgaacgggaacttctcgccaaacaacctgccttggaattaacacaagacagacaacagcctcagacatggatgcaaca

SEQ ID NO: 118228 - DNA, 397 bp, Glycine max
  Clone ID: PAT_MRT3847_77769C.1
ggctcgagtgtgttcctctttctctctcttccacgcacacagaacacagagacacttttctttctcgatccgaacctaacaaaacaacaagacaaccacgagagttgagttccgctccgttgttttcaattttccagtgccatcttctgtttcattgcgactgcgatcaacatttctattttcctcgttaatctcaccctcacgggttgccgcatcttcctcgtcgtccaatcgtcagggttgttgggttgagggtttttctctggttcttccgctccggtgtcatgccaacctatgtgtggtggtgatagtagcagcttcaggtgtgtggctgacgctggatgtgtgccggttgcttgataaatgcgtgttaccggcgatctagggttttcgagcc

SEQ ID NO: 118229 - DNA, 741 bp, Glycine max
  Clone ID: PAT_MRT3847_7776C.1
ccggggcggcccacgcgtacactcaactttgctttctcccaaagccatgactcttttatattccctttctcttttacaaggccgttctcttattatacgttgcacactcctcttcttgtctgcctctcggctgcgagaagacgacagaagggggtgtaaggaacacagcaaaacatactcttccgaggaagaaaaactgtacaggctcaaagtgttcgaggacaactatgcctttgtcgcccaacacaaccaaaacgccaataataacaataataatccaagctacactctttccctcaacgctttcgccgatctcacccaccatgaattcaaaaccactcgtctcggtcttccccctaccttgcttcgattcaaacgtccccagaatcaacaatcccgtgaccttctgcacattccttctcagatcgattggagacagagcggcgcagttacacccgtcaaagaccaagcaagctgtggtgcatgttgggcgttctcagctactggtgctattgaaggcataaataagattgtcacagggtctcttgtaagcctttctgaacaagagctgattgattgtgatacatcctacaacagtggttgtggaggtggactcatggattttgcataccaatttgtcatctacaacaaatggattgacactgaggatgattatccttatcaagctcgccaacggtccttcattaaggacaatttaaaaaggcttgctgttacaattta

SEQ ID NO: 118230 - DNA, 285 bp, Glycine max
  Clone ID: PAT_MRT3847_77770C.1
acgtacgcgtacgcattcgcaattgtggacgcccatggtgcaagtcactaccatacaagggggaatggttatcgcatacttggcgaaatctcagctgctctgactcatcgtggaatacaatcatcaccttgcactgaaagtatacactgcatctaacatatatctgtatactcttgcatatttatcgaacgatcactggcatcaaatatcatatgccaaacgtgtataacatgatcacagctgattcaaacgccacactgacacattgtcttcaaagaaagatga

SEQ ID NO: 118231 - DNA, 166 bp, Glycine max
  Clone ID: PAT_MRT3847_77771C.1
gtgatttcaatttctgcaactgctaagagtgcaaaaatgcggcacgaattggacttcgaattggaggaagctatgcacctccacagcatcggcaaaagacctcgaactctctctatactctccttcgaaactcgcatactcgaaaaggtatcgtcatcagatgagc

SEQ ID NO: 118232 - DNA, 172 bp, Glycine max
  Clone ID: PAT_MRT3847_77772C.1
aggtgggggatttgcatccatagcatcattttgggcatcaacaaacttgattgcggtcattgacaaattgccagttttcccaacagtgctggaattaattggaatatattactctgtgtggtttacttatcgctattttatattcaaacctgaccagcaagagctattccaa

SEQ ID NO: 118233 - DNA, 312 bp, Glycine max
  Clone ID: PAT_MRT3847_77773C.1
catgtatacaccctcatccacaaattttttgtcaagacactcaatttctccatacttttatccatcatatcaggttttcattattcctcaccgttcccataacataagagaaagtgttattaacacaaaaggcactttatcttttaaacctcattactgtggactctaatggattgctatttattgaagataatctttacttatccacctactctcaaattaaatttggtcacaatctggcttacgtctatcttacccattttcatttcttaactactgtgaaatttagctttccaatttgtacccactttt

SEQ ID NO: 118234 - DNA, 567 bp, Glycine max
  Clone ID: PAT_MRT3847_77774C.1
gagagaactagtctcgagttttttttttttttttttacttttaagattggaaaatctcttccacgcaacgcaatatggccaagtgatgtgatttatttcggcctttagctcagtaccaccccgctacattcaagattagggaattgaaaccaagaagctaaaatgaaattcagcataacacactctatttttccagcaaagaatgatattacataaaattataagccaaatgaatcttgacctattaaaattaaaccttttatacttgtttttattataaacatgtagtattattttctttttggtattttgaaaatttgctctcacttccacgtaattaatattaatgacttatttggagtcattaaaactgattttacgataatcaactatatgaaaaataataatcagctatatatggattcttgggggaatgggcatgttcaactttgggctttattctattgggctttgttctaatgggctatgtaggagtgaggctatgcagagaatccgcggatagctagtgatagggtcaaatcggagcgtgcgtgggaaataaagaaa

SEQ ID NO: 118235 - DNA, 422 bp, Glycine max
  Clone ID: PAT_MRT3847_77775C.1
gggaaatcgaaggaccacgcctagccagcattctttggaattgaattgtgattcgtgaaggaagggatagagacatgagcaacgttaacatagccggcggctcgcgtggttccacctcctcctccaatggccttctcaccgtcaccattaccagcaccagccaccctgacgaccctcccaccgacgacaacgatgacgacgacttgctcgctgatccggacgatcctttcgatattacgcataccaaaaatgcacctcccgaggccctcaagcgttggagacaagcagctttcgtgctcaatgcgtccaggcgttttaggtacactcttgacttgaaaaaggaagaggagaaagagcaaaagaaaagcatgattagatcccacgcacaagtcatcagagcagcattgcttttcaaattggct

SEQ ID NO: 118236 - DNA, 368 bp, Glycine max
  Clone ID: PAT_MRT3847_77776C.1
ggtgggggtttttttttgattgttttttttctttcttttttttttgtttttaaaagaaaacgcccaacaatttagatttccttttgggccgttgttggaaggctttcaagaaccaggttttttgggcttgagggttccttaaaaaaaaactccggagaaaccgttttctaatgaatcctagctggagggggttgggaacccaaactttcggaaagctcgggggggatgcccttcttccggctatttggggaacaaagacccccttttgtgggggggggaacgggccaaatagaacccggtttttcttgaacccccttttttttattggccccggtttaaggggaatacccccagggggcgcctttttt

SEQ ID NO: 118237 - DNA, 393 bp, Glycine max
  Clone ID: PAT_MRT3847_77777C.1
tgcattatgttagtttaatctatttatgtatttagtccataatggtgggtaatgtcacatgagtcaagtgcgagaatgctagaattaatgtctcatgtgagagacatgtgacttatatataaactaataaataaataaataaataaataaataaagactaaattgtaattggattaaatatgagaagtttctaaagataactgctacttaataggagtggtgattataaaggggttaatactcactaacgtgaaacaagtccccttcttgacagaaaggattctctctaatctatagtcatcacaaatgttgacaagaaagaatatttaagaaagcaaaatcttgtttctctcctcttccaaggaatcaaagtgtaccaaagagaagtctcac

SEQ ID NO: 118238 - DNA, 761 bp, Glycine max
  Clone ID: PAT_MRT3847_77778C.1
aaaaatcaaaaacaaactatataataatgtcttcttacggctgcgagaagacgacagaaggggacgcatacgccaacgcacaacacaacacaattctcagcttcttcagcgttcttttttttctctctctctctcttccttacgcacccaagagagagaaagagaaagagaatcgatcgacgctgctagagaagtagaagaagatggcgggtggtgctcccaaacaattgttcggattcggagttgtggcgttgcttgccactctcattcttcctctctttatgcccgccgctgttcaggctcaatccgcagcccctgcacctgcccctactagcgacgggtcctcccttgatcaagggatagcttatgtgttgatgttgctggctctggtactcacatacatcatccactcggcctaaatttcctccaccttctgaacttatagagcagaaaagggttatgggtgtttgaagggggtgttgtgtttgttatgattaacaagtttcgtacattgtgtagcaagcagtgggaaatgtaatattgctaatacttatgttagaagagtaggtgttatgtttattttcccagttaataaaacggtctgtgccatttagtggctagtggttgtggtcagtacctggttacagagattgccaatgcatttcttttaataataattatcttgcttttggcataaaaaaaaaaaaaaaaaaaaggatgatatcactggaacctcatttgcatactatttatcctcatgg

SEQ ID NO: 118239 - DNA, 444 bp, Glycine max
  Clone ID: PAT_MRT3847_77779C.1
aaattactctctctttacacttttttactacaattaaaagaggtgtggaaattaccaaataggctgagcatactcaacaagaggggcatgcctaattttctttattgatttaaacaaacgaacaagcgaaagaaaacacgaattccagatcatgccgaggattccaaattttcagaagatctggtagtaacctgtaaaacagaaaaagctggcctaagagtgttaccagcaatttcaaaatcttcagagattcccaagagaatatcaaacaactgtagagccaaattggtgacataaaaatggttgcttaatctatagggtcaactaaaattcctttcatgggcaaaatcttggggtgggtggaggggaaagatccagtggtttacaaactcatgcccctgccatagttgaaaatggaatgaatcacgggatgggctatttttt

SEQ ID NO: 118240 - DNA, 687 bp, Glycine max
  Clone ID: PAT_MRT3847_7777C.1
gagagatgtgagattaatgggtatgagataccagccaagagcaaagtcatagttaatgcatgggcaattgggagggatcctaactattggattgaagctgagaagtttagtcctgaaaggttcattgattgctcaattgattacaaaggtggtgagtttcagtttattccatttggagctggaaggaggatatgccctggcatcaatcttggcattgttaatgttgaattctcacttgcaaatttgcttttccatttcgattggaagatggctccagggaatagtccccaagaacttgatatgactgaatcctttggcttgtcactaaaaagaaaacaggatttgcagttgattcctatcacttaccacacagctgcataattgagtgtcattaactctttatcataaattgaaaatctcagttagttatatgatggagaaaatttgtttggacttaggaccatggacatgcaatctaggaccacataatttctccaagctaaggccataactgttgtgtgcagttcctatcaggcattggccacgtgtggccaatagctaatgtgtcatccttctttctctcttttaaaatttggcttgtatcctagagtaagtcctttaaatttattttctgtaattcacagccataactccagaaattagaacatgagtttaattacttttaag

SEQ ID NO: 118241 - DNA, 431 bp, Glycine max
  Clone ID: PAT_MRT3847_77780C.1
gacgcacacgccaacgcacacgccacgcacaacacaatctcagctccagccttcttcttcttttcttttttttctctcccttccgcacccaagagagagaaagacgctgctagagaagaagaatatggcgggtgctgctcccaaacaattgttcggattcggagttgtggcgatgctcgccactctcattcttgctctctttatgcccgccgctgttcaggctcaatccgcatcccctgcacctgcacctactagcgacgggacctcccttgatcaagggatagcatatgtgttgatgctgctggctctggtactcacatacatcatccattcgccctaaatttcctccaccttctgaacttaaagcagaaagggatatgggtgtttgatagggggttgttgtgtctgttatgattaacaagtttcgtaca

SEQ ID NO: 118242 - DNA, 507 bp, Glycine max
  Clone ID: PAT_MRT3847_77781C.1
atttgcacgtctttttcttctttcatttgtcaatatgaatataaactacaaaacaacccattcttaccctaaaaatgttcaattatcaatgcttcaattgattgcttattttaaatattcattcttagaatccattttttttataaaaattagtcacgtttttgagtagaaattagttccaatgtattaatactttttaataattgacaaaattataagtcaaggcccttctgtacatttctgggtctaaaagtggctccttctaatttggcaaaaatttgacatgttagtaagagaatctgcccaatttgcatctgcatcccacaatttttagtatgacctttgtcttcatgcaggagaccttttcttggagtgtctttaatatatttcaaaatgtaaaatacagcataacaatgccctttgtagggaaacttaagaaattgacttaccaaactaactgtaaaataaatatttggacaagtgacagtgagataatttagtttccta

SEQ ID NO: 118243 - DNA, 238 bp, Glycine max
  Clone ID: PAT_MRT3847_77782C.1
tgtcctttttttttttttttgccgagagtactcagatgatcaatctatttaggtataaaagaacaggagtatagcatacaccattaggcttgagtgcccgatacagcaagacgttaaaagccattgcgactgtcttaattaaaaaagactcgagaaactgctgcttcccgaacaccatgagaatttctaaatcatagaggagataaatgcctttcctgatagatgggcgtagaaccaa

SEQ ID NO: 118244 - DNA, 178 bp, Glycine max
  unsure (1)..(178): unsure at all n locations
  Clone ID: PAT_MRT3847_77783C.1
gacgcacgcntacgtaaagctccgggaatttcgggctcgagnaagaaaacagtggngatgntaaatgcnaggtcccatgtcgntgcnngcgntggcgatcaattntnncgtacgcatgggcaatncncaggcgatagggatatgntgccctctncngaagnganacantgggnnattg

SEQ ID NO: 118245 - DNA, 354 bp, Glycine max
  Clone ID: PAT_MRT3847_77784C.1
aaaccaaaaaaacccctctgggaaccatacattaataacaaaaaaacactcccccccgaaagggcccacaacggcaaagacttggggccaaacgccaaggaggcatgaaaaacaagcaaaaacaaccttggaaaaaactggaagaaacagagacattacagaaacaaaaacccctcctaaaagaattgcagggggagcccttggaacccgggcccttgaatcatagccactaaccacgggaagactagactccaagaaaacctttaaccggtcccttattgcttcaataatgccatcttctctacccccggttcctactaagaaggcgcctctccatctttttcctggaggccg

SEQ ID NO: 118246 - DNA, 232 bp, Glycine max
  Clone ID: PAT_MRT3847_77785C.1
attttccaccgaaccttaggttaaccccttaaaaaacttaaaaaaattggaggaaaaacaccgttcttttttgaaagccggaaaccttaattttgtcttataaccattctaaaatggtttgcttgtggttatttgagggtatttgaacagatattgtggatgtggttcttagtatgagtactaatgattgtcactggaacttatgatgtatacgtaggttggctttgattgg

SEQ ID NO: 118247 - DNA, 282 bp, Glycine max
  unsure (1)..(282): unsure at all n locations
  Clone ID: PAT_MRT3847_77786C.1
atgagngtggttggatnngnttnnggtaatgagannngcatnntnantganntanacccagntggtacgaangtacaaccgtgancggtgncgnnanggntgcnccattcacnggcctcaagtccatggctngnntccccaccaggaagaccaacaatgacattacctccattgctagcaacggtgggaagagtgncaatgcatggcaggtgtggccaccagttgggcaagaagaaattgagattctttcctacctgccagacttgatgatgcacantggcc

SEQ ID NO: 118248 - DNA, 392 bp, Glycine max
  unsure (1)..(392): unsure at all n locations
  Clone ID: PAT_MRT3847_77787C.1
ttcgnnacncgtngnngctcngaattcnnctnganaatncctncatgacctggnacanaagaanggannncacgggangngncaggncnannnatannnganngannagcnngnnnnataantnggctgatgganaagttaggngtggnnantanctgttganngacnantgatanngncaaggngngannntgcgangggcnngncanacnagnnntaganggtngaacananagtananagtaganngntagagntngcnangnaaanncncnanaggtgtnaatgaagncagnnggtnatgtngngnnangngngatgagannagactnagtgnaganagncnctggtnatntnagnngnggatncagncactgatagagagngagntc

SEQ ID NO: 118249 - DNA, 129 bp, Glycine max
  Clone ID: PAT_MRT3847_77788C.1
atggctaccattgcattatcaagtagatataggagcaagttagcatatgacaccggaatttggggccttatggctcatttggggatggcttttgtggatgattgggtaagagggactgttattggttga

SEQ ID NO: 118250 - DNA, 733 bp, Glycine max
  unsure (1)..(733): unsure at all n locations
  Clone ID: PAT_MRT3847_77789C.1
cacgcgtccgctccagagttttacccatcatcatcatctattctacgctgtcctcctcaaacttctcttcaaaaagttctaatctttaccacaaagcctttagcatttgtgagaagaaaatgtcagaacctgaggaagaaaataaccaagactatgttcccaggtcaaagccagcagaggaaggtgggtggtggctgcaccaccatggacttcgatctggacttagaaacttcatggcctttggatcacatggcctttggctcaaaccccatgtcacctttcttggtctccacttcctctgaccaaccttactctcctctttgggctttctctgatggagaagaccccaagcttcctgcttctgccttctctgattgccacaagatcttctcttgcgattcaaattcaatagctgaaaagccagtggagaatgatgacaacaaaaaaaatttgccaccacttgtgcctatgccaccagtggaaaatttggatggttattgtgtaatcaaggaaaggatgacacaagcgcttcgttacttcaaagagttgactgaactgaatgttctagctcaggtttgggcaccagtacggaatggtaatcnggtatgtgcttacaactttcaggtcaaccctttgttcttgatccgcatagtaatgggctccatcagtatagaacagtctctctgatgtacatgttttctgtggatgggggagatgatgggatctttgggac

SEQ ID NO: 118251 - DNA, 530 bp, Glycine max
  Clone ID: PAT_MRT3847_7778C.1
tagcattacataatatattcagtaaaaaaagtaaaagtcaggtgaaattttaaattaaccatattttgtaagataaaatcagtaataagaactgaaggagaaataagtgattcttaggtaagatctacaagaatgaaaacaaattaacagtctaacatataaaataagcatgacgaatgcaaaaaaggttaaactcataacagagtttctctatacagagaaactcttccaaaaataggcgtatgtcgctttatgtaacggctacacggtattctttagtaaaaggcgaaagaatagttcgctttgtagccattacacgactccgtaattttgagagactagaagctttcttttttataccatcaatagttatcttcctctcagtacactacacgatgtgggctttaataagaagcatagacaagcacactcgactcgtccttgtggtgtcgttcttccctcattgctaagaatgcttcatgtttcatatcacttccaatttcatatctttggcttcactcgttctaatc

SEQ ID NO: 118252 - DNA, 533 bp, Glycine max
  unsure (1)..(533): unsure at all n locations
  Clone ID: PAT_MRT3847_77790C.1
cttctctgaaatcgaattcgaaagtagcaagcagccatggaagcgatactcgtggattgcgtgcagaagagtcttcggcatttcatgcactccaacgccgtcttcctctgccagcgtctctgcgccgagttccccaccgaggtagtattcaatttccttcaattttcctctccttcatttgattcctcagaaacttcgagaaaatggaattagagatggaagtttctctccctccgttaaaagctccgaaaacttcactgttgtaagctccgagatcggtggatttatacatgatgatttaaattgggttcatgatggtaatttgaaggttcaagtttaattttggctctttgttagttttgtgagactagtggatttatacatgatggttttccctcttccaaggtttgaacttttaagttgcgtgtgtgcactttgtgataatagtgaaagggtttcttttcatgtgaggactatttactacgaggtatagctttttttttttnttttttgcaagggttagaagatttttt

SEQ ID NO: 118253 - DNA, 1118 bp, Glycine max
  Clone ID: PAT_MRT3847_77791C.1
ggaaaatacacatgtgcgatctttgtctaacctttctcatattatgtatcactactttgcacttagtttattgatttaaattagattcttatttgacttctgcttgcagaggcttggggttgagatcatgatctctggatttgtctttgaggatgacgattttataaggccgtgggaaggactggatgacaacttggagagttaggtatgcactgaagtgggagtccaagaatctatttgccctgagcactgcaattcaggattggcttacttcaagaattgcaacagagctgatgaagcaaggggcaatgatgacggttttgcatgctcttttaactgcattggcttggccagctgcattacttgctgcaactgagttcatagacagcacatggacaattgctatcgacagatcagacaaggcaggaaagttgcttgctgaagtattattgggagggttgcagggaaataggcctgttacccttgtaggttactcacttggggctagagttattttcaagtgtctggagtttttggctgaaacagaaaacagtgctgaactggtagagagagttgttcttcttggagcacccattgcaatcaaggacgagaattgggaagctgctagaaagatggtagcaggaagatttgtcaatgcttattcaagaaatgactggatgcttggagttgctttccgcgccagtctactttcacaaggattagctggaatccaacctgtcgatattcctgggatccaaaatgttgacgtgacagatcatatagagggtcattcttcatatttgtgggctacacaacaggtcctagatgaacttgaattagatacctattatcccgtttataacaaattcctttccagacagtgattcttcctaattctcctatgtttgagtatatgaataagttcctagtgtcactgtcaagtggatcgggttctcccacaatttttcccaaagaaacatacagtgatcagtatctttcactaaaatgcttgtgttgaataatgcctgtatgtatatggatactgtatagcctgctaagatcgtttattatagctatacaatatctatatcaagttataaaaaaatgtaagctgacga

SEQ ID NO: 118254 - DNA, 333 bp, Glycine max
  unsure (1)..(333): unsure at all n locations
  Clone ID: PAT_MRT3847_77792C.1
gactagttctagatcgcgaggccgccctttttttttttttttatacaataatatatatttttcgatacgtaacatgttattttccattcagaattacatttgatgcaacagagacgtttcccctgtactacaaaaactacgtggctaattacatccatgtagacgtgctttaaactcagaaagacacttttgtctttcctttttccatacatttttgttctctgttctaatctgaacaaaacattgaaaaaagggttctatatgctaccctagctgaactccattttntatggcagggtggggatgtacattattattctattcatttacacc

SEQ ID NO: 118255 - DNA, 492 bp, Glycine max
  Clone ID: PAT_MRT3847_77793C.1
tacggctgcgagaagacgacagaagggatatgattttagtatatttatattgttcatagttttgatagttttggtattttccttttcatttatcttacccaactttttctaaaggattttctttcccaaattattctctaaagattttatccaaagaaatttatttgttttacgtgtgtgtataaatatatccatgcaaaatgaatgtctaattctaggcaacaattatctatttattttacctggtaaatttacatatttcatacattgatatttatttgtaaataaatttattaatataaatttatatataatatattaacaaatttaaaggagtttctttaaaatttggagttaatcaaagtcaaactgatgtactcttttgcaatttctctaaagttgttaaatttttaaaatttatttgtcagattttgtagaatgtaacagaacaaatgatcctacagtattatatgttatattgagtatgtatct

SEQ ID NO: 118256 - DNA, 304 bp, Glycine max
  unsure (1)..(304): unsure at all n locations
  Clone ID: PAT_MRT3847_77794C.1
ttccgctttttctattagatacataaacaatttgagcatcgccaggtctccgacccgccattgcaaataaaattttctttccaaaagccgagtcaaaagcgttgaccatctccaaaactgagtttccctttgctattgccaggttataaacctgacaacctattttgaaatcgtgcaggtgacgcaacgcgncaatatgcgcatgtagtgaatggaaaacataaatgtagtcgcgaactccagtgccgggagttgttttatgatcgcttgcgagaactgtgaatgcaaggcggtctgcgatcgg

SEQ ID NO: 118257 - DNA, 785 bp, Glycine max
  Clone ID: PAT_MRT3847_77795C.1
ggttgtagaaaggaggaaggtttattcatttttgcagcactctccaactttcttctttgctttctataacttactgggcacatatatagaaatagatagatagtctttgctttcaaagtttacactttgcttcgcgattaatccacgctcctagctcttctaaataccctttctttcttttgcaaccatataataccccgaaaccgttctcttttacatcggtatcgttgtcgcagatggagctagctttgagcttaggcgacacacccaagcccttctctttgcccgcaaaaaatgattctgtgagtttcaaaatagcactgggtgacgacaaaagggtttcttcagatccacccgttcagctcgaccttcttccttcaacaccagttcttccttcttcacgccttcgaattccatggctctccgatgcactgggtatggaacgtgtgacatcagagattccggtgagggcggtggatgacactgacgatggtgctgcactttcatcccccaacagtgcagtgtcatcttttcagatggatttttgtttcaggaacagtagaaagtcttgtgagggtgccagcgacgaggacgacgaaaatggctcaacaaggaagaaacttagactctccaaacaacaatcagttttcctcgaagagagcttcaaagaacacaccactctcaatcccaagcaaaaacttgcgcttgcaaaacagttaaatctccgtccacgtcaagtggaagtttggtttcagaacagaagggcaaggacaaagttgaagcag

SEQ ID NO: 118258 - DNA, 440 bp, Glycine max
  unsure (1)..(440): unsure at all n locations
  Clone ID: PAT_MRT3847_77796C.1
gctctggcgagcccccgtcctacctaaccggagaattcccaggcgactacggntgggacactgctgggcttttcgcagacccaaaaaccttcgccaagaaccgtgaactcgaagtgatccactccaggtgggccatgctcggagccttgggctgcgccttcccggagttgctgccccccaacggggcgaagttcggacaaaccgtgtgcttcaaggccgggtcccacatcttcatagagggtgggcttgcactcttgtccaacccacgtctgatccacgcccagagcatcctcgccctctggcccacacaagtaatcctaatgggtgcccctcaaggttaccgaattgacccgggcccccacggggaggaaactgacctaatctatcccagagcccacgctcgcacctggggcccctgttgagacccagaagctttcgct

SEQ ID NO: 118259 - DNA, 198 bp, Glycine max
  Clone ID: PAT_MRT3847_77797C.1
ccgacgcgtccgaccgcttccagaagaccaccgaaggggctgcgacacatactgcgatttctgcgagtgtggggcgttacctcgatcgcatcatagcaatgggacactccagcgtatggtctcctcacccaacatactcctggcctggccttaacactcgactaacgcgtgcaaattcacatgggttgatcatgaggt

SEQ ID NO: 118260 - DNA, 592 bp, Glycine max
  Clone ID: PAT_MRT3847_77798C.1
ccccatgtcgttcgatataaattttttttttttttttaatatttatataaatattaaaaaaaatttttttaataataataaattaaaatttaattaaaattttaattaactatttaataaattaatttataattttaactaattttaaattaattttcttgtttttttacaacttaaaaaactttttaaaacccttgacattacccaaatttaattcctcttgcattaaatcatccttttaaacaaattggtgtaattacggaaaaagccactcttcgattagaacttcccaactatttatgcaattttgaatggcaaattaaacccgccctttaatggcacattaaactctgcttatgatttaggttacgcgcatttttaccgttacatttggcagaaccttattacccgatagtttcctttccttaacttcttttctcttcactttttccttttttaccagtcaagctttaatttgagggtttcttttaaatttctgatttattgtttttcgccgcttttttcttaaaaaatttttattagatttttgttttaaattaggggttaaataattcttttataaaccccttta

SEQ ID NO: 118261 - DNA, 812 bp, Glycine max
  Clone ID: PAT_MRT3847_77799C.1
ccacgcgtccggtctaaaagtagctgcactttagaacaaatccacagcccaagaaactccattaaaacacaaccagagcaacaatgaagactttcctactctctggtaagttatgttgctcttggttcttacttggcctgcttgctcttattggttcccttgcttcagctacagagatacatttccatgaatttgttattcaagctaggccagtgaggaggctgtgcaaaacccaaaacataatcacagtcaatgggcagttcccagggccaacagtggaagctagaaacggggattttattgtaatcaaagtagtaaatgcagcacagtacaacatctccatccactggcatgggttaagaatgctaagaaatccatgggcagatggaccaagttatgtgactcagtgtcccatccaaccaggaggaagttacacatacagatttagaatcatagaccacgaagggacactatggaggcatgctcacactggcttcctaagagccactgtttatggagctttcatcatctatcctagattgggctctccttatcccttctctatgcctaagcaagaagttcccctccttcttggggaatggttcgatacggatcttgtgctcctccaaaggcaggcagactttgcaggattacctccaaatacatctgttgcatacaccattaatgggcaacctggtgatctttacagatgctcaagccaagagactgtgcgtgttccagtaaatgctggggagacaattatgctgagtatcatcagcagagcactagatcataaactctgtttctcattg

SEQ ID NO: 118262 - DNA, 262 bp, Glycine max
  unsure (1)..(262): unsure at all n locations
  Clone ID: PAT_MRT3847_7779C.1
cgcttctgagcttggtggcctgttccctccatctctccgaacctggnttcgcctgtncccttnactnnacaccctctgnccttntgccttgagctgggactgctttctgtctgtcggcctgcngcnagnncctgcccacaaaancccagggacagcggtctcccnagcctgccctgctcaggccttgcccccaaacctgtactgtcccggnngaggttgggaggtggaggcccagcatccgngcagtgacaccggttttcta

SEQ ID NO: 118263 - DNA, 139 bp, Glycine max
  Clone ID: PAT_MRT3847_777C.1
aaataagccatcgatataaagaggacagcctatactattttgaggccctctatacatgtggcatgcatgtcttattatattatctgtataaacctttatactaagagtccttaccttttattggcaaaacctttaaatt

SEQ ID NO: 118264 - DNA, 198 bp, Glycine max
  Clone ID: PAT_MRT3847_77800C.1
acaggacaaggaaaactattactacttaataatgaaccaaaccccaaatcatttgtgccgaatacttcctaccattgtccatcctccaggggggtgtgtgtacagacttaattcattatttccttctccacatcactccaacccatttctttgaggacttactcctcaacggagaaaacttatgctgtttaaatagcc

SEQ ID NO: 118265 - DNA, 256 bp, Glycine max
  Clone ID: PAT_MRT3847_77801C.1
cgccggacttagagtagccaatgggaataggacaattagacttggcgatccggatttggtgtcccagatggcatcgtagccgtttattaaatttgagaaaacacaactcgacacctaatgaaccgtacgattcaaacggaaaaaacacacggataatgaatcgtatccgttcgatcactgacaaacgcttccaagagtatgctatatatagggctttacttcctttactttaagaatttttgattcttttccccta

SEQ ID NO: 118266 - DNA, 733 bp, Glycine max
  Clone ID: PAT_MRT3847_77802C.1
tacggctgcgagaagacgacagaaggggaaagtagcagagcagagtaaccagctaggtagggttttctctttctcacgttcctcttcgcagcgccacagtagcttcgcattagcaatggcgagaatcaaggtgtacgagctgaggtacaagacaaaagcagagcttctgaaccaacttaaggatctcaaagcagaactcgctctcctccgcgtcgctaaggtcaccggcggagccccaaacaagctttccaaaatcaaagtggttcggctttcgatagcgcgggtgctgacagtgatttcccagaagcaaaaggcagcgttgagggaagcttacaagaagaagaaataccttcctttggatctgcgtcccaagaagaccagagccatcagaaggcgcttaactaagcaccaggcttcattgaagacacagcgtgagaagaagaaggaattgtattttccaatgcgaaaatatgcaattaaagtgtaatgttagaaccaaatatgatgataattttggcgtcactttctatttggtatttgacatacaatttttttctggccattcagttttgatgccgtttcttcctagttttcttttaatcatcatgaaacttttattaaatgttcgctggtgttactctggctttttttttttagtcatacatgaaaattttcaatttcttgctaaaaaaaaaaaaaaaaaaaaaaaaaaaaaagcggccgctctagagga

SEQ ID NO: 118267 - DNA, 1047 bp, Glycine max
  Clone ID: PAT_MRT3847_77803C.1
tttttttgcatgcaaaaattgaaaattttcatatatgacgaaaaaacaaaggcgagagtaaaaccagttaacatttaataaaagtttcatgatgattaaaagaaaactaggacaaaacggcatcaaaactgtgtcaactaacaaacgccaaaattatcatccgtattgggatctaacattacactttaattgcatattttcgcagtggaaaatacaattccttcttcttctcacgctctgtcttcaatgaagcctggtgcttagttaagcgccttcggatggctctggtcttcttgggacgcagatccaaaggaaggtatttcttcttcttgtaagcctctctcagcgctgctttttgcttctgggaaatcaccgtcagcacctgcgctatcgaaagcctaaccactttgattttggaaagcttgttcggggctccgccggtgaccttggcgacgcggaggagagcgagttctgctttgagatccttcagttggttcagaagctctgcttttgtcttgttcctcagctcgtacaccttgattctcgccattgctaatgcgaagctactgaggctctgcgaagaggatgaaaagaattagaaaccctaccacctggttactctttctttctgctactaccctaatctccccttctgtcgtcttctcgcagccgtacggacgcgtgggtcgacccgggattttgtcccgaggctggattgtaattcgcaaaaaattcattttattttcgccccagggattttttttccctacgaattaaaaattgttgaaccatatctttttctctctcaattagttgaggtttgagagttgtacttgtatttcacctattaagtctagttgagacaatacttgaccaattttccattgaatagatcagtgtcaaattaaaaccccccttagaactcaggtttgataacatttttatacttgataggctattcaattgattgtgtattttgtcccgaggctggattgtaattcacaaaaacttatactttaaaaaaaaaaaaaaaaaaaaaaaagaaag

SEQ ID NO: 118268 - DNA, 440 bp, Glycine max
  Clone ID: PAT_MRT3847_77804C.1
cttaaaaccgccagctttcagacagataactgatccaaagccagttaaaaaattcagggctttattgatgttcacacattatgcaaaagtattggcttccctcctactaacattaaaaaccttagctcccccaccctgaaacattggccccaaaaccttaacttttgctactgcaaacccttgggggctacccccaaacaagtacaaaaatgggatttacttcacctttaaaatggggaggatgaggatccataatatcttttttttggttcaaatcaaccaacactaaaaaaaaaactagtcctaaaacttttttataaacattttaattaactattacccctcatccattttttcgcttttttttttgggtttttaaaaaaaaaacatgattctgggacttgattttcatttaaaaatccccgttcactcattcactc

SEQ ID NO: 118269 - DNA, 370 bp, Glycine max
  Clone ID: PAT_MRT3847_77805C.1
cacgtctacgctagctcatcatgccgctgtaattctacattcacgaatttgcaaagctctgcagttagctgaatctgttcatagtatcagggtagaagtagtttgcgttctgagagcgcttacgcttcctcgactcagtgatgcgctgcgcactcgtcttcggtagcgaccaccagttccatatcatgcatcggcggaaattcggttacatataatatcaggggctagtgtaggattgttcatgtcacaaaattgcaaacaacatgccagcaagcgtcataaagtcgtgttgctggggtgtttcaataagtgcggtaactcagattagcagcatagcgctcaatgctcactttacaggtgggaaaactgt

SEQ ID NO: 118270 - DNA, 627 bp, Glycine max
  Clone ID: PAT_MRT3847_77806C.1
cttcactgtcacttttcaaacgatgggacattgggtcactcaatggaagtggtagatatgaagatgatatttatgatagaatatggtcccccttcaattcctcatcctgggaatctgtcagcacttccacaccaataaatgtcaatgatgatggatttagaccaccatttgaagtcattagaactgctgctagaccaaggaaaggcagtgatactttggaattttcttggaccccagatgatccgagttggaaattttatgtctacttgtactttgctgaagtggaacagctggagaaaacccaactgaggaaattcaatatatcttggaatggatctccattgtttgatgattctctagtaccgcgccacttgtttgcaaccactctttccaattcaaaatccttggtagcaaatgaacataggatttctatccacaaaacaaaagattcaacgcttccacccattcttaatgcagttgagattttcgtagcaagacagctagatgcccttgcaacatttgaacaagatggtatgatgtgttttcattgcggaacttagatattgttccttatttcctttggtgctgtttgtattgttcactaatcataattaaagttttacctct

SEQ ID NO: 118271 - DNA, 285 bp, Glycine max
  Clone ID: PAT_MRT3847_77807C.1
cttgttttttgatgctgtcaaaattgagaattgcacatccgtgctgatcagcacttgtgcgtctacacatgcatgcgacgagcttgcacgacaaaatgccctgcttatctacacaccagagcaatgtttccaaggctacaactcaataccattcgtgaggaccatgccagttaaatgctctccatatacagcacatttgaccaccgtgtagccatatgccctcgttttaggtgtgtccaatggatctactgcagtatccaagtttgtctcatagaagtagactac

SEQ ID NO: 118272 - DNA, 304 bp, Glycine max
  Clone ID: PAT_MRT3847_77808C.1
catcacatgctcgaacgctttactaggtttgtaaccaatggtcaccttttgctcgatggggttccgggtgtgtcaaaaccttactattaattcactgggcaagcgttcagcaaaattagccgtaacagttacgcccgatctgtagccagcgacctaattcgtctatgatctatttcagcagaccaatgaatttatacttcgcaacggtcccattttcgccaatttcgtaatggtccatgaaattaaccgcgccacagcacaggtgcacatcgccctgcttgaagccatgcacctcagccaactc

SEQ ID NO: 118273 - DNA, 351 bp, Glycine max
  Clone ID: PAT_MRT3847_77809C.1
tcgcttgggctcgtccacttctcacaagtaaagaaggatgtgaagcaatgatagaccaatctctaggcactgatgtgccctttgacagtgtagctaaagttgcagccattgcttcaatgtgtgtgcaaccagaggtatcaaaccgtcctttcatgagtgaggttgtgcaggctttaaaacttgtatgtagtgaatgtgatgaagcaaaagaagaatcaggttcaagcagttttagcctggaggatttatctgttgatttagctctaggaataagcactgtttctggtcagctatcagataatttccaaagccaattatcaggtactaactttgattctggagttgatattg

SEQ ID NO: 118274 - DNA, 946 bp, Glycine max
  unsure (1)..(946): unsure at all n locations
  Clone ID: PAT_MRT3847_7780C.1
cagctacctatccaacttttggaccggttcgatcaatatatttgttattaattacacataaagaaaagactatctttaacttcgttcgtttggaacaagagtttgtagagaatctctcgatgatggcaaacagttgtgtttcaatggacaataataatatcctgggtcttctcaagcttcgaattaaaagaggcgttaatcttgcaattcgcgatgctcgtaccagcgatccgtatgtcgtcgtcaacatgggtgatcagaagctgaagactcgtgtcgtaaaaaacaactgcaaccctgactggaatgaagaattgaccctttctgtaaaggacgttaaaaccccaatacatctgacggtttatgacaaagacactttctctgttgatgacaaaatgggtgaggcagagatagacttaaaaccatatgttcagtgtaagcagatgggattgggcaagctcccaaatggttgttcactcaagagaattcaaccagatagaactaattaccttgctgaagagagcagctgcatttggcaaaatggaaagattgtccaagaaatgtttttgagattgagaaatgttgagagtggagaaatacttgtggaaattgagtgggttgatgttgttggttgcaagggcttatcagaggtagaactttaagtgtgcttccatccttgaggttatatgaagcattaaaagcttagatgccagctccagcataatgtagtgtggtaaattaatgtattgtgatgaaacctatgtgacactagtgttgaatgtgtaattctaagttgaaactagctcttgcactttatcttgtggagtaagacatcacataagtaattagtaacttctcgaaatatttatgtaggggacaattgatctctttttctgattaaaaaattatgcctatatttctaataccaaaaaaaaaaaaaaaaana

SEQ ID NO: 118275 - DNA, 141 bp, Glycine max
  unsure (1)..(141): unsure at all n locations
  Clone ID: PAT_MRT3847_77810C.1
aaaatgggcaacagtgagaacaccatttgaattttgatttctaggcaagcagaggcttttgtccaattttcntatttgaccctttctcggtgggagggaattttagtgggacaaaaccttggaggatttggatcacactta

SEQ ID NO: 118276 - DNA, 337 bp, Glycine max
  Clone ID: PAT_MRT3847_77811C.1
gagctgtgtggatttcagctctacaccaatcgctgctatcctctggagtgcagaaaggagaagtcgactgatgataacgtacattggatgtcatgcatatatacttctgatctcaagaaaatagtacccacattttaaaactcatgctatgagacatgaccgcatgttactaatcttgcctattaaacagtctttgcagctaataaaaaattgaacaaaattgtcctgatgatgtgaacaagataaattcaacatgttcaacatgagaagatactgaggattcttaggatgaagaaaacaacttcgactatttatccaataatctagcatcaaacat

SEQ ID NO: 118277 - DNA, 567 bp, Glycine max
  Clone ID: PAT_MRT3847_77812C.1
ttttttttttttttttttttttttttttttttttttttttttttttttttttttttttttttttttttttttttttttttaaaaaagggccggaacaattttggaacggggcataaaattacaacaaaagctttaaaaaagggggccccccccctcccaatgggggggaaaaaaaattccccctaaaaaaaggccccaaaaaaaagggggggaaaaccaaaaaaatcccgggcccatttgggggaaggggcccaaaaaaaaatttttcaaaccaaaggggggaagggctgaacctttttttttgttttaaaaagggggggaaaaaacttcctgggagaaagggcctacccccccttgaggattaaaaacaaaattaggacttgaagcaggattcccaacatttgtttttaaaggactgaaggcccccggggcaatacttggcccttccctctttggggggggcaaggacccggggtctcccacagggaaacaggtgctaaaaggggggggggccccccccaaaacaaaaggaagctggggggctttgttaaaataaattttgaggcc

SEQ ID NO: 118278 - DNA, 414 bp, Glycine max
  Clone ID: PAT_MRT3847_77813C.1
gaagaacatacagtgatcgagtgcgtattcggattgttgggtactggattcgcgatcgtggcggctgattcatcggctgtgcacagcattctcgtccacaagtacaacgaggacactatcatgcttctctatttccacaaactcatcgacgttcgcgatcagctcggatacagggttcaattcactgagtacattcagaaaaacgtctgcttgtatcagatccgtaacggcatctatattaccaccgtcgactacgccaatttcacacagggcgaacttgccactgctctacgcaagaacccatactctgtgaacatacgttttgctggccatgacaaacatacaggcccttgactgcactatattgactacattgcaacgcttcagatgcttgaaaagggagctcatggttat

SEQ ID NO: 118279 - DNA, 349 bp, Glycine max
  Clone ID: PAT_MRT3847_77814C.1
aaaaaaaaaaaaaaaaaaaaggaaaaaaaaaaaaaggaaaaaaaaaaaaaaaaaaaaaaaaaaaaaaaaaaaaaaaaaaaaaaaaaaaaaaaaaaaaaaaaaaaaaaaaaaaaaaaaaaaaaaaaaaggggggggccccctattaagaggctcttcaccccggaattaaatttgggaccggttcttgggggggaacaaattttccttatggggggggaatttaaggttgggggaaaaaagggtaataatttttccctgggggaaaatgatatccgttaaaaattccaaaaaaaataaaacccggaagattaaagtgtaaaccctggggggccaaaagggggggctacct

SEQ ID NO: 118280 - DNA, 344 bp, Glycine max
  Clone ID: PAT_MRT3847_77815C.1
actaactctcactctctctcccatcacaaaatacatccaaagttagatccaaaaccatcttccacacctccactaactttaaacaccccactccacattctaccacccctcctatctcctcaatccttccttctaccactccctcatctccaaatttatcaccactctcctcttcctctacttcaccatcctcaccatcatcaactacaatcaccacaccaacaccatcatcccctacctctccaatatccttcatcatactcaacataccctttcacctatcatacacatgatatcctctccttatctattccactcctaccatatcatacatacacataaac

SEQ ID NO: 118281 - DNA, 502 bp, Glycine max
  Clone ID: PAT_MRT3847_77816C.1
cgggagctcggaatcgaggttggagggtggaggggatcataggaaatcggaagcgattactatactagacagaactagtactaaaaataaagatattactaatataaatataacaagaacaaacacaaagtgaatgtgatcagtcgcggtatttaaaattgaaagtggacgtagacaaatggaaaaggaatggagatgtttgaataataatagttcccgttcatgttcttagagagtgcgaggacatgtcaatgtgaaagtatgctcatgctctatcttcacatgaacatgagaataagatgcagcggctgtgggagtacgtcaacattgctataggcagagagggcaggtccatgcacatgcccaagtacttattgcttcgtgggtggtaattgatcggttataggcatcagccatactaattattcgaaatctagagacgatttccggtataagtcagaagatatggactatgttcatgaattcacttgagacgtgtgca

SEQ ID NO: 118282 - DNA, 419 bp, Glycine max
  Clone ID: PAT_MRT3847_77817C.1
ccagggcattgatcctttgattttaattctcaagtatgctgggaacatcttcatattgactcgtttattatcgacatttaaaaaaaatcattgggcaggaaaaatggaaatcacccacaaaatgtcatacgcatcatagacataaatcccaacaaaactccgcatgaattgagtccgcaaaattcttgacaaaaacagggctctcttatgaatagagatcgctaatagtattacattagtttatgggcaaattctacaacatgcagggccaccaggcacgcacagacatggctctccaatattcaccattaaggcctaaggggctgcaaaaactcaccatggactccagataaccactcttttgcctttatatgatgtaataagaactccttcagctgctatctttttgatctcgaagg

SEQ ID NO: 118283 - DNA, 205 bp, Glycine max
  unsure (1)..(205): unsure at all n locations
  Clone ID: PAT_MRT3847_77818C.1
tgcatgacattccagactagagtcagacnntattaaatccatgatcaggaacaggcagcaaagtcataaaaagaaggcacctactttgtttttcaagtgccatgcaaaaattannnnnntagtagagagaacttgtccatcacgcaggctattattcactagcaatctactccttggaagacttgctgatacgagacttgtgaat

SEQ ID NO: 118284 - DNA, 498 bp, Glycine max
  Clone ID: PAT_MRT3847_77819C.1
ggctcgagattttttagaagaggagagagaaagagatagagaacccgttcttctttttttccattaacattttcaatctctttcacctaagacacgttcctctttccattcctttcttcctccgtcccattctcgaattggcgtgtgcctcttgctatccctcaaaggttgtgctaaggaggttgaatccgagaatttcattgcgttttgctttgcgttgacttttgtggatgcagaagataactgataaatctgatgataggatcactggggttgtgaatcaatgcatgttgggaagtgggaatgctctacttgcttaaatatgtagtcattaatttgtatttgatatttagtgtagtcttttttgtttgactcaatgacaaagggtgggggagttggatccaaggttcaagtcttgacaagcttagagttattttctgattctgaactgcaaaaatcatgaaaaaaaattattcgatgttgatccatgatatcata

SEQ ID NO: 118285 - DNA, 351 bp, Glycine max
  Clone ID: PAT_MRT3847_7781C.1
gggactaaaaaaaccccgaaacctaaatattatctttttaaaccccacggtggtttcctttttggggcccacccgaaataaaaccccccatttattttttttttttacaacacacaagcttgaaattttaaaacaatagttttttttcaagcaatgggatttttaaacccgaaccccaaacgaaaccccggtgagattttcaaagagtttcctcctggtcaagccggaattttagagactaaaagttgggaaaatttttttttttaaaagtttccccttggtttttaaaactcccttccaaaggaaaaaattcaatccccaagggttttttcttttttttggaaacccgaa

SEQ ID NO: 118286 - DNA, 184 bp, Glycine max
  Clone ID: PAT_MRT3847_77820C.1
ggaaagtaatcacctaacttgtttctagggtttccgatggagatgagatggcacaaatacaatactaagtcaaactaatttctattatcccattacatagctcttgacagcaataccaactttgaattcatagtccggataacataacaacacaaggttaaatcactgtcactgactaataatc

SEQ ID NO: 118287 - DNA, 270 bp, Glycine max
  unsure (1)..(270): unsure at all n locations
  Clone ID: PAT_MRT3847_77821C.1
tgatcagctaatgacattttatttaatattcagtgggcaagggagaagggataaggtagctagtagagagaagagaccctgctctgggtctacagctgcagggttcccaggctaaggagaaacctgagctcctagacacactctgcaggagacagactctnttccacagtgttcccttcatgtgtaacttggcaggtaatactgttgcgagatctccactgttctgctgtcaaacgtaagaagctgctggcgatgtatttgttgccctgt

SEQ ID NO: 118288 - DNA, 278 bp, Glycine max
  Clone ID: PAT_MRT3847_77822C.1
tacggaagctccgaattcggctcgaggtgatttcagcgagtgatcggttttcacttgttttcatcataatcgtcatcgtctagggaagaggatgcctgttaaaaacatcgtgcgccgaaggcctcaagaggcgactcaccccgacacgttgaccgacgatttggctgattacattgcaaccttcatcgacatgatcgccggctcaggctccaggatcgtctacaacaaggctcacctacacggcgctaccgcccctgccggtcttatgttcgtattca

SEQ ID NO: 118289 - DNA, 258 bp, Glycine max
  Clone ID: PAT_MRT3847_77823C.1
atattcatatttttttctttttttttgtaaccccaatttttgggtggggcgccctttagggtttttaacctaccaagtgaaaacttctgatctgcccctaagtttatttgaggcttaagcaccgtgccttttattgccccaaagatgggcactaagggatccattgttccattttgcaatgacctggtcccaagaaaaaatgaaagaaactgggccagttctacaaaattaattttcaagctcaatcccaattacaga

SEQ ID NO: 118290 - DNA, 669 bp, Glycine max
  Clone ID: PAT_MRT3847_77824C.1
ccacgcgtccgagtgtgtttatctaattgtctatgttgatgactttgttatacagggaatgatgctgtcaaatttcccaactaaagcaacacttattcagtcattttcagaccaaagaccttggctgcctaaagtactttcttggtattgaagtggcccaatcaaaggagggtgttgtcatttcagagaaaatatgctctggacattttagaagagacaagtatgactaattgtaggcctattgatagtcctatggatccaaatcagaagttaatgttagatcaaggtgatccttttctagatctagagaggtatagaagtctggttgggaaactcatttatctcacaattacaaggcttgatctatcatttttagtcggagttgtcagtcaatttatgcaggatcctcacattgaccactggaatactgtgatttgcattcttagatacatcaaaaggactcgaggacagggattattgcataaagataatgggaaaacccaaatttgtgggtattgggatgccaattgagcaggttgtcccatagacaaacgatccaccactagatactggggaatcctttggaggaaatattggctctttggaaaaacaagaaacagaggggtgttgcccggatcaggggcaaaagcagaaatatagagctatggc

SEQ ID NO: 118291 - DNA, 417 bp, Glycine max
  Clone ID: PAT_MRT3847_77825C.1
aatctaattaaaataaatatttttctaataaatgagatattaaatgagacgttccattgatttttttaaaaaaagtaatagcccattttcattacatgtttttattttagtcaaacaaattaatcaaataaacaataaattagttgaaaacaatgtttcaaataagtcgcatttttttagaggaaaataattgttacttatttaaaaagtcatttccaaataagtagcaatggataaaaaaaaaacttcgattccaagaggctggtttccggatttgaaatccatggacccaacaagtccaccaaggtacaacttttcccggttccacttaagggctggcttttaaaataagttacaaattggatattcacccaaaattttattttcccttaacaaggaaagtttaaagaaccttag

SEQ ID NO: 118292 - DNA, 1786 bp, Glycine max
  Clone ID: PAT_MRT3847_77826C.1
cacacacaagacagccaaattgaactgagagagaaagaaaacagagagagagaaaacagagagagagaaaaaagaaaacattgaccgccattaaaacccacttcccttttttatatcactcccaaacacattcctctcatttccttttccattttcctttctctttgtctttctctcacaattcatcactttagcattgcaacactgaaaggaaaagaatactctttaagaacttaaaaaacaaccaattctagtttgtgtttcgttttctctacagttcctacagtccggttcggtttggttcaattggatcatggagcaaaccactctcgaagccattcagttcaacgaggaaatccaaggcctcatggctgctccggcgccggataccgtcaattacttcaaggcgttgctcgagcttccgtcgacgcaggccgtcgagctcctccactcgcctgagcgcgccagaaaaccgctgcgcctcaccccccctcccaacgccgccttaatcgaacgcgccgcgaagttctccgtgttcgccggcgagaactcgccgcctccgcccgacctcgcctgcccctcccccgccgcgcccggcgcccgcgccgcctgggtctccgtcttcgccggcccgaacgcgaccgcgaactcgaactcgccggaggtgaagcgcgagctgccggagaccgacgccaacccgagctccactcacggcggcggaggcgccggctccgtctccgatctcgccgtggagaaccagaatctgaaaactgcgaagaggaaggagcgagagaagaaggttaaagcgtcgtcgaagaagagcaagagcgtcgccgccgccgacgagatttccggcgacggcgagaagcttccgtacgttcacgttcgagttcgtcgaggtcaagccactgatagccatagcttagcagaaagggctaggagagagaagataaatgctcggatgaagcttttacaagagctggtcccgggttgcaacaagatatcgggaacggcattggttctggataaaatcatcaaccatgtgcaatctctacagaatgaagtggagatattatcaatgaaactggcagcagttaacccagtaattgatttcaacctcgacagcttactggctactgaaggagtgactccaatggactgtaacttccctccgacagttgcacctgtcatgtggccagaaatcccacagaacggaaacagacaacaatatcagcaaccatggccgtttgatgcactccaccaacccctttgggggagggaagaagacaacactaatttcatgactccagaaaactcactcttgagttatgactcatcggcaaattcagtatctctgcattcaaatcagttgaagatggagctctaaagggaaactacaaaggtggtggtaccagtagcaattagcctattagtgtatataacaaatatagtattagcaattagtcatgatttgagcagcctcaacattcagcaggttttccctaactctattttgtcagagtcagttggaaacctggattttattcagccagcaaggaagaagaattggtatgctatttttatttaatatattactatcactatgtatactaactatagtaatcattcaatctttcaagtgattgattgatttagattgtaaaatcattgaacgaactattactgaactatcattgaagtttgttgctttgttcattaaatgctacttagatggttggctctttttcaggattttcctaaaaaaagatattttaatataagaatt

SEQ ID NO: 118293 - DNA, 271 bp, Glycine max
  unsure (1)..(271): unsure at all n locations
  Clone ID: PAT_MRT3847_77827C.1
ggtctatcacctctcccatcgcttgaagggtgcgtttatcaggaacaactatgacacccgttccggtgttctttctcagctaaaggtgttacttacaggttacaaaaacaaaccaccgaagactgccgatacaccttttgcagttcttgaaaaaacaaaagcaagggatatatacgagtatgctcttntccttnntgttaaaaatgaggatcaagatgcttttgaaaggcacctcctccaaaaaaaaacttattatacagatgcctggaag

SEQ ID NO: 118294 - DNA, 464 bp, Glycine max
  Clone ID: PAT_MRT3847_77828C.1
cgtcttatgcggattctgagggagaagatctacaccatgctgatcaaccgatacagaggcctgacgaatcttctaccggttcaaacgaatcatatgggaaaggtaatgcaaaagctactggagacttttctggaatggcttaagcctttcacatttcttccacaacagcaagggcaatctctatagtcatcgccttctctgctctcacccttccaatcttcatgaaatccctgggacaaggactggctctcaagaccaagcttttctcttacgcaacactactctttggtttctacatggcctggaacatcggagctaatgatgtcgcaaatgccatggggacttctgttggatctggagccttgacaatccggcaagctgtgatgacagctgcaattctcgaattctcaggtgcttcttttgatgggatactcacgtgactagcacgatgcaaaaaggaattc

SEQ ID NO: 118295 - DNA, 279 bp, Glycine max
  Clone ID: PAT_MRT3847_77829C.1
ctctgtcattacccaacaagaaagtcctaagcttataggatcactaatccaaactgcaccatggtgtcctcagacgaatactgatccatgataacaacactacgcattaactctaacacattctaaatgccatcatctgaagccatgcataccttgcttacgatgtatgagaacctacgcatggattaccagagactgatctaccatagtgagcactaccatcaaatgggttattgccaatggacgtcatagagcttgagttaaaccaaaccttgacat

SEQ ID NO: 118296 - DNA, 274 bp, Glycine max
  Clone ID: PAT_MRT3847_7782C.1
cccacgcgtccgcacacatgtccttcatgctgactggtccaaagattcgagagaggtatatgtaggggacataatcaaagtaagagttgagaatatagaggactatggtggctcatgggcatatgcgcttgcttgactgactttatcactttactggactaatacacgtctaacaagtgtcatgggatctaatgcacgatgtcagcgatatgttaacagcaggagatgaaatgagggccaaagttgtaggagttgctaggggaaaatacaaggt

SEQ ID NO: 118297 - DNA, 391 bp, Glycine max
  Clone ID: PAT_MRT3847_77830C.1
ggatcgagcggatctagcggttcgagctgtgactccctcgctcccactggatgcaggcgagggctgcaccctaagactttctcagttccatggaggccacaaatggctctgccactgccccaggcctgcgcggagagtgatatcagatctcgcctgctcaagacaaagagtgtgcgctgtcgccaagcaccataatcctgcccgaaacccacacaacgaagagttattcaacgccgacctagggcaatcagactaaagaaccatatatcagcaaggaggagagccccttgaggttgacgctcgcacaatggcaagggatggaggactagacaatgatatttagaccatcaaatacgtgatgatgctagacaaacactacatctactgctaa

SEQ ID NO: 118298 - DNA, 2031 bp, Glycine max
  unsure (1)..(2031): unsure at all n locations
  Clone ID: PAT_MRT3847_77831C.1
gatacatgcatggtaaaacactggtgaaacatgtgattttcaggttcttgtgtatagaagaatatctgtttgtagaaacagttccttacttccttaactagatattagtctctaattttttggctatcccgggttcaattacacctgaaacaaacaacaacaacaacaacagacgcgtaaggcacaatggactaccttctacttcttccactaataatcaccatagtatggataaacattcatgtattcatctctagcttcaaaccactcaaatcctctaaaaatcccccgggtcctcgcccttttccaatcataggaaacatcttggagcttggcaaccagcctcaccaagcacttgccaagctttctcaaatttatggtcctataatgagtctcaagcttggtaagactaccaccattgtcatttcctctccacaagttgccaaagaagtgctacaaaaacatgatcaaatttttgctaataggatggtccctgatactcttcgagcacttgatcatcacatactttctgtggcatggatgccacctttaccacaatggaggacccttaggcgagtttgtgctaccaaagtgttctcttctcagcagcttgattctacacaagtttttcgtcaaaggaaggttcaagatttgatggattatgtgaaggaaagatgtgagacaggtgaagctttggatattggtgaggcttcctttacaactcatcttaattccatatcaaacatttgtgctctcaatgggattggttcattacagctcttagcatctagaactctgcaagttgtgttggcatctcttctatacagctacgagtggaagctcactgatggattaaagccagatgacatggattgatctaaaaaatatgcggagaagaatgaatggttattttggaaagttaattgcgttttttgatggtctcattgaggaaaggttgcgtttaagggcatcagaaaatgaatccaaagcatgcaatgatgtgttagatactgtgctggaactcatgcttgaagagaattcacaagtgacccgccctcatgttttgcatttgtttcttgatttatttgtggctggaatagacacaacatcaagcacgatagaatgggcaatggctgagttgctacgcaaccctgaaaaactagaaatagttagaaaagagcttcaacaagtccttgccaaaggtgaacaactagaagaatcacatatctcgaaccttgcttacctacaagcagtggtgaaagaaacttttcgcttgcatccacccatcccaatgttagtgccacacaagtcagaagttgatgttgaactatgtggcttcatggtgcctaaaagtgcccaaattctagtcaatgtatgggccacaggaagagattcaagtatttggacaaacccaaatcaatttacacctgaaagattcttggaaagtgacattgattttaaaggccaagattttgagctaataccctttggagctggaagaaggatttgtcctgggttgccattggcttctagaactgtgcttgcataaggcacaacctctcctagtcattcccatccaagcataataccaagaaagacaacatccctgcaatcaaataggtagcaggttctcggaatgggtccgtttcttattcccaatctttccccttcttgatgtaaataaaacctttaatcattagcatccaaatgttttgataatcagttagttcccccctctttaaaaaaaagggttggggggggggcaaaaaagtaattttttttagagtggggggttaaccctttttgtattgtttaaaaagttttttaagggggggttttttgggttcccccccaaaattaggaagtttttaaaatttttttgaaaaaaaaaaaattttttgggggggggggggttttaaaaaaaaaaaaaaaaaaaaaaaaaaaaaaaaaaaaaaaaaaaaaaaaaacaaaacaaaaaaaaaaaaaaaaaaaaaaaaaaaaaaaaaaaaaaaaaatannnnnnnnnnnntn

SEQ ID NO: 118299 - DNA, 629 bp, Glycine max
  Clone ID: PAT_MRT3847_77832C.1
acaagcagtggtgaaagaaacttttcgcttgcatccacccaccccaatgttactgccacacaagtcagaagtcgatattgaactatgtggcttcatggtgcctaaaagtgcccaaattctagtgaatctatgggccaggggaaaagattcaagtatttggacaaacccagatgaatttacacctgaaagattcctggaaagtgacattgattttaaaggccatgattttgagctaataccctttggagctggaagaaggatttgtcctgggttgccattagcatctagaactctgcatgttgtgttggcatctcttctatacaactatgattggaagctcacggatggacaaaagccagaagacatggatgtatctgagaaatatggaattaccttgcataaggcacaacctctactagttattcccatccaagcataataccaaggaagattacatacctgtaatcaaattgttgcaaatttcttggtatgtgactttttcctacgaataaaaaaaatatcaataaaacttcattagcatgtaaataaaacttttattcattagcatgcaaatgtaattggatcataattagtgagtgagtaaaaattttgtaattttttccccctcc

SEQ ID NO: 118300 - DNA, 582 bp, Glycine max
  Clone ID: PAT_MRT3847_77833C.1
atatctcgaaccttgcttacctacaagcagtggtgaaagaaacttttcgcttgcatccacccatcccaatgttagtgccacacaagtcagaagttgatgttgaactatgtggcttcatggtgcctaaaagtgcccaaattctagtcaatgtatgggccacaggaagagattcaagtatttggacaaacccaaatcaatttacacctgaaagattcttggaaagtgacattgattttaaaggccaagattttgagctaataccctttggagctggaagaaggatttgtcctgggttgccattggcttctagaactgtgcacattgtgttggcctctcttctatacaactataattggaagctcacggatggacaaaagccagaagacatggatatgtctgagaaatatgggattactttgcataaggcacaacctctcctagtcattcccatccaagcatattaccaaggaagattgcatgcatgcaatcaaattcttaataagttgtcgtaaactgtacctgagttcgattcttatgaataaaaaaaattcttaataaaacctttaatcatttgcatgcaaa

SEQ ID NO: 118301 - DNA, 411 bp, Glycine max
  unsure (1)..(411): unsure at all n locations
  Clone ID: PAT_MRT3847_77834C.1
attattcataaaatactaacatccctttctaacaaacaaatcttttctttttataccactnaacaacagtgggatcctatacataaactagggggcgccatcctctcataccaacatacccaccctaatctatcttttcaaccattaaacccattccctcttccaaacacttcaattattccttctcattctctcaatcctcaaactaattttctacctcccaaattccatcctaaccattttaataatcttccttcttctcttcctctaccttcataccattctcatcctaattatactccttaaatccttatcaaacctattgattacatatttactcttctcaaacacatcaacatttatctccatacccctcttccttaaaataccctcaacataactttttttacc

SEQ ID NO: 118302 - DNA, 360 bp, Glycine max
  Clone ID: PAT_MRT3847_77835C.1
gttggtgcaggtcaaaaggcactggtttttttacatggattcccagaaatatggtatacatggaggcaccagatgatgtgctgcagcaaatgctggctaccgggctattgcctttgatttcagaggctatggactttctgagcatcctgcggagccagaaaaagcaaacttacttgaccttgttgatgatgtcgtgggtctgttggattcattaagcattaccaaggctgtgcttgttggtaaggactttggtgcctttccagcgtatattgttgccgctctccatccagacaaagtagattcagtcataatgttaggtgttccattcatgcttccaggtccctctgctattcagaacct

SEQ ID NO: 118303 - DNA, 422 bp, Glycine max
  Clone ID: PAT_MRT3847_77836C.1
ggtcgagatgagatcacgaaatcctttcaacatccaaggtgggttcgaatatcacacacggatacaaaaggaggttccacacctattagttgaagattataaatccacgctactaaatgtgatattgtttgctatatttcctatacgtgtgggctgatctcttgcttttgatttcttctctccttgataacagcatgtgctggaacatgggaagtctaaagaccgatatattatcatagcataagactcatgcgattcttgttaaatgagtcaacagaagtttgcctccaatgttgaagagaaatgagtgacctttgggggtccttctgagcgccaattactaaggcgtccaaagcgtgggatcacagatgaaaatgagcctcttcaggcgatgatgaaagatcaatttgcatactacgttg

SEQ ID NO: 118304 - DNA, 725 bp, Glycine max
  Clone ID: PAT_MRT3847_77837C.1
ccacgcgtccgcagatattatatatacactgcagtggattgcaaccaaagaaggtctagaaattgataaggatgccctgaaactcattgcatcaaggtcagacggatctttgagagatgctgagatgacccttgaacaacttagtttgcttgggcagagaatatccgttcctcttattcaggaattggtagggctaatctctgatgagaaattggtggatctgcttgatttggcattatctgcagacacagttaacactgtgaagaatttgagagtgatcatggaaactggtgtcgagccattggctttaatgtcacaacttgctacagtaattactgatatacttgctgggacctatgatttcacaaaagaaaggcgaaggaggaagttcttccggagacaaccattgtccaaagaagacatggagaagctgcgccaagctctgaaaactttatctgaggctgagaagcagttgaggatgtccaatgacaagctaacatggttgacagctgccttacttcagcttgctccagaccagcaatatgtgttgccaacttcatctgataatagtttcaaccacagtccctttgctttaaaagatgcagatgcaagagaagcagctagactgactggtaatcctgttgacattcctaacaaagggagacggttatcaatggatgctagaattgaaaatttccatgctggaagctcagcagatggtatga

SEQ ID NO: 118305 - DNA, 302 bp, Glycine max
  Clone ID: PAT_MRT3847_77838C.1
cgggttcgcccgacgccccacgtgttggttgaccacaggcgaaccagagcgtgagtcccctaagatccagacagcaccgctgttgctgctggatgtcaataatgtgtaaatgtccttccacatggccggagtcacggccctcacgggcaagagaatcactgtgggggcggctctgacaaacaaacaacaggttgcccacccactctcagtggatgagcaaaacagccgcatattaggcctgtcaccttgcggaagaagaaaagctgcttcgtgggtctaagaggaatgaggacagtgatgac

SEQ ID NO: 118306 - DNA, 403 bp, Glycine max
  Clone ID: PAT_MRT3847_77839C.1
ttgtcgcttgggggaagactgggatatgcttcattgataccatatgttgagccaggtgtgcaagctcaaagtgctgaagtttactttgacttgttccctgtgtaggctgatagtaaagagggagttagcatcacatctggggaattgaaacttgttgactatgttccactgtctacaaaatctatatttggaggaaacttccaaagaatggccactggctctaccttgtgacacaattcgtagtgtattgacttcaactgatgagagattggtagtgacaaaacatgagggatacgaatcttttatttggtgaatccaagaatattccactcccatgatgcccctagatgaagaaattatttctaaggctggacatgacattggtgaggaatgttttgaatgt

SEQ ID NO: 118307 - DNA, 679 bp, Glycine max
  Clone ID: PAT_MRT3847_7783C.1
ctctgtgtaaaaaatatcctcctctctatctctgttcgaaacaagtccaacaccagcaacacactgcttcaatctcaatcgggcacattgagaaatggttttgagtaatgggaaaactgaggcaccattgccaagtagtaatgggggaggtgctgagattgataacaatgagaagaagcccttcaagatcttcgtattgattgttcctcgcgaagatcttgcctatgaggtatgtcgccactccatcttgaaaaggtcttcaatccctgttgagatcataccaattatgacaccttgccttgccaattaccaaggttgggcaatgtttgtggattgtgatttcctctacttggctgacatcaaggaattgaaagacttgcttgaggacaaggatgccactgtgcgagttcagcatgactatgcgcgattggaagatcacctatgaaaggcttggctgcaagttatgccatgtacttttgtttcaggatcatcttcacaccctctggcctcgtgcttagtggggtcaattatgttactgaatgatgtaaacgtcccttatatgttcatatgatcaagaaatacttcattcagcgttctaaaagattgagacttcaatgtgtatagtttaaatgtagcaaactcgagctgaaatctgcatttctttgacttgtattgtttc

SEQ ID NO: 118308 - DNA, 294 bp, Glycine max
  Clone ID: PAT_MRT3847_77840C.1
cacgcctcctgaagaattttatataccttacgcatcgtcgaatcaacagagcatgtgtgatttcatagtgcgggtggtcacaaaaatttaacacacacaacgtgatagagatacaaatcttcgctctatgtcaatgtcacgaagcaagtgtttttacacaacttagcaaccactccatatattagaaaagtcagtttatttggcgtcatatttgctaaaagtcgtttcgtaactataccctctaattcaagactgaacaaacaacgatgggattgacatataaatagtacaatt

SEQ ID NO: 118309 - DNA, 567 bp, Glycine max
  Clone ID: PAT_MRT3847_77841C.1
taacaaaggaaaaaaaaaaaaggacaagaaaaggctagggacaaagacaaccatggaggaaaaaaggacagcaatcacaaacaggcaaggattaaagaagaaaatgcacccattaattagcagcttaagcattggcggcgatggtgggattgccgggctttttgtgttcggtggagccttggcccttgcgggtttcatggcagttggttcttttgcgagcaaaaaacataaggcaaagggcacccatgatgatcaccaacctaagcctaaacctaaaccccaacaattgttattggaggaacacgggtgtaagactgatcatgaagaagatcgtgacaccacccaaagtctcacctctcttattcagcatggggatgccgcatgctgttgggcatccaatatgagaatcaaccaagttagtgattcctccgagttgctgtctgctcaatccttgattttggaggataaaagtgagcttaaaccaagaagtgtagaggagagcccaaccgactttcaccatcaggaaattgtgttttctgactcttcgcacccagaaagcgcggcatc

SEQ ID NO: 118310 - DNA, 327 bp, Glycine max
  Clone ID: PAT_MRT3847_77842C.1
gggacaatagacggggacactaatcgtgaaccaatatcgaccttcaactataccctgaccctgtgttaatttcctgtgttgagaagcaatgagaggcagagatgcagagaatcacaccttacagttaaaccctggagttcaagccttaagacgataacatgatggacgaggaccgcacccctgacgccgacacttcaccgccacaacctaaactcaaatccgcgatgaccgccgccgcagcaccgatcaagaccaccggtcgcagattccggcaagacatcgaagccaaccgtgagactcgcatctccagttccgaattcgactcgc

SEQ ID NO: 118311 - DNA, 421 bp, Glycine max
  Clone ID: PAT_MRT3847_77843C.1
gataaaaaagaattaggtgctatttatatcactagatgattcttagcatgctgtgctcgtgaagggtaagtaagcagtgaagaatttgcgtactttagctttagattgagtgcttcataagattttcattgaggatgtttgaatagttaccaaaattgagtctgggacccaaaatcaaggtgatgattgaaaaagtggaagcaactatttgctgttttggctgtcaacgtgattttggaattatgggaaaattgaatctaatccaagcttgataccaatatcttcctttcatatattggatttccaagtgtaaagggatggtttcagcttttttgggggtattttttatatgcatatataaaaaaaaaaacataaatgaaagataaagaccattttatatgaaattatatgcattttttat

SEQ ID NO: 118312 - DNA, 859 bp, Glycine max
  unsure (1)..(859): unsure at all n locations
  Clone ID: PAT_MRT3847_77844C.1
aactttccctttaacccctttccaattgggcagattttctaaaagcaaaggaatcaaacctctctctcacacactcactcccacacccttccctgcaactgcaacaccaaatcatcatttcagtcacacctaaaatcccaaaatactatcaccaaattttcgtaaccccatcaactcaaaatcacaaacccccaatataatgttattgaaactccgatgacacccttcaattaactctctcacattcaaccgtgtgagagagggcataacttgaaccatcccaatggagattcaacaaagcttgaagctcacaatccacaagaaatggccatcatcacccaaaaaaccaccaaaagaatcagaaccaataacccccacccccaacacaccaaagctgaaatggaagaaaatcttcttccaaaccaaaaccaaaacccaaatacaaaccccaccagaagaattcctctgtcctatttcgcgttccctcatgttcgaccccgncatcgtctcctccggccactcctacgaacgctcctccgtcgaagcctgcaaaaatgtcaattttacccctcaactccccgacggcaccacccccgatttctccaccctcatccccaacctcgccctcaaatcagccatcctcaaatggggccaatccacccacacacctnctcctcacccccacaacaaccccgttcaaaccctaatctcctcccaccctaacctcgnccccaccctaaacccctcgnacacaaacctcggcccccccaaccccaacccccccccagagaaaatctccgaccaagaaaaggttctggacctccctgggcgcaaacccaccacaaccccggctccacaa

SEQ ID NO: 118313 - DNA, 514 bp, Glycine max
  Clone ID: PAT_MRT3847_77845C.1
aattagtagtgaatccatcatttgagtgtatttattaaagattcttttaacttatcagaatttggcattttatttgttatattattggtagtaattgtataaaaccaatgataattgtacagcaaatttgttatattattgtgataagtgataaggaacactattaaagaaaaataattagtagtgaatccatcatttgagtgtatttattaaagattcttttaacttatcagaatttggcatttaatttgttatattattggtagtaattgtataaaaccgatgataattgtacagcaaatttgtttgagaaagtaaatcaaaaacatgaatgaatagatttcaattaaataaactaaggttgtaaagcaattgaaacaagtacttccaaagttcactcagaattgtgaagattaaaagaaaaggtcaacaatagccacagttaatctgcataaaattagatttcaaataaagagaaatttggaagaacatgtgaaaatgataaattgcaaac

SEQ ID NO: 118314 - DNA, 149 bp, Glycine max
  Clone ID: PAT_MRT3847_77846C.1
ctttgtccctggacaatgatcattgcaattcagtgcaatcttctgctcccatgatctctaatgtatctacacctgtgttccacatgaatctgaattataaccattagattatatatattacaagtttatgttcaaataaactaagtaat

SEQ ID NO: 118315 - DNA, 441 bp, Glycine max
  Clone ID: PAT_MRT3847_77847C.1
cctctcagaaggggtaaacaagaacaggatgccctagtacattgactaaaaagggtggtgctgagcgacatagaacatataccctgatatttcgcacaatgtatacacgatctagtgggaccgactattatgataacgataagcatgaggagaacaactcttacatatacttatggagagtcatgctggctgcctcagcatttgacgggcctggcggggcactggatcaatgagctactcaattccgaagcgtgcatcgttttgagccatggatccactaggttaccaactgaaaaactatagaagccaatgtgctactgcttatcagcgtgcacaatgacactgccttcaaaaacaaatgcatgttattggatgtaggcaaatagcctgtggcagtcgagagtgttgaactcactgcagtcgggtagaatgcaaaagcca

SEQ ID NO: 118316 - DNA, 250 bp, Glycine max
  Clone ID: PAT_MRT3847_77848C.1
gctgcgagaagacgacagaagggctccctggtcatcttaataccatgtgagtcgatccgattctagctttataagaatctatgctgacctagtgactgatgacttgtctatggatttgatgtgtgattgcattctaaatttgatttgtctcggcatgctttacaaattcatgctcgttgggctaaagtgcattattttgagttgctattctttttgtgtctcttgcatccaaacttatgctagattgcta

SEQ ID NO: 118317 - DNA, 243 bp, Glycine max
  Clone ID: PAT_MRT3847_77849C.1
atatctgcacaattcggcttgaccgcttgcaggaatatatgagaatcaaattatatcaaaaggccggggtcacataattgataaagacttgataaattatgcttaagaccatcaataagtaaaacatcctctgtggaggtagagagattcgtacctatatttccaactccaacaatattacctttgatggtgactccatagatcacatgttcactatcttttagagaaatatgaataaacttt

SEQ ID NO: 118318 - DNA, 705 bp, Glycine max
  Clone ID: PAT_MRT3847_7784C.1
ccctcgcgtcctgggttgtgctagctgatttgcgaatgagattggatatcaatgccagctattccaactccaatgtactacgcgtgaagaagcatctatccatcggatatcaatgctttgctgtggtttaatttggttccaagatctttgcctatatatatataagcccaacactggcggcgtgcatgtgcgctaccgctgaatcctcgctttatcttcccttcccttcatctccgcttcaaaataatatcctcctctctatctctgttcgaaacaagtccaacaccagcaacacactgcttcaatctcaatcgggtacccttctctttttctcttcaccttttaatgttttttgtttcggtctttttagaaaaattaactagattattctttgacattgcattacatcaattgggtgatcttgggtgtggaaaaagattagatttttgcccttgcttttctatggttttgtttagagccaaatgggtatgtgtgtgcttgtgaatttattttcattgtcatatttgtgtttgatttgttgcatgacaggcacattgagaaatggttttgagtaatgggaaaactgaggcaccattgccaagtagtaatgggggaagtgctgagattgataacaatgagaagaagcccttcaagatcttcgtagggtatgaccctcgcgaagatcttgcctatgaggtatgtcgc

SEQ ID NO: 118319 - DNA, 128 bp, Glycine max
  Clone ID: PAT_MRT3847_77850C.1
aacagagtgcatgataaccctaatcaatgcaacacacagagtcatgcaggaagcgcaggaaacaaattggactcagctagtaacctaacagattttctggaggcgcaaaagagtgtttagctaggctg

SEQ ID NO: 118320 - DNA, 411 bp, Glycine max
  unsure (1)..(411): unsure at all n locations
  Clone ID: PAT_MRT3847_77851C.1
ggtttttcaagagatgaccttgtgacacagcttaatgcattgaaggtcccacacaaactttcaccgcatttggatgaatttgttcgtatcaaaactgggttgcaggtatgatagtgagacaaagggttgattacaaggatgctttcatatgtgaattttctaacttgtataatgattttttgagtcaaacactgattagaggagaaaagttttggggactaactaaacatatttcctaccatgtgtaatagctaataggttcgatatcaatagtgtgaaattgggctttaaccagctactgacctactgtgggtgtatcttttccttttattttatgctttatanttttcacatgggaggcaattgagttatattcgttttgcttgtattatcctgtatgaactaagcatg

SEQ ID NO: 118321 - DNA, 416 bp, Glycine max
  Clone ID: PAT_MRT3847_77852C.1
aattgttaatattgattttttttattaacaccgacactactctacctttatttttcctcaactttgtattcatgaaagcccacaagactgtaccaagagggactcgggatcgaaggccatcggcaaagaaataagcagaggtctccattttttttttgttggacacaaatcttacctgaaccccatcaccatttttgctatttgataaacaaagggccccagttctgactataaaagccatggccactttctttggtcttccccaaccaaaggcatgactattagcctcactcctaggggaccaagcagcaccaattattctcacataatcacttaaacttgcaagcagccaccttgtccaatgtcgtgcggcactcaccgctccatccttgagactcaccaaggcatcatggagt

SEQ ID NO: 118322 - DNA, 343 bp, Glycine max
  Clone ID: PAT_MRT3847_77853C.1
tttttgacatacagaaacttgattatcgatcagggtgggagaggagtaatggacaacattctatgtgttgcgaccctcgtggacagcattgatacactgacgtgtcatgctgtttatggacaatagaggtgcactgctcctaatttgctctgtcttatactgaataaaggtctaaggctgtaatccaatccttattacaagaaaaagcgctatatagaaatatgtacgctgcgaatttgcaggtgctttggagctgattctagacataatcattgagctctccgctgatgctcaatttgtttccatacaattcttgactcaattaaattttatatgttgctca

SEQ ID NO: 118323 - DNA, 710 bp, Glycine max
  Clone ID: PAT_MRT3847_77854C.1
attcccggccccgacccacgcgtccgcttcaaatttgttggcatggtttctccacacttgtgttgatcctttgtaagcgatgctgtaatctgagttcttgaattaaagcaaaaaaattggtgatgctttgcatggtagagtgaatgatacatggaagtgttgtcaaagttcttggttggcccattgcattcaataactagcaaatgtatggttttgcttgttactgttttgatccttagagcactgttgtttccatccttccctggctttgatgggattgaatggggcaaccttgtatgtatccgcactccattgttgaattcggactttggaatccagcaagataagtttttggaggttcctcagctcgtttggggattaaacaatcagaaaattgcatttgcaagggcttgccttactgctagaatgctgaatagaacattgttgatgccaagccttagtgcctcactgttttacaaagaaattgacctcctgcaaccaatttcctttgacaaggtattccaatttgagaagtttaatgccctttgccgtggttttgtccggttgggatgctattcagacgtcttgaatagacaagaagtgctgaaaatggaaaagggggagtggcaggaaggtggacagttggagaaagatttggcaccaatggaaggagcatagtaagggctcttttgatgaatatgaggtaattc

SEQ ID NO: 118324 - DNA, 235 bp, Glycine max
  unsure (1)..(235): unsure at all n locations
  Clone ID: PAT_MRT3847_77855C.1
atnatttaaaagcangaactcggcaangtaattttccagctgnttatcaaaaacatagtttattgtanttataataaataactcctgctcaatgtgtaaattactagccgcagnatactgactgtgctaaggtagcataatnattagttttntaatnaaaaactagaatganaggnaaaatgaaaaaaaaactatttcaaattaaaaattagaaattagaacttaagtnaaaata

SEQ ID NO: 118325 - DNA, 1285 bp, Glycine max
  Clone ID: PAT_MRT3847_77856C.1
ggattttgatgctaaaccaatggtcatgctccttggtcaatattccacagggaaaacaaccttcataaaacatttactaagatgtgattatccaggagcacacattggaccagagcctacaactgacagatttgttgttgtcatgtctggtcctgatgaaaggagtattcctggaaatacaatagctgttgatgctgatatgccgtttagtggccttacaacttttggtggttcatttttgtcgaagttccagtgttctcaaatgccacatccactgctagatgaaataacatttgtggacactcctggtgtcctatctggagaaaaacaaaggactcaacgaagttatgatttcactggcgttatttcttggtttgctgcgaaatgtgatctgattcttctcctatttgatcctcataaacttgacatcagtgatgaatttaaacgtgtaattggttctctacgtggtcatgatgacaagatacgtgtggttttgaataaggcagaccaaattgatactcaacaactcatgagagtttatggagcattgatgtggtctttggggaaagttctgaatactccagaagttgtgcgtgtatatattggctcatttaatgttaagcctataaacgaaggctttgttggcccattaggacaggatctttttgagaaggaacagaatgatctgcttgctgatttgatggatattccaaagaaggcatgcgatcgtcggatcaatgaatttgtgaaacgtgcaagatctgctaaaattcatgcatatataattagtcatcttaagaaggagatgcctgctataatgggcaaagccaaggctcaacaaagacttcttgataatcttgaggaagaatttgcaaaggttcaaagggagtttcatctaccagccggtgattttcccaatgttgaacacttcagagaagttctaagtggttatagcattgacaaatttgagaaactaaagcccaaaatgattcaagcagtagatgacatgcttgggtatgaaataccagagctattgaagaaattcagaaatccttacgattaaaataaaaaaatgttggaaaatgtcatttttttatgtatgtttaccaagtttgagatcttaatgtttaagttcattattaatggattgtggatggtttcattttcagtgtctatagtctataccccatgggtcacggcccatccaatatattgaccatgtataaaaaaattcaaaaataaaaagaaaaaaaacaacacttttaaaaataaaaaaacattaatt

SEQ ID NO: 118326 - DNA, 532 bp, Glycine max
  Clone ID: PAT_MRT3847_77857C.1
cacacccatgttctgatttccttgtttgtttattcaggaaagtgcccattttgggtgacatctcttatttttttctagtatttttctctggatgatatcacaaacttagctaagttcttggcttttttgtcattcatagtgcattgccactccttttgctttggtccctttgccccttcttcaacttcagatctgagttccttgctgtgttgcgtttgttgcagagattgacttgattgtgttcagcaaaagctggagataattcaaaggtcttgttgttggtggaactgttacaatggggagtgttcttggggagggacactttgttgtgctgcttttggtgatggtgtctttgacagtgagcactgtaaatggtcaaccaaagtctattctcttgaattgtggttcagattcttctgtgaatgtggatggtaggagatgggtgggggacatggccactgataacaatgtcaccctaagttcccctagtgttgttgtttccacttctacatcaagtggcagttcaatctat

SEQ ID NO: 118327 - DNA, 361 bp, Glycine max
  unsure (1)..(361): unsure at all n locations
  Clone ID: PAT_MRT3847_77858C.1
tgaataccgggtcgacggcgcgtccgttaaaactatttataccatcccttctggctgtagtggcagtgttggaagaagaaattgtaaggcttgaagagcagggggtgcatgtcanacaggatttgtaccatgaagctgtctacatgtcatcttctatgaggaaattggaaaattcagtttccgctccttctaacatgtcaaatccaacaatggatagtcccaatttggataaattgatatctcttacccaaacaactggttattcatcagcaacatttgcatctaatcctaccacaacacttcctgatgattatatacaagggtaagagaaccaattcctgtactaattttttcaagaaca

SEQ ID NO: 118328 - DNA, 471 bp, Glycine max
  Clone ID: PAT_MRT3847_77859C.1
tcggccgcccgttctttgtgttgtgtttgcgcatgcaaaaacgaggtacgcgattcgtttttgatcggaacggtcgcaccttaggcacttttaatagcactaatccggtttgattgctgggaaatggggaagcaactgacggtaattgccatgcttatcgataaatgcgactctgaagagtcaaataacacacccttttttgtttcctgagcttcagagacaaaagcgggacaatgaccaacgttggatgtccgagcgcctgctttttaaggaggacagcgtttgataatccccttgctttttactatttggggcccaaacctacccctcttgttagagcatctcaaagctattgcctgctaaaatttaatggttgaacgcaacaactccaattccccactcattgtacctattcccagacgaagaacctgttatgcagtgcctgataatatttgaagcagggagtgctga

SEQ ID NO: 118329 - DNA, 680 bp, Glycine max
  unsure (1)..(680): unsure at all n locations
  Clone ID: PAT_MRT3847_7785C.1
tgtgcgtcaccgctgaatcctagctttatcttcccttcccttcaaaataatatctctgttccaaacaagtccaacaacacactgcttctatctcaaacgcacatcgagaaatgagtttgagtaatgggaaaaccgaggcaccattgccaattagtaatggggatgagaagaagccgttcaagatcttcgtagggtatgaccctcgtgaagatcttgcctacgaggtatgtcggcactccatcttgaaaaggtcttcaatccctgttgagatcataccaattaaacagtcagatctgaggaaaagtggcttgtattggcgtgagaggggccagtttgagagcactgagttctccttttcaagattcttgacaccttgccttgccaattaccaaggttgggcaatgtttgtggattgtgatttcctctacttggctgacatcaaggaattgaaaaacttgattgaggacaagtatgcaatcatgtgtgttcagcatgactatgctccaaaggagaccactaagatggatggggcagtgcaaactgtgtacccaagaaagaattggtcttcaatggttctctataactgtgctcatccaagaaccgtgntctcactcctgacactgtcaacacacagaaaggtgccttcccttacaggtttcaatggcttgaggatgatcaaa

SEQ ID NO: 118330 - DNA, 340 bp, Glycine max
  Clone ID: PAT_MRT3847_77860C.1
cataatttgagattatcatgatctagacaatcttcacatgacgcataattaagttgtggggacctttttgttaattggaatattcagttccatgctgtctaaatactaatcttagaccatgaacatgtggtagtcttgtaccatgtaataatttctcctctcctacagagtattctcacaggcttctagtgtttttggactagtttcatggtgtgaaaatcaattatttttcattgtgtagttacttctactttttcgtggcatcaccatgattttgtaaggtagaatttatttttgtgtattatccaaacacactattcattaagtggaattggcttta

SEQ ID NO: 118331 - DNA, 566 bp, Glycine max
  Clone ID: PAT_MRT3847_77861C.1
tttctcttttttttttttttttttaaatttatattttatattttttttatgagtgtaataaaaaaataattattaatattttttatacttaaaaattgtattggatatgaatacaaataaaaatgaagtaatgtttcgtgctaaatcggaaggcgaaacttatcactttagtcttcacgccccaccgcagcagccataaggggacttcaatactgtatactttaaggggtgcaatcatgttagttgggagttgctatcgtgctcaaatttcgcgcacaagtggccaagtaattctatcaagtgcattcagctttctcttccatttattctatgcaagtcatgcaatctcgcattccaacttccatcaaatcatgatagtgatactttgtgattctgaataaggctgagtaattcaaattttgtgatcacccttgtcagttttatacattcgcatggaacaagacagacataattataaatatgcccaaagagtacaactaatccttaggttaatttccaccatatctctccattcttaccaataatccccacaggaacaaataccc

SEQ ID NO: 118332 - DNA, 244 bp, Glycine max
  Clone ID: PAT_MRT3847_77862C.1
ggcttatctataaaccgagatcaccgggcgccgaaccggggaacctgatacataatcattcgataccagctcacatgaagctaccacttccttcctacatcacggggcacgatggtacaagggagagctacatactctcagcgctggccacagacgacacgaaatataagcgtattcagtgttaggttaatcgctgaccactatgctatgagcagtgggactaagtgtgaactatacacgataa

SEQ ID NO: 118333 - DNA, 580 bp, Glycine max
  unsure (1)..(580): unsure at all n locations
  Clone ID: PAT_MRT3847_77863C.1
aaattattatgtttaaatttaaatgacgagtccacctgtatcatgtatttttgtagtccattgtatttttattgtgtatcaaattttctgtaacaaatgaaaggagaagaatcagtgcatcgtgttttttcaaaaaaaaaaaaaaaaaaaaaaaaaaaaaaaaaaaaaaaaaaaaaaaaaaaaaaaaaaaaaaaaaagggtttctttttttaaaaaacaaaacatattacccccgccagcagacgacaaagtttttcttttgtggggccaacaaaaaataaactgccggccgttgtacaacaacagcgcttggaaaaaacaccccgttgccaaccaaattagcctggttgaaaaacacccttctttcaccagcggtagtaacaaaaaagaaggccccaatgacctttctccccaatagcccagcctcatgaaggaagaaaacgcccccccctgtggcgctttattaacagcgggggtggtggttgctaccagcagaaccacctcatttgttatcaccctcacaccgccccctttttcttntttccctcccttctttatcacgaccagcggcgttcccccc

SEQ ID NO: 118334 - DNA, 728 bp, Glycine max
  unsure (1)..(728): unsure at all n locations
  Clone ID: PAT_MRT3847_77864C.1
ctatcgcgatctagaaccgcttacattacccacctctgccatccttgtcttttaagcaaaaactaataccaaatgcaaatactatccccactgaccaaatcttctttctcatcattcatgaattttgcttcttcattcagtttttcacccaggaagttctcgcctcagtagtctctaagttcgatctatactgaagggtacgttcaaatcaaatgggttcattccagacacccattggaatgagaagttcaacattgctagagacttcatgtggattcctgttgcaggaactgcagataatatgggatgaagttggagaagataagtttgaaagggagaaagttctgttagatttggagcaagagtgccttgaagtttacagaagaaaagttgacagagcaaatatatctagagctcatctgcatcaggaattggccgaggctgaggctgaatttacccaccttcttttgtcccttggtgaacgatctctaccagtccggccagagaaaagggcaggttcactaaaagagcagctagattcaatcactccagcacttcgggaaatgcgtctgaggaaagaagagaggttaaaccaattccgaactgtgcaaggtcaaattcaaaaaatttctgctgaaattgcaggtaactcagacaatgaaccctcatccattgntgtaaatgagaatgatctttcactaaaaaggcttgaggagtatcagaatgag

SEQ ID NO: 118335 - DNA, 128 bp, Glycine max
  Clone ID: PAT_MRT3847_77865C.1
accactcgtacgagccgatgggagaagacaatagacggggacacttatcgtgaactaatattgcaattcaattatgccctgaccctgtgttaagaacctgtgatgagaagcaaagcgaggcagagatg

SEQ ID NO: 118336 - DNA, 425 bp, Glycine max
  Clone ID: PAT_MRT3847_77866C.1
agccattgcattcctccagctttgacattttggatcattcttttcaaattagagattgttgttggtcctccaatcaagcaaaacagaatgggtttccgtttacctgctgttcgacgggcatcattcacggctagccaagcagcttcaaaatctgtacaagttccaaagggctatcttgcagtgtatgttggagagaaacaatagcgggtcgtggttcccgtatcatacttgaatcaaccttcattcgaagatcttttgtgtcaagctgaggaagagtttggatatgatcatcccttgggtggcctcacaattccttgcagtgaagatgttttccaacatataacttctcacttgaattgagaccacaaatctcactgtgggagacccacatagattagtggacattttattacaataggcatctt

SEQ ID NO: 118337 - DNA, 348 bp, Glycine max
  Clone ID: PAT_MRT3847_77867C.1
cattgtttgatttattcatgagggtgtgcatttaattcttgaagccaaaagtttggtctcttgtgccataataggggaccaccttgtgttacgaacacccttctgaatcttgttttttgaaaaaaagtttttaacagcggtttaattttaaaatttcttttagcggggacccttaaaccccgggttttgggtaccgggaaaaagaaactttaaatttcctacgcagctttgaaaccttttctcccaaaggaaattcgaagggtgttgcaaattttaaaaagtttgggggcttggttcctgaaaccaaattttgggtttaaaaacttttttgcccccccttttgaatga

SEQ ID NO: 118338 - DNA, 641 bp, Glycine max
  Clone ID: PAT_MRT3847_77868C.1
caagactggagctccctgccgatctgaaaggcttgccaagtacaaccaggtaaaaatcgtcaaagcttatctttgttttttttacatgagctgtatactagaatacctttgaaaactggattttttaaaggctttgatttagaaccaatgtttttatttgttttaatttttgttctctcccatactatattacatgccgcagcaggaccaataaaaaaattagtgtaaaattaaattgggatgtccattgcttatattattgaccgttgtcacttaccctttggtctgtggtgcagctcctgaggattgaggaggaacttggttctgctgctgtgtatgctggtgccaaattcagagcccccgtggagccctactgattgtttagcccaagattaccaagcatcatttaaataagattctattgatgactgcataggacatgtattttttgcgaaaaataaacttgtctactacttcagagaatataggttttccgggcgtggaattttgaagcgagaaaataaggcagtagatgtatgtctgatgcctagttttatttgaaatctagctttagggggtgtttggtgcgacaaattgttttccagaatcataatttttgggaattaaaaaattttggtcgt

SEQ ID NO: 118339 - DNA, 395 bp, Glycine max
  Clone ID: PAT_MRT3847_77869C.1
ccccaaccaagggccctatttaaattttaaaggcagattttaatatttaaaataacctccccaatttttatacagaggcccccattcccaaaacttttatttatatataaaaaaaaaaggggcttttttgccttaaacacccccataaaaggccaaaaacttttaattttgttggggggaaaaaaaccccctttttttttggggggggtgggttaaaacaaaaacccccggggggcaaaaaaaaacatcctaaatatttgggaggttgaaaaaccacaaaaggttttaataattttttaaggggcccttttttgttgaaatttttatctcccaaacccctcttttaaaagcgcgggggttgaaggccaaattacctccaatttggcccccttttt

SEQ ID NO: 118340 - DNA, 1783 bp, Glycine max
  Clone ID: PAT_MRT3847_7786C.1
aaaacaatgggttgtgctagctgatttgtgaatgagattggttatcaatgccagctattccaaatccaatgtactacgcgtgaagaagcatctatccatcggatatcaatgctttgctttggtttaatttggttccaagttctttgcctatatatatataagtccaacactgtcggtgtgcatgtgcgttaccgctgaatcctcgctttatcttcccttcccttcatctccgcttcaaaataatatcctcctctctatctctgttcgaaacaagtccaacaccagcaacacactgcttcaatctcaatcgggcacattgagaaatggttttgagtaatgggaaaactgaggcaccattgccaagtagtaatgggggaggtgctgagattgataacaatgagaagaagcccttcaagatcttcgttcgagggtatgaccctcgcgaagatcttgcctatgaggtatgtcgccactccatcttgaaaaggtcttcaatccctgttgagatcataccaattaagcagtcagaatctgaggaaaagtggtttgtattggcgtgagaaggggccagtttgagagcactgagttctccttttcaagattcttgaccccttgccttgccaattaccaaggttgggcaatgtttgtggactgtgatttcctctacttggctgatatcaaggaattgaaagacttgattgaggacaagtatgccatcatgtgtgttcagcatgactatgctccaaaggataccacttaagaatggatgggtgcagtgcaaactgtgtacccaagaaagaattggtcttcaatggttctctataactgtgctcatccgaaggaaccgtgttctcactcccgacactgtcaacacacagactggtgctttcctccacaggtttcaatggcttgaggatgatctaattggatccatcccttttgtttggaactttcttgaggggcacaacagggttgttgataatgatcccactacttcgcccaaggccatccattatactcgtggagggccatggtttgaagcttggaaaaactgtgaatttgctgatctgtggctcaatgaaatggaagattacatgaagcaagccaaaaaagaatctgccaattagatgaatcaaacatcagcttaggcttgtcatttatggccatgtattattctttatgtcaaattcgttgtgaaaaatccgcatctgctgatgcatgttatgatgagagtcggagtatgagcactgctagtctataacttatcttagagtatttgtagtattctttaccgtattacattacattacattacacttacattggcatttcagagaaagtactcttcgtgatgtatttcattttttatttgtttaatgacctccctaggaccttaagaggaggtacaagcaccactctgtattgaatattttaatgaagttttcaatgtaacgattatatgttgctcaatcagcgctctagaagattaagacttcaatgtgtatagtttaaatgtagcaaactcgagctaaaatctgcaattttgtgacatataggttttcttgagggtcaaatcttttgatcatcagttcatatatttatttttgttgggaatgaaatgattgtaaatcccacataaaactgattggatgcattgttgatgtaattggtgcggcgttattggcgtagttcgtgcgtgattatttgtagttcaaaaataattctatagaagtaatttatatcaaaatctatcgtaatctgttttaaaaaaaaaaaaaaaaga

SEQ ID NO: 118341 - DNA, 167 bp, Glycine max
  Clone ID: PAT_MRT3847_77870C.1
gtccagaagtaatgtcttattactgctgaaaatcaacgggctcgggggggtctttcgtaagaatccatgctcatgctttgaataattacacttatggaaaaataatgatggtccttttcttctatgctttgtggagagaatcaaacacccagctcatgatagaataa

SEQ ID NO: 118342 - DNA, 2992 bp, Glycine max
  Clone ID: PAT_MRT3847_77872C.1
catgactggagctccctgccgatctgaaaggcttgccaagtacaaccaggtaaaaatcgtcaaagcttatctttgttttttttacatgagctgtatactagaatacctttgaaaactggattttttaaaggctttgatttagaaccaatgtttttatttgttttaatttttgttctctcccatactatattacatgccgcagcaggaccaataaaaaaattagtgtaaaattaaattgggatgtccattgcttatattattgaccgttgtcacttaccctttggtctgtggtgcaggaattgtcatatgctcgacccagagcttctctcgtcactacacttttttcactttctcgggaaaatcacagcgacgctcaggaaaaactcgaaactctgaaaaaaccgctgcgatcaatggcaacgatcaaggccgtgaaagctcgccagatcttcgacagccgtggaaatccaaccgttgaagttgacgttattctcagcgatggaaccttccacagagctgctgtccctagcggcgcttcaacaggtgtttatgaggctttggaattaagggatggaggctcagactacctcgggaaaggtgttcttaaggctgtggagaatgttaattcaattatagcacctgctctgcttggcaaggacccaaccaagcagactgaaattgacaattttatggtacagcagcttgatggaactgttaatgaatggggatggtgtaagcagaagcttggagctaatgctattttggcagtgtcacttgctgtctgcaaggctggtgctgcagtgaagaaaattcctctgtacaagcacattgctaatctggctggaaacaagactttggtactacctgtaccttcattcaatgttatcaatggaggctcacatgctggaaataagctagcaatgcaggaatttatgattctccctgttggggcatcttccttcaaagaagcaatgaaaatgggcgtaagaagtataccatcatctaaaggctgttattaaaaagaaatacggtcaggatgctactaacgttggtgatgaaggtggctttgctcctaatatccaggaaaaccaagaaggtcttgagcttctgaagactgccattgccaaagctggttacactggaaaggttgtaattgggatggatgttgctgcttcagaattttatgataacaaggacaaaacctatgacttgaattttaaggaagtgaaataatgatggatcacagtaaaatcccatgagtcagcttaaagaatgtgtacaaatcatatgtgacagattatccaattgtgtccattgaggatccatttgatcaggatgactgggagcactatgcaaaattaacagctgaagttggccagcaggtgcagattgttggtgatgatctccttgtcaccaacccaaagcgggtggagaaagcaatcaaggagaaggcttgcaatgcccttctgttgaaggtgaatcaaattggtagtgtaactgaaagtattgaagctgtgagaatgtctaaacaagctggttggggtgtcatggctagccacaggagtggtgaaactgaggataccttcattgctgacctctcagttggattagcaactggtcagatcaagactggagctccctgccgatctgaaaggcttgccaagtacaaccagctcctgaggattgaggaggaacttggttctgctgctgtgtatgctggtgccaaattcagagcccccgtggagccctactgattgtttagcccaagattactaagcatcatttaaataagattctattgatgactgcataggacatgtattttttgcgaaaaataaacttgtctactacttcagagaatataggttttccgggcgtggaattttgaagcgagaaaataaggcagtagatgtatgcctgatgcctagtttatttgaaatctagctttagggggtgtttggtgcgacaaattgttttccagaatcataatttttgggaattaaaaaattttggtcgtagtagcttaggcctcatgatggaataataaactctgctgcgcccacttccgggggaaaaggaaatattgtagtaacttgataagactttgttccaaccttttcgttattgtaaatgtcaataaattggtttcctagttgcttcctaattatatgttgtagttatacatatgcttagaataatgctcgttacacatctccacattgcatgtagcatagcctctcattaatgacgtggcagcatcaatagtgcaagtgtagaaattttagtaagccaaactgtaataaggtgatggaaattgggcgaaggggagaaatgtgtgtacgtttgtgtttgtggaaaacaaaagcaccccgtcgatacgaaggatgtgttgtgcattggccattaaaaaattgtagtgatctagtgtaactaatgactcgtagaaaagcgcgagttagatgtgaacaaggtgtttgcgcaattatcattaagcttatgttattgcaagtccaatactattcaaggtttaattcgattcttccctatggggccctttagaggatccctggacagaggcatcatctattccaagagcactagtttcaattattttaagattgccaagacttaaatttacgattgtaaccttgggaaaagatggctgcataatgcttgagaaatgtgtggatgatgcttgaagctaatgctattttggcagtatcagtatcacttgctgtctgtaacgctggtgcggcagtgaagaaaattcctctgtacaagcacattgcctggctggaaacaagactttggtactacctatgctttcaatcaatgttatcaatggaggctcacatgcaagaaataagctagcaatgcagataatgtcttgtcttcaattttattaagtatgtaagttattataaactttataaatcttgtcttcaatttttatcaacaaatattggtaaagagataagggatgagtttattt

SEQ ID NO: 118343 - DNA, 284 bp, Glycine max
  Clone ID: PAT_MRT3847_77873C.1
ggtaaaaacaaaactaaatttattataaaaaaaaaaaaaaaaaaaactagagggggtcactatggcggtggctgggcgtgactgatcttcttgaccttaaaattgtcctgctccgttctcccgccactaaccccctgctgtctcggcttcttgattcctgtcagggtctcatatttctgtttgctgtgccctccttaagctccgtgtcctttcatgtaatccctcattctctgaaataaatttctttactatatgccgtggggtcctttatgtgtgaattattt

SEQ ID NO: 118344 - DNA, 1813 bp, Glycine max
  unsure (1)..(1813): unsure at all n locations
  Clone ID: PAT_MRT3847_77874C.1
gtacctcagcttgaaactggttgcaggtgggaccaatatgatgtgcaagtttcatcggtcgatatagaccttgtccaaaggttgttcgaatctgcaagggtttaccacttgccgtcaaagtaattgggagatcactcagtcatcagccttctgagttgtggctaaagatggtggaagaattgtcacagcattctatacttgattctaatactgaactacttacatgcctccaaaagatcttgaatgttttggaagatgatcctgtcatcaaggagtgcttcatggacctagggttatttcctgaagaccaaagaattcctgttacctctctcattgatatgtgggcagagtcgcatagtctagatgatgatggcccagaggcaatggccattatcaacaaattagacttcatgaatctggctaatgtcttggtagcaaggaaaaatgctagtgacacagacaattactactacaataaccatttcatcgtccttcatgaccttctgagagaacttgcaatttatcaaagcactcaggaaccaacggaagagggaaaaagattgattattgagataaatcaaaataaacctcgttggtggcttggggagaagtcaacactgcttaagcaccaacaggccactgcccaaacattgtctatattaactgatgaaaattgcacttcagattggccccaaatgcaactagctgaagttgaggttctgatttttaatattcgaactaaacagtatttctttccggatttcatagaagaaatgaacaaactcaaagttcttatagtcacaaattacagtttctatccttctgtaatgaacaactttgagctgattggctcattatctaacctaaaacgaatcagattagagcggatttttgttcctccctttgtcacattgaagaatctaaaaaagttatccctcttcttgtgtaatatgaaacaggcttttgaaaatggtgacatgctaatttcatatgcttttccaagtcttgaagagttgaatattgactatagcaaagacatggtgggattgcctaaggaggtctgtgatatcacctccctgaagatgctcagcattactaattgccataagctttctgcattgcctcaacaatttggaaacttggagaatttgaaacttctaaggctaagttcctgtactgatttgcaagagataccaaattctattggaagactttcgaatctaagacatatggacatctcaaattgcataagccttcctaatttaccagaggactttggtaatctgtttaacctacaaaatctctacatgacaagttgtgcgaggtgtgaattgccaccctcaatcgccaatcttgagaatttaaaggaggtggtatgtgatgaagagacggctgcatcatgggaagatttcaaacctatgcttcccaatctaaagatagatgttcctcaagttgatgttaacttgaattggcttcatacaatttcctcctaatacttgcttcatgcagttcaggttgtctttccaagaagtcaatgaaagaactaaatacacttttcacattggattggattgtggtaaacggaaacgtcccttattaatcagtgctgaaggggaatctctgttaaggaactcatcaaacacaaaacctttatgaatcccaagttcaacaacgaaattcgatatattgtgattagcagctatccgtccttttatatatccaacaatttgttgggtgtcaactcactaccatgcctgangtttctactggtatagcataactgaccaagaattctggggtcttattcaaatct

SEQ ID NO: 118345 - DNA, 401 bp, Glycine max
  Clone ID: PAT_MRT3847_77875C.1
aagacattaaggggaaaaaaaccttaaaaaaaaacccttaagacggattccaaccccccaatgggaaaccgggaggttttttatttaaaacaagggaaatttaaaaagggaaaatgccccacaaaagacccccccccctaggggcaagaacctaagggaaggtaaacccccgatgtaaaaaacccccttgaaaaaaacctgggaggggaccggataataggtatccccataaaaacccaggggggtcacttaggaagcccaaattacgggcccacatgctttgggctaaggggcctaaagccctaaggaaacccatcccccaacattttaccccccaccgtgggaccacggggaaactattccccaaaccctttgacctttggggggacccacactagggg

SEQ ID NO: 118346 - DNA, 513 bp, Glycine max
  Clone ID: PAT_MRT3847_77876C.1
aattcggctcgagctcaagtttgccgagcatacaaagatgtgcttgtaggaaaaggaggttctggccttgcttttactgttgcagttccttgggtctgtaatacgtctctgattgtgtgtagaggttttggtagggatagtaagtattttaaccgggactttgctattaacaccctcatttccaaatcccttgaactggaacatgtaatgggcttaccattctcatgtttggaatacataaaaagaggttttattgttgttggctaaccggtttatcacaatgttaatactagtagtctgcgttcagcaaattctcaatcagtctcatttactatgaagtatgatatactccgattctcctatgtcaatggaaaaacatatttcaactgggttcacatgataggatttctgtgcaggtttttggcatgagcctaaggttaatacatctccatccattcggattaaattttgaagatatattttattcatccagtgctttgatggtattaaaaa

SEQ ID NO: 118347 - DNA, 381 bp, Glycine max
  Clone ID: PAT_MRT3847_77877C.1
ggctcgagagttcatagagtagaaaattttagtcgagttagagatgagataattactgaaggtgatatagaatctgcaaaagaagagaatgttttggaatcttcctcagaaccagttgacctcagtgcaggaaaggaagaccaaaactatggtatctcagaaacttctgattgtgcaagaagttctcaatgttcaaagcaggatgtaacagaagtaaacaaaccaacatctccactgtcatccccctcgcactcttcccccactaagaaaattgaagagctaagtgttacagaggtatctggtcggccaagtcctgtatctgttcttgataccccattcttagaggatgatatcaaccctggctactccagatttcaaccg

SEQ ID NO: 118348 - DNA, 357 bp, Glycine max
  Clone ID: PAT_MRT3847_77878C.1
aaaataaataaatggcttttatggttcttttttggtggcttttgactcgttcaattttctcctaaagtatgataataatgatatttttctctttttgtctgttagatgttttcttcacatttcaacatgttagtaatctgttatgtgtatgtgttttctaggtatgtactcttcagtgccttcactttgacaactgctataaatgaatggagctctacgttatactcaatgttaagccaagatacatcttccattgctattttagtcctctgagtgaaaacaataattcatacttctgtattatttacacccaacatatttctgtatttgtctaaatgacttattttagtttttaaa

SEQ ID NO: 118349 - DNA, 515 bp, Glycine max
  Clone ID: PAT_MRT3847_77879C.1
aaaaaaaacccccccttcaaaaactataacaaaactaaaaagagggggggaaattttaaaaaaggcaaaacattccaaaacggggggcagcccaaatttcctttattggagggaaaacaaaaacaaaggaaaaaaaacccccccccccaaatcaggccaaaaattttgctttttaaaaaaatttggctttggcccgggaaacaaaaaaagcgggcattaaagggttcccaccaatttcaaagttttggaaaaccccaaaaaaaacatcaaaggggggggattgtttggaattataaacaaggaaacctaaaacccccgaattttgattaccccattcaaaaccccaaatttaaaaaccattatggggccccccccctttaatgggaaaaacccatccccccgaagggggttttgattaaaccccccggcaagcggaaaagggctctgaacaaatacggggggaaaggaacacttgcccaaaagagccccaatccctccttttaacggggggattt

SEQ ID NO: 118350 - DNA, 647 bp, Glycine max
  Clone ID: PAT_MRT3847_7787C.1
ttttaaagcatattttttacatttttcatttactgccataaaagcttttgggggggaacaagtacatgaactaagaccatacccttttcaaaaaaatgaacatacacttttcaaaaacaaaacaaaaaaaaaagtttccccccattccaaatataaaaaaaaaaaagacagctcatccgaaccctatgcatctctttaaacctttttaactttctaccactacttaatttaaggggctaaaaaccaattttaattagttcatcaatttatacttcataaccaacatagcctataaccaaatgtaatttccaatggggaaagcatggaaatatttcttcaaatatgggactgggaacaatggagctgataaacaaatccaacacaactccttcggggacaagggcaacaaaagtttcttcttcgttatttccatttacgtcgcaatctgatgcctaacttgaagccaaaggaacacaccacccaaaataaaataaagtagacaactacttggcaaaaaatttaactggctacatactgatatcaacaatatttatggttaactatatatgtacccagttaaggtatcacttgttttgaaagaagaaattattggtggaagggaaaataaaaaattggaccgatttata

SEQ ID NO: 118351 - DNA, 430 bp, Glycine max
  Clone ID: PAT_MRT3847_77880C.1
ctcaaaattcccctcgagagataatgttaattatctcgtctatcccaatccaacttaatgttacttgctttttacaaacaaaacaaattttgtaaattaaaaaaacaaaaaccggcccccaccactccaaaacacaaatcaaactaaacacctcctctccttactaacccactcatcaattacaccacctctaaccccccccccccccctctttttccccccccccccccaaattaaattccctcctcccccctccatactccccatcttccctaatactctactctattacatctctccaataacatcaccatcaccctttcccttttaaaaattattaccccctcccaatcccccccaccttctcctccccaaaccttataatttcacaccccctcctcccccccatctctcactcccccccctctct

SEQ ID NO: 118352 - DNA, 537 bp, Glycine max
  Clone ID: PAT_MRT3847_77881C.1
ttgcattccgattccaaggaagcgtttcccgtcatcactgtatgacgtcctcctgtctttggggggggggggggggcggccaccttatgaagaatgctaaccaacgaaaggaaaatgtgtctaaaataggcagagtcggataatttatgcgagttaacgcatttggaggggacaagatacggatatgtataacgctataatataccattagaccgaaaaatagaaagcctagcaataagcacgtaaacgtaagccctccaataagaagaggaatcttattattatggcgaataccctatgtacggttgtgctacgactacacaaaggacatagagttttcgtgtggtaaatgtgttatgcgtagttggcagcaggcgtgtaataccacgcaaggtgacattgaaagtaagtactggtgggcagctagttgggttatgcgtgtgtaataatttccggcccgagttgggcctaatggacttatagcgaggtaccgagaatggactaattggcgtcatacagtatgaacgcataagcagg

SEQ ID NO: 118353 - DNA, 722 bp, Glycine max
  unsure (1)..(722): unsure at all n locations
  Clone ID: PAT_MRT3847_77882C.1
gcctggctttcacttaaannttcaacggggatggaaaccaaacttttctaaaggaccctatagggaaaccgggtaatttcccttacaggggaaaacctctggttggtacttttcaaattgggaaaaaaaaaataaacagggaaatttatattttttccaacaggactataactttttggaggtaccttccctaaattcacccttaagggggcttaaataaaaatttcagggctaaaaaactattccctacttaaactaaaaaaaagggttttaacaaaaccttggtggaggaatttaagaactaccaaggttcccatggcctcaaatggtggtcaaattttttccaagttttaaatttgaacaccaagggaaggtcaacaactgaaatgggcttggacccaagggaccaggttttataaacaaaaaggaggactcttaattccggtttaacgcactctaagggggaacttggggtatcaacaatgggaaccggaacatttatagacccaccaaactcccactttgggctaaacnttccaacaagggccaagggggtttnaaagggaaactcccggaacanacncgaaaaaaggttcnctantnnntcaaggggatgaaccctggatacnntttggcnagnaggtaccactgnnaaggtaccaaaaggtgataaccnnnggaaggaaggctgaacacccgggaaaaggtgnaannnnngcttg

SEQ ID NO: 118354 - DNA, 217 bp, Glycine max
  Clone ID: PAT_MRT3847_77883C.1
aggaatttattgacgagctgactgttcagtagtcggcctttgtccttttttttgaaaactattaaactactagctttaaataaattaaaattgatcacaatggaacatattaagggtaggaccaacagaaattatgagattaatacattttgacaagacatttggtatgatctaaatcttgtaaagggtatattgtgaaatatagaacaacctatga

SEQ ID NO: 118355 - DNA, 439 bp, Glycine max
  unsure (1)..(439): unsure at all n locations
  Clone ID: PAT_MRT3847_77884C.1
acaccaggcnnaagaaggacaaacagagnaagaagggagaaangaagcncccncnggacaaaggcngcaaaangcnaggcttganggaacacaaaacaaaccaanggaacgggaaaaaccngacggggcngcaagnaagaagcctcttttttttttcaaaganacnnggggcatgggnncncaaatctatgacccaccccctggnatgaagaagggcaaaacagaggagttacgcaacactggcaccattaccaagtctctgcttccagaatacaaggggatactgagttatgtgccccctcggagattaaatacatcaaagcttaaaaaaaaaagcgaggattttcaaaaaaagttggtagacacaatacatttcatggaaattctcaacttgaaagataatgttgaaaaagacaccttcttccgaaagctccaaaat

SEQ ID NO: 118356 - DNA, 329 bp, Glycine max
  Clone ID: PAT_MRT3847_77885C.1
gtttttattttgcgcgatcacaaggtggcgggcctggaaagcggaaaccaaagccatggtcactcgagctcaagaaactctgaattgcttcctacttccctgtgttcaatcccttaagggatagagaatctctctatgggctagccacagacatggcgaatgatagtgtttgacacgctgaggtgatctggagaacactttactcttcaacataggagttggaatcagatctgaacgaagacagtgtgtttctcagggctgtcgttagatggaatgttcaagggggcgaaatacaggaatcagacgcccgctatagaatctggggtagg

SEQ ID NO: 118357 - DNA, 694 bp, Glycine max
  Clone ID: PAT_MRT3847_77886C.1
tcatgaacctatcacattccatttcagtcagaaccaaactccttaattatctctttcatttttgtttgccttttgactattaattcaccctccttaccaattctactagagtttccattttggacttggatactctcagtaaatagtactaaattggtatgcttccattgaaacacttattgaggtgatgatattcagtggattgttcggtcaaaacagctttggcgttgaatttttattctgttcattcgccttaagacaataatggggtctgtttgctcggctgagaaaaataaaaacaaagaggttggagggaaaaccttggggaagaagcttaagaagttaaaaagcattgcaaagggaaaaggagattgttattcaaattcaaggactagtgatcgtggtagaaagcaaaaggagcgaaactctggattttccagtgaattcaacttatccaatcctagtcgaaaagaaggaaaagaggacttccagagaggctccttttggggaagagctagtgagagggcagtagaagttctcgacacacttggaagtagcgtgccgaagttaagcaatagtaatgggtttgggtttggctctggcatggctcctagagggaatagaatatctatattggcatttgaagtagctaatacaataaacaaaggagcaatcttgtttcaatcactgtctg

SEQ ID NO: 118358 - DNA, 486 bp, Glycine max
  unsure (1)..(486): unsure at all n locations
  Clone ID: PAT_MRT3847_77887C.1
ctaactgtgcacttcggnagnganaaccatgcgtaaaaaagaatatttgttgcagcagcgtgctcaaaacccacaaccttgcattgggcatgaaacgaaccaaagaatccggcatgtagtgtgtggcgagaaatacctctatggagactaaccggcggaaaagaatcacagatccagttccagccatggatgggaatataatgtttgaatcactctagctcccctaccattaggaccaaggtgctagcctcgcgagggaacagcatgaaatgtggaccaagctagagagggctcttacatcacggaggctccggctttacagcatcattggcacgcaagaaacgaaccccgctagctagttggtccttcatcatggacaaaacaggagcagccagcacgcgttgtacaagttttgaggccgtaccattgtaacacccaccaaaccctccatgagggatcgttcatagaagagcatcccatgtacct

SEQ ID NO: 118359 - DNA, 324 bp, Glycine max
  Clone ID: PAT_MRT3847_77888C.1
ggggggagaagactagatgttaagaagttgatagtttgaagtgtcatgacggcttgtggcacaatttcgtcgctgctagttggaagagatcttcatgcacagattattagtagtaacatccataccatcatagttgtaagaagcacgttggtatggtactactgcagttgtgaagaatactccgatgccttcgtggtgctccaatagatgcctatcaaggatgttgtatcaaggactgccattaccgctggttgtaccatcctccggcatgatcatgatgctcaggagttgctgcaagaaatgatggaagaaggcgtgttgcct

SEQ ID NO: 118360 - DNA, 464 bp, Glycine max
  Clone ID: PAT_MRT3847_77889C.1
cactgagcatcgtctagctatctcgatcgaactgtccaaggtcctgtcactatgtggttaggtacgtaggtaatattgtatgtatgcaggtgtacaatataaaacagccgcagcagcagcaacaaatattggtgtggtgtatgggtatggtgttgaagccggtgtggtatggtactgtaaattattttactattagtattggttgtacttttaatacatagtagtacaagttgtaaaaacgttccaccaggtattatttggagttcgtgttgtattataatataacgtgtaatttagagtaatctttactgggcgaatgtaaataatccaggaatacagcggcgtattaaatcataacgttggttaacgttgtaaatttcatggttgtaatgtttgtaatcagtaatacaacaaagcaatggagttaaggttatgcgtgattaatagggcgggtaagtgtaaat

SEQ ID NO: 118361 - DNA, 228 bp, Glycine max
  Clone ID: PAT_MRT3847_7788C.1
cggaaacaaaatcaaacaagggcccggcatttagcttttataaaaccggaacccttttctaccacagggaaacagaaaaaaaagaggggatctttaagtcaaagccccttaaaaaacctttttaaggggggggaaaaaaactactgggatttgaaaaagcttttctggggtgggggaaaatatccccccaattcactcccccaaaaaccaccgaaaaaaaacaccttg

SEQ ID NO: 118362 - DNA, 705 bp, Glycine max
  Clone ID: PAT_MRT3847_77890C.1
cggctcgagggatttgaaatccttggctttatatatgcaccttacattctttatacatgccagcaaaccatttgactgaagaccttccatcaatccttcataatttgtctagtggttgtgttagacactcattacaagatttggttttgtcatttaatcaaatcactggctctttacctgacctttcagtattctcatctctaaaaatattggttctcgatatgaatcaattaagtggaaacatacctgaaggaatccgcttaccaattcatttggaatctctgtcaatccaatcaaacactttagaaggtggaattccaaaatcatttgggaatgcatgtgctttgcgctcactgtatatgtctggtaacaatttgaataaagagctttcggtgataattcatcaattgtctgggtgtgccagattctcgctgcaagaattgaacataagaggaaatcaaatcaatgaaaaattctgaattgtaggtcccagcttgttgaggtggaaaatgcaaagagacacttttaatttggaggtgagaaggcatctctcacagttggatttggagaccgagagagaattaaggaaggcttctagagcttgagggagccaattgtgattgtgatctagtttattttcctttttaatttctaagcattttgtttgtagtttggcctttcaatctgaactggttgttttttatg

SEQ ID NO: 118363 - DNA, 358 bp, Glycine max
  Clone ID: PAT_MRT3847_77891C.1
gtttatgtgcttgcatggtcgtgagaagatcactagaggggggaagaaaaacgaagggcatgtcagtccaagagtcgagagaggtacctaaagcacccgatagacactaaaacggacatacacttgttatcgagtcgaggtatgcaacgacgaaccaccgagagaggtcgatagacgaagaggtagaataaacgaccagagaggtagacccgcacggggacggctaagccagtcccgaagaacccctaaggaccacgacgtcaaaacgacgaacccgcaaacataatccccaccccacctaccctcataaccatcatcgccgccgaaacgcccaccgttagccataatccttctcccc

SEQ ID NO: 118364 - DNA, 1625 bp, Glycine max
  Clone ID: PAT_MRT3847_77892C.1
tgtccctgctcgcgcatctccagaggtccctaggagcggagaaaaagcatatggtctcccgtcacagatccaagaagtggtttcaaccgggaatccagaactttccacagcctcaagccccctctccgtctccctccccccaacgccgccgtctccgcagccgccttcgccctcttcctccgccgcaactcgcagttcccggactcctccaccgcctttatcgactctgccaccggccaccgcctctcctacggcgagctcctccaccgcgccaaaaccctagcctcgaatctcgccacaatcctcaaactcaccaaaggcgacacagcgctcgttctctcaccaaatattctccaagaaaccgatgaggcattcaaagctaagttccccaacgtcctcgtcatgcagggatacggtttaactgagtctgcagttacccgaaccactccagaggaggcaaatcaggtgggagcaacaggtaaactgataccaaatatagaagccaaaattgtgaacccagaaacaggggaagccatgtttcccggtgaacaaggagaactctggatcagaggaccttatgttatgaaaggtaattaatattattattattattattagaaattaattaacatgagagtataatgcaggactttgttgggttttcatctattacattatttttgttatgtaaaattgtattaatacgtgattattgtttgttgtcacacgcacaatgcatggatgatgatcaggttattctggtgacccaaaagcaacttcagcaactttggtggatgggtggttaaggactggggacctctgttattttgatagcaaaggtttcttgtatgttgtagataggttgaaagagttgattaaatacaagggctaccaggttgctccggcagagctagaagagttactcctatctcattcagagataaatgatgctgcagttattccataccctgatgaagtagcaggccaagtgcccatggcgtttgtggtgagacaacctcaaagttcccttggcgcagcagaagttattgattttgttgccaaacaggtgctttaatatttgataatatgtagcgatattaataatatttattcatattttttaataacatttttattaagtattaagttaaaaaatgttgttaagaatcacatactgtgttgtagtgaatttcccttgtgcttaatttcttttgcacatttagatttcagttttactccacatgacgcattgccccctcttgtttgcatgttgaattgagctagctactacatatcaatacttttattttggcatgtgttttcttggctgcaggtttcaccgtacaagaaaataaggcgtgtagcatttgttaattccatacccaagaatgctgcgggaaagatactgaggaaggacttaaaactggcgctctctaggttgtaatatgcttcattttcgttttataagtggtgtttgatttagtcttttgctccaaatgaaaaaaaaaaagaagaagcaatgcgtgtgttcagtttaagaatttatatgtaatgaaagaccttcttttgtaaaatagatcttgaactttatcaaatgatgtagtatagtaacttctcatcacatc

SEQ ID NO: 118365 - DNA, 1713 bp, Glycine max
  Clone ID: PAT_MRT3847_77893C.1
cgtttggcggaggtttgtggtcttcccatgcgcctttacggtgaccagtggcgggggccgcatctgccgccagtgggggggattccttctatcctgggtgttgggtgatggggtccgagggtggctccaccctctggtctttcttttattgatgcatacacagggaaggaactcaattctttgagtcttgctcatactgttgctcaagttattccactgccttatactgattcaactgaacagcgtctgcatctaattatagacacaaaccaacacgcatacctatacccaagaactcctgaagctattggcattctgcaacgtgaattttcaaatgtgtactggtactcagttgatgctgataatggtgttatcagaggtcatgccttgaagagcaattgcattcacaaagtagtggatgaatactgctttgacttcagggatttatggtctattgtattcccatctgaatcagaaaagattattgcaacagtaacaagaaaatcaaatgaggtagttcatactcaagcaaaagttatgactgatcacgatgtcatgtataagtatgtatcgaagaatgtactttttgtcgcaaatgcagcaccaaaagccagaggggaaattggaacagccaccccagaggaggcattgttggtcatctatatcattgatactgtgactggtcgcgtattgcatcgcatggcacatcatggttgccagggtcctgttcatgctgtatttagtgaaaactgggttgtctaccactattttaatctcagagcacacagatatgagatgtcagttgttgaggtctatgatcagtctcgagcggataacaaagatgtctggaagtttgttcttgggaagcataatcttacatcacccatctcttcttattatcgagcagaagttgttacaaaatcacagtcatacttttttacccattctgtgaaagcaatagaggtgacttcgacggccaagggtataacctctaagcagcttcttattggaacaattggtgatcaggttttggcacttgataagcgctttttggatccccggcgcacacttaatccctcacaagctgagaaagaagaaggaattattcctcttacggattcattgcccattatttctcagtcctacattacgcattcccttaaagtggaaggtcttcgaggcattgtaactgtgcctgccaagctggagtctacatctctcgtctttgcctatggagttgatctattttttactcagattgctccttctaggacttacgattcactaactgaagatttcagctatgctttgcttcttctaacaattgttgcacttgtagctgcaatatttgtcacttgggtattatcccagaggaaagatctacaagagaaatggagatgatctgtcctccatttttgccttataatttctaattttgaagttttaagtagttttatctctgttttctttgttagttattagttcggattttgaaatcttttgtagcttgaattgcaaaagtaatgcagaattccattaggttgaatggaggatgttttcattttaatgatgtaaattgaggagtacgaaagataatcatgaaattccgatgtttgacatgaatgtttaatcatcgctgtcaaggagaaatattcaagatgtttcttttcaaaatataggataaagccaccccccctcctatccgggctggcc

SEQ ID NO: 118366 - DNA, 311 bp, Glycine max
  Clone ID: PAT_MRT3847_77894C.1
gagcacttggtttagcaagagaaaaaataccaaccatggcaaccatttctactgatcacccatgatgatcctactcctatggaacctcctatggagcaccctatgggaccacctatgataccactagcagcatgtaacaatcctccttcacgccaagccgtgaagttcataactgctgcatctattggcatcacactcttacgcctgtctgggttgagcctcacaggcactgtcataagtttgatcattgcaacccctcttcttgttatcttcagccccatccgtgtccctgctgcgtgtgtgctgttcct

SEQ ID NO: 118367 - DNA, 3300 bp, Glycine max
  Clone ID: PAT_MRT3847_77895C.1
cccacgcgtctgcccactcgtccggggaggagaaaagtggaaagaagacaaagatgaccgcgagtacttcgagccgggctgtttgtcaagtggaagattgtagggctgatcttagtaatgcgaaggattaccatcgccgccacaaagtttgtgatatgcattctaaggctacccaggaactagttggaaatgttatgcagagattctgtcaacagtgtagcaggtttcatgttcttcaagaatttgatgaagggaagagaagctgtcgtaggcgtctggcaggccacaataaaaggaggaggaaaacacttcctgatgcaactgtagttaatggaggctctctgaatgaagaaaagggcagtagctatttgttaatgagtttgctaaggatactgtccaatatgcattcaaatggctcggataatatgaggaaccaggatgttctatcacatcttctgaggaacctggcaagtctgactggtacaattaatggaagaaatatagtgtctttattagagggatctcaagatttggtaaaagctgggacatctggagctgcacagaatgttcctaacacaaattctgatggccctgaaccatccagacctttagattcttctatcaaaatggatgatggtctaatccatcgggaccctccagagtctatggtacaacgtgagacgactcctgctaatgatatggctaaaaaatgtatagcttcaggcagtgatggagtaggaagtttaaaatctccttcagtaccgcagtcctcaaatgtacttctgtcaagggatggccttccaccccaatcagttgcagcacagactacagttggaagaattgggttaagtaatattgacctgaataatgtatatgatgatgtacaggattatgttgagaacacgaggaattcttgtcctcctctgccttcagggaatgggtctcttgatcatccttaactggttatcccacagtcccacagagatagagagctatataaggccaggctgtatcatattaactatatatctccgtctagaaaattccgcttgggaagagctatgctacaatctagaatccagcttgagaaagcttgctgcgccaaatgattctttctggagaacaggatggatatatacaagagtgcagcactctgtagcttttctgtataatggtcaggtggtcttagatgcaccattgcgcctcaaaagtccgcaaagttgtcaaattttatgcgttaaaccacttgctgtttctgctagttcttgtgctcaatttgttttgaaaggattcaattttttgctgtctaactcgaggttgctctgtgcacttgaagggaagtatctggtacaagatagttgttatgatttgattgacagtgctgatgcagtcaatggacatcaagagcttcagcatctcagtttctcttgtcatgtaccgaatgtgactggaagagggtttatcgaggtggaagacaatggtcttagcagctgttcctttccattcatagttgcagagcaagaaatttgcttagagatctgtaagctggagaatgtcattgaggcagcagagactgctgatgacaaccagataaaaactaacctaatggaagaaaagactcaagcattgtatttcatacaagaaatgggttggctccttcatagaagtcgtgtgaaagttaggctaggtcccatggcacctgtccaagatcgcttccattttaatcggttcatatggcttgttggcttctctatggaccatgactggtgtgctgtgatgaaaaagctcttgaacattatctttgagggcactgttgatactggagatcatgcctctgttgagttagctttgttagagatgggtcttctacacaaagctgtaaaaagaaattgtcggcctatggtggaaatactattaaaatttgtgccagttaaagcttcagatggtggagacagtaatgagaagcaagtcaacaagtcccctgacagattcatattcagacctgatactgttgggcctgttgggttgactccccttcatgttgcagcaagtatgcatggttcggagaatgtattggatgcattaactgatgatccaggaatggtgggaactgaggcatggaaaagtgctcaggatgctacaggtttgaccccctatgactatgcatccatgcggggctactactcttacattcaacttgtccagagtaaaacaagcaacacatgcaaaagccaacacgtgcttgatatcccaggcacccttgtagatagtaacacaaagcagaagcaatcagataggcacagatcatcaaaagtttcaagtttgcagactgagaagattgaaacaacagcaatgccacgtcgttgtgggctatgccagcaaaagctggcgtacggtggcatgagaagggcactggtttataggccagcaatgctgtcaatggtggccattgcagccgtgtgtgtctgtgtggctttgctcttcaaaagttcacccaaagtttactatgtattccagccattcagctgggaatcattggagtatgggtcaatctaatgttgtatatcaggtattctttgcagtaggcatgcacttttgttttttggagtgtgaaagtcttagttctgagtatatacatctgtgatagtagctgtcatcaaaatatgtagggaaggtttgtttaccttcacttcagatgttcagcataaaatgctcactgtgctatctatcaaatattaggtagatggtgctattagttcacgtatatgcaaagataataggagcttgccggtatttagaagggtactttgtatcaatcaataattatataagatttactacaggtgagtatgctttgatgttatcttatttattgatgttattatgaaaattatataagcaactaaatgtagttgactagtaacaagagaattatgtaacttgcaggggacttcatattgaatttgggtttcattatgtacacctgttgttttcaaccattggtttatgtatgaagctttatgtaaaaaaaaaaaaaaaaaaaaaaaaaaaaaaaaaaaaaaaaaaaaaaaaaaaagaaaaaggaagaaaaaaaaaaaaaaaaaaggtttattccttttagggagggtaaattttagcttggcactggccgtcgttttacaacgtcgggactggaaaaaccctggcgttacccaacttaatcgccttgaagcacatccccttttcgccagctggggtaatagcaaaaaggcccgcaccgatcgcccttcccaacagttgcgcagcctgaatggcaaatgg

SEQ ID NO: 118368 - DNA, 649 bp, Glycine max
  Clone ID: PAT_MRT3847_77896C.1
ggctcgaggtttaaaatctccttcagttccactgtccacaaatgtacttctgtcaatggatagccttccaccacaatcaattgcagcacagactacagttggaagaattgggttaagtaatattgacctgaataatgtatatgatgatgtacaggattatgttgagaacacgaggaattcttgtcctcctctgccttcagggaatgggtctcttgatcatcctttatggatccaatgtgactctctcaagtcaagtccaccacagacaagtagaaactcagattcaacctctacccagtcaccatctagttctagtggagaagctcagagtcgtacagatcgaattgttttcaaactatttggcaaggctccaaatgatttcccccatgctctccgatcacagatccttaactggttatcccacagtcccacagagatagagagctatataaggccaggctgtatcatattaactatatatctccgtctagaaaattccgcttgggaagagctatgctacaatctagaatccagcttgagaaagcttgctgcgccaaatgattctttctggagaacaggatggatatatacaagagtgcagcactctgtagcttttctgtataatggtcaggtggtcttagatgcacca

SEQ ID NO: 118369 - DNA, 468 bp, Glycine max
  Clone ID: PAT_MRT3847_77897C.1
cccacgcgtccgcccacgcgtccgtacgggcgagaagacgacagaagggcaagtaattgccaaaatttcaaggcttatttttaataaaagaataatatagttgaataaactagttaaattggttaaagatttacaactgcaaaaaacaaaaatatttaatttataggattttgaacatttttaaagtttttattattttgtaattcaagtttgtacttaaaattattgaatttgcatatttaatttctcttgtttcaaattctttagccatccacggaccacggtttctactcatttaaattttctcgtaacacataattctgtcgtagttttgttattagaaaaaagtacaagaatgctgagaaaaggacaagggaaaaaattgttaagtttatatttctagtatatacaaaccaacatagtggaatatgattaataaataactttctctagctcaaacatataatt

SEQ ID NO: 118370 - DNA, 382 bp, Glycine max
  Clone ID: PAT_MRT3847_77898C.1
gaatatgaggctgagaatagcacgaagagcgcttttttgtacgcgtgattgtactgaacaccatacatactttgggtacgcgtaaacttatatatgctccccattcaatcgtggtatgcgggaaataagttgacatttatactgttaacaattgttttatccgacgtatgatcaccatgttctttataacaagtctgtagaggaagatgtttctcatcaaacaacaatagacttacgttagcgtcatactacctgtggttagttcttatacatatgaaagaaatgaagtctacctgacccttgctaaaaatgaagcgacattgctgcataaaaaaatttcaaaccaagctttttatgatgacaactttatcatgatttttgc

SEQ ID NO: 118371 - DNA, 295 bp, Glycine max
  Clone ID: PAT_MRT3847_77899C.1
gggaccgggcccactggaaccataattttgattttataaacaaggttttttattttttccaaaggattactttgggtcatttatttttaaaaatttaccttaatagggggtggtggatatacaatcatggggaggtgaatgggaaagaagatcttattggtttaacttaggggggtttaaatgaactaatttcccgggacttaatgatttagtagaagggaaatgaaggactggtcacttggccttgccaagggttgcctttggaaggttaaatgggggagggttatcaacccct

SEQ ID NO: 118372 - DNA, 905 bp, Glycine max
  Clone ID: PAT_MRT3847_7789C.1
agaagaagagggttcagtttctagcctttgtcgctgccatcattgctcttagcattacagctgaaaaatgcaggcagctagttggcgagaaggcatcatcccagagtggaaagtttacattcctaaattgctttgacatgagttctggaacattagcatgtagtgtgaaggaaagtgtgaagctctacttctacaatattagagctgctcatgttgaaggagcaaggcatgatgcattgcagtctgcccttgttgatgctttgaagcagggaatgtcacaaagtgcttcagcaaaatatgctaagaaagaaggtgacaaggcagcaaaattggcttcccgtaaagccaggcgcattataggtcccatcatctcttcagggtgggatttttttgaagctgtttactatggtggtactctcactgaagggttcctcaggggaagtggcactttgtttggtacttatgctggaggcttccttggggagcaaaggcttgggagatttggttaccttgttgggagtcacttgggtagttggattggaggtagaatagggctaatgctctatgatgtggctaatggagtgcatttcttgttgcattctgttcaatcacttggaagtgatccaagttcaagaaacttaggctaaccatcaagaaaattaattctgaagcaactacaagttcctttttacatgacacttctgtttatgttcagttctagaggttatgttcataaattttgaatttactatctagcagagctacgacacaaaagaagattctcaattgagtatatgtaagtggtaagtttactcaattgagatatttgtcattttcttacatttaattggatgtatatgtaattttacaagtgtttataaattggtttttctttaacgttaaaa

SEQ ID NO: 118373 - DNA, 673 bp, Glycine max
  Clone ID: PAT_MRT3847_778C.1
atgagcttgaagaactgggtagatttctgatcagagactgatttgtttggatggcaagtgcttgtggttgaagtcgaccattggaaataagttggtcagcagccacgcgttcgcccacgcgtccggcagaattcaagtttgctttagtgctggtaaattcaaattctgagtcatgcttgcttacctggtagtctttagcccggttaggagaagggagctttggttggtggtcttgaatagcaacaaggccactaaaagagagcgagtccaatgaatatgaaatgctatcatacgccacatgtgaggtgagcttgtccattgatttatataaccaaaatggctatgtgggttgaaaacttgtatatatatgcagaaacctgctagacgctgggaccactttaatgcagttagaatgtgttctgctgagttgaagttgttttggttttatatttttctttttgttgtccgctttgtggtggagggggtaaagccaatacgcatattgaattttagggggcatttcttgagaagttaacatgctattaacttttcggtctgcaagtttgagtagccaattgaactgagttggggtatggagttggggatctttaggcgaagtgttggggacatgttgcgtgtgggcagggtatggatttaggagtctgcgggtggg

SEQ ID NO: 118374 - DNA, 366 bp, Glycine max
  Clone ID: PAT_MRT3847_77900C.1
gagagaactagtctcgcgttttttttgtttttatattaaaaagtcattcaaatcattgtagtgatagagccctttaggctttagttgtctcataaagtaaattcacaaagttatgcttttctgggtaacgttcaaaggttatttaccaaagattgatattatctctcaaagagtcctctggtttctcacaaaaaataaaatctcctgtttgaccgaaataatttaagaggggatttgcagttaattataactaagttaattgttttattgttctagcgaatattcgtgtggcaattttaaattggatcataagtgctttttttccccctattttgttggttaagtcctacctacctttctaagctt

SEQ ID NO: 118375 - DNA, 117 bp, Glycine max
  Clone ID: PAT_MRT3847_77901C.1
gttctccaaaaccggcggccaataattaactcctccaacccggaaataaattccggaccgttactggaagggttacaaccttccccaaaatggatccgaataaaaccttggcgtatc

SEQ ID NO: 118376 - DNA, 266 bp, Glycine max
  Clone ID: PAT_MRT3847_77902C.1
aaagaagttaatgtccttgtgtggtcgctcaaaagaagcaaacaagagtcattgtgcgctatgcatgtataagaggctttaacccatctcttcacatgttcatgctaaggtaagggtaacatcttactcccatgacctatccttctcataagtgtgggggccatatggtctacataggaatataattcctcttatgccataatggcacaatggtacaaactccccccttaggagtgtgaagagacaacagatggtgtgaatagtcc

SEQ ID NO: 118377 - DNA, 347 bp, Glycine max
  Clone ID: PAT_MRT3847_77903C.1
aagaggaattttattttagcagaagcgaccgggtaccaactggtaggcctaatgggcagcaccgacaaagcgcccgagaaccaaacgaaggcggagggccacagcaaacgaaccgcggcgattccgcgcaaggaaccctaaccacaaaaccagaagcgaccgggccccaaagacgcacgaactagcgctcgaacaaatccagaggtaacccctcacaaacacagggggtcgattatagacagaggacccagcaggtccgcatcaacgccaacctggaactaaccaacagcgtggacaacgactagagcggaagacacctggggtacaacgggaacgggcgactccag

SEQ ID NO: 118378 - DNA, 158 bp, Glycine max
  Clone ID: PAT_MRT3847_77904C.1
gcaaaagctaattccatgtttcttggatatgccgctattatatccattgtgacacggacacagggtgcaatctgtcagtggaaacttgctaaccctaaccaaagtttgattgcaatgataaaagtcaggcgcttattaaatctcatttataatacaaa

SEQ ID NO: 118379 - DNA, 574 bp, Glycine max
  Clone ID: PAT_MRT3847_77905C.1
agcaattcctggagagggcctacaacaatgcaaaaactattctgaccactcacaacaaggagcttcatgcacttgcgaatgcccttctggagcatgaaaccctttcaggaactcagataaaggcattgcttgcccaagttagatctcagatgcagcagcagcagccccaaacacttgaagctcagaacagttcacaatccaacacagtgcctccatcatctagcaacccggcatctgctgctgctgctgctgcagctgccgccgccaccacagccgcagctacagctactgctgctgccgccaaggctaaaagtgctccagtgggatcttagcaggacaagatatgctggagacgtgtagcaaacataactttgtactgccagattgagatgtgcttaggtatttttttttcaggttttctcagttggaggaactcaactcatgcacctcggagactagttgacattaaagtatatacattttcttttctcattgtttgtccccaactcaatctggtactctcactcgatctttttctgactataaattaataacaaattaccttgttcaattc

SEQ ID NO: 118380 - DNA, 429 bp, Glycine max
  Clone ID: PAT_MRT3847_77906C.1
ggggagcgttctctaatatttagcatacctgcggaaggtgcttatgtgctccccctttggtttgagctctcagattactcactactcaggagtcaaaatctttggtggtagctttagggtttttctgatttggctctgtgacctatgaatcggtggttggttggttggttaaattggaatggaatgggggagcgccccgaccaaatggaaaaaggggcgggagcgaaagaaccagaattcccgcgatttggtttttggcatccctttctggcttcttctgggttttggtcctttacttccattttgggggccttggaggagataatagcaatagaaaggttaggtataataatcaaggtgatcttggtcactcaaccctatcaacaacacctggttctgtgtaggtatgaacctcccccaacccatcaa

SEQ ID NO: 118381 - DNA, 505 bp, Glycine max
  Clone ID: PAT_MRT3847_77907C.1
ccggaccggaatacccgggaggagccgcccttacgggaagaccgtattttttttttttcattctctgatcacgttcctgtgaggtctgctgagacgctctgtatatttgcttgtaaatgttactgggaggctatatcctattatatggaacaacatggaatttgaaattttgatccttgcagttaaaaaccgacgaaccttcttgttgggaaacttgtgggccaaggttgagaaatgtctgaatctccttcccattctttcccgccttttataggacattattatggctgaagatggtggaaagtaccaatttgcaagaatcgtgtgtgaatgggtgaatcaatgttgtgtaactcgttggatttgaagcgtcaaaatgtgtgataccttttgcaagtgaattctttcacctcccattactgtacaattgtacacgatgttgcctgaccgttttgtggcgagggggattcactgtgggaggtcctttactgtgaacccatggatt

SEQ ID NO: 118382 - DNA, 424 bp, Glycine max
  Clone ID: PAT_MRT3847_77908C.1
ggaggaatatacactcccctcgtatattcctatcaataaaataaacatcatcatacccgattgtttatttttgaaggacaatcacatgagggtatttccttttaaaacgtttgttaaaccgaaaacgtattttttttttaaaggaccgaatggctataaatggcaaaaaacatgctgggccaaaaaaaaaaaaacccaccctcacataaaccctggggtgaccttataacatcaggggggtaaaaatttcttattaatcatcaaaaaaaatttttcctttttggccaaaaactcagggtggggacattactttttttttccagccacccaacaattcaactttttttttttacttaaacccctctaatgcggggaaggatcaaaaatgagttcaaggaacccgcctattttgatgacattacca

SEQ ID NO: 118383 - DNA, 517 bp, Glycine max
  Clone ID: PAT_MRT3847_77909C.1
gttatcgcttacgcttaatcctcctcagtggtgctgtcacgccttttctgatggggccacaaaacactggcagatgcatacaggtgaatattcaacctttgatggttatcaagctggctctagacactattttttcacgatcgaatttgcgaaactcaccatgattagaactgtgacctacattgtggttttattgaggctatcaacttcggacacgctgagttcttactaattctctagaatgaggattgctatggaagaatcatcaagcagggctgcacaggcaataagctcgatatcagcattgatggaattgcacggagctactgctctggatcttaatagattatcgagggactctgaaaacatcactatctattacctcagtgaaaaaggatcattggtgaggactgatgtggaaaagctggcatgatctctaacgctgcgccttactacactgatgatgtcaggtgttagagatgccgccctgatcagatacataatacgtggcattgga

SEQ ID NO: 118384 - DNA, 596 bp, Glycine max
  unsure (1)..(596): unsure at all n locations
  Clone ID: PAT_MRT3847_7790C.1
ccacgcgtccgggtttttatttgtctcttctctctgcatagcttgggttcttctcaaaagatgctctctcgtctgtgtcgataacttggattcaccactcaccgctagagatctagaagacgaattccgtgtttatggagctatttcaaatgcttagattgctcgtctaccacctggttatgcttttattgactatgatgaccgcatacactcacatgatgctctccttgaatcggatggtatgtctagaacaattatgtctctgtgacgtcatcgacttaatatctacttctgatgcgcatatatctgtatattcgctacattcttcttatctgctaatggggtattggttttcccccatgttttttccacgtgatctggtgaatggttttcctcaactaactgattacttcttctttttggcctatggggcaagcgcatgctgctctctttttcttctacttatgccttggcctgcactatggttttttcttcattgagtcctgngcaaagtatgctgctttgtacagcttgactacttctgctactactgcatgtaatgagaattaagattgtgtgcacgggagctttgcact

SEQ ID NO: 118385 - DNA, 268 bp, Glycine max
  unsure (1)..(268): unsure at all n locations
  Clone ID: PAT_MRT3847_77910C.1
gcagatnttcgtgaaanncctaacgggtgaagacgataaccctannggtagagtnatcnngacacnatgcgncantgtgnattgcnaagatncatgacanggagggnatnccgccggagncagcagcgcctgatgttcgccggtaagcagctggagganggccgcaccctcgccgagtacaacatccataatggagtncacgcttcanctacgtcctcngcntccgnggctgncgccaagaatcgcaagatagaagacctacaccang

SEQ ID NO: 118386 - DNA, 360 bp, Glycine max
  Clone ID: PAT_MRT3847_77911C.1
ctcaagacaatgggaatggctgcggtcagcgataaattgatcagctagaaagctgcaggaatcagatcgtctgtagtgagagaagccaaatctttacggccgacgtcgtcacgatgatcagctccttttatcaccggctttccggcctttaaacccgcttggtcccgaggcagatgagaacgcattctattttgaaagcccttgaaaagatttatcggactttgcaatcttgggatgccatcttggggctcttatgacaatattatcaagcgggaactttaatgggtgaaggaccacattattatgtgaaaaactattttggatcaattgaacaactgagaaaaaacattgtattttttg

SEQ ID NO: 118387 - DNA, 409 bp, Glycine max
  Clone ID: PAT_MRT3847_77912C.1
gcgcgcgtccgtaaaccgggcgcccttagagcggtcgtctttttttttttttttttaagctggcggtttccacattcaacatggaaatacaagttcatgttttaaattgataacataatgttcttaaatggagggatccaacaatggtgcgcaccctatgttgcttgggaaccaatcctaagatcttcctcacttgtctgctgatcccatccataatcacaaaagggtttttaaaaaggatccaaaagctaacccagcaagagtttgaattgctttgaagctgatagagaaagcgaagatcacgacaaaaaaaagtgcaatccaaccgtcaaatgaattgtccaatacatgacgtaaaaatgctcctgtaggtggccagaagatattcagcattgttagggcagacagt

SEQ ID NO: 118388 - DNA, 119 bp, Glycine max
  unsure (1)..(119): unsure at all n locations
  Clone ID: PAT_MRT3847_77913C.1
ggctngnatttccgtntccgtntcaactctttccactnttnacccaaaacttccttaaaccaanttntncncctgctcgtntctccctttctttccaaccggcaattcaaattgggagg

SEQ ID NO: 118389 - DNA, 437 bp, Glycine max
  Clone ID: PAT_MRT3847_77914C.1
ttttttttttttttttttttttttttttttttttttttctttttttttttttgtttttgggggaagaaaaccaaaatttcataatacaaagcattatatggtttattacgaccaaagctaaccgggttttgccccataacaaaaaggttactttacccgcaattttggggatttcactgaaaattgcctaaaacccctcactttggcctaagtttcctaaaacaacttacacgtgcccccaaaacatgggtttattcccgcccaaggcaagggacttgccccataattcacctatagtttctgggcacgggggaatccctgcagctctaaacctacttgacaagattctggggccctgggaacccaatggcccagcctacgctctatgccttggcagctacacttgcggggatgtcagctgcaaattgcttggggtt

SEQ ID NO: 118390 - DNA, 219 bp, Glycine max
  Clone ID: PAT_MRT3847_77915C.1
gtgttggactttattgttttaataataccggtggtgatacgttctaaacaagagggcgagtatatacagtcaaagacataggcagatgtctaagttaggtaagctccggaatataagcctatgacatttgagtgaaaccaagccacctggggctcctttgcaagcccgaaaacatgacaaacctcatgatagagcaaaggctcaccgtgatggccttct

SEQ ID NO: 118391 - DNA, 245 bp, Glycine max
  unsure (1)..(245): unsure at all n locations
  Clone ID: PAT_MRT3847_77916C.1
atagaactgtattatactaagaacataatagattatgctttccactacacaaaggctaaagctttagaacaaaaactctgagtgaccaatccaacatggatccagccctgagattgaagatttacatactgcgggctattatgttnacaccgtcagaatgaattgccataacataccttaattaaaagcaacactggcaactttgagcgggtcagccgccattacgtacgagacaggagccacct

SEQ ID NO: 118392 - DNA, 181 bp, Glycine max
  Clone ID: PAT_MRT3847_77917C.1
ctccgtttttttaataccacataatggtattaagatataagatgtgtcataaacaaatgggggccagaagcaattgaaatttcttatctacaggtccaaaatgaggtatctatctcattaaaatcccattttaaaaaccacccggaaaccatttttgttcctgtaccagggaattgctaac

SEQ ID NO: 118393 - DNA, 1880 bp, Glycine max
  Clone ID: PAT_MRT3847_77918C.1
gctgtcaagcagcagttgggggagctgcgatgtgaccgcttatctggtgatccttatccgtatcggtccgcaacgcaattgagtgagagtgaggcccttatttatctctctccgccaaattctggttgggattggttcttcttccacttccaacgccatgcctctttttggaattttccagataccctcatttatggacataatcactgacctcgccatgttcattactccgctatggattgcggttatcgtcggcgtcgtcgtgggctgggcgtggaagcccaaatgggcctttcaccccaaagacgctcttctcaagtttcgctctcctcgccctcccaatccccaaaacgacaccgcttttacctactccgccaccagttcctccgcgcgtgagaaagacgcgagtgggagtcctgtggtgacggaagacgatttgctgcatctgtggaagttggttgaggaaaaagacggagggcgggcatggattcagatgatggaccgttctaccccgaccatgacctatcaagcgtggcgtagggatcctgagagtggaccgccgcagtatcggagcagaacggtgttcgaagacgcgagtcctgagttggtgagggatttcttttgggatgatgatttcaggttgaagtgggatgacatgcttatacatgctgctaccataaatgagtgtggcctaactaggagaatgatggtgcactgggtgcgcaagcttaacatgttttggagtgacagagagaatataattgggagtggaatttgggacgaagtacgaatttactactgtgtcactaatggattaccttgccacgccatggcagtttctacaagaagtaatggagatgatttggtaaattccaaagcttgtattccgacagtgaaatcaaggaaagcgatgaccaactgacttcctgtaaagtgtacatatttcgtcacaaagatatggcaattcactgggaaattaccaagtgcaggtgtcgacagggtatgtggggagctgtcaagaagtttgatccggtattagggaacatatagagaaacaaagggtttctggtaccccattgtcaccctgtgcacgtgctgctaagatcaacactaaaagtaaccatggactatgtgaggtctctggaaaacacgaccagtgacttgttggagactgaaaatcaggattcttctgacaagccaggtggaaggaacatacctaagcttttaattgttggtggagccattgcccttgcctgcactcttgatcaaggactactgactaaggcagttatatttggagtagcccgaaggtttgcaaaaatgggaggaaggaggttgtgatacattatgctttttgctttgagaaattgccaggccagccaattccctctggcagtagaattagaaattgagatgtcacttcttgctttggggcaaatgtttattctggatctagttggcagccatggttcaagaagaatggtattattctttctccatttgtttgatctatgaggcggcttttaactggaaatagctacattgtatctttatgtcattaaaaaaagattgtcatgctgcaggaataacatcaatattcaggtttttcttttagttcatgttttttttactgttagctctctctgccctcttctttttctaccgtttgattctgagaaatacagtgaacaagatatggtagctctcaaaatttcgttgcatgaatgtttattgtatttgccaagtctctgtagataaaatgagaagaccggcagttgatgaataatcacagtcaacactttgcagtttgcagggtaggtggttgttgaattacgatttaattattggtcctttaatcgttatagttaatattcattttt

SEQ ID NO: 118394 - DNA, 647 bp, Glycine max
  Clone ID: PAT_MRT3847_77919C.1
gacgtataacaatattttcagtcaacttagcgcgattgtggacggtgaacctcctgatctgccagaggaaggctactctgacgcggcgaggaattttgtgcgaggctgtctaaacaagattcccaacttgcggccaacatatgcaatgctcttgcagcacgcatggttggccccacttgccaaaccagacacgattacagaagaagacgaggaggaagtcgaagctgctcacgcagcagatggtggagaagccgctagtgaccaagggcctgcccaaccaatagaagccgtcttcgataaggaagtcgcagattgggtcaagggtgccattgagaagagaagaaggggccagatgaagggcgtagagaagcctgccctgcacgcggcacctcttgatgcagtgcaaagtccgtctgcgactgccactaagaactttgagacggaagcgccagcagaggcagaggcagcagcatgaaggagctgctcttaccagtaccagtaaattgctcttttcttccatgtcagtggcagtcgtaggttacacggcgccccaagaggcaagcatggtcccgacgaggatgagccatatattttcgagcatcgtagccatggaaatgtacgtagcaaataacatgataccaaaatga

SEQ ID NO: 118395 - DNA, 168 bp, Glycine max
  Clone ID: PAT_MRT3847_7791C.1
gctgtagagaaattttggacttcctgattgagacatacctcatgctagacagatgcgattaaagatgtgcataattcatggatatttatgacccacattcatgcatatatattgaactcagtgctttcatatttgttgtttttggcgttatgcaaagcatgtaatacc

SEQ ID NO: 118396 - DNA, 1163 bp, Glycine max
  Clone ID: PAT_MRT3847_77920C.1
gcagtaccggagcagaacggtgttcgaagacgcgagtcctgagttggtgagggatttcttttgggatgatgagttcaggttgaagtgggatgacatgcttatacatgcttccaccatacaagagtgtgtcctcactggaacaatgatggtgcactgggtgcgcaagtgacagagagtatataattgggaggcgaatttgggacgcaggacgaatttactactgtgtcactaagggagtaccttgcccctccatgccaaggcataataaacctaaacgagttgatttattttattcaagctggtgtattcgtgcagttaaatcaagaaaagatgaccagctgacttcatgtgaagtgttattgtttcatcacgaagatatgggaattccctgggaaattgctaagcttggagttcgacagggtatgtggggagctgtcaagaagtttgatccaggactacggacatatgagaaacaaagggtttctggtaccccattgtcaccctgtgcacgtgctgctaagatcaacactaaagtaaccatggactatgtgaggtctctggaaaacacgaccagtgacttgttggagactgaaaatcaggattcttctgacaaaccaggtggaaggaacatacctaagcttttaattgttggtggagccattgcccttgcctgcactcttgatcaaggactactgactaaggcagttatatttggagtagcccgaaggtttgcaaaaatgggaggaaggaggttgtgatacattatgctttttgctttgagaaattgccaggccagccaattccctctggcagtagaattagaaattgagatgtcacttcttgctttggggcaaatgtttattctgaatctagttggcagccgtggttcaagaagaatggtattattctttctccatttgtataatctatatgaggcggcttataactggaaatagctacattgtatctttaagtcattaaagattatcatgctgcaggaatatcatcaatttccaggtttttctttagttcatgttgttttactgttagccctctctgccctcttcttttttacccttttgtttgatctgtatatcatctttttctaccgtttgatactgagaaatacagtgaacaagatatggtagctctccccccccccc

SEQ ID NO: 118397 - DNA, 1023 bp, Glycine max
  Clone ID: PAT_MRT3847_77921C.1
ccaaagattcggctcgagattgacaacaaaatcacacaactattttgcagatgctatttttatttgatggatctaactaaactagtaagcaaaaaaattaatggcaaaaccaaagttgaggtgcgccaaagacgaaagatggtcgctccatgacagccagctctagtgacaggaggcactcgaagcataggtgagagcgcttctccatccagagatagaaaggttttttctacatcatcaaccccaaagagtccagtattggcctctgaaacggtattcttctgctacccagttcttttttccttaattattttcttggttttgttctttttcagtgaaagtgaaaagatattctttacacatagacggtattattctgcttcccacttttttcccaagacataggatggagagaagagaatatagacaagaaaagacagaaagctcacacaagcttgcttgcttactgtaatgtaatggttatagagagttagtatttattaaattgatggaagcatcaaaaggttgcagagaaaaagagagaggcatggcagcgcttgcagtacagatcacgtgtgtgagagcgcttcttcatcgagagatacaaagacttttactacaacatcaaccccaaagagtccagtattggcctctgaaacagtatacttctcctacccattcttttttccttaattattttctcggtttttttcttttccagtgaaagcgcttctccatcaagagatacaaaggtattctttacacatcagtaacgtccagagtagaatggtattctgctttccactttttttttcgagacataggagggagagaagagaatatagacaggggaagtaaaatagttctaacttgatagcaaaacaacataaaattgaatatgaactgggattgagtatcgattcatggggtgacagtgatgtttttgcttcttcaagaataatgtgtctaaaacattccatatttaccgggaatggattaatggatccaattatgtgttaaatt

SEQ ID NO: 118398 - DNA, 1181 bp, Glycine max
  Clone ID: PAT_MRT3847_77922C.1
ctggccttccccttaaagaaacagaaagccaaatgcaataatggtcaagataaaaggggcacactaaagttggtgctgagggactctggcttattaaatgctgatcatccccactcgagccgctggccttctcttcctccttctttctaagcatcatacttcttctctccattgtttcatttttatttccaattcttcaagtgaaaggaatataggaacttgaagtgatgaaaacaacagaatgttaaaggaagctttgatgtgaggtgaggtgaggaaatcacaagaggaatttgaaaatgagtacagcaagattcatcaagtgtgttactgtgggagatggagccgtgggaaagacatgtatgctcatctcttacaccagcaacacattccccacggactatgtgcctacagtttttgacaacttcagtgcaaatgtggtgattgatggaagcacagttaatctaggattatgggacactgctggacaggaggattacaacaggcttaggcctttgagctacagaggagcagatgtgtttttgctggcattttccctcctcagcagagccagctatgaaaatatctctaagaagtggatccctgaactgagacattatgccccaattgtgccaattgtacttgtgggaaccaaacttgatttgagggaagataggcaatatttgattgatcatcctgcggccacacctataactactgctcagggagaagagctgaagaaggaaattggtgctgctgtgtatatagaatgcagctcaaagactcagcagaatgtgaaggctgtgtttgacgctgcaatcaaggttgttctgcagccatcaaagccaaagaaaaaacgaaagaagaacagaacatgcgttttcctttaattggtattcatttgatttgcatcatgtaacattcgtacccttcccctaagttttccttctgtttttttttactttatttgattgcaagaatcgccctttctgaacgtatgtattccaaactctaccctctttcggttttccaatactttttattgctggtggatctaaatgatgttgtatctactggataaatacaaggaaagaatgtactcaattaaagataatttttgtgataagaaaagtataatagcattaaaaatcaaaaagggcggccccaaaatagtgagactc

SEQ ID NO: 118399 - DNA, 682 bp, Glycine max
  Clone ID: PAT_MRT3847_77923C.1
taagatcgatcatcttcaattccctatattagtatattactagcaatattgattgaacactagataatgtgtatgaagttgtagctagctagctagctttctattgtctaatacacctttgtctgtgttgtaaattaaggttcaagaagcaacaagtaatcactcataatacatatatataatggcggattggggtccagtggtgatagcagtggtgctgtttgtgttgcttagccctggtcttctgtttcaattgcctgggaggagcagagtggtagagtttgggaacatgcaaaccagtgcaatttctatcttggtccacacaatcatcttctttggtctcattaccatctttcttattgctattggtgtgcatatctacactggctaggctttattctattctctttttggttaaaggtttagtaaatttttatcttgttattcttttaaggttagttgattgtggtttcccatttctcatgtcctcatcgaataataactctacttctctttagtctttgagattccaagattaggacaaccttggttagtatagagtcatagaatggaatcactggcactgcacacactgatatcatatcacatggcttgatgttttatgctttcatgttcgttctcttcaatcaaattatttacgtactgaccaatcactttattc

SEQ ID NO: 118400 - DNA, 430 bp, Glycine max
  unsure (1)..(430): unsure at all n locations
  Clone ID: PAT_MRT3847_77924C.1
gggtaaagcgtttttttttttttttttttttttttttttttgggaatacaagaactcaatatcatatcacataaacaaacataagaattagtttacaaacacttaaaaatacttcacatggactcgcataaaaaattaccttnccaatggctcataagggggggggncagcccaaagaccatccaacagaaaaaaaaaacttccccagggggggggggggggggggaaacttaatcattctactcatcatcttcatcggtggcttcataatcaaaatctgattcatcactttttggttgcgacagggaattcatgtgaaaagagggggccatttccatctcttccatgtcaataggggcatagcgcattcggtgcgcaaatttctcattagaacaattaagcctccatgagagaaaacacttaaaccctt

SEQ ID NO: 118401 - DNA, 277 bp, Glycine max
  unsure (1)..(277): unsure at all n locations
  Clone ID: PAT_MRT3847_77925C.1
tttcanatctganccgtcgnttgattctaatcanactttctgancaactncttttgtgaaggaaaaggtntnaacgaaaatgaattcaaccatggcggncgaagtgttgccaacggccgcagcgntgacgattnataanggnaagnnttcgggnattaaattcgcggcgtnccaccgcgaccccnagnagtngttganccnaaaccgtggcaaggnaggnaggcgatcnaagaaactngacgggggagctcnncgntttcagaaccnncggtgncag

SEQ ID NO: 118402 - DNA, 106 bp, Glycine max
  Clone ID: PAT_MRT3847_77926C.1
atgacgatttcatggctctggtatatgttacaatcaatgtgtatgctgaactcgcctctagtgctctgtgcatcaatggaattagctttgcactaggagaagttag

SEQ ID NO: 118403 - DNA, 569 bp, Glycine max
  Clone ID: PAT_MRT3847_77927C.1
ggctcgaggcttttttttcctcttaaaaaatgaaaattttagaatattcgctttgccactgaaactttattgtagatgtagtccaaatgaaagatttggaggttttgtttgttccaatagtacatttgtctctaatcccgtacgtttaaaacctctcaaagaaaaaatatcgttgttgctaaatatttttttatcttgttttgtttgtgttggatcgacagtatctgaatgaagctagttggaattggagattgatgaagataatcatgacagtgtgtcatgtgtacgacaaggagcaaaactatgttgccttcgacgaactcgcccctgaagattcacgtccaattacatttttgaaggaaaccatgcctgattatgcttaattaggttcaagctggcttttttctcatatgaaattttttatgtatcaaattacgttcgtatggcattcattttctttttacattttcgatcttgcttagtaatatagttctatttctcatatcatgtattacgagaaaattgcttgctgctctcaaagtcacgtatagagtaattaattatattac

SEQ ID NO: 118404 - DNA, 1909 bp, Glycine max
  Clone ID: PAT_MRT3847_77928C.1
cccacgcgtccgagttgacatatattgtttttgaaaagttacagaaatctaccctattttaatagaaggtccatatgcatagtaaaggagctacaagagacataggtgtagtttttttatgaagacagtgattagaagtaactaactgtaagacactgctaaaaaggactgtttgaaatattctcttattgagtatttctaacatgatttatctggatcccattggtaggtttcatttctaagcttgcccacgcgtccgtgacgaccaaactcacccacttctcacgcggcgacaccacacaccagactcctccgccgtcgtcttcacggcgacatccgatgatatcgctccgataggcggcgccggcgacttcgccagagagttcttcgccgagtcgaagaagctctggtacctcgccggccctgccatcttcacctccgtctgccagtactccctcggcggcgtcacccaagtcttctccggccacgtcaacaccctcgccctcgccgccgtctctgtcgaaaactccgtcatcgccggcttcagcctaggcatcacgtttggaatgggaagcgcgttggaaacgctatgtggacaagcttacggagcggggcaagtgcacatgctgggagtgtacatgcagcgctcgtgggtgattctgaacgccaccgcgatcctgctgtcgctcctctacatcttcgcggggcatatgcttagagctatagggcagacggaggcgatttcggcggcggcgggggagttcgcgttgtggatgatcccgcagctgttcgcgtacgcggtgaactacccggcgcagaagttcctgcaggcgcaaagcaggatcatggtgatggcgtggattgcggcggcggcgctggtgctgcacaccgtgttcagctggctgctcatgctggagctcgggtgggggctcgtcggcgctgccgtggtgctgaacgcgtcgtggtggttcatcgaccttgcgcagctcgttatataatgagtggggcctgcggggaggccatggtccggatttaccttcaaagcctttcacaatctctggggcttcgttcgtctctctcttgcctctactgtcatgctctgccttgaagtgtggtattttatggccctggtcctcttcgctggatatttaaagaatgcagaagtttcggtcgatgccttatctatctgcatgaacatattgggatggaccatcatggtatcctttggaatgaacgcagccgtaagtgtgagggtgtcaaatgaattaggagcatctcacccaagaacagcaaagttttcacttcttgttgctatgatcacttcgactctgatcggtgtcatgctctccatggtgctgatcatcttccggaaccattaccctttctttttctcaaatgattcagaagtgagagcgatggtggtggagctcacacccatgttggccctttgcattgtcatcaacaacgtgcaacccgttctctcaggggttgctgttggcgcagggtggcaggctttggttgcttatgtgaacattgcttgttactacctatttggtattcctctgggccttgttttgggatacaagcttgacatgggtgtcatggggatttggtctggaatgctgtcaggaactatcttacaaacttgtgttctattcttccttgtctatagaacagattggaataaagaggcatcccttgcggaagatagaataaagcagtggggtgggcatgaagattcataaacgcacgctatagggaagaataatggtcaataaacatgaaattctgtttctctttcttaggatcaggtgaacgatcctgcattcattgtttttccttaaaaagtaaatgagcaatattatgttttctgaataattcttctagtgttttataatattagtattgg

SEQ ID NO: 118405 - DNA, 191 bp, Glycine max
  unsure (1)..(191): unsure at all n locations
  Clone ID: PAT_MRT3847_77929C.1
acgacagaagggagtatagaaggttccttttgttttactttgatgtggagggaaattttctgaaagtgttttatggttgttggattggaactttacttgcatgctacatggagttcggtttatcttgttcgtgttgcttgttggtgtggctagtggtacaattgcttgcttntggttttattttgtttggt

SEQ ID NO: 118406 - DNA, 604 bp, Glycine max
  unsure (1)..(604): unsure at all n locations
  Clone ID: PAT_MRT3847_7792C.1
caccaccaacagaaaatggtggaagatagaattgtatttttgttctggtttttccagcatacataagtgactagtagttggtgaaaatactaagttacaagcaacacaacacaccccatactgacttagcttaatcactcccttaaaacaaggtctttcattcaatttcacctactacatgttgactaatactaacttatatcagaaacataacaacaacatattttaataccaaaataacaagaaaagtctcaattctaacattggtcaattatagtgtcgctctccaccattttcttgctgtggaggaaattgacgaggtcttggaggggatctctagtatcagagctctttgttagctctcccgcaacttctgcaggtgtcacattcacttctcctagaagcccctcaatttgttcaaagagtttgtgttgtgaaatgccaaggtagttgaggaccaattgtttgaaagcagaaaaggtgcagtatgacaagtggatgtgcatgtccatcctccctggcctcagcagagcaggatccagcctttctttgtgattggttgggaaaataataatnncgttctctccacagcatgaccaaaggc

SEQ ID NO: 118407 - DNA, 252 bp, Glycine max
  Clone ID: PAT_MRT3847_77930C.1
cggtatagtgaaagtggggtgaacatagtaatattgtttgtttttattacagcttaggatagcaatatgtaggacaagaaagggcatccaatggtaatagctagttgggacagtagagttcaattcccataacataaatgctcttcattctaaattctagcgaataatagtagctattcccctaccttccctaataataatagtggtgctatggggtattttacaattcagttttgcatcactaatgcacat

SEQ ID NO: 118408 - DNA, 444 bp, Glycine max
  Clone ID: PAT_MRT3847_77931C.1
ggtagagtagagttttgcttttgcatttacgaccaagagacagtttgaattctcgacttgtccttactggagaagaaaataaaatgaatgaaggagataataacaatcaaatttctcctcccacaggttaaaagctacttttccgcctaaatttttttatgagccctcatcttgctactccattagttgtgtataagttgattttatctcacgggagaagtttgattcattttacctccttgattcttcttgttttctttttctttaagtgtttgttcaaaagtttatccaaactaagttgtctagcaaaaatggctaggaattatattttagtttgttctcactcattctatgatgcacctttcttattttgtcctccttagttacattgcaggccttttggatggtgaggtcattgtttttctctacgggttctgtaacatc

SEQ ID NO: 118409 - DNA, 511 bp, Glycine max
  Clone ID: PAT_MRT3847_77932C.1
ggggacatgggaaaagggcaagttcgacaaggccttttaccccctgtgccgtcttcgcaatcacaagatccaagcaactcgcgacatgtactacgcctacaagctcctcgaagtcaaacaggccgagcgccccggcaagtcgctctggaaggagtttttcaccgggcggggcaaccggggcgcagcccaatcctcctttttcgtcatgttcatgcagcaattctgcggggggcgtgtccttccccttgcccactccctttttacccttcaccgggtttttaaccgcccccaggtcaacgtcatcgcatactactcgtcctcgatcttcaaacaagccggcttttcgcgctccgaagccctactcacaagcatgggcacaggaataacaaacttccttttcgccatccccgcaatctacaccattgacaccttgggccgccggaatctgctcctcaccaccttcccgctcatgggcctttgcctgctctggtgcggcatgagcttctacctg

SEQ ID NO: 118410 - DNA, 1183 bp, Glycine max
  Clone ID: PAT_MRT3847_77933C.1
gcgtcaatgaaagctgccgtggggcagatgatgcgacgcgtcagcaatcaatcaccccaacatgggcagcggaaagcatgcaaacccatctttacctcttccattttatacaccagtatcgctctgtatttgtctcatcctcctaactgaaccctaatttcttctgggaaactctattttctctaatatggagcaatactggtctgggagtgccatcaatgaaaacaaaggaatggtagataatttgcatcgttatggagtaatcacatctagaaaggtagctgaagtaatggaaaccattgatagagctttgtttgtacccagcggcggcggactccaaccttatgtggacagtcctatgccgattggctacaatgccaccatctctgcgccgcatatgcatgccacctgccttcagttgcttgagaagaatttgcaacctggaatgcgtgttcttgacgttggctccggaacgggatacctgacagcatgctttgccttgatggttggaccccaaggccgtgctattggcgtggaacatattcctgagttggtttctttttcaatcgagaatattcaaaaaagtgctgcagctgcacaattgaaagatggttccctttctgtccatgctggtgatggaaggcaaggttggccagagtttgccccttatgatgccattcacgttggagcagcagcaccagaaattccccaaccacttattgaccagttgaagcctggagggagaatggtgattcctgtcggaaacatattccaagatttaaaggtggtggataagaattctgatggttctatcagtgtccgcactgagacatctgttcgttatgtacccctcaccagtcgagaagctcaactgcgaggttactaaaatgaagccaaaatcctgaattttggaaggctaatgcttcagatgttagtgtttggatcttgcttgtgcacatgccgttagaagttgtatagataaagttccctgaattttgtaaggttcatgtttacagttacagatatcagtagttggaacatgaatgcactcctatgctggtagaatttgtatagtatgaagttcatattctgcttagtgaattaattcgttttcatgatgtgcatattttgtaaatatcttgtacacttttcatttaatttattcgcttttataattctttat

SEQ ID NO: 118411 - DNA, 1243 bp, Glycine max
  Clone ID: PAT_MRT3847_77934C.1
cccacgcgttcgcacgtatggaagaatgggttgacacgtgtgggtaatatatgacgagagcgtgtgaagagaaaagcctgaaaagaaagagcgagaaaaagaagaaaatgagggtgcagtaccactactaccctttcccttctctggcgtatggttgcagctactgttatgcttatgcgactactaaattaaaacctactcactcactctctctaacactctccaaccaccgtcgcatttctgcgtcacaacctcactcttccaccttctccatcatcaccaacctcttcttcttccaaaaccctaatttcatcacggggaacactctcttcctcaggatgcagagattttgctcagtaagtggcttaagtaagaacaaagcactggtggagaggttgcagcgctatggagtgatcacatcaagtaaggtggctgaagtgatggagacagttgatagagccttgtttgtaccagatggagctgcaccttatgatgacagccccatggccatagggtacaatgccactatctctgcgccgcatatgcatgccatgtgtcttcagttgcttgaggagaatttgcagcctgggatgcatgctctggatgttggctctggaacggggtacctgactgcatgctttgccttgatggttgggccccaaggccgtgctgttggtgtggagcatattcctgagttggtttctttttcaatagagaatattcaaaaaagtgctgcagctgcacaattgaaagatggttccctttctgtgcatgctggtgatggaaggcaaggttggcctgagtttgctccttatgatgccattcacgttggagcagcggcacccgaaatcccccaaccacttattgaccagttgaagccgggtggtaggatggttattcctgttggaaacatatttcaagatttaaaggtcgtggataagaactccgatggttctatcagtatccggactgagacttctgttcgatatgttcctctcactagcaaagaagctcaactgcgaggttagtgaagtggatgactgggaaggctgtggttgtctataccacgtgctgtaagaatttgtatagttcaagttgctgtgcttttcttaccctaaaacaaatgattcatgaatcatattgatcatacagataaatactaataattacaccataaacattgtcgtccgctgtatgaaatctgaatctatcattttatgttgatggataatttgaaattttt

SEQ ID NO: 118412 - DNA, 688 bp, Glycine max
  unsure (1)..(688): unsure at all n locations
  Clone ID: PAT_MRT3847_77935C.1
ccacgcgtccgaaaaaactaccattgggngcttgatcaatggcatcaccagaaagaaaagagtcagaggagaagttggtggtgaagatgaatgaggggttgaacctatccaaagatgatagggacaaaatcagtgagatgcctgacaacatcttgctccacatgatgaattttatggacacaagagaagctgttcagacttgtgtattgtctaaacgatggaataatctttggaaacgtctcacgtctctactattcaattcctcgaaatttggaagtgttgtcaaaattatcaatttcttgtatatgtttctatctgatcgagatgactccatttctctatctactgtctatttggatctcagtcaacgtccacgtgattccacaagttgtttaggtttcttaatcactcatgcctatgattgggaatgcctaaataggttaatgaaatatgctgtggtcgcacaattgtcagcgcctttcaatcaaaatacttttttattgtaaatttgaagttgatcctgtcattttttcctgtccctcgttgataagtcttcggctttcctttacgcctttttggtacaaattgtaaacttccaaaatctctgcagcttgccggtattgaaaactttgtatcttcatcaatgtctgttttaccgcaagcgacaatggggtgtgctgaactcttt

SEQ ID NO: 118413 - DNA, 219 bp, Glycine max
  Clone ID: PAT_MRT3847_77936C.1
aacggacatcgagagggccacaactgattgtcgactaacacacgtgctgacggctagggcactagcgatgatactggttggatgccttgctctgtgtgtgaacactggactacatgcttgttgagctacgagacgtgcagcagcttcaagaaagcgagctgagggtctacttaatgaagacagttacgatacccgacttgcggaacctgcgactgctca

SEQ ID NO: 118414 - DNA, 306 bp, Glycine max
  Clone ID: PAT_MRT3847_77937C.1
ggaaccaaaagggcataaatcataaatgtgaaacgcttttggaaggattccaaatcagctcctcaaacaatgggggggctatgggtaactgcatccaaattaggtaatcgattccctgtttatagttttattaatctgggggggctaaaaaagagattataaccctcaggatgctggtttgccccggatccttaaactttggggaacctagcatcgaagggaaccccagaagcaggcacccaaatgttagtttggacccaaggtttaaaggggaattggcccacctcctctttgctaatgagacct

SEQ ID NO: 118415 - DNA, 395 bp, Glycine max
  Clone ID: PAT_MRT3847_77938C.1
ataaaacttaacatgctattactacacggttatgtttacaatcttataattcaatgcaaggacgggctcattcagatcactgtattaactcacacacatcaagcccaaactcaccttcaacaaaatcatcacttttacaccactcacatcatcatataccttcgcattcacccaatctatcccaccttaatacttcataatcatcaccatactctcattccttattattaaaatccctacacttactacctcttactaataatacatgaatgataccgaagaagtcatcaacaaatttaagacaacaatcgtgatggacaataattaccccaacttttcaacctccaaatcttaatttcacagaaacctcaaactcttgtgtttctaatttcatt

SEQ ID NO: 118416 - DNA, 280 bp, Glycine max
  Clone ID: PAT_MRT3847_77939C.1
ggctcgagtgactgatgttgggacctgtctacttgttattctcaatagcatgttaattttacaggagaaaactaaatatgaaagaaaatctacaagttccaaatacggaactttctcggaagatatgaccacagctctacttgacaagaaaagtaatagcaatgagaacaaagcagttctctccgctgaaagggtggaaagattgtggaaaaccaccttattgggagcaactccaccaggattgaatcttctggactttaaagttgacttactgaaggga

SEQ ID NO: 118417 - DNA, 124 bp, Glycine max
  Clone ID: PAT_MRT3847_7793C.1
agaatcacgaaaaaggaataatccacaaccatggcatggaaaatgacgaacgcagcatcgaagattttaagccgaaaccgcgtcctttaccgattcgttgcctccacacgtcccctccgcaccg

SEQ ID NO: 118418 - DNA, 190 bp, Glycine max
  unsure (1)..(190): unsure at all n locations
  Clone ID: PAT_MRT3847_77940C.1
cccacgcgtccgcttggagttcggattctgttttacaagaaagatacattatactccaattgggcgccgaanaccaccagctttagggtgttatactacctatcttccctcatcattcacactctcatcttttcttctttaccctacccttttcccacctcttacccatgttcttcttctctcgcttttt

SEQ ID NO: 118419 - DNA, 400 bp, Glycine max
  Clone ID: PAT_MRT3847_77941C.1
gtttttgttcattttttctcatattatatacatctacatgatattattatataattgtacaaacacaaccacaattagaaaatataatgaaatgaaggccaacataataatacgcccttcgctaatgcataaaatcggctaaaacaccactaactgaatcatgtcaagctttgtcttaaataaaaactccaccactacaaaacccatggtagtccccacttggggttataattcaggaacttaaaacatcctcctacaaaggcgaaagcaattacaaaaaaacttgatgaattattcggcgaagccagaaatggaagcaatgggctcatgggccttaggcacaggggaaggttaaacacatggaattggctcaacagtgctaacaagaagcttctgaggc

SEQ ID NO: 118420 - DNA, 128 bp, Glycine max
  Clone ID: PAT_MRT3847_77942C.1
ggctcgagaaaacatgaacatacaaggtatgcttgtttcagcactgggcgaacaatctttaatggacgactgaaatgtttgagattactgttcattcatgggcataataaagacataatgctgtgaat

SEQ ID NO: 118421 - DNA, 334 bp, Glycine max
  Clone ID: PAT_MRT3847_77943C.1
acccacccggccggccttcatactttgcatcttcctctctgcgtcgatctgagctcccctaccctttagtaatccagagctgtgtcctgataaggaggacagcgcattcaagggaatcaacagctacaggcaaacacggagcctggtacccctgagccaagatttgaacgcaacatgtttcggctgatgaagctgcacaagaaatagagctgatgccctgtgaaatcgggaaccaagactaccctgtatctgctcctggtagtgggaaccctaaaatcgccagcttgcagatgcacatatccaagtgggacattaacttcaacaccaaccactg

SEQ ID NO: 118422 - DNA, 1467 bp, Glycine max
  Clone ID: PAT_MRT3847_77944C.1
ctcaaattcgtcccctccaatccaacaacaccgatcagtttcatggtattgttgtttcttctgccttaagcccaaagcgataagaccaaggtgcttcagtttactcccacatacccggaaacgtttatcagaaaaccagaactttgaagctgaaagccccaaaggccatagaagctacaagtccccatctcacgttcgggatcacatcatcgccgagagaaaacgaagagagaagctcagccagagcttaatcgctctagcagctcttattcctggcttaaagaagatggacaaggcatcagtgctgggagatgctataaagtacgtgaaagagctccaagagcgtatgagaatgcttgaagaagaggacaagaatagagatgtggagtctgtggtgatggtgaagaaacaacggctgagctgctgcgacgatggttcagcttcacatgaagatgaagaaaacagtgaaagactcccccgcgtggaagcgagagtgttagagaaggacgtgctccttcggatccactgccaaaagcaaaaggggcttttgctcaacatacttgtcgagattcaaaaccttcatctcttcgttgtcaatagcagtgtcctacctttcggggattccgtacttgacataaccattgttgctcagatgggaaccggctacaatttgaccataaatgatcttgtaaaaaacctacgcgtggctactttgaaatccatgtcataacaccaacgtgatcttgtctgtttctggtccagcaggatggtctggtggtgggtggtaatattaataatgatattttcatgttttgtggtgtgcagatacccaaaaatgattgaaaatgagttattgtttgaaggtaaaaaatttggtcctccagtctatttttaattttggatttgatctcccactaaattaattcacaaatattatttttttattttataaaatcatgtaatgttcgtcctccagtccacacttgaaccttaacgggttacaaggtgacgttgattattgtcacgtgtcacttttttattgaatgatgactttcacgtgtcatgttttgatgggtcaatgaaaacaacaatgtatttcatcttttatggaattaacatccacatgatacgtgacaatcatcattcaataagaaagtgacacatggtagtcaatgtcactttgtaacaatcaacgtccaattgtgggttgagggaccaacattgcatgattttaaaaagtaggagaaaaaaaaattgtgaattaatttaatgggggacaaaatttgaaattgaagacaaactggagaatcaaaaatgtaattttgccttgattcaaatgctctcttgtcaatttgaatgcacaaaatttatatgtaattgaactttcatttcaaaatttacttctcttgatatttaatgcaaatatttattatatgaattgtttaaatgaaacttcaattttaattt

SEQ ID NO: 118423 - DNA, 278 bp, Glycine max
  unsure (1)..(278): unsure at all n locations
  Clone ID: PAT_MRT3847_77945C.1
nncacgagataaaatataatgcatttattctcaacataagggatttcgggctgagaatgccttaccagtaacaacaaactctaccactaaacttccatgaaacttgggccacccaactatacacttatcttggtcacccttggttaaaatggtatccgatactacaccaagaatttccgaacgtctgccaattctttccatgtcaataccgttgtcacatctgacgccagagactcctttattagtgcattgctatacaagattgtttgcaaacccaa

SEQ ID NO: 118424 - DNA, 304 bp, Glycine max
  Clone ID: PAT_MRT3847_77946C.1
cccacgcgtccggataaaaaagattctaaagaaatataattaatatgctttataataatcaaaaagaatatttaattcaaataaattttagatagaaaaaagacttagaaaggaggatttgaaatagatagatctaaaaacttatgtagacgtggcaccagtaataagtactctatatgatcagagcttaggtgggtctcttgataaacatcaatagtttttgttgagatgcattgatatgcccttattatacattatagtgattgacactgaaaggggcgaagattattatgcatccaattaa

SEQ ID NO: 118425 - DNA, 749 bp, Glycine max
  Clone ID: PAT_MRT3847_77947C.1
ccatatatgcacaaaaatttagcagcttaaaaagaaaaagggtccagggaaattaatttccgaaaacagagcatcaggtagcagcaaacataatttaagggagaaagaaagggcctgactatttcaaactgggtaaaaaagatgccagtaagttagactaacactggactaataatgttgaacaaaaaacactatagtaggacagcaggcataatacaaaatataccaggtatgtttttcttttatcaagataaatcttacacacggaattagtaaggctaaatatatacacctgttaaatttttaagcatttacaaaggaccctctcatatgctgattattgattaattacatacaattggatttaatcagatcatgttttgtatcctctatttcatttgtacagttaatgacttgtgtaaatcacatgattctagcacaagttaacagttaacattaaatcacttggatctcagatttgatgactgtacaactcacaactttttaccataatgaatgcataaaaaaaaaaattttgatcctgctacttcttgacaaaagttcacaactcatgatggttgattctaaatggctggtgatatactacattttaatttatgaatacaactatgagcaaaaccaaatttaatagttgaagggttgtcagggaaacacatagagcacaaagttatatctttcctaagaagatctaaatttgaaaaggtgttcttaaattgtaaagaaaccta

SEQ ID NO: 118426 - DNA, 283 bp, Glycine max
  unsure (1)..(283): unsure at all n locations
  Clone ID: PAT_MRT3847_77948C.1
attcccaattattcagntgcnttttaanttcaattggtagattacgatttcccccacctgaaaccccnccccatntactagatgacccanttgnaaattcccaattttgttgctgaatttcattngtgnntggtagttncatttcatcttcgcnaccaatttccaggngaaaatggcccncnctcgatctgtccaaganagtagccgataggtatctcaagcgtgaagtcctggtganggnacatacggtgtcgtttacaaagcnatcgatacccagncaggg

SEQ ID NO: 118427 - DNA, 1085 bp, Glycine max
  unsure (1)..(1085): unsure at all n locations
  Clone ID: PAT_MRT3847_77949C.1
cgacgatcttgactggtcttgcaaattagcagttgaaatttcttggatatctactcacaaacgtcactcttcccatgcttcttatgccatcaaaaattacagagttttagttgaacaactagaaagggtgaatgtcagtcaaatggatagcgatgcacaaattgcattctggatcaatgtgcacaatgctcttgtgatgcatgcatatttagcatacggaattccccagggttctctcaggaggctagccttgtttcacaaggctgcttacaacattggcggtcatatcgtaagtgcaaatgccatagagcaaatgatattttgcttccgaacacctcggattggacggtggcttgaaagtattgtgtctgctgccttgaggaagaaaagtggtgaagaaagacaacttctcagttccaaattgggtcttactaattcccaaccccttgtctgctttgccctttgtactggagccttgtcagatcctgtgctaaaggtttattcagcatcaaatataagtgaagaactaaatattgccaagagggagtttctccaagcaaatgtaattgtgaagaagtcaagaaaagtttttctcccaaaattggtggaaagattttctagagaagcatcaataagcgtagacgatctctttggatgggtcatggagagtgttgataggaagctgcgtgattcaatgcagaagtgccttaatcctaaatccagccaaaaaccatctcagatcatagaatggttaccttatagctcaaggttccggtacgtgttctccaaggatgtcatagacaagccttggtgggtatgagtctatgatgacatctaactgcttggtaaagattattgaatgattagtggaggcataactggtttgagaaagagaggaagttagttgcaggtgttgtgcacctgaaaatttctatcaaatggaatttatcttcacacttatactccaacaatagctaattgaaaatttgtgtacattgtaatatgagataaaattagtcgcataccttccaaaaaaaaaaaaaaannnnngnanagagaaaaaaaaaaaaaaaaaaaaaaaaaaa

SEQ ID NO: 118428 - DNA, 1232 bp, Glycine max
  Clone ID: PAT_MRT3847_7794C.1
atttgcaattatcttgggttgcaatggagggagtgttgcttcccgtgtgtccttcaccttcttcttgctctgcaactcctaaacccagaatccccattccgctacgctcttctttcccttctccattattacacaaccgtttcttctcccaaaacgcagcgttttcccttcgcaactctctccgcacttccaccttcgcactcgcgcaacacgaagctcccgttctgggcaaacccgataacaacaacaactcttcaccctatcttcccaaaatcgataagacgggacgcttctgcagccccagagccgccagagaactcgcactgtcgataatctatgctgcgtgcttggagggaatggacccggttcggctctttgagaaacggatgaatgcgcggcgagaagccggatataaatttaatgaggaaaagttgttggagtataatcatatgagtttcggagggccgcctgttactgttggatcggacgaagaagcaaatgagctactgcggcacattgaagaagagtctgccattgaagcagaagtccttacagctccttcaaagctggtatacaacaaactgattttaagattcaccaagaaactattggttgcagtcagggatacatgggacagtcatgtcctggtcattaacaaaattgccccacaaaattggaagaatggaccagctgcgagcattttatagctgtctaggcctcacctggacatgtacgaataggaagtgctagacacgagacacttaatcgtcattaaagatcttgtaaaactggtctaagcggttttgggctcgagcagcccctcgcatcattaacggctgtctccgcacatttttccgagaactggagcttgaagcatcgaataaccgggtttagttgagctccatgtacattggcagattgtctacacgttgtagtcctcgggtcgttgaaaaggttgacgtgcatttcaggaaatatcaccaatggtggtttgataatttgcatattgacctgcaggcaaggcctgagttaggaatcgtgttgtttgaaactggtagagttattatgccattttgtttttacagcagttattatgacattgcaatattgtaatcgtgtatatgtaatattttatgtattctagctcgtgggatttgtaataaattttgtttaagttaaagaacttttgaaatataatttaattaagtacttttgaaacatggtacaaaaaa

SEQ ID NO: 118429 - DNA, 370 bp, Glycine max
  unsure (1)..(370): unsure at all n locations
  Clone ID: PAT_MRT3847_77950C.1
tacactccaaccgcccacaagaccgggaaggggggagtccagctagaacaaaagcggggaccaccacaaccaacccaaacccgagaacagacgcacggagcccggaanacgcgaagcgcaccggaccccaaggagacaccacacgcgacacaggacggacggccaccccaacgcaggacgcccaggacacaaacgaacggccaagcaccacgcaggaaagggaacccaggaccgacggcggcacaaaaccacaaaacccaacagggccaaacaggaggccggggaaacagacaggcccccagagcacaccccgaagcgccaaaagaccgcccccaaccaaagggggaggagcccgagcaaacaacgcccc

SEQ ID NO: 118430 - DNA, 351 bp, Glycine max
  Clone ID: PAT_MRT3847_77951C.1
acgcgaaaaactagcccaattttttttgaaaaacagggggtaacaaattaacaatccaacttcttctttaacgataaacaaaaaagggtttttagagggggggggaaagggaacttcccccccttttttgggtgggggcctctcaatctcaggttccgggtggcctcatcccccattttttttgattggggcctgaaataaggcaatcttcaccgacgggttgattttgggaacaaaccaaaagcttgcttagaaaccgtttgttcccctcaacccaaagaagggctttgaaacaatttttatgtttcccaagtaaagggtgcccgagaccagctttgaaatctccaactt

SEQ ID NO: 118431 - DNA, 4076 bp, Glycine max
  Clone ID: PAT_MRT3847_77952C.1
ttgctagactatgtgtcttggacgaatggtgggttctgatgtgaaaagcggtattcagtgttgtcggcagttggtactggtataatgccaccgtcgtgatactgaacgatcttcatgagttcaaggtcaaccaccattgtgagtccactgataggcctcacccagatattggggctgctttctttcatgaagcattccactctcactgtccttctgtccttggtttctccaaaccaccccattgtgaatgtggaacacaccacctcagagaggttcagccctctcttgttcactgactcaatgaatggaccgtatttcagtggcagctctatggcaacgacttgttcatcaacggaaagggtagggaagccattcccggagtgaatattgtcggagacaatgcgccttgcctttagatcaattaagatctcgtgggtttggctgttgattataacaatggccaaggctttgcgagggacagttataacagttggtttgatggattcccatttgaggatggcatccttttcaacatccactagaccctttaaccaaacaagagataagtcttgtccaaaccatagtccaaaacaagtacccaagctcaagtaacaggttgagcttccactacattggactcgacgaacctaaaaaggataccatcctcaaatggaaatccatcaaaccaactgttataactgtccctcacaaagccttggccattgttataatcaacagccaaacccacaagatcttaattgatctaaaagcaaagcacattgtctccaacaatattcactccaagaatggcttccctaccctttccattaataaacaagtcattaccataaagctaccactaaaatacagtccattcattaagtcagtaaacaagagaagactaaacctctctaaagtaatatattccacattcacaatggggtggtttggagaaaccaaggacagaaggacagtgagagtggaatgcttcatgaaagaaagcagccccaatatcgtaaataaagcctatcagtaaactcacaataataattaaccttaaactcataaagatcattcaatatcacaacgataacattataccagtaccaactaccaacaacactaaataccacttttcacatcagaacccaccattcaatccaagacaacatagtctagcaacccatcaaccacagggtccaggcttccaaatcaacggacacagtattagttgggccaactggaagttccatattggatttgatccacgtgccggaattgtaatatcactggcatccatttatgatttggagaagcacaaatctcgtagagtgttatacaaaggttacatttctgagctgtttgtgccataccaagacccaacagatgatttttactataagactttctttgatgctggagagtttgggtttggtctctccacggtctcattggtgcccaaccgtgattgcccatcgaatgctcagttcctagatacatatgttcacgctgctgatggtactccgttactcatcaagaacgcaatctgtgtctttgaacaatatggcagcatcatgtggcgtcacaccgaaacaggcattcccaatgaatcgttcgaagaaacgagaacggaagtcaacttagtggtaagaactgttgttaccgtgggcaactacgataacatcattgattgggagtttaaaacaagtggctcaatcaaaccctcgattgctctctcgggtatattggaaattaagggagtggatattaagcacaagagtgagatcaagagcgatcaacatggtatcttggtgtcggcaaacagcattggtgtttaccacgaccacttctacatttaccatcttgaccttgacattgatggtgttgccaactcttttgagaagacaagtttgaagactgtaagagtgacagatggaagttcgaagaggaaaagctattggacaactgaggttgaaactgccaagactgaaaatgatgcaaagataatacttgggttgagccctggtgagctttcagtggtgaatcctaacaagaaaacctctgttggaaatgatgtgggataccgtttgattccagcaatcccagctcatcctcttctcacagatgacgattatccacaaatacgtggcgcttttaccaatttcaatgtgtgggtcactccatacaataggactgagaagtgggctggtggactctacgttgatcacagccatggagatgatactttagccgtttggaccaaaaagaatagagacattaacaacaaggacattgtgctgtggcacgttgtgggaattcatcatgttccagcacaggaagacttccccataatgccattattgagcactgcattcgagctcaggccaaccaatttcttcgagaggaatccggttcttaaaacactttctcccccggatgtccaatggcctggttgccccaagtaaaactagctagccagccatttccattatattagtgtgcttcgagtgctacaactagatgtgttccttggataatgtgaaatgcgatctgcttattgcatatgcaagaataatgatttgatatgtattgcttattattatatcaatgagaagtttacttgaacttgacaccgaaaaactccgcgtcggaaacctaagatctctcctctccctcagcgatgacctcgccaagtccaacaatttcgtggaaggagttacgcacaagatcaggcgccagattgaggagctcgagagagtttccggcatcgacaccggcgccctcaccgtcgacggcgtccccgtcgattcctacttgaccaggtttgtttgggatgaggcaaagtacccgaccatgtcgcctttgaaggagattgtggatggtattcacagtcaagtggcaaagattgaggatgatctcaaggttcgtgtttctgagtataacaatatccgcagtcagcttaatgctatcaaccgaaagcaaactggaagcttagcagtccgtgatctttccaacttggtaaaacctgaggacattgtaacttcagaaaatttaactaccctccttgcaattgtttccaagtattcacagaaggattggctctcaagctatgaaacattgataaattatgtggtccccaggtcttctaagaagttgtatgaggataacgaatatgctctttatactgtaacactcttcagtcgtgttgcggataattttagaactagtgcacgtgaaaaagggttccaaattcgtgactttgaatacagtccagaaacacatgagaaccgaaagcaggagttagataaattggtacaagatcaggaaaagtttgaggggttctctattgcagtggtgttatgcaagttatggagaggttttcagctcctggatgcacttttgtgcagtgcgtgtatttaccgagagcattctgagatatggtcttccaccatctttcttggcatgtgttttagctccatcagtcaaagcagagaagaaagtacgttctatccttgaagggttgagcgatagctcaaacagtgcttactggaagaccgaggatgaagtaggtgccgggatggctggcctagcaggtgatgccgatgctcacccctatgtgtctttcaccatcaatgttgcttgagggctctcagaaaccagcccgatacttaatttacaatccattatgggctcctttggacagcaataatgccaatgcaaacaggatttgaagaagatattgtacattacgatcatatttcattctttgttatttatctatataattgaagcgatcaaagtttcaaaagggtttaatgaatttcaagggtagcgtctggtgccaggatttcttgtttcctgtacattagcaacttgtatggtttcctgtaagatttcttgttggcgattatgtgaacttggagatgtgacatactcttgctcatcccttcagagaataatgcagccctggagagtgtaataataaactgttacttggatgcaataaggttgtttattgttgtacttctcaattaatcaatatttaaagatgtttttctggggtacttttatcggtt

SEQ ID NO: 118432 - DNA, 1043 bp, Glycine max
  Clone ID: PAT_MRT3847_77953C.1
aggtggcctcgagcattgatgatcctgttccatcctctcaatatccactatccctttttgtgctgccactaataaaactgcacttcaacttcaaattttcaacctttccccattcacgtcccttcttccttccaatgttcccttccatcataaattctaatcaatctcgtgaccagcaacaacaaaagcaaaagggagaatggttagcaggaagtttcaaggcagagaacttcattccagggcttgttataggtttcatttttgggttgttgttggatttatcaaagcccggtagaaatcacttgtccaagaaaatttgctcatctgccagacctcaacaacagcaaatctcagtctcaagcaatgctgatcaagaacttaaaatggttctggtcgttaggcaagacctaaagatgaaatctggaaagattgcatcccaatgtgctcatgctgccactggcatgtacgctgaattaatgcaaagtgatcggtatcttttgagaagatgggaacagtgtggccagcccaaaattgttgtgacttgcaggaatcaacaagaaatgaataaactagcggaagcagccgagagtattggccttcctacttttgttgttgctgatgctggacgaacacaggtttcggcaggatcaaagaccgttcttgctgttggacctggaccaaaatcttctgtggattcagtgacagggagattgcccctgctttgacagcattcaagaagcatgtgctaatatgataaatcacccgagcttgttgccacttggtctgtgttctaacgcgttatccggcattgtctgattccttatccttattgtggcctatgcaacatggctatggtggttctataattcgtagtgttaaatatgactaattcttaatcagatccctttcctgttttatacctctaattgtatgggttttcagcatcctgtctagcagctcgggaatgaactgaagacttttatttattttatttggatatattgggggaaagcctgttagtaaaatatccttccttgtaacgc

SEQ ID NO: 118433 - DNA, 191 bp, Glycine max
  Clone ID: PAT_MRT3847_77954C.1
atcgttttcttatatatgaactcgccattcaaagaatttaaaactcctgtgctaaacaaactcatctcgaatatttaggggaggccggggtactaaaattcataccctttctgcccaaaataaagacaccggataaattccccactgcatcacttgggaaaagaaccgcgaccgtaatgggtaaagaaccc

SEQ ID NO: 118434 - DNA, 270 bp, Glycine max
  Clone ID: PAT_MRT3847_77955C.1
gggggggaaacccttaaaccaggattacctaaaacctcttattgcaaaacaagaaatcctttgaatttccccggaatttataccctcaggcctttgaaaaaatcgcttgttggccctaacccaaatttccccacctttatcggaaaaattccaccccaggttttttctcaaaaagggaacccctaactaactgggaactatgaacaccccaccgaacaaaagcgcggtaacaacctctaaaggggccccacagggaacttggcggcaacc

SEQ ID NO: 118435 - DNA, 351 bp, Glycine max
  Clone ID: PAT_MRT3847_77956C.1
gacccacgaatcagcccacgcgtccgctgacgcgtgggtgaaattgaaatacaccaatctctctccgtacgatgttgccctgttccgtcatcaattctcgtgtctaaggacacagtttgcttgacaaatttacatgttttcatctcgatgttatgattttgaatatgtatgactatgccattgataacgacacatgtggttttgccacaagtggcttgtaaatggtttcaggtcttgtcaattgtcacatcacggacgatactcaattggatcttagttggtacaatgtctcctgtcccatatgcttggatttacctcagtacagtgttctcctgcattgggcatcgcatg

SEQ ID NO: 118436 - DNA, 416 bp, Glycine max
  Clone ID: PAT_MRT3847_77957C.1
ggggggaaattaaacaaattggttacattataaaaaacattcacgtcggggtttcaattcccgctttttcccccccaaaattcccactttttcaaatcccacaatttttaaataaaaatttttaaaaaacccgaaaaaaaaaaaaaaaggggttttcccttcgaatccccttaaaaaactaaaccctaaaacccccttttttaattaattaactcacatcacagccctaacgggaaccccaaaaccaaaccttaagccaggggaacaaccccccccccgtacctcccgccgtttgttttaacggggccgtttctgtcattgggggtcacattagccgcttctttgggagaatcagcgggggccttaaaattattcgccggggcattaaccggctttttttttttttttcccttttt

SEQ ID NO: 118437 - DNA, 233 bp, Glycine max
  Clone ID: PAT_MRT3847_77958C.1
ggcgtctattttagaaacactatgtcaacacaaggttacaaattaacacaaaagtacgacctaagtttctcatcatatatataatactagattctcttcgatatataatttctgaaatagatctaactggagtttgttagaaaattgaaccttggaaacacacccggggagcctaaacctctgtcatcttttattttaaccccaggcctaatatggggtctgttaaaacctca

SEQ ID NO: 118438 - DNA, 534 bp, Glycine max
  Clone ID: PAT_MRT3847_77959C.1
ggacatcgttgccattggcgttgtcattaccgcctttttcttcacgtgagttccttctccttttctatatcacatcaacacaagatttcgatttttatttgcgtgtatataccaattacctcgcaaattgtaaaaaaggttttggtggatatgaacgtaccctaggaatttcactgaaagctgagtttgatttatcggaggtctcaaaagcacttctaacttgtagttgtatccaaacaggccctaatgcagttaactctagcttctgcacaagatagattatgagagagggcttttataaaagttaagtgcagaatttgattttagcttatagaagaagctcaattcattatatcttccttttttcccctcttataagtgtttattgagggttttcccaaacagggcctaattctattggctgcttgggtgagagattttgcaattgtaggagtaagtttaatgtaggatgcaattctctaagttttgacaaatgtgcttgctcaacaatatttttctatgccaaggtttcat

SEQ ID NO: 118439 - DNA, 495 bp, Glycine max
  unsure (1)..(495): unsure at all n locations
  Clone ID: PAT_MRT3847_7795C.1
antatgggacttcgttgctttgttgatgtccttttttgtttttttcatttttgtttttgttagatatttttttttttnaaagctaaagggggggcacgaaaaaaacccctttttcccttttttttttggagagagaaaattttaaaccccctggccccgggggggttttttttttaaagggggaaacgaattttttaaaaccccatagggggggggaaatttttttttttaaaattttcttaaaaaagggattttttgcccacaacccagcaagtgtaatttttttttatccccaatttttttttcatggggctaaaaaagctgggacttttttaacaaaattttttgttttaaagagctgtcccccaaaaaaaaggggcccccaaaaaaaggccttttttccaaaaaaatgtcaaaaacggttatttccccaaccaccccccatatggggaagaacattttggtaatttcttcccaaaatgtttgaggggaaaa

SEQ ID NO: 118440 - DNA, 471 bp, Glycine max
  Clone ID: PAT_MRT3847_77960C.1
cccacgcgtccgtacggctgcgagaagacgacagaagggtaatggtcaggtatatatatgttgattgagaagtgtacttactggctttgttgataatttcctattctaggtgcaaatggaggctaatgactcttctagtcagaaagaagagcagatgaaacctatgcgaaataaggtaatggggttgtgtgaataaagcttcaaataaggagttaaacttcacgtaaataatatcctgccaatgtatactaaggatggaattaatacttcatattagctatttatacttggcattagctcaagcatttcatcaaatgggttgtaggcaagtaggcaagttgaaaacaaaaacactacaggaccacatcacgagatcacatcatgttatcaacacaacatgaactatttatacttcgcttagctcaagcatttcatcaaataaggtgtaggcaacttggttaaatacttaaa

SEQ ID NO: 118441 - DNA, 168 bp, Glycine max
  Clone ID: PAT_MRT3847_77961C.1
atggcggacagacaagaaccctgcactggagcttctataaactgtaccgggtgtatggagtctgatccaactccgggcaaatgggtaacacgacttgtggggaaagatgcgcaacctcttgagaatgtaaaactggtttacttccccgggctaaccggacatgaaccg

SEQ ID NO: 118442 - DNA, 291 bp, Glycine max
  unsure (1)..(291): unsure at all n locations
  Clone ID: PAT_MRT3847_77962C.1
gtcgcacgcncgcgtacgtnagctcgnnaattcggcncgagnaacagangagtgatgtctcagtganggcaaaacanggnacnccnaaantngncanccganntancactncgnnggancctccactttcagngcnnanactgtnctccatgaaggatgtgncnccangatcaacncngctgcccctcttaanaaagnngctgtngtcantngtggantctgcacaggnnnnggggctacngtgaatgtngcnnagccanagcctaatnatactgtngcnnnatttggatt

SEQ ID NO: 118443 - DNA, 1064 bp, Glycine max
  Clone ID: PAT_MRT3847_77963C.1
caattttcgtctcgcgggaatgggggataatagtcaaaggagattcagagctcatgccgcaatggggaataacagacaaaggagaattcagaactcatcgcgcacaatccaagtcgacaccaccaccaacaactcttactagaggacgattctcaaagctctcttccagaaaaaaatggtgagggcgaggaagaggaggaggaactcacggaaacctaaaataaaagcttgctatgtgggattttgggcaatgcgatgccaaaaagtgcactggacgcaagctttcaagattgggcatgctaaaagagttacgtgtgagtaatggttttgggggcattgttttaagtccggctggaaatcaatgtgtctcaagagaagattactctttaatccagaagaaaggattggctgttgtggggcttgtagcagcaaatccagtaaattatggtcggccatgtcagctatcttgtgtagaggctttatctgctgctttgacaatatgtggggaagaaaaaactgcaaatttgttgcttgacaagttcaaatggggccatgcttttatgtctctgaatggggaattactgagggcctactccaaatgccaaaatagtgctgaaattatatctgttcaaaatgcttggctgtcacaagagagtcagattccaagggctcctactgacagtgaagttacgacacctgaaagtgaggataaaatccagaactcttccgattctgaagatgggcttccacctcttgaaaagaacatgaatcatttgagcatagtcaacagtgatgaagagagtgaatagattcattttacatctttaaggctgcggtactggaagtgatttgaagatgtgtgcaatgcagaatcgcttagtggcaaatcgttttggttaacaaaatatatgcgttgttgcctgggtggggcatagttccctgtccttttttatctctaaattgaaataaggaaatatgatcgagtgtcacttagttgtatttggaatagagagatttagcttgtgatccatagttatatggcgtcaatggcgatcttttattcc

SEQ ID NO: 118444 - DNA, 355 bp, Glycine max
  Clone ID: PAT_MRT3847_77964C.1
ggcagaaatggggaataacagacaaaggagattgagaactcatcgcgcacaatcaagtcgacaccaccaccaacaactcttactagaggacgattctcaaagctctcttccagcacaaaatggtgagggcgaggaagaggaggaggaactcacggaacctaaaataaagcttgctatgtgggattttgggcaatgcgatgccaaaaagtgcactggacgcaagctttcaagattgggcatgctaaaatccggctggaaatcaatgtgtctcaagagaagattactctttaatccataagaaaggattggctggtgtggattgatcatgggcacgcttagatgacgtgcctttcgt

SEQ ID NO: 118445 - DNA, 840 bp, Glycine max
  Clone ID: PAT_MRT3847_77965C.1
atgttgtttctaacagcagaaaatggtgagggcgaggaagaggaggaggaactcacggaacctaaaataaagcttgctatgtgggagttacgtgtgagtaatggttttgggggcattgttttaagtccggctggaaatcaatgtgtctcaagagaagattactctttaatccagaagaaaggattggctgttgtggattgttcatgggcacgcttagatgacgtgcctttcgtaaggctgcgctgtactgctcctcgcctcttgccatggcttgtagcagcaaatccagtaaattatggtcggccatgtcagctatcttgtgtagaggctttatctgctgctttgacaatatgtggggaagaaaaaactgcaaatttgttgcttgacaagttcaaatggggccatgcttttatgtctctgaatggtgaattcaagggttttgtaaggaaatacaaattcatttttaattgttttacttccattccagatacggaattactgagggcctactccaaatgccaaaatagtgctgaaattatatctgttcaaaatgcttggctgtcacaagagagtcagattccaagggctcctactgacagtgaagtttttctggctgttttaccttccacattggttgctgctttggtgcaagtgtgcaaaaggttgctggcttgtgacctgggctgccctttttggaaaaagcctccctgcaagaaagttacgacacctgaaagtgaggataaaatccagaactcttccgattctgaagatgggcttccacctcttgaaaagaacatgaatcatttgagcatagtcaacagtgatgaagagagtgaatag

SEQ ID NO: 118446 - DNA, 487 bp, Glycine max
  Clone ID: PAT_MRT3847_77966C.1
actacgcggttgtcgtccttttttgggtaataatttttctttttttagctattttctaggaaataatacaaactgaattgaaaatttaaaaggaatatcaaaattatatatatcaagtctggctgccactataagcctcagaaacagtatcattaaccaactcttgatgttagccgtcactcggatgctactcgaagtttatcatacatacattcctacgaaacataatagtaatcatggtatcagctgatattaagcggcttcatactgtaagaaatttatattattcccaagacttgaggcaatcttcctgagctatacttataatattgatgaatacactcaaattaccatcttcttgatttacaatgctatgttaaccaaattttttttatccaaaacacttttagttataggtttgccccaaggaatccaaaatccaatttcaatgccgatggtttagataagcactttgatttttgtaaac

SEQ ID NO: 118447 - DNA, 773 bp, Glycine max
  unsure (1)..(773): unsure at all n locations
  Clone ID: PAT_MRT3847_77967C.1
cccacgcgtccgcccacgcgtccgtacggctgcgagaaacgacagaagggggcagaaatggggaataacagacaaaggagattcagaactcatcgcgcacaatcaagtcgacaccaccaccaacaactcttactagaggacgattctcaaagctctcttccagatggtgagggcgaggaagaggaggaggagctcacggaacctaaaataaagcttgcaatgtgggattttgggcaatgcgatgccaaaaggtgcactggacgcaagctttcaagattgggcatgctaaaagagttacgtgtgagtaatggttttgggggcgtcgttttaagtcctgctggaaatcaatgtgtctcaagagaagattactctttaatccagaagaaaggattggctgttgtggattgttcatgggcacgcttagatgatgtgcctttcatgaggctgcgctttgctgctcctcgcctcttgccatggcttgtagcagcaaatccagtaaattatggtcggccatgtcagctatcttgtgtagaggctttatctgctgctttgacaatatgtggggaagaaaaaactgcaaatttgttgcttgacaagttcaaatggggccatgcttttatgtctctgaatggggaattactgagggcctactccaaatgccaaaatagtgccgaaattattttctgttcaaaatgcttgngctgtcacaagaaagtcagattccaagggctcctactgatagtgaaattacgacacctgaaagtgaggataaa

SEQ ID NO: 118448 - DNA, 279 bp, Glycine max
  Clone ID: PAT_MRT3847_77968C.1
aaagttgctctgcttgaaaggcactcctatcatggattgactatcacaccaccttactaccctgtggtccaatactcttatcctgaatcacctgtgaagagctatattcacccatccacaaaaccatattcaacattccctgatctgaatgcgtcaaaaagcttgccttcaactttcattaagaaatctgacatagacacttgggaatgcgtaccataccacaaagctccgtactacacaaacaaaacatgctgcgctattcataatcaccaaaactgc

SEQ ID NO: 118449 - DNA, 192 bp, Glycine max
  Clone ID: PAT_MRT3847_77969C.1
gaaagaagaccacagaaggggaagccaaatactcatacactttagcttaaatctgagagagaacaaaacattgtaggtttacattgccaaatttcactccctttcactatgtttgctccttgtcttggttttttaacacagggggactggtaacagctgaaccaaacccaatgaaatataagcaagggaacc

SEQ ID NO: 118450 - DNA, 305 bp, Glycine max
  Clone ID: PAT_MRT3847_7796C.1
cgtatgctgctagaggagcttcacggaactaacaaagcaaccctatgtctaaggtgggtggagtgaccagagcgatgaaagccattttatcttgtgtggtgctaggtgctactccatcagagattactgtcgtctcaggacatagttgaagatatctatggagagaatgagacgaaacatttggagggaatggcaggagcgtagactcaatttcattcatttgaaacacgagaatgggacttcaagtagattgaccatagtataaagggttgtagcatgctaataaactttgacagatcgaacag

SEQ ID NO: 118451 - DNA, 572 bp, Glycine max
  Clone ID: PAT_MRT3847_77970C.1
ttttttttttttttttttttttttttttttttttttttttttttttgcacacaggataggattcttatttgataatatataagtggcctgtcacatacatatttattgacgaaacaacaaccatacatatatatccaagaatctatcatgctacctatgatttgttttgacttgaacacaaatgttgtcgcccatgtataatgtggacgaaacgattcctatcctgaaccagaaccatatatgcatgaaaatggaattgcaactcgggcattttcgacctgccctaccaatttaaatttcaaacccaaattcaattacactaaccactgcattgcaaatttcaaattgcaataatcaatcacgaatactgttgtgccagttctgcttcagtatcactgttcttcatcttcattttctttgagtgtttaatctccccatagaagtaggacaccatgccccaaagcgagagcaacagagaaacccctttttcggcttgaaacttttctttgtagaaaataaccgccaacacttccgttacgggtagcaacaccgcaatcaaaataccagaaaac

SEQ ID NO: 118452 - DNA, 235 bp, Glycine max
  Clone ID: PAT_MRT3847_77971C.1
gggactcgggtgattcgcattcatggggggactcacgttagaacggaagacgaaagcattggatactaggcatgtacaatttctaatgatcgtgctacatcgttgggtgccattgcttgaggatacgaacaaaacgctgtgtgctgtgcacaggcttgcagaagaagactgggttccactctaaggataccagatgaacaccctgctgtgcgagctaagagtgctggagagaact

SEQ ID NO: 118453 - DNA, 499 bp, Glycine max
  Clone ID: PAT_MRT3847_77972C.1
tcggtgcttcaggcttgtggcagataattcgacaacttgacatacccgttgagttttaaaaaaaaacatgattttttatacaacttttttgttagaattttattttttcaaagcctaatgtttgtattttacaattttttttaagctttcattttttttcgaaaatcttatgtaattattatatatttgaacatatatctttttaataagaaaaccttttttcttttgaaaattcaaacaaatggtcaaaacaaggaaattaagcagtagaaaaatcaatgatagggtttcattgcaaaactacgatattaattctaatcctatttatggagttaagtaaatcctaactggatattttctttctcatcttatttttttattgtaaatattcataattttttaataatatatctttattttttaagtattgtgcctagattaagtgaagatatctgtactctataatcatttgagtgtcacccacatcaacatgtattca

SEQ ID NO: 118454 - DNA, 397 bp, Glycine max
  unsure (1)..(397): unsure at all n locations
  Clone ID: PAT_MRT3847_77973C.1
tttttccaaggtgttganacnntttnccgggtggggctttaaacagatgaataaaccttaatccaaagagggtctgtccgcctttggaaagatccaattttgtccaactagaaagatatgggtttcccgttttttccggggggaaaacctctttggccgaaacccccccctaacccaagaccgagtgggcccttccccaccccttgatcctgatgctaaaaaggtcaataaaccccgaggggggggggggttaaaagccgacgagctagtccattggggaaaacttggggtaatacaaacccttgtccgagtggcgcctttccaccaccaatttgcccttgaaaagtttgagcctgaccatgccgttgacggttttttgcaaggcgggtttggggga

SEQ ID NO: 118455 - DNA, 383 bp, Glycine max
  Clone ID: PAT_MRT3847_77974C.1
gctcgacctcctcactcgtctgcggccgccctttattttttttttttttttatttttttatttttcttttcttcagaaaaatggcatgcgctctataatttgagatcattacatttttctagcctaaaacttgaaagaacatttttttttgcctcatcatataacatatacatggcctgaaagaaccccattcgagttcccaaaaaaatgggggaccttccttaaaattttccccaaaaaatacaccgatttgagttcgagggaaggaaacatagagaaaactctaccaaccagattataagaagcccgttggagtgcaaaagacccttgccaaaagtggtggaaccccctttatataaacaggaaccctttcccccttgagg

SEQ ID NO: 118456 - DNA, 939 bp, Glycine max
  Clone ID: PAT_MRT3847_77975C.1
aggggctcttgcctttggcggacgcaaagggtgttcaactatctcacacttttctcctcctacgttgcaatccctctcatttcatggctcgcaagcctttcaaattcaatgaggatgttctcgagcaacttagaaatgggactgcgaaattcgaggttgtttcttccccggttccttcagttgctgctcctcctaaccggaacacgagcttgtttgggattgggaatagtagcactgtcttattcgccagaattggctcatcctttggtggacactctccagcaatgaagaaacttgagcatttttcagttcagaaggttacaggggatggacggtgtctgtttcgtgcactggtcaaaggaatggcttacaataagggaaccactctcaatcaacgcgaggagagagaaaatgcagatgaattaagaatggctgtgaaagaagctatatgtgaaaatgaaggtgaacgtaaattatacgaagaagccctcattgccatcacagttgacgagcctataaaacgttactgccagcggattgtgcgacctgatttctggggaggagaatcagagctattggtactgtcaaagttatgtaagcagccaatcattgtgtacataccagagcatgagcatagaagtggtggttttggatctggtttcattcccattgcagagtatggaagtgactttagaaagggttctagcagaaaagctgtgaggctattatacagcggtaagaaccattatgatcttctagtatgaggaaacatatgaacgaaggagaagcaagaaaatgagtgggagattcaaatgtcattttgtaacaattgtgttatgctagaatccacatattttgttccttttcatttatggtaaccctgttttgaagagtccacagtaaaccccttcttttggtatttttaataaaagttagcag

SEQ ID NO: 118457 - DNA, 461 bp, Glycine max
  Clone ID: PAT_MRT3847_77976C.1
aacctttgggctgatttatgtgcttgtttatgtgcttggtcgtgagaagatgatacaaggggaggagaggtggagatgaagaagcgaagagaagagaagagaagggacccggactcgaaaagagaagacggggggaggaacggaagtaaataagaataagcctacagaggaccggggtatcgttagagagaattcggagcctaacccttgccggatctgttgtaattccgtctccgccggtactcctggtactgtcacctttgcttctgctcataagggtactgcttgcgaaccttacacgtaagacgaagacaacggctggttgcataggaagcctacgcgagagagcacggagagctccccgcaacaacctgctaagccagattccgacaccacgaggtcataaattacgcccccccccttccaacctgtaaaggtccgtccgtccccaagcatctcag

SEQ ID NO: 118458 - DNA, 214 bp, Glycine max
  Clone ID: PAT_MRT3847_77977C.1
cacctggagtatgcgccacctggcaaattgaagcggggcacccttaataccttgtactaacatgtgtcttgatctaccgcgaattggtgcccaataaagtagcttttgatttcactggcactggccgcgggggcgaaactcactgtcacccctcatgacacgtggaatgcattgaacttgacaaatgagtgtacgagagaacaggatttgatgg

SEQ ID NO: 118459 - DNA, 323 bp, Glycine max
  Clone ID: PAT_MRT3847_77978C.1
taagctcggaattcggctctgctttggccaactttcgtctcctagcacatgaacagtggttgttaaaactagggtcttaatgcaccaaaaaacgatgaaacactaaaatacaatacactgaagtatgaaaggtgtacctttcacatacacagtaaccaacaaccttgaaattggtggttttttttactaacttgccattggccccgatgactgacagattatcaccgtgaataaatcccactgaacactgtatgataccagataatcttatatcactgaggtttatatctggccccaaaaacatataatacccaaaacggacc

SEQ ID NO: 118460 - DNA, 610 bp, Glycine max
  Clone ID: PAT_MRT3847_77979C.1
cttgggcactgggttgcatctctcgtcaacgctgttccagtaatcagggctcgagctcaaagttcttaccttttctgtccaaattctgattctcttcatggatttcccgttcctggaaaagctgaaaatttggaagaaaaaagcagagcaagaagaagaaggtcctcctctggtgtggttcgaaacctctgccactgtttctcgccgcttccagtttgaacccaatggccaactttctgtaacgcttgttggtgattctaggccattataccacaggattgttgactctttcttgaataaatttttcccttcaggatatccatacagtgtgaatgaaggttacctcagatacacgcagtttcgagcactgcaacacactgcgagtgccgcgctatcagtgttatcaactcagtcactgctatttgctgcaggcttgcggcccactcctgcacaagcgactgctgttagttgggttttaaaggacggtatgcaacatttagggaatataatatgtagcaagttgggtgcaagaatggattctgagcctaaacgttggagaatcttagctgatgtgctctatgatttaaggactggtttggaagttctttct

SEQ ID NO: 118461 - DNA, 1175 bp, Glycine max
  Clone ID: PAT_MRT3847_7797C.1
cccggtttaagtcctcggtcctccaaagctgagagagccgcctgcgaaaaaacagcctatggggatacccttctctcttctttctctttcaattttcaccttactcattgtttctcccaccttacctctttgtccctctgcttctcgctgtgaaacttcattatctttctctttctttatttactaataccacttcacctcactttgctttcattctccataccctatcaaactccactttccttttttcctctctttgtctctctctttctacctcacatcacacattctcatcctctttttatatccttcccctccaaagctgagggagccacaacacaaccaaaaccctatattattcacttggtcaaacactctttcacttgacaaacaaacactgtgtgtagctgcaatggaagagtattactaccagagacatcacgtgccagcatttgggagctgggattggaatgataatcttccttttacacaatgctttgagtctgcaagacaggctggtttgctaagatatggttactctgagtctgaagatagagatctttatgtcactggagacttgtatgagaatgattttgtcaaacccgctgtgatcgttgttcctcgcagaagggaaaaggtacgttgccagaatgaaaaagacgaaaaaaagcaaagttggaggagtaatgtgaaggagctacctagcccaactagtccaattcaaagaccaaaaccgaagcctgtggatgaggacttgtacaagatctcaccagagcttctttatgccaaaaataggaagaagagagggttgtgtttcttcccaagctgcttgataccaacttgcattgcttgagatccaaggaaatttgaggagccaatgtacatataagtgaaatatatgatacatacttgattggatgatatttatttaaaacgggacctagaagattatcattatatatagtcacatgattattgtggcaaggactttgttgtttattctttgactttaccgtttagtttttgttggggtgttttcaattagtctttgatgtactttggggtgaatcattggtaggacttgaactttggttgtaaaagctctggaactggaagtttagagaaaaaaggggtttaaaaaagtttttgttcctgccaaaaaaaaaaattattaa

SEQ ID NO: 118462 - DNA, 423 bp, Glycine max
  unsure (1)..(423): unsure at all n locations
  Clone ID: PAT_MRT3847_77980C.1
tttttnnagaaggaattattagacaacagacaggggctacattggcgggggacacagaggcccccagcacaaggagacacccccacaagggggagaaaaaccgcatnaaagggccgaacccctgttccagggaccacaagcaagctctcatggatttcacactaagccactagaacagttcactctaggttttactatctctttacacttggggatgccgcccgacacgccctgggatgagcccaggaagcagttcagggggcgctccatctaactcctgctaaaagcagaaaagcggaggcagtggacgaccatcaggtagccgggcactgggcccgcgaaagcccgcaaagaaaggaagtgccattgcccccaccgcactgtaacgaagttttggggaacaatggagaagccccgaagcaa

SEQ ID NO: 118463 - DNA, 273 bp, Glycine max
  Clone ID: PAT_MRT3847_77981C.1
atactaccccttccctttaatattgaaagtgcaaacacttgtcacttgagtatgaacatcacaaatctatgtcttaatttaagacttgaactgatgctaattaagctatacagcttgcttgtggatgctgacattcttacaaagaatgataaaaaaaagccttcatgcgcgtttggttcattcaattttgaaaacttaatcacttgttaactctctaggagagtgtttataaaagagagcgatcatttcctaagatataatcatttccaaaca

SEQ ID NO: 118464 - DNA, 324 bp, Glycine max
  Clone ID: PAT_MRT3847_77982C.1
acttcatccaaaaacatggcacccttaaccatcagaaccatcatggacacctccgctattcagcattcaggattcactgggcaaactgctctgaaccatctcagtcacttcgtccgcaacaccggtggcgcccgcaaaggtctcactaacatacgtcgcactctcaatagtgctcatcacagcaattggtatggccctgaccgtcccaattacttgggtccagtcgctgagcagattccatcggtcctgagcggacaattccctggtgaccaccgttgggacactgcagaatatccagctgacccggaaaccttgtctaggaac

SEQ ID NO: 118465 - DNA, 318 bp, Glycine max
  Clone ID: PAT_MRT3847_77983C.1
tttgtaatcaaccccaccagtccaccactctctgtctctctctcttcaatgctgcaaccttatttggattttggaaaagcttagctaattaagaagcataatacaccctcttgaataagcattttggtatcttcagctaaaaatggagagcagctgcattctggcttttcttttcctcctcattctccactcaagtacaacaaaagctgccttcagtgttggtggtggagttggtgtaggtgacggtgtaggtatatgtgtgggggtccatgacagctctggtaatggaaaacctatccggaggggcaccacaaggag

SEQ ID NO: 118466 - DNA, 212 bp, Glycine max
  Clone ID: PAT_MRT3847_77984C.1
gataatgtattggaccaaaaatatctggttaaaaacaataagcgcatgggtatgtacccaactggttaattgattcctagctgaattctatgttacatggaccaaaaagggaaaatctcccattaagaggcaatggaatgtgtggctttctccagcaagaggaatgaatctgtgctatacccacaccatgagtttgaatagacgttttataa

SEQ ID NO: 118467 - DNA, 443 bp, Glycine max
  Clone ID: PAT_MRT3847_77985C.1
ctctaattcggctctagcattttttccctttacagtaacgcacatcacacaacgccccttctcttctcttccctttttccctggtctctactctactctacactgtagcttcccttcttctctctctctaaaactctcccccatttatctatactttttttcaatccatagtcctacaccttatcacaattcacaacaaataactacaaactttttttacaccatacacctttttttctttttttgaaggtctttatatctcaaaacctctgggtctgattctccaccatgaaccaataactacaaccttgtacttgtcgttgagtgtttgtgtttatgtttgtctggttacatggcgtaccataaccaccacaaccttttacaacaagaccttcctccactccaccatttcccgaaccaatccatgttaccagaccaacaac

SEQ ID NO: 118468 - DNA, 229 bp, Glycine max
  Clone ID: PAT_MRT3847_77986C.1
tgaaaaagccaaaaaaataagtgattccgttttagcccttataaaaagaaaaaggattcttgaacctctttaacgctcatgtaacgtggaggcactgcaaaaaaaagaaccggaaaatgcggtccaatttttcggaaccgattagttaacatgggggtttaccgtttttggaaagacggaaaaaaatgctggggttataaaattctttttggagccgggaaaaagattc

SEQ ID NO: 118469 - DNA, 635 bp, Glycine max
  unsure (1)..(635): unsure at all n locations
  Clone ID: PAT_MRT3847_77987C.1
cggtccggaattcccggggcgacccacgcgtccgatctaaatacccaaattcattgcagcgtgtgttccacttcaatgtgcaatttgtataaaacacatatcatgttctaagtgacaaattatgtgtgtgtgtttcaaactcaacgttttggatagcatttatacaggaagtgttacccccataggcaattatttgctgtgatttgtccanggaaggattgaaggaggaggagcaacaaaccagggtaggttcttattctctctttgcgatggatacctctataagggtatcctttattggggaatttgggaagatttgctttgttcctcattcatggtagacgcatcatcatcatctttctctctttcttcttgagagaatattcttaggttctttctttcttttcatgattctttgctcttgtttctcaccacctttggccatctctcatttaaatggcgtctggttttcctatatgggttacattcctaggtattctgaaatatcttgggtgtgagactgcgtttatctgatgccatctcagtcattgcctttgaacttggggatgatttatttttcaccttctcatttccctctggtggatcatattacacaactgggtttcttttctcct

SEQ ID NO: 118470 - DNA, 319 bp, Glycine max
  Clone ID: PAT_MRT3847_77988C.1
caatcatttgattagtgcgaccattagtggggccacctgttgacggaggttgcctggactgctgaactatgacatatagaagtggggtggccatctgataccatctccgcctctacacttgtatatagcgcggtgggcacctgtaacttctggggggtataagtaatatgtgagcgatactgtgatagagctgactgaacagatgtctgatgcaaggtgtatgaagagtgctgttgatcccacgaaccgtcgatacttgacatggtctgctatgataatgggaaagatgagcaccatgtaggtcgatgaacaaatgatc

SEQ ID NO: 118471 - DNA, 243 bp, Glycine max
  Clone ID: PAT_MRT3847_77989C.1
gaagatgcagagcaggaaacaccagtgtcttgaaaattatgattctggactaagccttctcttgtgtggggcgcaccaaatctgacgtgggggctgatgaacattctgccctttcatcctacccaggaggtcctgcatatagaactgaggcctcgtttgaacatgctatccttgctattggtgatccgaacacataaaacagggatctattctttgccatgtccctcctttcaatcacccgct

SEQ ID NO: 118472 - DNA, 202 bp, Glycine max
  Clone ID: PAT_MRT3847_7798C.1
caagtggtgaaaaatgtgaattcaatgttacagttcaatccattttcaagaatggtaaattcaacgtggatataaacaacaacggggatgcaacctctgtggtgactttcaaggataatatgtatggttacgagggtgaaaatcagaagccagagttcattcatggccgagcgcgttgtggacaagccacggattgtaatag

SEQ ID NO: 118473 - DNA, 837 bp, Glycine max
  unsure (1)..(837): unsure at all n locations
  Clone ID: PAT_MRT3847_77990C.1
aaagccttccttttcccaaacactaacccttcattaattttttcctccgtcccttctctgttctttttttttgccctatctaattagggttcccgcgatttcaaaccttaatttcttcgattactctctctttccatctcatgcgttcttgctctcaacaacaatcacccaccgccatcgaagtcttcgttcttttcttcttcttcactctccttttttctctcgttcgagggttctttcgtggggaaccctgcagatttcaccactcgtgcacatgtccaaagttctcggcttttccggagttgacgatttttgcccgatgggatcaatatatgccaaccccaaggaagcaagtttcttcttgcctcttggccctcaagttgatgtatactttcctcctcggaagagatcgcgtgtcaacactccattcgttttcgatggagaatggtttgagcaaaagccgaaaacctctgttgaagccttgccagatgagtgtctctttgagatctttaggaggttgccttctggggaagacaggagtgcatgtgcctgtgtttccaagcgatggcttatgcttctaagcagtatttgcaaaaatgaaatctgtgttaacaaaaatgccactgtagagaccattgaaaaggagggtgatgatgtagaatttgggaggtgagggatatctctctcgaagcttggaaggaaagaagcaacagatgttagactagctgcattagctgttgggacttcgtctcggngaggattgggngaagctctcaatccgtggaagcaacatgggttcgtgggggtgactagtcatggtctcaaaggctgttgctc

SEQ ID NO: 118474 - DNA, 430 bp, Glycine max
  Clone ID: PAT_MRT3847_77991C.1
aaaaaacccggcccgacccacgcatccgcccacccctccgtacacctgcgagtttactacacaaagccccacaaattactttcgtgggctatataactaaaaacagccgcctcaaaattaaccttctttttttcttctctgctacaatttttttagcactacacagccatgcctacgatattttccctctccgaataaacactatctatggtaccctcactccctatgtgaaatgctcaaattttatacttgctttctaatcacacaacatctttttcttctataccattccttaacattttcatttaaacaacaaatcaatacctccactgctaacaatattcatctcactcctttataattaacctacactcttacttttaatccatataccttctattccattccaatgacacatttctttttcata

SEQ ID NO: 118475 - DNA, 3005 bp, Glycine max
  Clone ID: PAT_MRT3847_77992C.1
ttgaccggccggttctttttctctctctttcctctgttcttttttttttgccctatctattagggttcccgcggattcaaaccttaattcttctattactctctttctctcatgcgttcttgctctcaacaacaatcacacaccgccatcgaagccttcgttcttttcttcttcgttctcctttttgctctcgttcgagggttctttcgtggggaacactgcagatttcaccacccgggtcttattcatccgtgcccatgtccaaagttctcggcttttccggagttgacgatttttgccctatgggatcaatatacgccaaccccaaggaagcaagtttcttcttgtcccttggccctcaagttgatgtatactttcctcctcggaagagatcgcgtgtcaatgctccattcgtttttgatggagaatggttcgagcaaaagcagaaaacctctattgaagccttgccagatgagtgtctctttgagatctttagaaggttgcctgctggcgaagacaggagtgcatgtgcctgtgtttccaagcgctggcttatgcttctaagcagtatttgcaaaagtgaaatctctgttaacaaaaataccacagtagagaaccctgaaaaggagggtgatgatgtagaatttggaggtaagggatacctctctcgaagcttggaaggaaagaaggcaacagatgttagactggctgccatagctgttgggacttcatctcgaggaggattggggaagctctcaatccgtggaagcaacattgtttgtggggtgactagtcatggtctcaaggctgttgctcgtggatgcccttctttgaaggctctttctctatggaatgttgctaccgttggtgatgagggcctaattgagattgctaatggatgtcaccagctagagaagcttgatctttgcaagtgccctgcaattactgataaggctttggttgcaattgcaaagaactgccagaatctgactgagttgtcatttgaatcttgccctaacattggtaatgaaggtctacgagctattgggaagttgtgctccaatctgaaggctatagtggtcaaggactgcactggtgttagtgatcacggaattgctggattgctttcttcaacttctttggttctatcaaaggtgaagctccaggcattgactgtttcagatctctctctagctggtattgggcattatggcaagtcagttactgatcttgtccttaattgcctcccaaatgtcagcgagagggggttctgggtcatgggtaatggtaatggattgcagaagctaaaatcacttacagttgcatcttgcaaggcagtaacagatattgggcttgaagctgtaggaaagggttgtccaaatctgaaaattgcacacctccacaagtgtgcatttctgtcagacaatgggttgatgtcattcgccaaggctgcttcatcacttgaaagcctacgattggaagagtgccacagaattacccaacttgggttttttggtgtcctttttaactgtggtgcaaaattgaaggctatctctttggtgagctgctatgggatcaaagatctgaacttggtgttgccaacagtatctccatgtgaatcacttcggtcgttgtctatcagtaactgttctggatttggcaacgcctccctctctgtattgggaaagctgtgccctcagcttcagcatgttgaattgagtggactcgagggagtgacagatgcagggcttcttccactccttgagagttccgaggctggtttggttaaagtgaaccttagtggttgcacaaacgttaccaataaagtagtttcgtccttggccaatctgcatggttggactcttgagaatctaaaccttgatggttgcaaaaacatcagtgatgctagcttgatggcaattgctgaaaactgtgcattgctatgtgatctcgatgtctccaagtgtgctataaccgatgctgggattgaagccctggcacatgctaaacagattaatctgcaagttctttctttgtcaggttgcactttggtctcagacaggagcttgcctgcgttgagagaattgggtcacacccttttgggactaaacatccagcactgcaatgcaatcaacagcagtacggttgacacacttgtggagcttctctggaggtgtgacatcctctcctgagctgaaagaaaaactaatctcacttgcaatttaggccaggatcacatcatgcaggaagcttgttatgcttagtgttgcacagtagtttattttaggtccttaacaggtcttcatcatccagcgacttggttcctttttaccggagtgtgcagtcatttagctctcatttttgcaggttccttcaatgggaaatctgttctttttggcatccattttgcccccttttaaatggctgcatatctgagaacatagctaccgggttctggagttaggaatctttgttactggtgttggcacctgatgtttttagctcggctttgcatcggttttgccaccatgtgtgtcttagttttctaagtttttacagctagctgtaccactgtatcagtctttgtttaccaaatgtttcatgtgtttgaactatgttcttcacatgatgtttgggtatcagttttactcacagggcaggttagaagttgcagtgtcatgtgctgttattagcgtggttgcagttgtcaagttcggtgttatgaagccttgtttttagggactggctgtggcagcaagttatacaggtctgccataaccacgaccttttttcccctttgggaagggttgtgtttttttaccaagtcctagtttttttaaggcttcattttttttgaacttggcactgcacctccttattgtctaatgatattcatacctgcccttgtgctgtatgttatgaaatgtaatgaaataaataaaattcagtctcattcctagttgcttgaacagatgtgatgatatatatttctctaaactttgatt

SEQ ID NO: 118476 - DNA, 261 bp, Glycine max
  unsure (1)..(261): unsure at all n locations
  Clone ID: PAT_MRT3847_77993C.1
ggangctaagttggccntcacgataatacttattttctgcgtaatttggntatgagggtggaatggcatagacccttgtgcctctcaaggncggataantccgagctgaaacgtgntttcccntntancagnnaatgnncagcgtttaaancagcaaagttcagnntgcatcgggggcnacaggattatnnacatnggctnaaaatgnccaattcgnntnaaatncttggccaccttngnggggcaanaaancgtgtgnaa

SEQ ID NO: 118477 - DNA, 358 bp, Glycine max
  Clone ID: PAT_MRT3847_77994C.1
tggcttggaacctttgggctgatttatgtgcttgcatggtcgtgagaagatgatagaagggcatggtcgtgaaaatattatagagggatattgtcgggaacatactaagacgagatagaagaattatacggcggagtcaaaggcgaggaataagacggcggcgtcagaggggggcatagtggtatgtatggaatcgagtgccataaaaagctattaggtattaagtcacgatgacgacgagtacctacaattacgtgacgactatcatacgcgtatatgtcgtagggacttccaaagtagtatatatcaaacgatcttgaaacgaagttatctagacagcaagactcgcatacgtata

SEQ ID NO: 118478 - DNA, 450 bp, Glycine max
  Clone ID: PAT_MRT3847_77995C.1
ctccaaagacgcataccaaaggtaccatgcccatcactacacaaatggaacccggtgcgatgtcacaaaccaaccacgagaaactgaggttagatttgtttgctcaaagccacccagagccatactcaattgtatcacagaactatcaacgggcaagtatgcacttacggcgcgatgcccgacactttgcaagcatatgttatttgaagaagagagaccagtgtggtacatcattaactgcaatgagcttccagatgattacaaggaaacagagaggagtgaagaatcaacagatgagattgtcatggttactgacatcaaatatccaaaaaatgaatctgaagattaatgtgaatatatctttatatgatagaagttttatcaaccaaactaaccttacacacaaagctttttcctatgtagatttttctttttcatattcaaattata

SEQ ID NO: 118479 - DNA, 183 bp, Glycine max
  unsure (1)..(183): unsure at all n locations
  Clone ID: PAT_MRT3847_77996C.1
cttttatctacaaaattgtatttacttttatanatannagcnacaanngtntcantgnncctctttatnagtnctttaaacaaaggatgcagcanaaggnacacaagttgaatggaactactgaatcacataacattcgcatttcacgctcgcatcctttgtttaaagaactaataaagagga

SEQ ID NO: 118480 - DNA, 324 bp, Glycine max
  unsure (1)..(324): unsure at all n locations
  Clone ID: PAT_MRT3847_77997C.1
nggtgntngnnnncgnnagctcggaattcgccncgacgtnattgncgnnaatnacnatgacatgnntgcanccagatnnanataccngntcnncntgtactnannatgtcacnggcntaggnngggttncaaagtnnnancnnagcagagttcgaggatcgcncnactnctgcagcagcngnnanaggnctnnnattnnnaagcntntccagntatgtnnctncnngggncagnangannatgncnacncgcatatatcatggatngtatganctntanaacancncttngcgattgtctnngacnttagtggatcttncaaat

SEQ ID NO: 118481 - DNA, 190 bp, Glycine max
  Clone ID: PAT_MRT3847_77998C.1
aggtgaaaaaatgttttacaatagctctgttaaatgttccaataaacagggtccttattactcaaaattggaataaaaagccacatagaatgcctaagcccctttgccttcgccaattttgcttaaagcaaacacccttttggaaacaccaacggatccccctgggaacattttggacaagtttaattgc

SEQ ID NO: 118482 - DNA, 363 bp, Glycine max
  Clone ID: PAT_MRT3847_77999C.1
ctgaacccccgccgctcgtttaccccaagacgaggaccacaacaaaccacaccgtcaccaacctcgttctggtgtcacgaggttttgctgggatctgctccattccaatcacaacaacaacaacatcacgcaatctcaaggcaagtctagcatcacaggaagcaacaacaacaacgactctctcctcgctcgtcgttgcgctaactgcgacaccacttccactcccctctggaggaacggtcctcgtggcccaaaggtatatcaccatattcaatccagttatctctaattcatgagtaacttttgtaaaatgcttctaattgctaaacttggtgaaaatttcattaaaatcacactatgttc

SEQ ID NO: 118483 - DNA, 492 bp, Glycine max
  Clone ID: PAT_MRT3847_7799C.1
cggactcgtgggcggacgcgtgggtgatcattgacaggtgtaataaacttgaaaatgtttttccttcttatatggtcggaagttttcttagtctatgcgacttgaaggttactaattgcaagtcaatggaaaagatatttgacctcaaaagtgttggaaaacgtcgtgcttggaatatgatcaccagtttgcaaaatgttcatgtaaaagcactgccaaaattggagcatgtatggaatgaagacccaggagggattcttagattcacatatttgaaaaagatatgggttcaagaatgtctcaaattaaaacatatatttccagtttctatagccatgaatcttaaaaatcttgaataccttgaagtctggaattgtgctcagttgaaggaaattgttttcaggggggaaacaatcaaagagagtagcgttctgtttgagtttccaaaactaaccacagccagattctcgaaactgccaaaccttgagagtt

SEQ ID NO: 118484 - DNA, 557 bp, Glycine max
  unsure (1)..(557): unsure at all n locations
  Clone ID: PAT_MRT3847_779C.1
ccacgcgtccgcacacgcgttgcgaacttaactacgcatatttttcacacaatattgcttaagaactattactaaatctctacccaactttgatccctcctgtgctctaccgtgatcgcccctatctatttaccctttcataagacacattataagactccccagtcaaattagttgcctttgcaagtaacttttttaggtcattatatcaaacgtatttgcaaacggttatgtgtgccattatctgtgacactgagctaagggatgatgtagaggctgatgctaagactgatttacagacttatttgcgcgattatnagagagatcatgaaatgtcccatgaattggagggagatctatagggcaacttatgggactactccacgcttgaagccacgcttaaaccatggaaaaagctctacgatgtgtccctggagccatagctcaccaaaagatcaacggggagttcattgaggagtctataaacagaatctgacttagtgtagctcttcatgctcctatagatgctcctatacaggctgatgtaaacagtgatg

SEQ ID NO: 118485 - DNA, 727 bp, Glycine max
  unsure (1)..(727): unsure at all n locations
  Clone ID: PAT_MRT3847_77C.1
cacgcgtccgctagggatggttgtgatgttttgatctcatcggagaatggatggaattgttggattttggtaatggtgataggcattccgtgaaccttttggattcgatggcgtcctccagctcccgcaagaacatccatgctgatgccactgacgacgaacaagaacaagaagaagaagaactcgagcactttgatgatttcactctcgcttcttcgtgggaacggtttatttctgaaatagaggcagttttacgggtttggatgtctgatgggccaaacaatttattggaaaaaggtgcagttctcttggaggatgccggtaatttgtacaaggtgaaatctgaaatgaagtatgccatgaaaagttactgcatggagttctatttcaagactgaccctgatgttgatgcaggaaaacttgcggactggaattttgatttgcatgatctgcagttatgttttggtgtaaaggagtttttggtgattgctcctcagagtgcaagtggtgtggttcttgatgcgccagagtctagcaagctcttgagtgctattgcaattgctttgtctaattgttcaagtttatggccagcatttgttccagttcatgatccatctcggaaagcttatattggaattcagagcatgggtactgtatttactagaaggttcgaagcagatcgaattggtagtcaggttccagtanaacttatgcatttggaggggct

SEQ ID NO: 118486 - DNA, 273 bp, Glycine max
  Clone ID: PAT_MRT3847_78000C.1
atggctgccccgcccccggaagcggagaagaaggtgtcgtacgatgtgaagctgtgccaacttctagaggattacacccaaattctggtagtggctgcggacaacgttggatcaaaccaacttgagaacattcgaaaggatctacgtggcgactcggtgtgtaatttgaaggaggttagcgaagaggttgccaggtacaaggatgtcattgcggttaaggatgacaaagggaacccggatactcacaaatatatttgtaagtggaacgggtaa

SEQ ID NO: 118487 - DNA, 316 bp, Glycine max
  Clone ID: PAT_MRT3847_78001C.1
ggctcgagaatgattatggctactctccttactggtcgtagtacgctcaccctacgcgctactatagagagaatggaggagcatcccgcacattgtccgcgcataatggaagtggagctgacgatggtacgtactcactattatttgcacgacagacattggattgtcgatgcctgacctagcaccgtctacaggcattgacagggctatggattagatctaccctgctgaggctcagctcttgcaagactaacacattacttccactgtagtcgtgacagatgggtatgcgcaccactatagaacaccagatatg

SEQ ID NO: 118488 - DNA, 1211 bp, Glycine max
  Clone ID: PAT_MRT3847_78002C.1
ggaccttcatttgtcattgggaattgattcctaaaatttgacgaaaagagattacagggaaagtgggaaacagtagatgatcccaatgggaattggcaaaattggagatcatcgaccatagatatcaaggtctgaagttgaaccaatggattgtacagctgcaaggaaaacacaaaaggctgaccgagaaaagctaaggagggatcgattcaatgtacagtttgtagaactgggtaacattttagaccctgataggcccaaaaatgacaaagcaaccattctaggtgatacaattcaattgctaaaggaccttacttctgaagtcagtaaacttaaagatgaatatgctactctaaatgaagaatcttgtgagttggctcaggagaaaaatgaactcagagaagagaaggcttctcttaaatcggatattttgaagttgaataatcagtatcagcaacagctcaggactgtgtctccatggactgcaacggatcgttcaataatgctagctccaccatcatatccatatccagtgccaatgccaatacctcctgctcctattgccatgcagccataccccttctatgctaatcaacattctgcaatcatccctaacccttgttcaacatttgttccttatttagtccccaatacccttactgaacagcgatccacccagtacatgtcgccacctgttcatccaggttttcggtcccatgtgtcaggaaaacaagagtccagaaacaaatcatccaaggagagcaaggctgaaaaacatgaggattctaatgatgtcactctgactcctgggtcttctgctgatcaggatttatcatctggacaaagaaaatctagcaagttgtcaaggaaggaaagcagttgcactgaagtgagttctttagataggtgctctttgtcttgtagcgttcaggatagttcatcaagtagtgtagttcacaagcacaaaggctaatgaatgagaaatggtacaattttggtcaagtgcttatgatgaagtttttccattgttttaactgctgcaactgtctggaggcataagttatttgtggtcttattaaaaaagaagtaacttctgtaagtctctccctggctaggaatttattcttaagtaggtttaaatactaaaaaacaaaaaaaaatcctatacccaaactttttcttgctggggaaaatattggaaggtttggatc

SEQ ID NO: 118489 - DNA, 642 bp, Glycine max
  Clone ID: PAT_MRT3847_78003C.1
ggaacatgggcgcataatttattaaagccactaacgagaacacaccatagtgagagtctcattacatgactcgttgacacacagctgaaacaacataaagagaagctcgtgcccctattagaacgcattttattacatatagatagattggagcaagctaaattgttgagaggtgaaggaactactgaatgtatgacaggggattaggaagcttaaaggtcctgctttcaactatgtggtcttcgaggagatcgctccattggtatccaatgatcccaacaatggagagtccctgccttatcacaccctatctatctgctcgcatgaatgaaactggatttggagtgtataggatctcgaggatccttgcgaatttatttttaacatgcgtggtacccaggcttgtctaagaacgcttttgatacggactgtttgagcagtgttctttctgacaggaatattatcttgaagccaagagacaccaactcgttgtagaagatacgagagtctgtcggggccgtgacatagaccttgtccacccacacatcatacagggcatagagaaattgctcctccgcaaattcatgtgctgtgtagtatggaatataataaagtacagtggcatttatactgaggacaaat

SEQ ID NO: 118490 - DNA, 561 bp, Glycine max
  Clone ID: PAT_MRT3847_78004C.1
agagatccatgaagaataaaaatctaagccttgcaggtggtggggtaacggatttccaagtaacatagaaccttacaaatacaaataggttgtgcaacccaaacattacttatttatgtagccacagccacaaaatcattggacaacaaaataaggctagagaacatagctggtgaatattcgaacccaaccaattctaagaaatgtaagcacttgggttcaacctaggggtaaccaaagcagcaagtggaacctttttttgcaaggcaagcccaaaggactcctccatgtctaactccctcaccccattgggtagcttccaatcaaacgaatgcaccaaagtgcccaaaatgtagtgaaccaacacaatccccatcctagtccctgcacaaatcctcctcccagcaccaaatggaataagctcaaaatcattcccacgtgggtcaattttggcattcttcccactcaaaaacctctcgggcataaactccaaaggattgttccacacatcagggtctcttcctatggcccaaatgttcacattcagcccccacgcgtcca

SEQ ID NO: 118491 - DNA, 512 bp, Glycine max
  Clone ID: PAT_MRT3847_78005C.1
ccctcttttctttcttttcttttcttttcttttttttttctttttttttcttttttttttttttttttttttttttagaggacaaaccggttatgaaaattttattcgctggatacagggggggcccctaaaggggccggaccgaaaagcagtagcccccaggggtcagggaaattaaccctccctgacatatattataggaaggacccccaattatacctctttaaaaggattttttttatcccaaaattaaaaaagggggccaacatcccaaatattcacccctaaagggggggtttgggggggggggtatatcctctaaaagcggcccttggagggggtttttccacaaacagggacgggggcgctgccccattggaaaagttttcggccggggggaaaaaaaaaactagggggggcaacccttgcaagcccaggaaaaatgagtagtaaaaggtttgcaaaaagagccgcaaatgaaacccctttggcccttgctaaaacgggccccg

SEQ ID NO: 118492 - DNA, 749 bp, Glycine max
  unsure (1)..(749): unsure at all n locations
  Clone ID: PAT_MRT3847_78006C.1
ctcgagccgctcgagccgattcggctcgagcttgaaggtctcagctacgtagaacggaaaacttaaatgaacataagaatattataatttataaataagaaataggattacatatgcctatctgatgagagaatgaaaggtgggtaagtgaaaattgaaaaagaaattggttcgacatttcattcctttacaaagcaaaccctctagataaaattagatgaactagccgttaaaatttattataaattataaatgatttcacttgttcattgttgcattttttttaaaggccatgagaattatatttataaccacaaagagtgaattacaatacaacttgggactgaaatggactgaaaataactctaatcaaaattcatcataaactatattgtccaatgttggttaaggatgttttttttcttaaatatatagtatactttttaaataattttaaaagtagttttaaactaaaaaaattatttttgattttaaagttggatttaaaattcatccaaaaaaaattcaaattgattttcctacaaaatatgaatctgaaatttaaattcaatccatttaattggatctggatttaaaattcaatccatgtaaatggatccgaattagatttttgaaaacatgcccacccctagcacaagttgtgcttgcacaccaagttccaacatcatgataaaatctgaactaaaaaaaaaaaacaaaatctaaccncccaagttatcaaagcattc

SEQ ID NO: 118493 - DNA, 496 bp, Glycine max
  unsure (1)..(496): unsure at all n locations
  Clone ID: PAT_MRT3847_78007C.1
tacggctgcgagaagacgacagaaggggcatctctagttttaattatgcagttgactgtcttctgtgttttattatctagcttggaataaagtaagtcatcttttgctttaggggaaatataataggatgagaaaccttggtacaaaatagttgggaattagaatactgaaaacaacaaagaaaatgttagcttctcatggtgattgagagaagtcgtggcgaagtaatcacttttataaatagaaaatctgaagattttatctatcagaatgaagatttttgtaagtgtttattttacaatgcaataggtaactgggtcagagtattagtctcatatgagtaactacataaactaagttggctgttttagagactggttataatcagatttgtatttcttattcagatttttgaatgttcccatcanagttttggagattctacctacaaggacttcatgcatgcatgcacactangtaaagcaaatacttgaaa

SEQ ID NO: 118494 - DNA, 275 bp, Glycine max
  Clone ID: PAT_MRT3847_78008C.1
ggtatttttttttatttgtttattttttactgatatctattatttattattggtttttttgatttttacttcattttcgatatagttgctgacagaatgaatagcttgacaactcattggttcattgcatcgcacgacaacacatactgatctattaaaaggaagaacgatggatctctgaaatatgacacacagaagtacagagacagcctaacgatcacagaaagatactgatcgccaacagaagcagcatcaacaggagttggcagggacaa

SEQ ID NO: 118495 - DNA, 331 bp, Glycine max
  Clone ID: PAT_MRT3847_78009C.1
ctcactggaatggagagacggaggggggagattatgcacaacgttatatgaaaatatagcacatgcacgaagtggatttaaactgttaagaataaatgtagaaagatagccgtttttatgataagaatgaaaacggttaaaacttataatcgaggggaaaaccggttttagaagggagacaagtacaatatgaattattttaaaaacaatcagaatcatattgggtaatttgaacacaaaaactattgtattactaactatgtatggtattatcttatattcaatattcttggcacatagattaaatataattgagtgcaactaaaaaata

SEQ ID NO: 118496 - DNA, 315 bp, Glycine max
  Clone ID: PAT_MRT3847_7800C.1
cgcctcgagctcgagccgatcccctcacgtgggctcggcagagtgctctggatcatgacagacctcgcactcattaggctccgatgtgtcaggagatcactagggagcgctagtgcataatacatacagagacatatagatggtcaggtttatcaccagagaacctttactttccattgcagaacttaccctttttttcattcacaacaggttttaattaaagttaaatatgtgtactttttggcactttataaggttgcaacactaggttactaagttatttacttactcattagccttggtgttcattccaac

SEQ ID NO: 118497 - DNA, 198 bp, Glycine max
  Clone ID: PAT_MRT3847_78010C.1
ctcgagccgcttccggagcctggacttcggggagcgcaacggctacctcaagggcgtggtcgccgacgtcatccatgaccctggccgcggcgcgctcgctcgctcaagggtcgccttaccgaccaaccctattccagatgacgaaggaacgcaggagacgagctcttcattgccgccgagggctctacacggtcagtt

SEQ ID NO: 118498 - DNA, 136 bp, Glycine max
  Clone ID: PAT_MRT3847_78011C.1
ggctcgagaaacgaatcccaacacaccgttctgaggctctgcactacttcatccatgacgcgtggttcttcaggagccagtgatgaggctccaaggaacttcatatggctagaggagcttgacaagggagagaaag

SEQ ID NO: 118499 - DNA, 393 bp, Glycine max
  Clone ID: PAT_MRT3847_78012C.1
cccacgcgtccgcccacgcgtccgatcagcattcgttgcagcgatggtaaccctccaacaacaacactttcggtgcgaaaaatgtctctggtggccatcgaggatttccagcacattctgcgtgtgctgaacaccaactttggatgggaagcagaagataatgctcgcaatgacctccatcaagggtattggaaggagattcttcaacatcggttgccagaaggctgatgttgacatgaacaaaatggctggtgagttgactgctgctgagttggatagtgggattactgtggtggctaaccctatgcagctcatgatccaaactggttttttgacataaagaatgatttcaaggatggcaaatactctcaagttgtgcctaatgctcttgat

SEQ ID NO: 118500 - DNA, 151 bp, Glycine max
  Clone ID: PAT_MRT3847_78013C.1
atagtgcactacctctatactcacgtgtgagattgcaggccgttcagttgcaccaatgtctcaaccacatgcagcaaagcttaaatagggaaacccaagaccaccaagtccgtatcccgttccaccagcacctgacttcaattacacatct

SEQ ID NO: 118501 - DNA, 461 bp, Glycine max
  Clone ID: PAT_MRT3847_78014C.1
gtctagcttatagatatggtagagggataaatttgactttgttgcttgcatgggagcattttttggggttgtctttgcctcggttgagataggacttataattgcagactctatctcctatgcggagattctattacaggtcgcagggccacgaactgcacttttggggaaaatccttatgactactgtctacacactcatccaacagttccctgaagccacaagggtgcctggagtacctattataagagttcacactctgctatactgatacaactccaactatgttcaagaaaggatattcacacagctggtgtatgaggaacacctagtgaacggttactaccatacaagaatccaatttgtgatgggcgagatgtcaatcgttaccgacatcgataccagcggtatacataccctcgaagagttatctagaagtcttcagaagagaaacgttcagc

SEQ ID NO: 118502 - DNA, 326 bp, Glycine max
  Clone ID: PAT_MRT3847_78015C.1
aggcgtgcgaacacgtgcgagaggactacagagggggagagggagaggcgttagcaagagcaagaataactctgctaggcccatgtgctctattcagcgatcgagtatggggccctcacagctgccccttgcactgatgagacgtcctcagaactatgcctaccatacctcttatggaactccttgctaaccagagtctccgtctgcggtggcaacaacatccagactggcatgcctgatcggagtaatggtgccatggctgcaaaggaaggagccgcagcatctggcttgatacgaacgcgcaagagcggacaccagaatggaac

SEQ ID NO: 118503 - DNA, 1044 bp, Glycine max
  Clone ID: PAT_MRT3847_78016C.1
gaatcggctcgagtacggctgcgagaagacgacagaaggggacctcttttattcatcccttcctttcacttctccttcaaaccacaatcccaaaccaatagcaaacaaaccaaacacgacataaacgcaaatgctaactccgaccaccggagtaccgaagcgccggccgcgatctggccggacgccgcttcagctcaagaacactcctgccgatcccattcatccttccgcgaagcccaagcccaagcccaagccgtatttcgagatttcattgatcgacaaagagaacaatccggttgccgccgtcgcggttctggtggcgcagccgccggagacgtcgctggcggaggagctcagcgcggtcaagaagaagctggagagaatgagagcggacaaagaaaaaacggagaaaatgctgaacgagaaacacgcaatactggacgcgaagatgaaggagatggaagagcgaggtgagattcagaagaacctcgagatcgaggttgaccggttgttccggttgaaggaactcaagtatcgctgcatgagagtttctccgatgagaacgcttagggagaaggaacaaggaaagatcgtgaacgaagcgccatcgcaatcggaggtgaaaacggaggaaacagtggcgtcggaatctgaatcggaatcggaatcggaatctgttggaggcgaatgccaagttctgcagagtccaggttcagcttgttcacaaactcatactccacatacaaaatcagatagttgaaactgagtatcttgatggaattttccatacataattgctcgttatgtttgtttttttcttaaaaaaagtatgtaaatttcccattgcaattaatttgtacctttatttcattattattactatttcttgttaagaaagaaaatggccccccctattatattgccgataaacttgagcattctttgtaactttattatacttctctcgtgttttgctattgttcgacgatcccagcgtatatatgtaatttgaatgataaaaaaaatataaatggttttgttccg

SEQ ID NO: 118504 - DNA, 656 bp, Glycine max
  unsure (1)..(656): unsure at all n locations
  Clone ID: PAT_MRT3847_78017C.1
gtccggaattcccgcgtcgacccacgcgtccgtagcaaacaaaccaaacacgacataaacgcaaatgctaactccgaccaccggagtaccgaagcgccggccgcgatctggccggacgccgcttcagctcaagaacactcctgccgatcccattcatccttccgcgaagcccaagcccaagcccaagccgtatttcgagatttcattgatcgacaaagagaacaatccggttgccgccgtcgcggttctggtggcgcagccgccggagacgtcgctggcggaggagctcagcgcggtcaagaagaagctggagagaatgagagcggacaaagaaaaaacggagaaaatgctgaacgagaaacacgcaatactggacgcgaagatgaaggagatggaagagcgaggtgagattcagaagaacctcgtgatcgaggttgaccggttgttccggttgaaggaactcaagtatcgctgcatggttcgcgcaacaactacatcacattttctgttcgattcgnttttcaagttcgatttctcgatgctgatatttttattcattggaacagagagtttctccgatgagaacgcttagggagaaggaactaggaaagatcgtgaacgaagtcgcattcgaatcgggaggtgaaaaacggagg

SEQ ID NO: 118505 - DNA, 424 bp, Glycine max
  Clone ID: PAT_MRT3847_78018C.1
ggcttggaaccgttgggctgatttatgtgcgtgcttatgtgcttgattatgtgcgtcatggtcgtcagaagatgatagatgggcatgggcgttagaacatgatagaaggggatagtaaaaataaccaacaaagacgagcccgaagaataatacggcggcgtcaaaggtccgcgaagcgtccgccccatccgccggggccatagtcgtatctacggaatcgactcctcctacatgtgactacctactcagtcacgacgacgacgagtacctaaacgtacgtcgagactctcggacgcgtatatgtctaacgttcggctaacgtatccgccaaaacaccaagtcgaacccacgttatcgataccgcaaaggtcgcacgcgtatatgtcgatagttaggatagcgtttccggtccgataatacgatc

SEQ ID NO: 118506 - DNA, 388 bp, Glycine max
  unsure (1)..(388): unsure at all n locations
  Clone ID: PAT_MRT3847_78019C.1
gtcccaccataaaacatttagatggctacctagggacaggtgtaaatacaatgagaccaagaccaagatggctttaatttgtatgttaaactttgcattgctagagaaattaataaggtgcatgagtactttggcacctattatgctacatataccttagatacgttataggttgacaaagtcgtactggtaggttcaagaagcacagttgtctctcacattgtctgtcacccaacttgctatagtgtgtggagaaattcggatcatattgaagatgttctaatgagttccagtccttcattaagtgtttaacgattctgtctttctttatataatttntgtttgcttttannnaaaaaaaaaaaaaaaaataaaaaaataaaaatta

SEQ ID NO: 118507 - DNA, 813 bp, Glycine max
  Clone ID: PAT_MRT3847_7801C.1
gaattcgagctcggtacccggggatcctctagagtcgacctgcagctcgacaaggaaagtacaagcatcaacatcatggagctgtcaaatcaatgttagtcactagtcagttgccttccaacaaaaacttataaagagcaaaagtacaagcagtcaagcacctatatatgtaattaaagaggacatacatattgcttgtctgatgccatgtttttattgttgaaatatggtggtgctgatgcagtcccccctagggtagaattaaatgggatgggaagaagacctcggaatccatcgtcaatccatcgaacttgtcccacataatctgggatgaaaaatgatgatggaaagcgatgccattcacttccaacacaaagtacagaatctgcaacacaaaggaacatgcaaatttaggcagcacagcagccttagtttctttaagtaccctatgacacattgtcaggaacccataaaacagcttctcagttttcagagatggttgagaaaaacagaaagaaaaggagagcatgctttggcagtgtttactaaatttcaaatgaagaagtagaacctaaggagaacattctcctttcaagtgtttccccttttacaaccggttctttaccctttctacaacagaagcaatgctcagtttccaaacagaatgctttacccccatatcctattaaaactaattccctatccctacacctttaatcactgaactatttcaataattaaaaactatcccaattactccattcaatcacatttttaaaaaaaggccattcataaaatacagaaacaagcccc

SEQ ID NO: 118508 - DNA, 423 bp, Glycine max
  Clone ID: PAT_MRT3847_78020C.1
cgaactgtccaaggtcctgtcacgctaaagtagttggactactaggtgagctacttacccgtgccatacctgctatagcgttttaatgcgaagtgccaatagtaatagtaccagtctagtactaggaaatggctttagagatgcagcgggtgacttgcgggaacgggggttggaaatgaatgagctgcgtcccaacagaggggtatgtaacggcttaaggtatgagcgggatgattccaagaggcagggttgcccctagcaatcaacgagggaggaaggctaggggagatggggcgaatgtgccatggttgccggaaagtagacctacgtgtaatgtgacgaggatggaggcaaggtgaagccgatgataatgcaatgggacgcgccagagaaagtagggccgaaacagcattaaggcagggg

SEQ ID NO: 118509 - DNA, 2090 bp, Glycine max
  Clone ID: PAT_MRT3847_78021C.1
attacaagtataggtagattacagttaaagagcggaaagtgggtttaatggtttttttctagagagagagagaggcatgatggccaccaatcccatgaacatagctttggcctcttattcttattctcagtgttgagagagagagggtgtggtagtgattccagatgctttggaaatgggaaaaaatgaacaacaacaacaacatgtgcaggaagaagggcaggttgaggctccaccctgttgttgggtccttcttcgaccattcagtttcaagtgtctgttccttctcctactcagtttgtcggctctgctttctgcactcttttgggttcttcctagacacaccatcacatatagttttgatgcaaaagatgtaattaagcaaagtgcttctgttcagacatccttcagactggaaaaaccggtttcacagcttattccatatattgaaacattacaacatgatatacgtgacgaaatagctctaccaaatacagaggtggctctcctgtccatgcaccaaagtattacacctaactgtactgacgtggtgtttggtgttctctctgatccaatgaatgcttcaataaatccagtgtccttgagtgtgctgaagtcatctttaattgaactgtttctcaagcaaatcaatctgactttgacatcatcaatatttgggaatgcatcaatatttgagatcttgaagtttcctggagggttaactgtaataccagtgcagtctgcttatatttggcagatgcctgagattttgtttaattttactcttaacaattcgatatctgaagtattggaaagttttgatgacttcaaggatgaattaaagtttggattgcatctaaactctgacgagaatgtgtatgtgcaaataacaaatgcaaatggctcaacgataactcctccagtagtagtgcaggcttcagtcatggcaggctttggggagcctcttgcctcaaagattaaagcaattagctcaaacaataacaggttccgctggcaaaaatcttggccttgataactcagtttttggcagagttaaagaagtcagattatcttctttcttgaagaatacactacatgcttcctcaccttctcctgctcctgctccatctccacagttaattgatcactctgagccatcaacttcaccacatcgtgctagtccttacactccaatatcaccagcagctgctgaacaacctccttgtttcgattgtgaagtaccctcacctgcaccttctatggtgcctgcgcatcctccagatccctgtctatatagtggcttccttcatcatccaatcccttcgccaaaatcttattctaaaccatcctttccccctgattattcacctgctgctgcccctacctcaaattctgctagccacaccagtgaggaagcttctgatctgtctcgtgtagccgaggtgtcccatggatccaagcttccgcagggtgaagagacatctaataaattggtgtctcagctacttgctccatcctctttatcttcagcgggtggtcatttctgtggggaaatcttgctaatgggattttgtatgctattaatttcatttgtttttctcaatcataccatgttttgatgatatggagatgttgcctgatgaaggatcctggagacatgcaaggactactacagcctaatgatgctatgcaagttttgttcagacaatagaaggaagaagcttccgtccaattttaatttgccttaattttacttcaagtatgcaaccgaccatgtaaagctccggtgggtaaagggtcaaagccagaaagttggcaggcctctcatctagtactacatatttctatgaagcatgaaattgatcccaaaggggtcaactaacaaacatcatgatcgagagcaaaattggctttcagatgtcagaagaaccatcccttgtattcgatcaagtgtatgatatgatatgcaaagaaatgtgggttctttgagcatctgaatctataaaacaactacactaatatctagcaaagagataaattaggcacacttgtatagctctatgcttcccctttctccctactttttaaag

SEQ ID NO: 118510 - DNA, 709 bp, Glycine max
  Clone ID: PAT_MRT3847_78022C.1
caaactcaacacgttttcaaggtaattcaattctcagaaacaaagtaacaaaatacaaattacaatggataacaagtcccttaaataagagataccttgtatcttttcactagcagataaaaaacaaccaagttcaagatggtttaagaagaataaccaatatggcaagggtgcctcccctattctggaggattatatatcaggaaccaaggctcagaaccgttcaccaagaacagtactagatggtctagagggacaatcgaacagcactgaagatgatacctttagcactagggtctcaagcaccacaaataccccatcatcggattctaagaggcgatccaagataagaaaaccacagttcccattcaggttcatagtctcattccttgcttcaccatttagaagcaaaaactttagcatatccaaaaatgaaaagcgtcagcctttgttgaagtgcttcagctatgaacagatttccaatgctaccaaagacttccaccaaggtatgttagtttttttggacaaaacttagatacattttctgaagtatctttcgggtcgtcctcccatcgctgtgaggcggtggccccaggaccttcgtggttcccttcaaggcaagcctgttcctcatggactgcgatgttgttggtcccgtccggataggagaacaacacttaaaacacttaaagagtcctaatttcttttt

SEQ ID NO: 118511 - DNA, 338 bp, Glycine max
  unsure (1)..(338): unsure at all n locations
  Clone ID: PAT_MRT3847_78023C.1
ccgggccgaccgacgcgtccganaaaaanaaaaatcaaattacggtggtgagttctgcttctgcttcatcatcatcagagaagaatggcttctactgtgtcttctgccctatcaaagcccggcgcgtgggctctctattcctaagaacacgaatccgaactccttcaacaaaacaacgacaaaccactctccgactttcccttcctttcccccgtcgttttcaatcccaataaaaaaaaagcccaaacctactccctctccgaattcaccgtcaaaccccacaccttcttttcccaccaaaatcccgtcgttcttcccaccggtccccgtcatctcac

SEQ ID NO: 118512 - DNA, 398 bp, Glycine max
  Clone ID: PAT_MRT3847_78024C.1
gagaaatcatatcaggttaagtagtgtttgtactcttaattcatatgatttcttttgctggggacttgcagttaaaaggtgatattaaccttgcctttttaatgcagccaaactgaagaaaatgctttgtctgatgttgaagttctaaggttagcagctgcagtggaatcaaattcagtacatccagttggtcaagcgattgtcaatgctgctcaggctgctaattgtcatgatgctaaggtaaaagatggaacattcctggaagaacctggatctggtgctgtggcaacaattgataacaaaaaggtttctgttgggacgttggaatggattaccaggcatggagttattaacagtatacatcaagaagtggagaagagttataaccaatcctttgg

SEQ ID NO: 118513 - DNA, 325 bp, Glycine max
  Clone ID: PAT_MRT3847_78025C.1
taccatacggctgattgtgcaccctcacttcgaatcctcctggtgaatttggactactagatgcagtcctataccaaactgcaatattttatctctggccaacctccatcagcaaatggggggggatatacatgaccagcagctagggcttgacccccctcacactatgaaaagctgtcggcatctttccgtctttaattatcgtcctgcaccacattgtgttggctctgaagtatgtcaatcgagctctattccttctacattttacatgccgtcttcctcatccctcacagctccgtactcatattcctgtggctctgatgca

SEQ ID NO: 118514 - DNA, 409 bp, Glycine max
  Clone ID: PAT_MRT3847_78026C.1
gcgacaaagttggggagcttatatccaatattgtctgtaaaatgatacttggccgcagtagggacgatagattcgacctaaaggggcttacccatgattatctgcatttgctgggattattcaatgtggcagattatgtaccttgggcaggtgtctttgatcttcagggactaaaaagacaattcaagcaaacaagtaaggcatttgaccaagtgttcgaggaaatcatcaaagaccacgagcatccttctgataacaacaaggaaaatgtgcactccaaggactttgtggacatactactgtcacttatgcaccaaccttcagaacaccatgtcattgatagaattaatatcaaggctattttgttggatatgattgctggagcctatgacacatctgctattggggt

SEQ ID NO: 118515 - DNA, 380 bp, Glycine max
  Clone ID: PAT_MRT3847_78027C.1
tgattgtcacaaaccacaatcaatatccatcttatttgctataaacatactgtagtgtgacaactaataaacgctctcagtgctactactgtatgcaccccctaattcaaacacataaatcattattcccaaacaaacgcacactatctatagtatattgcaaacatctctactcaacgaactcaaacaacaggcaatgcatactctcattaccatgaccaattcattttgttcttcagctactcagcatcaatcttgattcatcacaacttctacgcaacatattcaacattatcctgtataacattattcacgaacactactttcacatcatcatccacaagctgactacatttatgcatcccctgccaacattgaca

SEQ ID NO: 118516 - DNA, 371 bp, Glycine max
  Clone ID: PAT_MRT3847_78028C.1
ctcaagccgtacaaaatagatagtttcctttttcaatgtcccgctttcccaactgctttcttaattggcggggcaggggatatatttcttacccaactcactgatcaggtacatttgaattacctcttcataattaagagccgtatcctctttttctatgaagagttgaagatgtaaacccttaatgtatggttttgaattttttgttgtcacgtatcagcttcaaaagctaaaggttgaaccagtgctgcttcattacctttcagaaattaagatccttcagggtattatatcaaccatacaggtgcaatatttggacagggactattcgtatctcatcctgacttagctatgcattcttttgtttatgg

SEQ ID NO: 118517 - DNA, 249 bp, Glycine max
  Clone ID: PAT_MRT3847_78029C.1
ccgtatttctcttctctctcttcttcttctctaatcctcatcctttcaaaccctagacattctcgaattccgagccctttatataataatcctatgaggctctaattttcttgatgattttgaggttcgtgagttaggttttggagtttgagttggttgaagagggatagtttgtccgtggtcggtggaatttgagttccgtagtgttcttgttatctattatggttatatttgtcgtgttcgaagatc

SEQ ID NO: 118518 - DNA, 247 bp, Glycine max
  Clone ID: PAT_MRT3847_7802C.1
ctcgccggcaaagataacatgtaggttaattttaagacggttccctcaaacatttcgcaagaaattaacactaaaatataacgggtcgagaaaaatacttgaaactggattattcactttgtaccatacttcaatgcaaaatgctttcactataaaagtgatgatgaagatttggaatgttaaagccagcaaaagaggacatggtaatccagtatccgtaatttggattaacttgagctgactttgg

SEQ ID NO: 118519 - DNA, 279 bp, Glycine max
  Clone ID: PAT_MRT3847_78030C.1
tgctttttaacagcctttagaagccgctgctgaaattgatactgggggaagggttccccttccttctagagcagaaaagggagagaggtgttgtattcctgtttggtaacctcagtctcctgtaagacctcctaccacatggcgagtatacaccaatcaggagcgggtagctgcctgcataggagcctcgcttccgattattcccttcccaatattattcatccagacttagccacagtgcacaaaagcaaacctgctagagaggcagtgaacaccaca

SEQ ID NO: 118520 - DNA, 457 bp, Glycine max
  Clone ID: PAT_MRT3847_78031C.1
ggagacgtcctccactaccaactttcacagttaataactgtgtagaaagaattaggatgaaatgaaactcgttgctctacaagaatttgttgctggcattagaatgaaagcagggttttctccacgggagcatctatgtatcgagttatttacaaagcatcacctgacacggatgatggcgactgagaattggcatagttgcaagaaacaagatctttacttgggcactttcagtactgaaaaacaagctgcctaaacatacaacgtaactggcataaagctttgatgtctcaacgctggcacctactttcacatgaaccgctacgacttgaaagccctcctttcaagccacactctcccaatacgaagaggagcttcaaagcaactcaaagaatctcacgctctctaatcttcgagaaaccgcgaagagatgatttgcctatgctcatcctcattc

SEQ ID NO: 118521 - DNA, 419 bp, Glycine max
  unsure (1)..(419): unsure at all n locations
  Clone ID: PAT_MRT3847_78032C.1
aacgtattaaccgncgcccctataggccaaataaccgcaatgttttatcacaacgcacaccacacacttaaattagaacatcctgcacctatcataaaattgatcttttcaaagtaatatatacaaattttatttatgcacagacactgtcaaaaccttcaccttaacaccattccaatttctttcattccattcttttcaggtaaaacaataactcttcagaaaaaaaaataaaaaacccagcccttttaaattcttcaaatttcactttactttaccggcttttaacatataacataccttctttctcttcaccctcctgcattggtgttttcataactatgccatactagtacctctactactacacagcccattctatataagcacccactaaaaaactaatcttacaccttata

SEQ ID NO: 118522 - DNA, 387 bp, Glycine max
  unsure (1)..(387): unsure at all n locations
  Clone ID: PAT_MRT3847_78033C.1
atccgatccatcaaagcatttcataatgaacaaagatctatgccactagaccaccacctcttcttagaagaaattaaaatggcacatcggtgcccaaaacccctcttagacacccggtactgcttaaaagaccatattcattgggaggaagaacaagtagaagatgatgagtacagtagtagcacaaccacaacaatcacaaacacaaacacagacacctnctctgtggtctttttagaacacgacctcttctgggaccgcgaggagctatcttctcttctcgccaaagaacaccaaaaccaactctcgaatactctccaaaaaaacctcgttttagcctcatctcgacaagaagcagtggagtggattctgaaagtgaatgcccat

SEQ ID NO: 118523 - DNA, 520 bp, Glycine max
  Clone ID: PAT_MRT3847_78034C.1
aacccagtcaaatacgttagttcttgaggcaaaaccaaacatatatttaattgagagcttacacaaactaacccgcataacccatcagaaccaatacagaaagaagtaatcagattgacctcgaaattttacagatcaactaaatgtattgtcattcttatttaagaaaaaccattttaatttggaatgtcatttttagctttatgaatagagtataaacaattttataaaatcatccaatcacaaattatggtttgaaatactttttaagataattattttaaaaattaacaaatttatcatacatgattgattatcatataaaaccttttatgctgtcaatttataacattttttttttatcttatgtatgaatagccctcattttcaaataaagagtgtattcggattggcctaccatgccgaagattacagccaacctaacaaaatataagctcatttagattttagaatgtaagctccggctaactgactcattcttatctgtggaactagagac

SEQ ID NO: 118524 - DNA, 373 bp, Glycine max
  unsure (1)..(373): unsure at all n locations
  Clone ID: PAT_MRT3847_78035C.1
cagcggcgaagcaatgtttttagaattttattttcgcaccnccgaacccaacagggaaggcaccaccgaaagactgaggccaaacaaaatctttatcaagaaccaacttgtatgaactactgcacacacccaatgtcggatcatcacttattgaaaagcgtcgaaaaagactggcttatgacgcagcaagcggaatgaattatcttcatcaaatgtgacctactttcgaaatacttcaaatcgcccaggatcaaaaccctgcactataagaatcttcacagcaacatcataacctctccagtgcgcacgaatgacggctccaaatgaccctgaaccaatgatctgcttcaaaataagttcatccatggaatat

SEQ ID NO: 118525 - DNA, 363 bp, Glycine max
  unsure (1)..(363): unsure at all n locations
  Clone ID: PAT_MRT3847_78036C.1
tggcttcttctattatactagantttaaganagaacgaagctcgaattctctcagcaaccacggaatacaatactanctaattttacgcaaatatctccggcgacgagagcactttaagcaggtatattatactctccccttacacgggttgatgtggatgttgaggattaccttcatgtccttatgaacataggaggttttcttacaacaatggaatgcgtaggaagcagtgattggttactttcgacacctacttttgaaaaaaggaaaagagtgattttgttgaaggccgcatcattgtttcagggagcctctaaaggaccattgatagatttggctatttaaataaaaacaagccttat

SEQ ID NO: 118526 - DNA, 536 bp, Glycine max
  unsure (1)..(536): unsure at all n locations
  Clone ID: PAT_MRT3847_78037C.1
caataacagaatttggaaactagtacttcactgatgtagctcaggaattcgagagcagctgtctccacagtgtaggatcaggtgggtattgagggaattgctgattgtatgtctgaataccctttatagacttgggcaatgctatttatacatcatcctatatctaagtatccaactattctgttaggcattacaactatcaaactaacaacttttactgtcagcaaactctcaactaactaccaaaaatggggaagttcctgaaattttactaaaaaagtacaaggatgactactttcgaatttgggactaggaataactctatcatgaggcgagattgcacaagcctctataagctctattttatcaatgtctataatcgacgtgggatcccaacaactactatatctactctttgtatcaaaaccctggcaacatccttgggaaaatagctcctttcttcnccttggatacacacctcaagcaaatgagtttatagagnttgnnggaacatatgaaaacatcttatcatattt

SEQ ID NO: 118527 - DNA, 205 bp, Glycine max
  Clone ID: PAT_MRT3847_78038C.1
ctcgagccgtggaaaactgcatcttccactaccatcaccacacactcctcactctcccttcaatttctcacaaaccccacttcagattcttcacaagacctgatcttggtggtggtggtggtggtgttctgttgctcctcctcctcctcctggttggtaatcccataggcgatgaccctttatcggacaagttgtggaaccaccc

SEQ ID NO: 118528 - DNA, 240 bp, Glycine max
  Clone ID: PAT_MRT3847_78039C.1
acgaaaccgcgtgcaacctcctttgagagacacctatagatcatctttttcttgcggaatttttttggagagaaaaacacatgctgagcagatgaggacttgttattatttctgtttagattacacaacttttgaccaaacaattttacgagacaatacaaattccttgattgcttggttaaaaaaaaaaaaaaaaaaaaaaaaaaaaaaaaaaaaaaaaaaaaaaaaaaaaaaaaaaaa

SEQ ID NO: 118529 - DNA, 278 bp, Glycine max
  Clone ID: PAT_MRT3847_7803C.1
atgcttagaagtctacctgttcacttggaaatagaatgaaaataggtatggatttttaaatttttcagtaagtttcttaaatacatggtgtgaagtactatttgcatggcataaacaggtttttaaaagatcaagccttactcatttgtcttatcattagatacttaaagaccaaatgcaaaactgactgaatttgtcctgaggcaaacagtaaaggcatttcaggtgttgaccgcagactccagcagctgacaggtttcttcttgcacttggggttg

SEQ ID NO: 118530 - DNA, 355 bp, Glycine max
  Clone ID: PAT_MRT3847_78040C.1
accactcctacaagccgacagaagaagacgccaccccaatcttcactcatcctctcacttggggccggtaccatgcgacggtgtcatctcactacttgctctcactacccgctgagccctctcccaactccctgacaaaccttcccaacccaaactcataaatcaaacccatcgctgccgccgtcatttcctcacactgtttcaacatactttcgtatcttctccccaaacactcgctataatcacatgtttcttatgaacttgtcacaaagatcaggctcaaccctaaggacctgccgtaacatcctcgagtgattcattcacgcaattcaagcatgcgcttcatgctattact

SEQ ID NO: 118531 - DNA, 483 bp, Glycine max
  Clone ID: PAT_MRT3847_78041C.1
ccacgcgtccggttcttcctatgcaccaggcgattcaaggtttacccgtctattgaaggaatgtgatgagtgcattgctgaggaatctagccaggcaccagcaaagaatgtcgaggctcctgtagctgctactgttgaggacaaggaggatgtcgcaaatatggataatacaccgccagtggtagaacccccaagcaaacctaaatatacgcatgactactacaacagtgccacagaagtggtcctcacaatatatgctaagggtgttcctgctgatagtgtagtcattgattgtggtgatcagatgttgagtgtatccattgaagtacctggtgaagaaccgtaccatttttagccccgtctgttatctaagattatccctgagaaatgcaagtatcacgttctatccaccaaggtcgaaatacgccttgcaaaagctgagcaggtgacatggacaactcttgattatagcggaagaccaaa

SEQ ID NO: 118532 - DNA, 952 bp, Glycine max
  Clone ID: PAT_MRT3847_78042C.1
ttaagacacaagaagctggattctcccacagtgttgtgtactccaaatcgaaagaactgtgcagttggattatgtacgtggacgttgacgagttcgtgttttctccctcatggggacatgaaactgaaaatagtgttgttgttccttcgttgaaaaagttattggcgagggaaataataaagggggggactagggtgggacaagtttcgatgaggtgcatggaattcgggccttcggggcaacggcggcacccggaggaaggagtgacgcaggggtacacgtgtcgtaggaggggggaacagaggcacaagtcaatggtgttggtggaggcggtggaccccagtttgaggaacgtgatacatcattttcaagtgaatgaaaggaaagggttcatgtcgaagcaggtgagtgtggaggaagggttggtgaatcactacaagtaccaggcgtgggatgagttcaagagtaagttccgaaggagggtgtctgcgtatgttgtggattggaagcaggaaattaaccctaattctaaggataggactcctggcttgggcttccaagcaatagaacccaaggattggacccataggtttctgtgaggttagagaccataggttgaaatccttgacccgtgcttggtttcgctccgtcacgtccaacgggtacagaatggcttggcaaacaaattgatttttttgtgttacagtttaccataggttgtgttttttgtgtgtgtggggggggacagattatatttttctcggtcaccaccaccaccaccacttctatccgtttttaagcaaattaaacgttacattcacataggaaaggaaattaacaagtgggtcgggtggatttttgcatgccattaattttcattgtattctgtttttttctattccctgtttattcttttttcggcgtggaataggagttattatttgtatcaaaa

SEQ ID NO: 118533 - DNA, 2142 bp, Glycine max
  Clone ID: PAT_MRT3847_78043C.1
aaaactaaagggaaaaacccaaaaaaagggggccttgggacccgccaaaaagaggggcaaaaggggggggaaacaccccaaccccccggttttaaggcccccccaagggggggggccattttgcccttaggcggggcccccttttggaaagagggttcgtttgggggttttttttttttcccccctcgggaaaaaggggtttttttaagagcgattttttttgggttccccccgggtttttcccctccccaagttttatacgccgccccccgatttttttttgggggcccacaaattaaaaattttcggtggtgttaaacgggggttaagtttgttttttttaagggggccccccctttttttttttttttttttttttttttttttttttttttttttttttttttttttcttttttttttttttttttttttttttttttttttttttttttttttttttttttttttttttttttttttttttttttttttttttttttttttttttttttttaccattaacaatactgtggaaaattttatcattaatgcaaatcataaaaaaacatccgataaagttctatgttggctatataaatgacaaacataggtcggagtaactaagtctatataaccaacataaagaaatgtgacaaaaaatacttgagcagagcaactgaagatgcccgcatagataaagacctgcccatccaccaaatctctgtatatgcgactcacttcttggatttcttcgatgcttgaggaggctgggatgctgttgcaggtgtagcagtttgtgctgctggtggcctctctcctggaccttgggccaagcgctcctccctacgagcatttttcctctccctgctagccttgttcttggcacgcttagcctcaaactggtcagacaaggtcttttctcttgccttctcagccttggacttgtgtatgctctccatcaagactctcttgttcttgaaaacattacctttcaccttcatgtacatatcgtggtacatgtgcttgtcaatcttctttgattccctgtacttgcgaagcaagcgcctgaggacacgcatcctcctcatccaaaggattttggtgggaagccttgcctcccttgtacccttacgcttaccatagccagagtgacgtcccttcctcttggcctccttcattcgacgagcacgagagcgagagtgaatcttagttggcttcctgataataaacccatccttaaccaactttcttatgttttgtcgagaattggccatggagatttcattgacttcatttggatcgagccagaccttgcctctgccacactttaggacgctagcggcgagccgcttctgaagcttcaaggacaccatcttcttcttcttgttcccctttgcgccgtgtgcaactgctacctacggcgttttttttttttttttttagtagcaataagcatgataataataataagtctaacattaaagttgcatgaaaagagaaatacatgatgcataaggtagttcatgttactggtatgctccggtacagcggagcatgcagtgcagtttgaagctgaggagtaattaaacagctagttggaggaaggaaaccaaggacacacctgagaggctgacacagtgtttatttaatttagtattataatatgatgtcctccaatggttgttaaggaagggtgtgaggcttctcgaaatcctcgagactggtggggcgaaaccaggccttctcctccagcgcatcagagtgaatggcagaagcagtttggtcacctcctccggggggcccaaataccccagtctgtggatgtggggcccagtatttgccggattgtgttgccgcctggatcacatcgtctgggacctgcccagactggatctcatcatcagggttcttgtcgtacactgagccgctactgtatgctcccctccttgaagtgagaggaggtgcgttggaagtccagatccggttggcgactcgcttccctaaggcggtgatccctcggctactggaattggcggccatacaataagagagagagagagagtagtgtatgtgttagaagttgtttggtttgtgatgtgtccccttctgtcgtcttctcgcagccgtacggacgcgtggg

SEQ ID NO: 118534 - DNA, 1003 bp, Glycine max
  Clone ID: PAT_MRT3847_78044C.1
tttttgacaaataaatcttatttttccattgataataccatggaaaatttcatcagtaatgcatatcataaaaaaaatatccgataaattctatgttagctatataaatgacaaacataggcagagtaactaaaagactaaaaccaacagaaagagacgtgacaaaaattacttgagcacggtaactgaagatgcccacatagataaagagccgccatccaccaaatctctgatcacacactcacttcttggatttcttcagtgcttgagctggctgggatgctgttgcaggtgtagtagtttgtgctgctgatggcctctctcctggaccttgggccaagcgctcctccctccgagcatttttcctctccctgctagccttgttcttggcacgcttcgcctcaaactggtcagacaatgtcttttctcttgccttctcagccttggacttgtgtatgctctccatcaagactctcttgttcttgaaaacattacctttcaccttcatgtacatgtcatggtacatgtgcttgtcaatcttctttgattccctgtacttgcgaagcaagcgcctgaggacacgcatcctcctcatccaaaggattttggtgggaagccttgcctcccttgtacccttacgcttaccataaccagagtgacgcccctttctcttggcctccttcattcgacgagcacgggagcgagagtgaatcttagtcggcttcctgataataaacccatccttaaccaacttccttatgttttgtcctaaaaaaaggcacaaggaacagagcacgtatcaaacataacttaacaacagtatcaaatcaaaattataagaaagcaaaacaaggagagaaagagagagtacgagaattggccatggagatttcattgacttcatttggatcaagccagaccttgcccttgccgcactttaggacgctagcggcgaggcgcttctgaagcttcaaggacaccatctcttcttcccggacgcgtg

SEQ ID NO: 118535 - DNA, 2067 bp, Glycine max
  Clone ID: PAT_MRT3847_78045C.1
ggctcgagcggctcgaggtttatctggagctattcctcctgagatcagcaacatggctagtctccaagtgttgcagttgggagataaccagttggtggggaatatacctacacagatgggttccttaaagcagcttagtactcttgctttgcaatataacaagttaactggtcaaattcctcttagcttggggaacttggagaagctaagcaggcttaatttgagcttcaacaactttagtggtactgttccagcaacactagcatatattgaacatttggaagttctagatattcagaacaattctttgtcgggaattgttccttcggcattgaagagacttggggaaggattccaaggtgcaaacaacccgggtttgtgtggagttgggttttctactttgagagcctgcaacaaagatcaagatttaaatgttaaccatattgatacctcagacggagaccaacccaaaaatagtaattcttcaaaggcgctcccggagcctgcttatgttcagttacattgtggccagacccattgttcgaaatcaagaaggtttcctcaaactgtcatcacagcaggtgttgtaatcgttactcttacattcatatgtgctggatttttgacattcttcagataccgccgtcaaaagcagaggattagtaatacattaagttcttcttcagaaggaaaagttagtcttgaccagcctaaagagttctacacaaaaagtccatctgcacttgttaatattgactattatagtggatgggatcaattgtctaatggtcaaaatgctgatgctggtggactatccaatgagtatctaaatcagttcaggtttaatgtggatgaggttgaatctgcaacacattacttctcggaagccaatttacttaataggagcaaattcgcagcaggttataaaggagttctcagagatggttctcttgtggctattagaagcattagtgtgacatgctgcaaaacagaggaagctgaatttgtaaagggcttgaacttattaacctctctgagacatgaaaaccttgttaggctgagaggtttttgttgctcaaggagtagaggtgaatgtttccttatctatgactttgccaccatgggtaacctgtctcaatatctcgacatagaagatggaagtagccatgtgctcgagtggtccaaaagagtctctatcatcaagggcattgcaaacggcattggatatcttcatagcaatgaagaaagcaaacctacaatagttcaccagaatatttcagtggaaaatgttctcctagattatcagtttaacccattgatcagggatgctggactacctatgcttcttgcagatgatgttgttttctcagctctaaaagttagtgccgcaatgggatacttagctcctgaatacatcactacaggccgctttactgagaaaagtgacatatacgcatttggagtaatcattcttcaagttctatctggcaagaccacaataggtagttcaatacggacagcagttgagtctttcagatttgatgattctgttgacacaaatctcaagggaatatattctaaatctgaagcagcaacactttcaaagcttgcaatacagtgcactcatgagcttccagaccaaagaccaaccatggtggatgtgattcaggagctgagtgtgtcatctgctcatatataatcatctactactttctattggtattaggagacgcttaaacatttcctttagctgggtttcatacatgttattatttccatgagcatatacttagctaaaaaaaactagccattgcccaataattgtggatctaaacggactcgtgtcctgtttttacgaacaactgggatagttgaaggatgttctttattcggtttattgtaaaataaagggcttcctgaggtaatgatctcagcacaactctcgtggtttattgttgttcagcttgaaacactttcttcttggtactgcaagaaacttagtttacagtgagctatgtctattatagtgtacaattgaaaaatatataaacataattggttatgtct

SEQ ID NO: 118536 - DNA, 1382 bp, Glycine max
  Clone ID: PAT_MRT3847_78046C.1
tactataagggattcacacaaacggaacaagatagatatatagaagagtcttccatatatagcctcccaaaaaaatgaagagtactacctctttggctctctttctactttgtgccctaacttcatcatatcagccttcagccaccgctgatattgtattcgacaccgaaggcaatcctattcgaaacggcggcacatactatgtgttgccagttataagaggataaggcggcggaataaaatttgccaaaaccgaaacctatactcccccctcgctggccgagcgtcggcctttcagccctcagccgccgctgatattgtattcgacaccgaaggcaatcctattcgaaacggcggcacatactatgtgttgccagttataagaggaaagggcggcggaatattacggctggagaagacgacagaaggggattcacacaaacggaacaagatagatatatagaagagccttccatatatagcctcccaaaaaaatgaagagtactacctctttggctctctttctactttgtgccctaacttcatcatatcagccttcagccaccgctgatattgtattcgacaccgaaggcaatcctattcgaaacggcggcacatactatgtgttgccagttataagaggaaagggcggcggaatagaatttgccaaaaccgaaacagaaacatgccctctcactgttgtgcaatctccctttgaggtctcaaagggtctaccactgataatttcatccccatttaaaatccttgacatcaccgaaggacttattttgagcctcagtttcacttatgtacccccctgtgcctcaactccttctcggtggaccgttattctcaagggtctgccagaagaactccatgtcaaactcactggctacaaaaacacaatagatggttggtttaggattcaaagagcttcctctgaatccaactactataagttggtgttttgtacatctaatgatgatagttcgtgtggggatattgtggctcccatcgatcgtgaaggaaacaggcctttgattgtgactcatgatcagaatcatccattgttggttcagtttcagaaagttgaagcttatgaatcatcaactgcatgagttggccttgaaaaatcatgcacgtgctttccggaattattccgatactttggttacttgtaagaccgaataaataatgctttggttgtaataaattattattattattatcattattattccaacgctaaataaattaaataaggatatataatgctttatttttatataaaaagatagtgcgcctttaattacgaattacctgttacatcaaatgtgtatatgtaatgcatattctactcgcacgatttctgtgattgtcaa

SEQ ID NO: 118537 - DNA, 1060 bp, Glycine max
  Clone ID: PAT_MRT3847_78047C.1
gacatcacaaaccaaacaacttctaacacatacactactctctctctctcttattgtatggccgccaattccagtagccgagggatcaccgccttagggaagcgagtcgccaaccggatctggacttccaacgcacctcctctcacttcaaggaggggagcatacagtagcggctcagtgtacgacaagaaccctgatgatgagatccagtctgggcaggtcccagacgatgtgatccaggcggcaacacaatccggcaaatactgggccccacatccacagactggggtatttgggccccccggaggaggtgaccaaactgcttctgccattcactctgatgcgctggaggagaaggcctggtttcgccccaccagtctcgaggatttcgagaagcctcacacccttccttaacaaccattggaggacatcatattataatactaaattaaataaacactgtgtcagcctctcaggtgtgtccttggtttccttcctccaactagctgtttaattactcctcagcttcaaactgcactgcatgctccgctgtaccggagcataccagtaacatgaactaccttatgcatcatgtatttctcttttcatgcaactttaatgttagacttattattattaaaaaaaaaaaaaaaaaactcgagaccggctgcggaggctgcaagatgtacccagacttgagctacactgagtcaaccaccaccgagaccttggtcatgggagtggcacctgttaaggctcaattcgagggtgctgaaatgggtgtgcccgctgagaacgatggctgcaaatgtggaccaaactgctcctgcaacccctgcacttgcaactgaggtgttgggagatcaagcttcaagcacacatagcccttaattaggaataatgatatactactaatgtgtatctaaaaacttatgtattatgtctgtgattgttttcgtgcactctggtgttttgtgttaaacaaacatccttacaatacaatggtcatgtcttacctttcagccagttcaactatattggacttgatattggtgtctta

SEQ ID NO: 118538 - DNA, 1096 bp, Glycine max
  Clone ID: PAT_MRT3847_78048C.1
tgttgtgactcgttcttcttcgtcgttggttctagtgtgtgattttgtttgttgttgtaactcgttcttcttcttttgttgttctgtgtttgtgtttgttttttctctcacctgaaaatgtcttgctgcggtggtaactgtggttgcggaagctcctgcaagtgcggcaacggctgcggagggtaagattttcgttgtaacattgtttttttcttgggaaaatagagtttttccgggaaaattttctttttggatttttaattggtattatggttacccttttggttcaattgcatgaaaaaactatgctttgtttattttcttgcatgggggggagattctgatcacccgaacctttgttttgcttttacagaacatgtcgattttgttttcttttcatgggatggttttctggggtgttatatgcttggctttttgggtaccctttttggtgaattttataagaaaaagataacgttttttgttttttttttctcttacagggttttacacgagtttaaattctgttcactttgaggatctgttttacttgtgtaaagatggccatgtttcgattttgatttggttttagggtaccctttttgttaaactgtgcttcttagaagctcgctgaggtttttattttcaggggaaaatgtttctgagagatgaattcacttggtcatgtttggatataatcatataaaaaattgttcacttttaagaagagagagacacaattttcacatgagatgttcatgtgaaaatttatcataagaagcttctataccttttgtgtttgtgttatgtaaattttcactaaaacgtgttttctttttctacttgttctgcagctgcaagatgtacccagacttgagctacactgagtcaaccaccaccgagaccttggtcatgggagtggcacctgttaaggctcaattcgagggtgctgaaatgggtgtgcccgctgagaacgatggctgcaaatgtggacccaactgctcctgcaacccctgcacttgcaactgaggtgttgggagatcaagcttcaagcagaaatagcccttaattacgaataatgataaactattaatgt

SEQ ID NO: 118539 - DNA, 307 bp, Glycine max
  Clone ID: PAT_MRT3847_78049C.1
ggctcgagcgcagatactgcttacttcaaaaatattgcttaacccacccaacgatctctgtctattggatgcattgaacctaagccttttactactaatttctttcctgtctataactacaacccatcatccggtgacaagccgccgggataataattgttcaaccctcacatggatggcgcaaccaaaccatttacaacatccgagaaggggagggatttagctgacatctctaccccatggaacttttacttttcaaagacagtgctattcccacgacgggactctttctccacctagaaggatc

SEQ ID NO: 118540 - DNA, 319 bp, Glycine max
  unsure (1)..(319): unsure at all n locations
  Clone ID: PAT_MRT3847_7804C.1
nnnnnnnnnnnnnnnnnnnnnnnnnnnnnnnnnnnnnnnnnnnnnnattgaaataattccattgttttaaaaaaaaacttataacattcattttaatagttcatttaaggtactcgaatgcataatttttcaaggtgaatggactgctgagtggaaggttgaaggggctaccaaaaaggattatcaaagatttgtcaaggctgaattagatgtttttgggcgagcaacatttgggtggtgttattggacactcaagaacgtcaataatcattggagtttggaatggatgatcaagaatggctacatttaagttttaaaa

SEQ ID NO: 118541 - DNA, 516 bp, Glycine max
  Clone ID: PAT_MRT3847_78050C.1
ggctcgagcatcattgtcccaactctctcttataagttctaatacacatttaatttcctaaggtgcttcctttccctctaaggtttaattattcgttttggacctaccaacaaacaaacagtgaagcctttgtttttattaccttacttacacctctctatggtctagaccaaataaaaataaatgtctggaagtgcagatctgcagctacaagtgtgcttaagctgacactctccgagtggagaacattcacaagtgagtgaggctaatggatcttgaatccagcaagtgttgggacacatcaaaggactcttggaagacaattctgctcttgtgctaccaaagccttggtgtggaatatggggacttgagcattttttcattgtatgtttacaccagcacatttgttgaagatattgaacattctaagaccaagaagagattttggggccctttctttgttttttgactctgacactggcgccgtcttcagtaccttttgtggtctttagctga

SEQ ID NO: 118542 - DNA, 647 bp, Glycine max
  Clone ID: PAT_MRT3847_78051C.1
ttgtttgttgttgtaactcgttcttcttcttttgttgttctgtgtttgtgtttgttttttctctcacctgaaaatgtcttgctgcggtggtaacctgtggttgcggaagctcctgcaagtgcggcaaccggctgcggaggctgcaagatgtacccagacttgagctacactgagtcaaccaccaccgagaccttggtcatgggagtggcacctgttaaggctcaattcgagggtgctgaaatggggtgtgcccgctgagaacgatggctgcaaatgtggaccaaactgctcctgcaacccctgcacttgcaagtgaggtgttgggagagcaagctttcaagccagagatagcccttaattagggaataatgattaactattaatgtgtagctaaaaacttatgtattatgtctgtgaagggtttcgtgcactctggtgttttgtgttaaaccaacatccttagaataaaatggtcatgtcttgcccttcagcaaagtcaagtgttttggacttgtgatgggtgtgttaagctcatggttgcttcttttttttttttttttaatgtttggtaattggtcgcttctgtataaagttcggctaatctgaattatgaatctctgcctataatatttaatactattactggg

SEQ ID NO: 118543 - DNA, 186 bp, Glycine max
  Clone ID: PAT_MRT3847_78052C.1
tcagacaggtgtcagacggctgaaggggttcgacagaagggggaacttttcacgtttattcggacacatgcctagctctgtagatcaaaggttgacgttctagatttccagctaattatgcttatgtacgtttattttttatgtgtacataattaataatggtcttttaacacttgtactggaaac

SEQ ID NO: 118544 - DNA, 854 bp, Glycine max
  Clone ID: PAT_MRT3847_78053C.1
ggcagtggtgattcccagttcgattgtggaatattgactctggagcacttctagagagaagaaggccttgagggcattcctgagcctgaatgaaggcaaggccggctcgagattgtttgttgttgtaactcgttcttcttcttttgttgttctgtgtttgtgtttgttttttctctcacctgaaaatgtcttgctgcggtggtaactgtggttgcggaagctcctgcaagtgcggcaacggctgcggaggctgcaagatgtacccagacttgagctacactgagtcaaccaccaccgagaccttggtcatgggagtggcacctgttaaggctcaatttgagggtgctgaaatgggtgtgcccgctgagaacgatggctgcaaatgtggaccaaactgctcctgcaacccctgcacttgcaagtgaggtgttgggagagcaaagcttcaagcagagatagcccttaattaggaataatgataaactattaatgtgtagctaaaaacttatgtattatgtctgtgatggttttcgtgcactctggtgttttgtgttaaacaaacatccttagaataaagtggtcatgtcttgcctttcagcaagttcaagtgttttggacttgtgatgggtgtgttaagctcatggttgcctttttttttttttttttaatgtttggtaattggtcgcttctgtataaagttcggctaaatctgaattatgaatctctgcttataatattaaatactattactggctggaaaaaaaaaaaaaaaaaaaaaaaaaaaaaaaagccccccctatagaatatacaaaaaaaataaaattggtgcgccggacctcagcgaccagcttccc

SEQ ID NO: 118545 - DNA, 782 bp, Glycine max
  Clone ID: PAT_MRT3847_78054C.1
ggtaccgccctgcaggtacccggtcccggactcttcccgggtcgaccctacgcgttccgatctgtttgtgaactcgttctctcctcgtcgttatcttcttcttttgttgtttgtgtgtttgttttttctctcacctgaaaatgtcttgctgcggtggtaactgtggttgcggaagcgcctgcaagtgcggcaacggctgcggaggctgcaagatgtacccagacttgagctacaccgagtcaaccaccaccgagaccttggtcatgggagtggcaccagttaaggctcaattcgagagtgctgaaatgggtgttcccgctgagaacgatggctgcaaatgtggagctaactgcacctgcaacccctgcacttgcaagtgaggtgttggagagctaaagcttcaagcagagatggcccttagaaataatgataaaaactatatgtagtttcaaaacttcaaaattatgtagtatgtattatgttgcactctggtgttttgtgtctaaacaaacacccttagaataaagtggtcatttcttgcccttgagcaagttcaagtgttttggacttgtgatgggtgtgttaaggtcatggttgccttttttttatatatatatatatatataaatgtttggtaattggtcgcttctgtataaagttcggctagttaatctgaattatgaatctctgcttataatattaaactagtactattgctggaataaagtgtctagtttttctgtttgttataaaaaaaaaaaaaaaaaaaaaaatcccaacac

SEQ ID NO: 118546 - DNA, 256 bp, Glycine max
  Clone ID: PAT_MRT3847_78055C.1
gaaaaaacggggaaaaaaaggtctcattggacaaaaattggatgcccacttttacaacttggacacccttacaaaagaacaaatcaggtgggaggaaacttccctttttaaaatttgcaccccccctaagattaaccctgaaaaccccaattaaatttcctaaagcaagagggtttaacttaagaaccaaagggtgccactttgggcccatgaacaggaaacccgggaatctcaaccctccttggatgggagaacc

SEQ ID NO: 118547 - DNA, 327 bp, Glycine max
  unsure (1)..(327): unsure at all n locations
  Clone ID: PAT_MRT3847_78056C.1
aaagagataaagcctcaagtgtatcaatcacagaacaccaaccaaatcctcttgtttctgcagaggccatcccttcacagtattaggagtagtattccactatggttggggaacaaagtgcagaggcaaaaaaaacttaaccacctcgttctggtttnctcgcaacgttgaaactaattctactacttcttcaacaacaacaacaacaacaacaacagatactcatacagatgagagtagagtgaaggttaaggccatagttaaggtgaaagtaactgcgggtnggtttcttttcaagtctgaggttagacagaggaatcgatgatt

SEQ ID NO: 118548 - DNA, 382 bp, Glycine max
  Clone ID: PAT_MRT3847_78057C.1
agttatgaggcctccacaacttcttcccgatggcatgaaaaaaactgtgtttgccaattttacggatctatgcaatacgatgcttcggctgccagaccgtgtcatggccttctcgcttgctgaattgggttctagtggctcccttgatggacagcatacattggctgtaaagggagggtatgcaccaaaaaacttcgaaggaattgtgcgacaatgtgtcaatgaatctgttattagccttgggtgcaacagtccagatactatacttgcaaaggataatcggctcttctttctccggtgtgagaagtgtggatcaggaagatcaactgctccaatcaacgctggtttcgttgctcgtgttggccgaaggaacacagggaca

SEQ ID NO: 118549 - DNA, 2153 bp, Glycine max
  Clone ID: PAT_MRT3847_78058C.1
ctggcccgaatagaaaacatattacacgttaaaaagatgataaagttacctagcgatgaacttatatattcagtgttactaattctcattaaaataagacaaagcaaacgttgcagagatgacagaaattccttttgtgctgcgcctccacatattgttaattcttctccttatcaaaagtggcagcagcaacaatgagtgtggggaatggtcttgcggctctggccaaccacctatcagatttcccttcaaactcatcaagggaattaaagatgaatgtggttatccggggttttgtctatattgtactcaaaaacatgagactatgcttgctctctcctccgtaaaactccaagtcagttacataaactacgaaaatcatgaaattgtgttgaatgacccggaaaattgccttccgcacaagtttctgcaaatcaacgattctcttattcatccttacaaatttgacgatgaagctaaaacaagtaagttgagcttcttcaactgttcttcagttgagcatcaacacctgagaaactaccagcagtcactgtcagactcacaagacatgatctcctgtccgatttatgtttctgatcttgatgacagtgtgctcagtttggacctaacatcctgtaccaaaatgttcgatatcgttacgccagtttcggcatacgggatgcagcgaaattcgttggatttaagatggtccgaagcaaattgtagtcagtgcaaagcaaaaggcaagaaatgtaaatggaagaacaacagaggtgacatcgaatgtttcgactgcaaggacaagcgaaaaactattcatgttcccaaatcttttatttactctgcaccaggttcgattcttttggggttcgtggttattgtcgtttttaagatcatataccattttagacagaaacaagaggaccaagcaagggtggagaagttcttagaggaatacagggcagaaaagcctgcaagatttacttatgctgatgtgaaaagaatcactggtggttttaaagagaagctaggggaaggagctcatggggctgtattcagaggaaaactttcaaatgagattctggtggctgtgaaaatcctcaataatacagagggagaagggaaagagttcatcaatgaagtggaaattatgggcaaaatccaccacatcaatgtggttcgtttgcttggctattgtgctgaaggaatccatcgtgctctggtctacaatttctttccaaatggttcacttcaaagcttcatatttccaccagatgacaagcagaatttccttggctgggagaagctgcagaacattgctcttggtatagctaaagggattgggtatcttcaccaaggttgtaaccatcccattattcactttgacatcaatcctcacaatgtgttacttgatgacaacttcactccaaaaatttctgattttggcttagcaaaattgtgttccaagaatcctagtttggtgtccatgacagctgctaggggaaccttgggatacattgcacctgaagttttctccagaaactttgggaatgtgtcttataagtctgatatttatagttacggaatgttgttgttagaaatggttggaggaaggaagaatgtagacacgtcttctccagaagatttccatgtgttgtacccagattggatgcatgacctagttcatggagatgtacatatccatgttgaggatgaaggtgatgttaaaattgcaagaaaactagcaattgttggactttggtgcattcagtggcagccattgaaccggccatccataaaatctgtcatacaaatgttggaaagtaaagaggaagacctattaactgttcctcctaatccatttcactcatccacttccactattcctagtggattcacttcggcaagactacctttggaattggaagtaattcaagaatgagaaattagcttattgatttatttacaacgggagatgatcagtgtttacacatattttgttttctcctcaaggaaatattgttgtgtttgaatcaaatgtatgaaaataaagtaaattattattataattaatcaattattcttttatatatatataaaaaaaaaaaaaaaaaaaaataaatatataaataaaagatgtttaatatttgaaa

SEQ ID NO: 118550 - DNA, 108 bp, Glycine max
  Clone ID: PAT_MRT3847_78059C.1
acgagacatttcaagtgggttttaggattatgggtgtcgccctgtctggtctgcaaatagataaactggatctgaagactgtaccataccgattttacaaaggttttc

SEQ ID NO: 118551 - DNA, 507 bp, Glycine max
  Clone ID: PAT_MRT3847_7805C.1
gttttggttgaaacactcaatattcaaaatttttattgaacgaaaaaatgcgtatggagaaaagatcatgcctattaaacgatgtattagagatggaaaattatgattgatttcaactacagacccgtgtttttagagagctaaacatgaaatagagcagaacacattctacttggggaagatttgagctggttggagctcctaaagctccggatccacaaccaatgccgggccttccgccaggacccccaaaagagggcactgtacctagaacgagcttctcccttggctcctgcaaagtcaccacaaggtgctactcggggacctacgcggtatgcatgacgatcaccaccaaagctatactggtcttcaaagcttggagggcctgtagggggatcaccgggtgggcctccaataggcctgacgggcgggttggcttgcttcttcagagtttcaaggacacttggggagggaaggttgaggctacttgtgataaactggatgccc

SEQ ID NO: 118552 - DNA, 163 bp, Glycine max
  Clone ID: PAT_MRT3847_78060C.1
caagcttagaatggaactgagtcacttaagtaacactaaccacaaatcatcggcagggctccgttaatttagagtttgcctactcgagccccatacctgaatggttttaaaatgccatgaaacatccaccggagatgttaaattaaatacaacagcaataata

SEQ ID NO: 118553 - DNA, 314 bp, Glycine max
  Clone ID: PAT_MRT3847_78061C.1
attaaaaaaaacaaggggtggggtttttaatcttcaacagagtcatcaatacatggtttttccgcatcaaaaatataaatgttcatattattccttttatcaagagcccccgcacacacaaagcacaagtgagtggtgtaaaaaatgtccaacaattaacaatttgttcctcacaaaaaacccacaaaaacacattttagcatgtttgccttgcttttaagcccactggtttttacccgaatacatccggtcctttatgccattatttgcgaccatagggcttttggcccctttattgggaacttgtgacaaaa

SEQ ID NO: 118554 - DNA, 138 bp, Glycine max
  Clone ID: PAT_MRT3847_78062C.1
aaaatcaaagccccagcttttcttcctttttatgggatgaactattagttcccccacaaaaaaggaagaactatcattgttgatgaatctagacatctagttgggatgagatctacatatagctgattctggaactag

SEQ ID NO: 118555 - DNA, 519 bp, Glycine max
  Clone ID: PAT_MRT3847_78063C.1
aggttgacaaagaaagataagaataagccattgatcgaacgcatctcaagacaggttgataacatcaactggttgttggaaatcatgcttgatgggcaaatagcagaggactttgtgaacatatggacggatcagcaccaacttatcaaaatgcatgaaaatgcatcccctatggttagatatgaactaagtcgcgtgtcagcgattctctttgttgccatggctaccagaaaattgcaatgtcggttggaagctcgatcggggcttcttcaggcatggttccggcctatgcttttgaacttgggttggcttcaaagatgtagaaaagggcttgatataaaggtcttgcaagaggctatgggtcaaacactttttactctacctctaaatcaacaatatatgctcttcatggaatggtttaggtatttctcaagccatggtactgaatgtccgaatctaagcaaggcattccaaatttggtggcgcagatctttcttaagaggctctgaaactgatgcc

SEQ ID NO: 118556 - DNA, 286 bp, Glycine max
  unsure (1)..(286): unsure at all n locations
  Clone ID: PAT_MRT3847_78064C.1
agntagangctcgaatcggncnannggattgaagacgtgaggtttccngcnanctgatgacatnttcngacagatgtgcaagcctgagtnctatatgtgcattactcatagatcagaantgatggtntctgtgtccatccacagtacctctgtactcagccncattgactccatggtggcttcnggtacttattatctagatgaagcaacangttggggttgganatactgaactcaagaagcaatggagctgccagtctaagggatcatgttaggcntngtgtat

SEQ ID NO: 118557 - DNA, 378 bp, Glycine max
  Clone ID: PAT_MRT3847_78065C.1
gaatctaccgttgggtcaactcataacctccatttcgaaaggcatcctcgacgtcaatttcgaacccagcgatgcacataagtctcgagcactgcccatctatgtctctgttggttagagtgaatatggtctcaggatgccagacacggtcttcgaacagattatgtgccacacgccactgttttccacagcatcatacacagtgcgtacatttgagattagtataaatgcgacaatggccagcgatatcactgtcatcagtaagacagcattgcagcttatggaaagtggctcgacggtgacagaatattcacttcttatgaagaacttcagtgagactggatgccacggctgtgatatgcaggtgcataccgagtt

SEQ ID NO: 118558 - DNA, 291 bp, Glycine max
  Clone ID: PAT_MRT3847_78066C.1
tccctgtctacccactcgtcctgaataatcatgcttgggaatgacagaatgacaatatattagcatacgtgcatttgaaagataggttcaatcattcggtttgatagcattcccattctatcactaaaattaatttcacttcccttatcttaaaaacccctcttacttcctaaaacctattcttaacataacttaatctatttctattataaaacacttaacccatttaatctaatacacaatatccatatacatattatcttatcacatagattttcatcctaaatataa

SEQ ID NO: 118559 - DNA, 400 bp, Glycine max
  Clone ID: PAT_MRT3847_78067C.1
agatgaacaattcatatttttatatcattaagagcaggattacctaattttgaagtctctaaccctgggtaagattatcacatctcagtttagaagaagccatgaattaaaaacatggtgatttgaatatacaggttaaagtgtttttgagatcatagcacatcaccagctaatgaactacagaatgcgtgttgacaatgaggtgtctatagaggagctaaccttcaatcgtgcactaatgtgaagcaataacaaaattgattaactggatggtatgttgtgactccccagactagagcgaccgaagcctgagccaaccgttttgttgcactacgcaattaacacagtggatactgctttcacgagcaagacggttgtcactggccggtgtcaccttact

SEQ ID NO: 118560 - DNA, 257 bp, Glycine max
  unsure (1)..(257): unsure at all n locations
  Clone ID: PAT_MRT3847_78068C.1
gaattcggcacgagcttgagtacaaagagctgaaacttaagcaaaaggaatacagtagacatgaagctgacatcttcagcacaatgctttcaagaatgaactagtttagaaggtgaatttgcggtccaaagtagaaatacctctgtactgtataacattttgcgttccaaaatatctattaattttgatttctaactatacacctctgaacttgctgacgtgagatatatatatatatatatgctannatnnnntgc

SEQ ID NO: 118561 - DNA, 411 bp, Glycine max
  Clone ID: PAT_MRT3847_78069C.1
ggctgcgggaatttgccgctctacacgtgtagtactagcaccttcactcgtcggtgggggggggggggggggggggggggggggggggggggggggggggggggggggcccggccctggggggggaaaaaaaaatcaatttcccacaggggggtttaccggataaatttttccccggggaataaaaggatagtccctggccagttaaaaccaaaaaatccccaaaaaaattggggtaacccggaccaaaggggttgggaaccccaaaattagggggaaatttttaaggaacacccaaagcgggtttcctcccaagtaggcataagccgcaaaaacctttttccccaagggtttcccaaaccctatggggagcgccataaaaggccttaggcgttaaccctgggaatccccc

SEQ ID NO: 118562 - DNA, 262 bp, Glycine max
  unsure (1)..(262): unsure at all n locations
  Clone ID: PAT_MRT3847_7806C.1
tntagnagagncgatcgtcacaacgtacaaaactatttagcacnactnagtcatccaggacacttgtgtnagtatnatgcaccgtctctctatatccatacacaaaaacatggtatgggtggagaattnaactcgacttgtatgatgatgggtaacaagggcaatgaaccggnactgcccgagactcttaagaattacaacaagctggtgtctcttggcttcaagattatattcttgtcaggaanaacactggacaaacagn

SEQ ID NO: 118563 - DNA, 705 bp, Glycine max
  unsure (1)..(705): unsure at all n locations
  Clone ID: PAT_MRT3847_78070C.1
atgcatgtgagtgaagaaggactgacatagagagagagtgaaacggtgcctattctgaaagtcgtctccacgttctcctttgcgcatattgtggggtgtgcggtgctgtgtgtgccactattgtcatattccgcgaaatgagctttttcctgtagagttctgaaccttcctttcttttgtacatgcaaggaccctcttggccgatattgctgaaggttgcatttttaggtcattagtgagtttcggagatctgggtatgttgcaagctgcattttggcaacgccagtgtgttagagcagtgacaaatctgggccataataatgcttggagattagatgctccttgatttgcaaaaaggttttgtttcataagctgggtttcttttcccactgaatttgctttttgtcaggtgttgtaccctacaaaagcattagctcttcttgaaagtagtttgtgggtattgactttttgcactttgccaaagttaagttttttattattttttattttcaagaaattgggttgtcttcgtcgttgtgttgtttttttttttctctgaagaaatttgagcattgccagtggaatggttgatctgaaatcttaagttgatgcttgtatgggngtgttgtgatgaaatttgattctgggaaaagatcggaattggagagtttagtgagtgggtttggaaagatcatcatcaaagta

SEQ ID NO: 118564 - DNA, 606 bp, Glycine max
  unsure (1)..(606): unsure at all n locations
  Clone ID: PAT_MRT3847_78071C.1
cttntttttttttttttntttttgaaacccaatctcatgaaattaattctttcactctttcatcaactaattcgtagattaacgagacgcgctttttaaatcatgtttgtcataactaaaacaaatttccaggtaacttcaaagtcaagcaataagaaaacaaaattggggngggggggggggngggggnnnnnnccattagaagccagccaaaatctacttatgcttagagcgggagtggggatggccattgggatttctcctcccaccgaaaacggccatggttttccttacaggaggctggaagggagctttcttatctgggggggggctgaaaacactgtctggggtaaaaaagccatcatcctgcttgtgggctttcttcgttttaggataaagtcccctatgaggaagttgatcttcacggaaaatgaggttctttgaaactgcatccctcccaccttggggaaaaggcaatgaaaactttgggccacgtaatgtaactcggggtcgacgggcagctaatactattccattttcattaacagggacagctaccttccttaaggtgccaccatttccacatttgggacagaaaatcctccc

SEQ ID NO: 118565 - DNA, 256 bp, Glycine max
  Clone ID: PAT_MRT3847_78072C.1
tttttcaatcacaaattattaacctcatgttcaagggggattctataattacatagcccctactagacactgtaaaataaaataaattatggaacagtgcattatttaatctataattccataaattacaaaccaagaggaatcaaaagatctgtaaatatataatccaaaaaccctcgggctttttatatggaaagaacacaaattctaaaaagcaatgaaattaacttcagctctataaataatttggggtgaa

SEQ ID NO: 118566 - DNA, 252 bp, Glycine max
  Clone ID: PAT_MRT3847_78073C.1
ctagaagcagctatatgaagaactaaagaggacagagagagataagagagtgtgtgaaatggatgtcgagaaaatgccctacatacacgctatgctgtaagagcttgttataaagcacactgcaacacactgtgtgctaacacatgctgggactgaacccaccacttttggctgacttgacataccaacatatgcctgtggggtaagtggcacaccatgcattgctggtgacccgctcaattgttcaaaccc

SEQ ID NO: 118567 - DNA, 578 bp, Glycine max
  Clone ID: PAT_MRT3847_78074C.1
gggtacattaacgtttcattccttacttcaagaaccaagcaatgcatatggtacaatactacaatattctcccttcatgagtccatgctccacatacccaatagctggttttaaattataacctttcgtcacttatatactatacaaagaccttactacaagaaccaatcaatgtctggtacaatttgctagtactatcaaatatagaaaaatgctagctacgcactctttttaatattctttattggaaaaaattataaaatttggaggatctcactttttacttaatgaaatccacttataattttataattttcaataaattttaactaataacacaaaatgtgttcttaatatttctcttatggcctatgttttgctatttgaacttattacaattacataatcaaaacacatacattgtggcagttggatcacaatggatccagatgccaaataatttctaagtgagcgcagtcgagtgaacctttcactctattcagagccgcttgtctgtgtcgcagcagtggtaatgatgaatcttcactttgcttggagagattcggctcgagctcgag

SEQ ID NO: 118568 - DNA, 385 bp, Glycine max
  Clone ID: PAT_MRT3847_78075C.1
ttcgtcacactcactcaccactcaccactcaccactcaccaatacacttcctcagaggtcaattatcgcgcgactcggtaggttgtggattttgagagtggctttgatttaattctagcactagttgcagagagctgcatggtgaatacaaaacagatggttcacatggcagcatctcgaggaggggttcataaacttgtatcctcctctcgaattgaaaaactagtttcccttttatattccaaacaatatctgcctccgtggcttgagactgtgcgccattttagctttaccgatgatcgcagtggcagaagccaacaacctgttggagaatctgatgacttttttcgtgaacagtcagactcaagttttaagacaatggtag

SEQ ID NO: 118569 - DNA, 516 bp, Glycine max
  Clone ID: PAT_MRT3847_78076C.1
cttagacttcgtcacactcactcaccactcaccactcaccactcaccaatacacttcctcagaggtcaattatcgcgcgactcggtaaaatatagggtgcacactctcaatttgctgccattacttctcactatgaattgctactttcaccctttgtttcgtgttagttagggttgtggattttgagagtggctttgatttaattctagcactagttgcagagagctgcatggtgaatacaaaacagatggttcacatggcagcatctcgaggaggggttcataaacttgtatcctcctctcgaattgaaaaactagtttcccttttatattccaaacaatatctgcctccgtggcttgagactgtgcgccattttagctttaccgatgatcgcagtggcacaagcaaacaaacctgtggagaatctgatgactttttccgtgaacagtcagactcaagttttaaagacaatggtagcaaccgaacccaggagtcatacaatgttgaacagtcttt

SEQ ID NO: 118570 - DNA, 426 bp, Glycine max
  Clone ID: PAT_MRT3847_78077C.1
gacccactcggacgatttttatctctcccttagtcaaatgtattcatcagacttcttcccatgatatcttataaaagctaaatgcataacatttactgcggggaggctagatatcccaatgttactactatgacagtccttctacttatgatcccattcacagcattctctggcgtaaaattatctctatcacatattgatatcttgaacatcaaccaactaaactatctatgaacctctccaaaattgttttgtaaatcattacctgttcaagaacctattcttaagcacttatatttaaaagcatgtctttgaaactttccttataaccatctctttctacaccccaatcaaaactcattatctttaatctaatttaacaacatttttttcttattgaaaaaatacaactcccatcatttctta

SEQ ID NO: 118571 - DNA, 374 bp, Glycine max
  Clone ID: PAT_MRT3847_78079C.1
gtttactatttctgtgaaaaaccttataggcaggagaaatgtcaataatacatggttctaggcatattattctctagcatatatataattacattgaaactcattaatactactatctcttaaattcaatatattattaattatgtataatcaattacaactacctatcaatgacattatatggttgacatgtaaaacgagcttaacaaaactctataaaccaacccaacacttcagacaagacagtatcattggtcagcgaaggactaggacaatgtacaaagcaacacttccaaacagttgattcttgctcacagttaagaaactttatgattgttagataagtatcacaagttcaaatttagaactaatga

SEQ ID NO: 118572 - DNA, 340 bp, Glycine max
  Clone ID: PAT_MRT3847_7807C.1
cacaaaaggactggggcctcgatttttattaaacccctaacccccgtaattcccggggcccaaacaaattttacccaaaagggaaaggtttgctaaaaaaaaagtggataaaaaaacccggggcggttttttctcatatgacccccattaacatttactactatggggaaagccaaattactaggggcatgtgagcgggggctccattgaactggggggggggaaatcaatattatgcttcattttcctttaacggaaattggccccaaaaaaccgggtcccgttggacatcactttgtgggacactgttttaaagcctatcccccctgtttgaacaagc

SEQ ID NO: 118573 - DNA, 339 bp, Glycine max
  Clone ID: PAT_MRT3847_78080C.1
agcctggcgtttgccgtggccttctcagctttgcctctcactttatacattcctcccatacgcagtttcaacctcttcgtccacacgctacagatctttctacaagattcctctatcttctcctttcgcgcctttcttcgcatgagactagctatttctcgcatcttcaactccatcatccacgtaacctggtagatcatatcctctctttattttattttctctttgattggatcctaaatgaatttcaaactttagggttcggatgtgtaactatttgttgctgtcatgacatgattgattgatgaataaataataaaaatcattaacttataaaaa

SEQ ID NO: 118574 - DNA, 1518 bp, Glycine max
  Clone ID: PAT_MRT3847_78081C.1
atatcacagctgcaactgcaagcatggcctttttatatgctgccaagaataatcaaatgttacaacaaaattaaaaccaaagtggtttcccaagcagggcgtgcctgtgcacatatattttacacaatccattacaaataaattttacagtatcatatcacaatctcctacaaaagtgtatatatatatatatacacacacacaaatctatcctccacatcacataaatacacaattaacaacaaaagttacatttcaaacaacattgatcatcgatcgatcaccacctacgctctaactctcatcaccatgcgcatttttgtcaacagccacatcaattctctcatacctgacatccgaagaagggtgattagggattttcacaagagactcctcttcacccttttggaagaaaatcacccacataaaaagcaccacaaacgtcaccattgcaacacacccagttccaaaaataaccccagcgagaaccgtcaagggacacagcttcttatgctcatcctcaaacttattattattattaccatgaggatccgcaggtagagaatgcaacccatttgaaactgaaaccttcttcaaactaagcttccatgaatagacactaacaacctgaaccgagtgggccccattggaagagcttatgcccgcaatcacaggattcgcaccccaaatcttggaaaaatcaatgtcatgagaaacaatgggatcagaaggcttttgtgcaccccatttgcttaacctaacttccaaaaccttagaactggcttcgtaatcaacccaagcgttcaacttttccccgttgttgagaaccaaatgcacgtcggaaacattcgcgacggcgaccgacacgtggcttccgacgtcgatgccgacgtggttcgcgttcgggtctccgacgttgtcgtccttggacgtgtcgaactccacgccgacgtaattcgagaggttgccgccggcggcgaggacgaggaggaggccgtggccgtggccggtgacggagaaggagaactccgtggagagcgacgtggggtccgcgaaggcgagtggctcccggcggcggaggatgccggaggaggaaggcgcggggcgcgtgagccgcacgtgggagtcggcgtcggcggcggtgacaacgtgggcgtcgccgaggaggtagatgctgtcggggtctaaattggggggttgttgggtcgaagaagaagaaggctgaacgaggaggattaaggaacagaggatgaagagggagaatgcaaccatgccgctatgttttttcgatggaagaagaacaatgcctctttctttgtctctttgttcttcaaccctcattcttccaagcattgtttctgtttctgtttttggtgtgaaatggctcacaacaaccttttgcgttgtcttttcttttcttttcttccgctgcttgcttgatgcttcttccacttcttcttccccattcctcttcttccacagcttctcacttttcattttcttcatttccgcagccat

SEQ ID NO: 118575 - DNA, 534 bp, Glycine max
  Clone ID: PAT_MRT3847_78082C.1
tttcctctcgtccgcccacgcgttcgtagataagtaaaattccccaattaaaaaatgatatattaagaatcccccgtagctggctgtctatagcctattatgtggttatgctgtgtcaagtcttactgatattttgattttcgaccccaatatttttattcaaattttagtttgttaagggtagataactgttccaaaatacctgaaaattacttatttttcccagtgataactaacttggcgattaatttttccttgttcagacttcacctagacagttggatgcttcccgttttgaaaataagcattctagtatagtttcttgtggggcccgtcacagtgctttgctaactggtacgcctccattaccatgtgcttttcaggggaacttttaaaaccaatcttagtatttgcatgctttgataatgtcatatggcttattcatattagagaattgacaaacaggattcgcgccaataatcattctttggtctatgtgctaatttagtaaatccataaccgctgcatctatga

SEQ ID NO: 118576 - DNA, 524 bp, Glycine max
  Clone ID: PAT_MRT3847_78083C.1
caagtttcaatttttttggtccgggaatttgctttgaacggaacaagaatccaatagaaatgaagaagatgtgggtttcggatcataggttgtttcttctctgcattctttgtggcctctgtttttgtctgcagttcacaacgggtcatgcagattcaaatgctggaagaactttgaatcaggagggtggtgatcatcaaatacattgctctagagaaagaagtagaacagcttggaaaatcattcaagagtatttgatgccatttgtggagaaagaaaaataccacatctcaaaaaggtgtatgcttcaccctgacaatgacatatacagagatcaggagcaacataagtttcatatagatataaacgaatggcagtgtgggttctgtaagaaaagtttctatgaagagaaacatcttgatcagcattttgacaacagacactccaatttgcttaatttgatatgatgcttcttggtcaatacaatttttatttttttcagtggaaaatggctagtagtggaa

SEQ ID NO: 118577 - DNA, 289 bp, Glycine max
  unsure (1)..(289): unsure at all n locations
  Clone ID: PAT_MRT3847_78084C.1
tttcatccccctatttatataatcataaccattacnnccccacccctagacaatgcttcattcttcaacgtgcgagctaccctcctatttacacccccctcataatctagcttttcaacctttcacatctcacatccatccatccatagacccttcctcaatcattntggcttgtggaccttgtgccaagcacccctctggtgacaaagcctcttggtcttcttacctaaagtttaggagtagttattctccttctcagtgatagaaagacanttagtttcatacctca

SEQ ID NO: 118578 - DNA, 265 bp, Glycine max
  unsure (1)..(265): unsure at all n locations
  Clone ID: PAT_MRT3847_78085C.1
gtatgagacgtatccgttttatcagcattcgggancctntccnccaacnatggttnagcgtggagganatattggaactgaagtgattgtngtcgttgttgtcttggncgtcgttttggtgatgctttntggctttggctattgtttcatccggataaaagcgagnnagaaacggaaggccggtgacaganaaaaatttgggccagaacanactgtcttggagtctttggaatttgantnggttncaattgaagcagccacaaac

SEQ ID NO: 118579 - DNA, 1393 bp, Glycine max
  Clone ID: PAT_MRT3847_78086C.1
caggggggaagtgggagtcagacagacaaacaaactactgctacgttaatcatgggtccaacctctatggccgccggaagagtcacgaggtttttggccaggcactaccctctcgagcaccaccgtgataacgccgatgttgagttcgactttcttgatgatattggagaagccttgttagctcaaagtgctagcagtgatgagtgcggtcaccccaatgaaatggaggaacagttcgaccaagacgaggatcacagagataccgtcgaggagaatagaaccttttgggacaaacaacaccagcttttgcaggccagtatatgcagaactagttcttcggagtcacggataaggcatgccaccaaagaagcgcttcaggaaattcaaagcgcggaaactgtgtgcggttgtggcagacaggtggctgtgatcacaacttgtcgaaactgtttgatgagagaagtttctaggcggcttcagaaagcaggttatgatagtgctatttgcaaaactaaatggagaagctcacccgatatcccatcaggggaacacaattttttggatgtgatagacagcacaaagaagggggaggtgagggtgattgtggagctgaatttcagaggagagtttgagatggcaaggggaagtgaagactacaaccgacttgttaggaggcttccagaggtgtttgtggggaaggtggagagactgagcaacctaataaagatattgtgtatgggagccaaaaggtgcatgaaggaaaagaaaatgcacatggggccatggaggaagcataggtacatgcaagctaagtggttaggtccatgtgaaaggaacacttccacaacctcactttcagtgaggtataattctgagaggatattgccaaggccaaaggcatccatgttgactgttgatctgctagagaagccttcccaatatgcattgcactgctgttgaggttgtgtaatataattttaagagagagaaccccctttttttgtttattttggtaattaattaattcccctccctaaaaaggtgaatattaaatgagtgattcgcaaattaatgtcctatacacatgtacgtaaaaacaaattatggaaatgaatgtgcagttcaaaactgccttttaaaatttcataaaaaaaaaaaaaaaaaaaaaaaaaaaaaaatttgtctttcatcaaatttgctaatcttttacatgcaaaatgccaaactatttgatgaaaacatagtgtatacaaactcaaaaagacctttttcaattggtgtatataaagaaatggtataaaatagagtatcataagggtgggaagtattgtatttagcaaaaatagattttgcttgtaaagagagaatttggattgttgagtttccccatcta

SEQ ID NO: 118580 - DNA, 1097 bp, Glycine max
  Clone ID: PAT_MRT3847_78087C.1
gggttgtttcacaatttgcgtttcggcaaatgttaatccgttgtcgcgttatatatcccgcttttcaagtatgcttgtcctagaaatgcgaggcctacattgcctggtcccattatcttgtctgaccgtctttcgggatgttgcgggaggtgacgagtgcccacgacgaggtcgtgcgtcgtccgtggtccgtggtatcttctatgcctgtgagtgtcttgccgtggcgcgcctcatgcgcgggtctgtgaggttcccccgtgatccttcccccgtttcttccgcgatgtcccgttcccagccgcttgctcccattctctcttccccctcatcaagggtaacaagcatgggaatgtaatattctcaagtgcacattactgagaatcttccttcataacttacgacaaacggcttgtaacaaatattttatatcccacgtcaaggaatatgctgctgctcggttaagggactcatatctaatgaacgcaaccaaacgctataaccgctatcactgtttcaattatagtttgaaaatcctaatccacgggaaaataaaggtatgtaaataaatttagaccttaagatagattctcctaaaatcagtcccaaccaaaaccaatgatgcatgttatattttggaatttgacctctagctactgctttgaagaatcatcatgccaataccctgcttctgcagagttggacttaaaaacgcatcatcactgctgagtatggccagcccataattgatgttggtacatcggcatggtatgaatcggctggctagcattattatcgtatagtccagggcctcctggcccctgactaaaatgactattctcattatcttcagatgactcagttgaaggcccttgagaggtaggagtagttggagtccgagaagcaccaaaggctaacatctgggatgatggtgtcaaagaacgtccagatttcaggtaacttgagctagacttttttccatcagcaataaagctacccagaacgatcatttgagagcaatacctgcactgccgttgctgcagtaagggctccaacaacttcaccacccaatactcgtccatcaggacctgctaaac

SEQ ID NO: 118581 - DNA, 543 bp, Glycine max
  Clone ID: PAT_MRT3847_78088C.1
acgcccacgcgtcggacgcgtgggacaaaccaactactacgttaatcataatcatgggtggaacctctgtggccgccggcagaagagtcacgaggtttttggccagtcaccaccgtgacgtcacgtgcgttgttgccgatgttgagttcgactttcttgacgatattggagaaacgttgttagctcaaagtgctagcagtgatgaaatggatcggttcgatgaagacgaggatcacagagataccgtcgaggagaatagaaccttttgggacaaccaacaccagcttttgcagaccagtatatgcagaacgagttctttggagtcacggataaggcatgccaccaaagaagcgcttcaggaaattcaaagcgcggaaactgtgtgcggttgtggcagacagatggctgtcgccagttgtcgaaactgtttgatgagagaagtttcttggcggctccagaaagcgggttataatagtgctatttgcaaaactaaatggagaagctcacccgatattccatcaggggagcacaattttttggatg

SEQ ID NO: 118582 - DNA, 467 bp, Glycine max
  unsure (1)..(467): unsure at all n locations
  Clone ID: PAT_MRT3847_78089C.1
ctgagcatcgtctagctatctcgatcgaactgtccaaggtcctgtcactgtcttccacgcccgaaaataatatggcatgagtctccagtgagaaggtgaggcatgccttaggggcaactggtggctgggtggcaaaagcgcaaaacaatggttaatatcagaaagcccggacaaaaatgttaactggttggtgggtgaaaattctgccacaaaggaacggaataaaggccacacaaccaaggtttaggagaaantcgacttgtacgtaaaaaaaccggtggtggaggtgacagcagcgagcagcaacagaaatacggatacgtatggaggcctactttgcagccgggccgtggcctcgacaagtagtagaattatgtcacatcaatagggcggantgtgatataagcggaaaagaatagagaaccgcacaacacggcaagcacaaatacgtgtggtaaggatggatg

SEQ ID NO: 118583 - DNA, 258 bp, Glycine max
  Clone ID: PAT_MRT3847_7808C.1
catccccaccaaaaataaatttttgaccgggggaccaaaagattggcccctaaaaaaaccctttttgccacaaaatggcagattttagctggggttggctccttttaaactttccccatggaggttttaattttttagggcgctgaaggaagttttggtggaccattgggccttttaggggccgattccttccctcaaaaccatattggccctcactaagcccggggccagggggggggaaagatgaccctgaaacaa

SEQ ID NO: 118584 - DNA, 137 bp, Glycine max
  Clone ID: PAT_MRT3847_78090C.1
gagggagatgcgctctgagagagcctcacagcaaagtgagagcaagatccaaaagcagactgcccttaaaccggataaccgcatagagtctagagtgggttcattgagacctggcatcctaacaacaagccattgca

SEQ ID NO: 118585 - DNA, 209 bp, Glycine max
  unsure (1)..(209): unsure at all n locations
  Clone ID: PAT_MRT3847_78091C.1
aacaattaagattgncgatgcaggtcctgntattgataccatggttgtgttgttggaaaacatgtctaatattactgttatggcgagaaccttgattgctgcagtctatagaactgctcaaatagttgcttcaataccaaatttgtcatatcagaacaaggcatnccctgaggcattatttcatcagttactcctggcaatggtccatg

SEQ ID NO: 118586 - DNA, 533 bp, Glycine max
  Clone ID: PAT_MRT3847_78092C.1
cacgcgtccgctaatgtatgaggcccattttttccttttctacagatgcgaagcgcattctgaatagtgttcttagaacacctggacttgaggtgagagcgtccatcgaactctaaaatcgaattctaaactacttatagtattcgttctttattaccatttcgaggaaagatttcttttatggcaccgaggcattgaccttttgaaatgggtgacgtattcgtttaatgaaataatttctatgttatacgaactggagatgaccagcattatggacgatgagaaacatgagaaactgattgctgaaacacaacatgactcctgattgatttcctttgtatctgatcgggcttgaagagggcgatgaaggggatggaatggagaccgcatctgattgcggcagaacagggttatagaagactcattggagggcctatcgacgatttgaaagggccaaatgactcctctgaggatgatgtaatccggctgacagtaaacatgctgttataatcaggctgctataacgcgggcag

SEQ ID NO: 118587 - DNA, 1825 bp, Glycine max
  Clone ID: PAT_MRT3847_78093C.1
agatttatttggttcagagttcccaaagaaaattaataatactacatctctaagcagtctgcaacacaaatctaaattgtctgtgcccctatttgcctcatgactactacccctgtcgttcaacgcatttcagaatgcttcgtcaaaccacatggtttaacccaagtgtcaaaccaaatatgtcatttaacacaatgggatattgttatgttgtctaagcactatatccagaagggtctactcttcaagaaacccacacctcttgttgatcaacatgatttcatagagaatctcttggagaagctcaaacactctctttctctcactctctcccatttttatcctttggctggtcgccttgtcacccaaaaatcccaagaccctccttcttatgctgtttctgttgattccaaaaacagtgatggagccagattcatctatgcaactctggatatgaccatatctgacatcctctctcccgttgacgtcccactcgttgttcagtcattgtttgaccaccacaaagcagtcaaccatgatggtcacaccatgccccttttgtccatccaagtcaccgaaatagttgatggtgttttcttaggttgttccatgaatcacgctgtcggtgatggcacctcttactggaatttcttcaacacatggtctcagatctttcaatctcatgctcaaggccatgaatacaatgttcccatttcacacccacccattctcaaccgttggtttcccagtgattgtgatccgtctgttaatcttcctttcaaacatcatgacgagttcatttgcaactttgaagcaccttttctgagggagagagtcttccacttttctgcagagtccatagcaaaactgaaagcaaaagccaactcagagtccaataccacaaaaatctcttcattccagtcattatcagcacttgtctggagatccataactctcgcgcgctccgtgccgtacgagcaaaaaacaagttgcaagatggctataaacaatagatcaagaatggaaccgcctatgccagaagaatactttggaaacttagttcaagtagtgagtgcagaaacgacaacaagggaattgcttgagaatgatctaggatgggctgcatggaagttgcacgtggctgttacaaaccataacgacagagtagttctgcaatcactcaaagagtggttacagtctcctttaatctatcaacttggtcagcccatggacccgtacgttgtgttgataagtagctcgcccaggttcaacatgtatgggaacgagtttggaatggggaaagctgtagcagttagaagtggttatgccaacaaatttgatgggaaagtgacatcatacccaggtcgtgaaggagggggaagcatcgatttggaagtgggccttttacctcatataatgagcgctctggaatctgatgaggagtttatgaatgttgagtttcggtttccaatcccttatgctagtttgctattgttcccactgtttgaccgttgaacatgtcaaatcccatattttgtgtagtatacaatgagttgttggttgaactagtaatgaaataaagtagagaaataagtggaaagtgggggaaaatagaaatgaaacagaaaaggaatagaaaaatagtatattatttggatgaatagaaaaaaatgaagaaaaatttctttacttatttagataagtgaggaaaaaaatatataaaaaactagatatatcacttgagttaattagttagttagaggttaattagtgtgttagttaatttgttgcatactaaataacttatgaatatagaattttggct

SEQ ID NO: 118588 - DNA, 1152 bp, Glycine max
  Clone ID: PAT_MRT3847_78094C.1
tccccgcccgccccctttctctgtccccccctctctctctctccggtcccatttcgttccaacgcaaaagaaagaaaccctagagagtcctagacgtcgtcgtttcttacctctacctcgatccgtgtcaatgtccagaggcgcgtggcgatgatgacggggaagtctgacttgttgtcgatccgcgttccctacaagaatctccaccacgattcctccgccctcgaactcgaactcgtcgacgtcaaccaccgcaacttgccaccatcaccccaccgacccatcactctccctcgccgccgaacaacaccaacatcaacgctccgttgcttcatctcgttctcagttgcaccgtcgccgccggcgtccaattcggctgggccttgcagctctctctcttgacgccctacattcagacgttgggaataggacatgcgttttcttcgtttatttggctctgtggccccattacaggtcttgtggttcaaccatgcgttggtatttggagtgataaatgtacttcaaggtttggcagaagacggccgttcattctggcaggatctcttatgatatgtctggctgtgatattaatcggattttctgctgacattggatatgtattaggtgatacacatgagcattgcagaacatttaaagggacccgaacaagggctgctcttgtatttattcttgggttctggatgctggaccttgctaacaacacagtgcaggggccagctcgagcacttttggctgatctgtctggtcctgatcaacgcaatgttgcaaatgctatattttgctcgtggatggcagttgggaacatcctaggatattcttcaggtgctagtggaaagtggaacaaatggtttcctttcttgacaactagagcttgctgtgaagcctgtggcaatcttaaagcagcatttcttgtggctgtggtgtttctgacattatgcacacttgtcaccctatattttgctgatgaggttccacttactactgcaagtcaacatcatcacttgtcagattcttctcctttactggatgaacaacaacaaaatggtgttgatttttcaaaattaaagcctttatctgttatggatgaatccaatagtaagagaactgagaatcacattgagaaagatacag

SEQ ID NO: 118589 - DNA, 326 bp, Glycine max
  Clone ID: PAT_MRT3847_78095C.1
atctggacgagggtccaagtgaactaagcggcacgttgcactcgctgatgcagcttcaggtgccttcctttgcagcatgtagctctcatgacgagctggcacggggatcatttctacatcacatcagcatctgtaaaagagggttagtcagagagtccgtgtcagctgatttctgatgcgttgcatgatgagtgacgtgaaaacgcgtctaaaagcacggctgcgtgtaagacatgcatggctacgactctcgtcatagtcatcgggcagataaccgccaatgctatagtagacgatgctttcactgtctgcgacacatgacgcaa

SEQ ID NO: 118590 - DNA, 435 bp, Glycine max
  Clone ID: PAT_MRT3847_78096C.1
ggaattcggcacgaggatttttacatatatagaacttttacatgattatataatttaatccttatttcaaaagtaatgtaaatctctaagcaagattaaaaccacgtgcttttattacttttatgtgaagtttgtccgtaggcaagttaatcaagttgctcgtgtctttgccagagtgtctagattttatggtggttaaaaacctattaaactcttcattaaaaacgttaacatgataataaaatgataacatgacgataaagtgttgatgtaaacattatgaacttgtttgatagagatgagaagtaacatggatgaaaacataattgatgcgtgaaaataaataagaaataaaaaataaagtaaaaattaaagatggttaaagaaaaataataaagagatgtgcgaaagatagaaaaatgaattgaaatagat

SEQ ID NO: 118591 - DNA, 392 bp, Glycine max
  Clone ID: PAT_MRT3847_78097C.1
acccacgcgtggacgcacgcgtccgaccgaatactttacttcacaaaaattagatccatgaaaacgtgttctgtgatgctatgcctgtaaacgtatcgaagtcttactggggccacagcataacaatgtggcacacactcttgtggagcgtaatgcccaaatatatcatgttccagcaaatttgggctgtgatatgacacacatatctactgactagaaagttgccatatccaatagctgatcgcaacaccctaaacatctacttcaacaacacctaaatctggtggagatattagcatactcattatcttttttctctacagatcaaatgctttaataccgatacgattgcccgtagtctagtcatggattctacagatatgatgcttaca

SEQ ID NO: 118592 - DNA, 512 bp, Glycine max
  Clone ID: PAT_MRT3847_78098C.1
ggctcgaggagagatttttagttctgggcatgctgttaatcttctcgaggccccccatagcttccacgtgggactaaactccgtgcagttttccgggcccacagtggagacaccggcaccagcaccagcaccggcaccggcaccagcaccggcaccggtaccggtgattgctccggtgatgaattcaggtagtacggaggggaagaagaagaggggcaggcctaggaagtatggaccggatggcaaggtggcgctgtcaccgatgccgatatcggcgtcgattccgttcaccggagacttctcagcctggaaaaggggcagagggaagccacttgaatcaatcaagaagacttttaagttttatgaagctggaggtgcaggatctggtgatggaattgcatactcggttggtgccaatttcacacctgacatccttacagtaaatgatggcgaggacgttactatgaagattatgtccttctctcacaaggatatcgagcaatttgcattct

SEQ ID NO: 118593 - DNA, 580 bp, Glycine max
  unsure (1)..(580): unsure at all n locations
  Clone ID: PAT_MRT3847_78099C.1
acaaacaataantattattctttttagttttaaatttattttttaaaataaaaaatataactcactcacacataatttgtcttgtgcatctcatgtgtaaccactgtatcttttgaagatagcatttcagtcttctatactcaacacctaagtctattgttgaaaggctactaaatctttctcttattctacagggtgattcttggtcttctttattctacgagtcttgcagctgaagtgaagacctcaccacacttgtcctcagtagcaagtgttcatccatgatatttactacatcgatgcttagcaaatcaaatatcccatcattaagtagatttttttgcctctagaactcttttagagtttcttacaatgggaatatgtgtgttatttccattggtggctggtggtgcataacttttgtgtactccctccaacttgagccatagtgggtggcttttagaaacaagtgttgagcttggaggaggacttagtgttgaaggccttattgggaggctaccacttaatggatggccatattaatctcttgaaaaactctcgtgtagtagttatcatgtct

SEQ ID NO: 118594 - DNA, 511 bp, Glycine max
  Clone ID: PAT_MRT3847_7809C.1
cgagctttccctcttactcttaccattctatcctgaaaaaagaggaaaagagtttcccaagccgaatctcatactgataagaaccttggttatgcaattgaaaggatataaaatttaagaacaaaaaattgttagttattgatgcatctatttttcttcttaatgtgggtagatgataaccatatgagtttgaacttataattatgaaaaattggaaattatatggacataaatgtcctgtgaattaggattttcaacttgaatctgttaggccatactagaaagaagttgtctccagcaaccagatgactaatataagtggaacactcatagtctcttcgaaattgtattctgtggacttatactctaatcatgcttgtcttgttctatgatcagtgcccccttgtgtttttctttttccatctcttcatgatgaattaaagcatctttttgctgaaaccaaattctttgtggccataaagatgaatcaaatttatacatcatttttatc

SEQ ID NO: 118595 - DNA, 616 bp, Glycine max
  Clone ID: PAT_MRT3847_780C.1
ggcagaaaaacaagtaaaccaacttgttagttgttactaactgaattctgtcttgatcaatttgataaaaatcacatcaccagagcttcgaatggtttcattgtggttgtgacctcatataaaacttcttacttcttagcatgtcagggttagtcagtgtaatggtttatgcaaataaacttggaataaactagcaacccagcccataacacatgaccaaccctaatatgctaacaagaccaaaacataatattcggttttcaccttaatggtcattagatgctcttctggagaaacggacatacgtcaccagatacagattctgaaagcagcttccaaagcttctgcaattgaatataccctccgtataagcaaacccaagcaggaaagtatgcaagctacaatatataatcagaattagaaaacccgttagtcaggagtaacctaaatggcggacatactcaaattagaagagaatttgtttttgtatcttttttgaaatttgtttcccctttgcctgaattcgcatcatctaagttcttcatctctttactcctcattgcattcaataaaagggaaggtcatccaccactaccaaagcctgccaaaggggcat

SEQ ID NO: 118596 - DNA, 744 bp, Glycine max
  unsure (1)..(744): unsure at all n locations
  Clone ID: PAT_MRT3847_78100C.1
cccgcgtccggttgaaatggttgcttgtgttgctatcttgcatggtgtggtttgtggttgattatggtgcgtgtggcagagcactgcagctggaagcaccttctttgtctccagctgcagcacctgttgttgctgttgatgatctgccactgccgacgaatgctcatgggttaaagcatttgcctgcaccgattccgtcacgcgccaatttcaccaaagggagaggagaattacagcccccggtttccgggtttaagaatattgcccctatgcatcccattgctgatgctattccttctgctctcgctcagccaccattgtccccttatgtttccgattgttgcaaacaagacatggtgtggaaacgtggcagtgaggtttgccactgtgcttatcccataaagctagacctacttcttttgaatgtctctgaaaaccccgaccagaatgcttttctcaatggtttggccacccaacttgagctgcagactacccaaattgaaattattaaattttatctactcagcttatcgacgttgaatatatcaatggatatcactccacataaagggatcagtttctcggccgaggaagcagctaaaataaactcattgcttttactgcataaggttcaactagaccgcagatttgtgggcgactacaaagtaatcaatataacctggtttaaacctncacctcattcttcagctcctacaatttctacatnacctatgaaagctcccc

SEQ ID NO: 118597 - DNA, 281 bp, Glycine max
  Clone ID: PAT_MRT3847_78101C.1
ggtttcacgattcagtatgtgagacaagagagggtatatggctagagcacataaaggaatcacatattagtacatcgaacatgatcttacctactacagaactttgcttcaagaaatgaactgaattcacaataagactccagttcatatacatcatgtaacacctatctgatactccctcataaatgtcgcgtatattgatataattttgatacaaccaaagtactttgcttctctatcattcctaccaaaaagctcaaatcaaccatatgaactcattc

SEQ ID NO: 118598 - DNA, 236 bp, Glycine max
  Clone ID: PAT_MRT3847_78102C.1
aaacatatttttttttaatggtgcatgataattcaaaatctggtgtgctttttaattttgtcattcccgtcaaattgacaaccataaacaatatgtgtgcatatgtgctcaatccttatctttcaagttctcgtaatttgttcaccattccttattccatttcacatcaaactgttttgaatcaaatttcaacattgaaaacaccatttaattatcatactaccaaacaaaacttt

SEQ ID NO: 118599 - DNA, 2126 bp, Glycine max
  Clone ID: PAT_MRT3847_78103C.1
ctggttctagtgctcgacaagtgaacccccacgcgtccgggccaccaaggccggctgctgtctctcagtctgatgaaggacctccgagaaaaagttgctgtcacatatgaagccgcagaaatctagaattccagtcttggagaagcacctcattaatcagctgagttcagatgagcaaaattcaattaattcaaagtttcaagaagcaacagaagctgataagaaggtggaagaacttgagaaggaaattatggagtccagagagaaaatagaattttaccgtgcaaaaatgcaggaacttgttctgtacaaaagcagatgtgacaatcgtcttaatgaggtcatagaaaggatagctgctgataagcatgaggttgagattttagcaaagaaatatgaagataaatataagcaagtgggagatttatcatccaagttaactaccgaggaagccacgtttcgtgacatacaggagaaaaaaattgaattgtaccaagcaattgtcaagatggaacaggatggaaaaggtgatgcaactctgcaggctcatgttgatcgtattcaaacagatcttgatgagctggtgaaatctctgaatgagcggtgcaagaaatacggattacgtgctaagcccactacattattggagctaccctttggctggcaacctggtatccaagaaggagctgctgactgggatgaagattgggataagcttgaagataaagaatttgtttttgtcaaagaactcactctcgacgtgcaaaacattatagtgcctccaaagcaaaagttgccgtcagctgtgaacacgaaagctgtgaacgtggaagctgtgaacacggaagctgtgaacgtggaagctgtgaacacagaagctgtgaacaccgacagtcctacatttgctgcttctcccaagagtgatgataagtcggaaaagccccggactaccaatgaacagggagttggcaatggatctgtttataataaaagtgaagatgggtctgtaaaaagtgctcccaatagtccatttgcaagcagtgctatcggaagcccacatggggattttgattctgacattagaaagacagctggtgaagatagctcactccgtgatcaagataccatacaagaaacccaaagtgatcatggtggtgtcaagtctgtgttttctggggacaaaatttttgatgaaccaaattggggaacctttgacacaaatgatgatattgattcagtttggggattcaatgctagtagcttcactaaggaggagagagatcttgatagagctgggaacaactatttctttgattctggggaactgggcttaaaccccatcaaaacaggttcaccacaggctggtgatttcttccagaggagcagtggattcggttttgatgattctgttccaagcacaccactttacagctcaagtagctctccgcaaaggccaaaagagtggttggaaactgcttttgatttctcaagatttgattccttcagaacacatgatagtgtatctttgcctgctcgggagacgacagaacaatatgattcagtacgcaacagtgtggattttgaccatgctcatgggtttccagcttttgatgactcggatccctttggctctggcccgtttaggacttcatcggataatcaaactccaagacgaggatctgataattggagtgccttttagtttagcaattccacccgatgcattatttctttctattttcagactttccgactgttgcctctggtggagtgggttgtcagtcttgctatttggaacctgttacgtgtaatgtatttcttgtatttaatcttgtgtattccttgttcctcactttttctttggggaagggcgcaggtttgtctccagtccagcaatcttacttcccttcttaaattaaaagtgaaggcctgtctatatttttggtttgttggttgataattttccatagtcccgtagaagagattgtggtattgatgactatctgatttgagtgttgtttactgagcggaattttattatgattttttatcatttatgtgctgaagtataacttgaacctaatttgttcaattaaatttagtgaaatgtaaacaaaaaaaaaaaa

SEQ ID NO: 118600 - DNA, 374 bp, Glycine max
  Clone ID: PAT_MRT3847_78104C.1
gaattacactatttgttcattgaaccaatgtgcaaaaggatggctgcgaaatcatcatgggcgctgagcatgtgcatcagactttgctgcatggctagaactgctattattaatcttagaggcatatgagatcataatcggagggatagaacacgtatattggagcatatgaagcaatctagagtgctgtcttggctgtgatagatcttcttggtagtgcactagcgattacctatattgctcaccatcgctgttacatgcattagttgactgcatggttcaggaggacgccaaggattggcttgaggagtatgtaatcatgcaatagtgattcctgagatgattatatgcctagcttctgtatcttgagatgc

SEQ ID NO: 118601 - DNA, 1461 bp, Glycine max
  Clone ID: PAT_MRT3847_78105C.1
aattcgctttaatcaatcatcatatttatctttgcaactaaaatggcgtcgtcacaaccagagatggagcatccaaagaaggtttttggttgggctgctcgggactcatctgggcttctctccccattcaacttctccagaagagaaacgggggagaaagatttggtattcaaagtgcaatactgtggaatatgccactcagatctacatatgttaaagaacgagtggggcaacacaacctatcctctggttcctgggcacgagattgctggtgtggtaacagaagttggaagcaaggtgcaaaagttcaaagttggagaccgggtaggtgtggggtgcatgattggatcctgtcgttcatgtgaaagctgtgatgaaaatcttgagaattactgccccaaaatgattctcacatacggtgtcaagtattttgatggcaccataacacatggaggctactctgacttgatggttgcggatgaacactttgtggttagaattccggataacctaccacttgatgctgctgctcctctcctctgtgctgggatcactgtgtatagccctttgagatactatggacttgacaagcctggtctgaatcttggtgtggttggtcttggtggacttggtcacatggctgtcaagtttgccaaagctcttggagctaatgtcacagtgattagcacatctcctaacaaaaagaaggaagccattgagaacataggagctgactcatttgtggttagccgtgaacaagatcagatgcaggctgtaatgggaaccatggatggtatcattgacacagtttctgctgtccatcctcttgtgcctttgattggcctgttgaagcctcatggtaaactagtcatggttggtgcaccagagaagcctttggagttgccagtattttctttacttatggggaggaaaatggttggtggcagtagcatcggagggatgaaagagacgcaagaaatgattgattttgctgctaagcatggagtgaagcctgatattgaggttattcccatagattatgtgaacactgcaatagagcgcctcgccaaagcagatgtgaaatatcgatttgtaattgacattggaaacacgttgaagccaagctcttgagtaaataaagaaatatgcatgcgtgattcagacttcagatactgaacgtacatggggaaagagataaagattgagaattgataataatttctttaagcattatatgtgttttccgtaatgagtttttgtttcaaggatttagctacgctattccttgataaataagcaattaagtgtggggtgtgcaattgcttaagcttggttataatccctttgggacgaaaattgttttgtactatatatacattttaaagagtgaaattgtgtgagattatgaacatgttaaatgtttttaattattttgattgttggcaagaaatagtttctatt

SEQ ID NO: 118602 - DNA, 716 bp, Glycine max
  Clone ID: PAT_MRT3847_78106C.1
attttgtgccagcagatatacagggagtttatgaacacacaacattggcttctccaccaactaaagagcttcactctgcttctcataatcaacttgatgctgatgacattgaggagaggagagttggttcagtgcaaaggggtctaggaggctcgctgagtggtggtactgaggctgctgttgctcgtgaagcttttgaaggaatgattgaaacattgtcaaggaccaaggaaagtattggccgtgcaactcgtcttgccattgactgtgccaagtatggcattgcgaacgaggttgttgaacttctcatccgaaagttggaaactgaaactagttttcatcgcaaagtagatttgttttttcttgttgattccatcacccagtgctcacataatcaaaaaggcattgctggagcctcctacatccctactgttcaggcagcgttgccacgtcttcttggtgctgctgctccccctggagcaagtgcccgtgaaaatcgtcgtcagtgtctcaaggttttgaggctgtggcttgagaggaaaatttttcctgaatcagttcttcgccattacatggatgatattggagtttcaaatgatgatatgacagttagcttgtctctcagacgtccatctcgagcagagcgatctgtggacgaccccattagagaaatggaaagcatgcttggtgatgagtatggaagtaatgctacattt

SEQ ID NO: 118603 - DNA, 794 bp, Glycine max
  Clone ID: PAT_MRT3847_78107C.1
atttccgagacgataaattagacagggactcagcacttttgtaaagaatgatgattgtctttgggaatctctccgatgcataatgatttttgtgtttggttttgtaatgcctgtttgactgtttgtgttgatgttgaatcgttgtttgatacgccctgtaaaacacattcaaaatgccttcgttttctgattgattttatgtgtcggtctttggtttgcaaatttatagtctgtacacaaactccctttgtcttacggaggttatttattctaatttaaagacgttgccaatgatgtactcaaatgcacgtattatcagacttggtcatgatgatatcctaattgtcactacctctgaggccatgtctaccttgaatttatagtgtctgttatgattagtcttgtgtcattgttctattcacttcttttttcaaagaggtgcattaaacctgctttcttattctgattgtttttcatggtagttttgttcttttacagtgtttgctttgtatttgtgtattgaatgttgcaaacttgcttcttcttttatcattgtcattgttttgtaagtcatttgagcttgccaaagttaattttttggacaaaattagcagattccatggttaagaattttggtgctggtgtgtgcagtttacaagcctgatgattgtcaccaagaacggagatttgaagattcttttgttgaagcctgaccatcattgggctccaaaagcatctaatgtaataaatcgttctatattggtataaattaatgaaggctcttattggattgc

SEQ ID NO: 118604 - DNA, 495 bp, Glycine max
  Clone ID: PAT_MRT3847_78108C.1
cccttaaaccctaaccactaatccttagaaggtaaaaaggcatgatgcagggcacataggcccattcactcttgggaaataatgtaacacactcaaacatctcggcttttattatatcttcaaagccaaaaacctcacattacgcttttaccgtacccctgggcggccgcgtgggtccaccggtaaatcccggacagtgccctcggggcctaccagcttcccctattttcatttaattaaaagcttggggtattgagggaaataggggcttcctgggtgaaattgttaaacggttacaattccacacattctacaaacctgaagcctaaagggtataagcctggggggcctaatgggcgaactaactaacattaattgctttgtggtcactgccctattgccagtttgaaaacctgtaaacccagctgccttaatgaattagccaaccccccaggagaggcggatagcgtattgggctccagggcggcttttttt

SEQ ID NO: 118605 - DNA, 465 bp, Glycine max
  unsure (1)..(465): unsure at all n locations
  Clone ID: PAT_MRT3847_78109C.1
tnnttnnttttnnnaaaaagggacaagcttccctttccgaggtttctttgatataatcttgggggccctgttgcctgtgttctgggaccaaattgggctttgcttctttaaaaccccccaggattcggggggtccctttcggaaacttttttcttacaaaaaaggaaggacccattttgaaattggggggcccaattcgggccttttggcacaaaaactgggaaaacttggggccaggggagtttaacctgtttcgtggccggggggggattcaaccccccggttttttaggttttttgattttttcccaccctttggggaaaaatgaattttttttttttttaccggctccctttgggggtgggccccccacaaaatgggggagtttttgggtggggaaacatttattttatttccggggggggctttggaacaagataaccggaaagggttccgggggggggg

SEQ ID NO: 118606 - DNA, 919 bp, Glycine max
  Clone ID: PAT_MRT3847_7810C.1
cggctgcgagaagacgacagaagtgtacgtaaccgtaactgcactgtgaacatttgaacccaatccccaactcagcactgcatcgtgaagccgaaatggggaaccaataccaccaagcaacagatgggcttctgagccttttcacaaaggccaatcacgatctctctatggttcaccatcgtctcgaaaaggagtttcagcaggtttaccccgacaacgctaaccctatgaagctggtttctagaatcaagaaggttcaggaagatatatcaatcttgaaggggcagtgccatgagcttctggctgctaagcaggatttgattgataaggctcagagagttctggtggagaacagaaatttggtgcagcgtatgcagccgtccttgggcatctccccctctggtgaagatgatgctgcattcactaacttcaaacaggtaattgaagaatggacagcacaagtaagatccaaaacagggaatgaaacacatgatgctgattctggagatatcaacaaactactattctcagctatagttcaaagtaattgatttgctatctcaaggatagtagatgttgcagatgccaagctccttgggtttcactaatgatacataacatagacttgtaatgtagtatgcttctagttggttattgttcttttaagatgtagctgttctaggttcactaactggtgtgcctcttttgttggaatggctagtagaaaacaaatttgattttacttatataaagaaatggaattgtgttcacagaaacaatgaataatgttcactgactggtgtgcctctattgttggaatggctagtagaaatcaaaattgattttacttatataaaaaaatggaattgtgttcaaaaaacaaaaaaaaaaaaaaaaaaaaaaaaaaaaaaaaaaaaaa

SEQ ID NO: 118607 - DNA, 174 bp, Glycine max
  unsure (1)..(174): unsure at all n locations
  Clone ID: PAT_MRT3847_78110C.1
ggattgggtttggttctcagtgtacncaaaaacagaggnagnaggaggnagaagtanaagnanattagagagagtgagtgngtgagcgagggntaattggcgagttagggtttngaattgacncactgagttttgcattgtgtngnggttnnncnnttcgcnggagaaanatcg

SEQ ID NO: 118608 - DNA, 1257 bp, Glycine max
  Clone ID: PAT_MRT3847_78111C.1
tatttttttggatatttcctgtatctgctgtgtctgtctgtcccatttcatttcacctctctttcctaacccccaacgccacgccactgtcactttctccaccaatgtgcaccaatagcaataataagaatcatctctcacttctccattaaaattaaaatccaatctaatctgggtttccctttctcccatcagaggacaaagcttccaactttgcgggattcgtatttgttgtttcagtgctgtgatggggaaggtcgcggtgggagctgcggttgtctgcgccgccgccgtctgcgctacggcggcactggtggtgcgccaccgcatgattagttcccggaagtggagtcgcgccatggcgatactgaaggagtttgaggacaagtgtgggaccccaattgtgaagcttagacaagtggctgatgccatggatgttgagatgcacgcaggtctcgcatctgaaggtggtagcaagctcaatatgttgatcagttttgtcgataatctccctactggggatgagaaaggactcttttatgcattagaccttggtggcacaaacttccgaacccttcgagtgcatttaggtgggaaggagaaaggtgttgtcaaaatagagtctgaagaagtttccattcctcctcatttgatgactggttcttcacaagaattatttgattttatagcatctaaacttgcaaagtttgttagttctgagcctgaagagttacaccctccccctggcagacaaagggaactgggttttacattctcatttccagtgaagcaaacatccatagcatctgggactctaataaagtggactaaaggtttcaatattgaggatgcggttggagaagatgtggtgggtggactaaccaagtccttagaaaaaattggtctggatatgcgtgttgcagctctagttaatgacacagttggaactgtggctagagctagattcagcaatcaggatgtcattgctggagtgattcttggtacagggacaaatgcagcttatgtagagtgtgcacatgcaattccaaaatggcaaggtcttctaccaaaatcaggagagatggttattaacatggagtggggtaatttctgttcctcacatcttcctctacagaatatgatcaagctctagatgcggagagcttaaaccctggagaacagatttttgagaagatagtttctggtatgtatttaggtgacattgtaaggagagttttgttgaaaatggcggaagaa

SEQ ID NO: 118609 - DNA, 617 bp, Glycine max
  Clone ID: PAT_MRT3847_78112C.1
ccacgcgtccgacatttttaagcatgataattatatcttatatttatcatgaataatttatattatgatataagataatttctaattattagtaactctttttttaaaaaaatattaaaattcattttaaaaataataataaaaatgatatatcgaaagagataagacattaaaaaatctcttaaattgtttttgttgaagaaaattgtctaagaacactctcagactaaagataaagaattactgagagacttgatgtgggtgatctggagggagagaagtggctgggtttagtgcttaagttggtagagatggaagacgctgcaaaaccacacatcgaggggaaaggattaggtattgggctcaattttttatagtcatgagtaggaactgggaagggttctttactcttatccttcatagactttgtgccattctgggtatttttattttatttatgaatttaaaaaaaaaattgaattaatttttcaacaaataattataaaaagaggaaaataaaataaataaagcatatcatataagctaaaattattttatgcaattattttatgtatttttcaacaaaatttcttttacctaaattctttaaacattaa

SEQ ID NO: 118610 - DNA, 1861 bp, Glycine max
  Clone ID: PAT_MRT3847_78113C.1
ctggcgtccgaacaaaagtctgatgtcctgagtgtaggttcccgccatcttttcaacaaccacaagttcccaaccactactataaacaccacaaactcctctcctctcttgtattgtctccacacgtcccacggaagcattgacacccaaggaatcacagcaaaaaaagacttccaacttttgcccgatccgattttgttggattccctaatcccgattacttcatagataccaatgacgttgtccgttctctgtatcaacccaccaaccccgcactaacatccactggtacaacaccacaaacttttctcttctctcttttcttgttttcaaatctcagacggaagaaataacaaacaagaaatcataggaaaaatgccaccttttgccggctccgaaccagttgggttcccgaagccagattccaacatagtttccattgacgtgggaggccaactgttccaaaccacgaaacagacactaacctcggcgggtccgaaaaccttcttctccagaattgcggcggaatcttctggactccacacccccttcgtagacagagacccagaactcttctcgctccttctctctcttctcagaaccggtaaccttccctcaaaggccaaagctttcgatctccaagacctaatcatcgagtctaaattctacggcatcgagtccctcctcgtcaattccctttccaacccttctcaattggaaccttttaatctccaaaaatcgcttcttttacccttgaacggacgcgattccccctccgccctcgccgccaccgcttccggcgccctccaggtcgcgcacggcagcaagatcacctccttcgactggtccctccgccgcaaatccaccgtcctgactcaatttaccgccgtggattccctcctcgccctctcgccggccctcgccgccgccggcgccaacgacttctccggcctccagatcctcgacctcgagaaggggcgcgtcagggaaaccataaattgggaaaacgtcaccaaatccggctccaccgtccaagccatcggatcctcgccggaaaacatgttcgtgagcttcgaatcttcccgcagaaactcgaattcgataatggtttacgatttgcataccctaacacccgtcacggagatcagtcacaacgagatcttcggcgcgaacatcgattcggcgattccggcgacgaagttgcaatggattgagggatataatttgctaatggcttctggatcccacagtgggccctcgggcgtgagcgggaacatacggttgtgggatgttcggtccggcaacgttgtttgggaggtttctgagaaggtagattgttttgctgacgtggcggtttgtgattcgctgtcggttatttttaaggttggggtgaattcgggggaggcatcctacgtggacttgaggaatttgagtagcggtgagagcgcgtgggtatgtctcggagataaaagaaaaattttgaatgggaagaaggaagggtttggttgcaagattgaaacgcaggggaatcaagtgttttgcaccaagggtggtgacatggagttgtggtcggaggttgttatggggtctgggaacagtgggaggatcttcaagaagaacctgatggggagagtgagggatatgggtggggccaagattaccaatttggcctttggagggagccccatgttcttgactaggaaggatcaacaatgtgttgaggtgtggcagagttcttctagggagttttgatgagtttgttactttctttcttattttattcaaaaaaattgaagaatagttaccttgccaaagagggttggtttgcttgcatgcttgtaatgaacctttgctggcgtgt

SEQ ID NO: 118611 - DNA, 2067 bp, Glycine max
  Clone ID: PAT_MRT3847_78114C.1
gtcttttgtcaccccgatagattaagattagattccgcccacgtgaatcaatggggaaagtggcggtcggaaccgcggtggtttgcgcggcggcggcgtgtgtcgcggcggctctggtggtgcgccaccgcacgaggagctccggaaagtggggtcgcgcgacggctattgcgaaagagcttgaggagcagtgttggacctttttttcgaagctgagacaggttgctgatgccctggacgttgagatgcacgctggtcttgcttctgaaggtggatgtaagctcaagatgttgatcacttatgttgataatctcccttctggggatgagaaaggactcttttatgcattagaccttggtggcacaaacttccgaacccttcgcgtgcatttaggtgggaaggagaaaggtgttgtcaaaatagagtctgatgaagtttccattcctcctcatttgatgactggttcttcacaagaattatttgattttatagcatctaaactagcaaaattcgttagttctgagcctgaagagttacaccctccccctggcagacaaagggaattgggttttaccttctcatttccagtgaggcaaacatcaattgcatctgggaatataataaagtggactaaaggtttcaatattgaggatgcggttggagaagatgtggtgggtgaactgaccaagtccttggaaaaaattggtctggatatgcgtgttgctgctctagtcagtctcactctcctctcttttggatttctttattttttatagccaggatttgagcatgatggtttccagtttgtgtctgacagaaatttggagttataaggttaatgacacagttggaacagtggctagagcaagattcagcaatcaggatgtcattgctggagtgattcttggtactgggacaaatgcagcttatgtagagtgtgcacatgcaattccaaaatggcatggtcttctaccaaaatcaggagagatggttattaacatggagtggggtaatttccgttcctcgcatcttcctctaacagaatatgatcatgctctagatgcagagagcttaaaccctggagaacagatttttgagaagataatttctggtatgtatttgggtgaaattgtaaggagagttttgttgaagttggctgaagaagttgacttctttggagatactgttcctccaaaattgagaattcctttcgtacttaggacacctgacatgtctgcaatacatcaagatacatcttcagatctgaaggtggttggaaacaaattgaaggatatattagagatcaataacacatccctgaaaatgaggaagattgttgtggaactctgtgatattgttgctaatcggggagcccgcctttctgctgctggtatttttggcatcctcaagaaaataggaagagacacagtaaaggacgggaagaaatcagtagtagcactggatggaggattgtttgaacactatactaaattcagaagttccttggagagtacactaaaggagttgttgggagatgaggcagctgagacaattggcattgagcagtctaatgatggctctggaattggagcagccctcctggcagcttctcactcccagtatttggaagtgcaggagtcctgaagatgtggtttaatgtcaaggtaaatcagtgtaacactagtttcatttttttgtatacctactagatcaacagattgaagcagaaaagtcttcgttactagtcctagagagcttttaaccaggaaggtggaccaagtccacagtggagttatttgtagggctgtgttcttcttgctgcaaatgcaacattgctgcttctcggctaattactggtgcattgttttggttacagtgtttgtctctcccacatcaaagaataataggagagatgtaaacttttgagttgtctcgttttcccaatgtaacatgttttcaatgagaataagtcaggattaatttattgacaaaggtgaatgatttcaattcaaggcttttgcgagttatcaatgaagagttgagtttatttattaaaaaaaaagaaaa

SEQ ID NO: 118612 - DNA, 280 bp, Glycine max
  Clone ID: PAT_MRT3847_78115C.1
aaaagacgaccaaaaggggaagaagaaacaatggtaaaaaaaatttgagaaaaaaaaaaataaaaaagggttgaattggtttcctctccctctcccaaaaaacaaactcaacccaatcctcaataatcacctatctaaagatttcttcattcctcactcaatcatttctgttttcatttccctctttgatatcctcgttatcgccgaatcagctaccactaagatattgttttctgatgtaattttcgtcctgttgttaattgactcagttgtctgaatc

SEQ ID NO: 118613 - DNA, 1176 bp, Glycine max
  Clone ID: PAT_MRT3847_78116C.1
agaataatcttacagatatacaaaaaataaaatgtacactccctttatattttttttttttttcggaggtaaactgtattatgaagccaataaaagaaacaagtaaaggcacttgcagcctactaaaatgtacacactcttcacgtaaagttataaaccaaaaattggcaagcaataaaatttccagcaacaattaattgagaaggcaaagagcaatagtcacaaaagttaccataccatcctaaacaaacaaaataatccacaagaggaagatctttttgctgttaaaagaatttgttatactggctggtgagagagtcccttagatttgagtacaagccatagagagagtactgccgcaggttttccacttcaaaccatgaattaagcactctgagatgcctgtctgtaccagaaaatgcaagctgaattccaagactacaatctactgcacctcctctgcctttgcaagatgatgttctgattgcacaatcttgtttgttgaggcataccaagttcgatttccccttgcatgaagaacagccgtctctcttccagtacaagttatgcagcctacccctctgaaactctagcaccagtgtaaaacttgtcacggtgtatgtgctgtttgcgacaaacgcaagtggagaacgtgcagcatatttctttcccgcaaatgccaccatatatccaccgtagttatcagggaagaaactagaggtgttgatggtgaggagagagatctcatcaactctgggacggaagagagcaagctgagcgttggaggaagagagagagaggcgtcggtcacagggagagagctggagggactggttctggttgtagaagaaagagtccctggaactgaaggcaatgccaaaagtgaagccatcagatctctgaatcctggcatcagaacaaggatggtacacactgttggtgttggtggcagcagcagcaactgcagataacagtggcagcagcagcaaccacgatgcccttttgagtgccattgttgtgcttggctttgatgatgatgatgatgatggtgtgttgggagatgcttggctttgttttgtttgtttgtttctctcaactttgaatctactggctactactaatgaggtgtggcaggtttatcctgtgtacagctacagtctttttgagtggcccgtc

SEQ ID NO: 118614 - DNA, 658 bp, Glycine max
  Clone ID: PAT_MRT3847_78117C.1
cttctatctttgtatcttctccatgaacaaagccctcatcattttcatctgtttccgcaccatcatcatttacagtttcactagagacattctccattaaaacaccactcccagtttcattttcatcaattttcttgaattcttcatgaacaacagtatcaatctccgcagaaacatgttcttttatttcttcttcttctctctccattattcttcgatggagatcagagtcattctccacgaaaacagagttctctgtttcatcttcatcatttcttttaccatcttcatgaacatctgagtcagtctccatgaaaccaagctcctgcgtttctctttcgatttccctattattgtcatgagtaacgtagttgtcagtgtcactattcataaaagaagatcctttttcttctattcccctactcataccatcttcacgaatgtccgagtcaatctcttctgaaacagagctctctgtaggcacctctgttttcaccccatcttcatgaacatcacagtgggtgtccataaaaacagagcactctgtttctccatctcttttctccctttcaagagcaataatctccatggaaaaagcagagcaatctgtgtctccatctcttttctcactttcaggagcaacctccatgaaagaaac

SEQ ID NO: 118615 - DNA, 247 bp, Glycine max
  Clone ID: PAT_MRT3847_78118C.1
ggggggggagaaggtgtttgtaacgttctttcgtgtatgttttacccacatggaacacgccgttgcggggtcttcatcgatttgccaggacaaataatctcaagatgataataaagagtttcatttcttcgctgtctttgacagccaccgctgctaacacgtagcgactatgcgtcaggagaggttacactaaatattgatggaagagattcacaaagctgaatgacaatttggaatggcactcaac

SEQ ID NO: 118616 - DNA, 1199 bp, Glycine max
  Clone ID: PAT_MRT3847_78119C.1
aaaaataacaaatatcaaaaggttcgcagctaggcaggaacaatgaatcactcatacgcgaatcaatcggctcaagaagttaatatagttacagaggacacaagaagatctgcaaattataaacccaacatttggaaatacgattttctgcagtcacttgacagtaaatatgatgaggaagaatttgttatgcagttgaacaagcgggtgacggaagtaaagggtctttttgttcaagaggcaagcgttttgcaaaaactagagttggctgattggatccaaaagctaggccttgccaactactttcaaaaggatatcaacgagtttctcgaatctatacttgtctatgtcaaaaacagcaacattaatcctagcatagaacatagtttacatgtatctgcactatgcttcaggcttttaagacaacatggatatccagttttgcctgatactttaagcaactttttagatgaaaaaggtaaagtgataaggaaaagctcatatgtttgctatggtaaagatgttgtggagcttcttgaggcctcacatttgagcttagaaggagaaaagatcttggatgaggccaaaaattgtgccataaattctctcaagtttggtttctctcccagttccatcaacatcaaccgatcactccaatctggttgttgaaaaaatggtccatgccttggagcttccatcccattggagagtacagtggtttgaggtcaaatggcacgtggagcaatacaaacagcagaaaaatgtggatccaattttacttgaattgactaaattaaatttcaatatgattcaggccaaacttcaaatcgaggtcaaggatttatccaggtggtgggagaatcttggcataaagaaagagttgagctttgcaaggaataggttggttgaaagcttcatgtgtgcagcaggagttgcttttgagccaaagtataaagccgtcagaaaatggctcactaaagttattatttttgtactaataatcgatgatgtttatgacatacacgcctcatttgaagagttgaagccgttcacattggcatttgagagatgggacgacaaagaacttgaagaacttccacaatacatgaaaatttgcgtccacgcacttaaagatgtcacaaatgaaattgcttatgaaattgcatgataaatatgtagaataaaaacaatcgtttcac

SEQ ID NO: 118617 - DNA, 449 bp, Glycine max
  Clone ID: PAT_MRT3847_7811C.1
ggttaaaatatatttagttttatatttttcttgttcatgtaattatccaaaactaacgttttttttttttttaaaagggcggagggccacggaaaatacaacaaaaaaattaattctacagcccagcaggaattaaatttgaacgaaaactcagaaacaaaataggacctgaaaacactaaaaagcctaacccaataacggccaaaagcccaaactctgaccacaccatcggggggggcaaacaacaaaaagtttcccaacttttttccaagtcaaacttgtgcaaaggaaaaaattcttcccgggggagataccaccaccggggggggagggtttctcaaacaaaagggcaaccggcaaaaacttaactattctgggagatttccaaaaccgacaacttgttggtcttttttaaaaaccaggagatcctttacgtggtgcgggggaac

SEQ ID NO: 118618 - DNA, 236 bp, Glycine max
  Clone ID: PAT_MRT3847_78120C.1
attaccaggcggtctttgcttttgctttcatttataaaagaggccactgtgtcttaacaagaaaagcggcccccttaaaaccaaaacgcctaatacgcccaaaaaccttggtcggggggaagtgacaaaaaaacccctaacaaaaacctccccgctgagtggggattgtctaaaaattaaagggtggggggaaaaaagaacaacccagggggggggggacaaccgggctataaaat

SEQ ID NO: 118619 - DNA, 274 bp, Glycine max
  Clone ID: PAT_MRT3847_78121C.1
ccccagggtaaaatttggagaatcatttaaatcccttgaaactgtttggaaaaaaaaaaaggtatatttaattttctgagacataccctacatgaccagggtttttttagggtcctttattcttttttaaagccacatattggggcggctttccggcataaattccagtgaagggccctgggcgatattttaggggcaaaattgtggaatctgctccaattagtggaaactttcaagaatataaataaaatccttccccggggatctaaaattg

SEQ ID NO: 118620 - DNA, 643 bp, Glycine max
  Clone ID: PAT_MRT3847_78122C.1
cccacgcgtccgatagcactcgagccgaatcgttgagagcttagtttctctcatacaaaactccactcaccgtgttaatcaaaagtacttgttttctagttgtccataccatccccatccatcaacgtgacaattaagatttgtgattataagaagattgaattaatgtgttgtacctcttgctatctccgcctatgcacctataagagtatgcagtttctactttgttgataaccacatgctctctacatcttacaaagaagcatcctctatagactaatgggtttgttcagaagtaagggtgtgatttataggccagtgaaggatgttaacttaggtcctgatagcactgaattctatctccaagccaatgtcaaagctccccgcatgactggaatcctggtcaagattttcacttggttcttggagtctccaatacttggacccttgctattgtatatattgaagggaaacaatcttattcataaacttattacaaatgcagacttagaagagtcacccctctatgttccctcacatcattttgaagaccacaaagaacaagaagtcaaatgcttggattctgctttaactcctgaagaacaagttcaacttgcaatagagtgcttacctacatcttcag

SEQ ID NO: 118621 - DNA, 418 bp, Glycine max
  Clone ID: PAT_MRT3847_78123C.1
ccatatggccatttctctgcttactgaacattatggagcatgcagatatccacctgttgagcaggtaacgatgagcactgttcgtgcaattgcacgtatcattgaccgctgcttagactgcactctgacagaccttcaggcaacgcataagattactccgtgccagctcactgcgtatatggctaatccactatactatactggtgcaatgattattgctggagatactctagagagcgatgagttatagcacgatcttgaatctacggacaagcactttttcgaaacttgtgaagatctcgattacacttggttacactacacgctgaagatactttgctaccccattagagcatataattctacgttttcctaacatattgcatactccacaggatctcctttctggtcagcgccg

SEQ ID NO: 118622 - DNA, 406 bp, Glycine max
  Clone ID: PAT_MRT3847_78124C.1
gtacgcgcgagaagacacagaaggaggggagatttagcattagccaatcacaaacaccagactgggcacatggcatgccacaatggaaagtgaaagtcactaacaaatgtgcgtgtgctcaatcacaagtgaagttgaactgcagtgaatttcaaacaaattttgttgagaacccatcaattttgaacatttctggcaatgtgtgtcttctaaaaaacggtcttcccattggtataggtgaaactgtagagtttttgtatgcatggcttcctaagtttccatttcaacccatttcttctataggagattgcaactaattgatcttaagtagaaggattgcaaatattatttatttccccatgtaaaagtttaattaatgaaagctgcaaatgaaataattggtact

SEQ ID NO: 118623 - DNA, 631 bp, Glycine max
  unsure (1)..(631): unsure at all n locations
  Clone ID: PAT_MRT3847_78125C.1
aatatagtatcagtataacttgtaatgctgcagtaactaatctcggaattctctagacgacccagcttttcgtggacacatgggctgacgcttgggataaaaaaaaaaataaaaaaaaaaaaaaaaaaaaaaaaaaaaaaaaaaaaaaaaaaaaaaaaaaaaaaaaaaaaaaaaaaaaaaaaaaaggggggggccgtttaaaagaatcaaagttaacttacccttgcatgaaaagtaaaagttttttaataggngaactaaaattaaattaattggccgtgttttaaaaacttcgtaattgaaaaaaccttggcttaaccaaattaaatcgctttgaaaaaaatccccttttcgcaagttgggtaaaaaaaaaaaaggcccgaaccaatcgcctttccaaaaatttgccaaccttaaatggcaaatggaacccccctttaatcggccaataaagcgcgggggttttggtgtttaccccaaagttaaccgttaaatttgcaagggccttaacgcccgttcttttggtttttttcctttcttttttggcaagtttcgcgggttttccccgtaaagttttaaatggggggttcctttaagggttccaattaaatgtttaacggaacttgaaccc

SEQ ID NO: 118624 - DNA, 335 bp, Glycine max
  Clone ID: PAT_MRT3847_78126C.1
ccattctttctttcacttttttcgtttcataacgcgcccaattgcccatctcttggatcacctagaagacatcaatggcggcagtgtcagcaataataatattaataagctctagctgactggggtcggtgcctccttttttgagggcgggacccggctcttcatattgacggctgccatgatgatagtccatgtctcgccctctataaactggactgcgcacccatgcagtgaggtattaacattactattgctagacctggacgctttgatgtcttctaggggctcaaagagagcgtaaatcgcccgcgttctggaacggacgcgtgggcgga

SEQ ID NO: 118625 - DNA, 589 bp, Glycine max
  Clone ID: PAT_MRT3847_78127C.1
aaggggaaaccattttcccattttttttaaagaccataattaacataaaaataccccatccaaattttcagatttttttggacaactaaaaaaaaatactagggggggggttcaaaatacctcatccaaattttcaaatttttttgcacaactcaaaaaacatactaggaagggggttcaaaatactttatccaaattttcaaattatttatcaccaaaacccttgacaagcagtttttagggttttttggaaacttttccataaaaaacccattaatttttggactttttttccttgggaaaaactttggttccttttttggcccccttttccaaagcacatttgggagggggatcaaaggcacaatctccacagggggaggaccatatttgtcccttttcattggaaggatcaaagtaatacaccctggggggcgtaaacacaaggtcatgctcatggaattaaagcttaaacttttccggccaccccttgggaggctcttcttgggcgggctttatttctttaattctctcctcggggaaaggatatgcatttgctccataaagggaaaccaaatctcgagctttt

SEQ ID NO: 118626 - DNA, 472 bp, Glycine max
  Clone ID: PAT_MRT3847_78128C.1
ccacgcgtccgcccaagctcactttgcctaagtggcaaggcatatgcctgatgacagagactcctgcaatcatcaacatcagaccctctgggtaattactaatgctgagcactgaaccatgatgccttagcagcaaacagacgtcttaatgtgcctcaccctattgataaactttagctgcctcaatatagggacaccgtggacataacagtgactctgagacatgcactaataaaagcgagtagagctttgatatgccattcatttgtggcagtcccactatctgaggatatgaatacggaacgttacaagatgactttcttgactgttgaagcccttcctggacttctaatgaaaataggaacgggagactatgatgcatcctctgcctatgatctatatgcttgtgatcatgactacccttatgctgttgatggactaaagatatggagggccatccagacatgagcct

SEQ ID NO: 118627 - DNA, 340 bp, Glycine max
  Clone ID: PAT_MRT3847_78129C.1
tcgcgatctagaactagatgtggaaatagttttcaatatggttcgctagagcaattccacttaagacagctgcctctttttttttttttttttttttttttttttttttttttttttttttttttttttttttttttttttttatttttttttatttttttttttcaataaataccataccccttgggctttctcggatttttttcaagagatcctttttgccttccagatttttcttttattggctgcataataatttttgctattccttgttacaagtggattctttgttaaaattgtattcctttttcaattttaaacaaaattcaagtccgaagct

SEQ ID NO: 118628 - DNA, 218 bp, Glycine max
  Clone ID: PAT_MRT3847_7812C.1
ggcctctgctccgcataactcctcacacacacacacacaacagaacacaacacatacacatacacatgttgttgatgagtggagggaaggggaaacacagatccatcacacacatgaccaactgatctttgtcctttgtatataatctgattccactttttggcactaacagagccactcaacgctctgggatgtactatactccattcggggttctg

SEQ ID NO: 118629 - DNA, 408 bp, Glycine max
  Clone ID: PAT_MRT3847_78130C.1
ttatcgcgttctttagggtttgtaagacaaagaaaaaagatgcgcatgatgagtggaagggtttctgggaaggtcacatggttcaacgatcagaaggggtttggattcataacccatgacaatggcactgaggaactgttcactcaccaatctgacatcaaatctgacggttttcgaagactagctgaaggagcttccgttaagttcactattgcttttaaatctgcctggacgctccatgatgttgatgtcactggccccgacggctcccgcgtgcaatggacctgacgcagcgtggatcgacctcgactatatggcagtggacgatgcggcgtgacacggggatattactaagaacatgatcactgggacattccacgctgactgtgctgcttttatcattgattc

SEQ ID NO: 118630 - DNA, 419 bp, Glycine max
  Clone ID: PAT_MRT3847_78131C.1
gcgcgcccgccctgtatctatcttgttttttttttttttttttttttttttttttttgggttttttttttttttttttttttttatttattgtcttatttaatcttgttattgttatggtcattagttgtttcctgagggaaattgtattccggtccaaattcccagaaaaaaagagaaaaaacccttttttggggggccgggggggcccccgggaaaacccaaccgcattaattgcggggcactcactgccctatatgcagggcggaaaacggccgggcaaaaggcagaaaaaaaccgcccccggggaaaaaaaggatgcccgcaaaaaaccacaaaaaaaaggagcccctaaaaaaaaagaagacggccgggggggcccaaaaggggaccccccccccctagagggggggggcaaaa

SEQ ID NO: 118631 - DNA, 388 bp, Glycine max
  Clone ID: PAT_MRT3847_78132C.1
gagatcccgccccagagattccttctgtcgtcctttcaggaagaagggaacgattgctcttaccacatacctgagaacctaccacgtaggcgactatgttgacgtccaggttaacggtgacgttcgacagggaatgctgcacaaagtctatcgtggcacgaccggacacgtctggaatgtatccgaaagtgttgttggcgaccaagtcaacaatcacgttggtgactcaattatcacggagacgattcatgtgcggctagagcatgttatgccttcgatgtgcactgaggatttgcgtctcatgaagattaagagtgatcagctaatggccgaagcctatgtcaagggtgagaggatcagtacctggagacagtctatgggtggcaaa

SEQ ID NO: 118632 - DNA, 324 bp, Glycine max
  Clone ID: PAT_MRT3847_78133C.1
tttttgttttaaagcgcctgagccctttctttaactgcgggaacgaaattctaaactaaagaatccaaaaattcactcttaatcgtgacgaagacatttgagagcctatgataggccctgatagccaaaatgggcaggcttctcccgcgaaaagaagtaggtgaaaaaaacttgctgaacaaaacttgcgtactggtcaaatactaaagctgaagatcgtgaaaaaacatgaattgtaaataaggccctggtccggcttgcatagacaatatacatccgatcgcctggtcggacagaaaaaagaccatattctgcgaacgattt

SEQ ID NO: 118633 - DNA, 822 bp, Glycine max
  unsure (1)..(822): unsure at all n locations
  Clone ID: PAT_MRT3847_78134C.1
taccggtccagaatcccacgcaagcgtacggctgcgagaagacgacagaaggggactttgagttcgaactaaacaattcaattcaatctgcctcgatcatggagaggaaaacatttgggtttttgttcttgctcctccttgtcttagcttctgatgtgacggtgaagagagcagaggcgaaagattgcttgacaaggaggcacgggttccagggtagatgcttattcgacaggcaatgtgcacatgtgtgcaggagcgatggtttcatcggtggtcagtgccgaggccctcttcgcaaatgcttttgcagcaggccatgttgatcgaaattactactgccaaagaggccatgaaataaacaaacaaacaaataaataaatagctctaaccgacacatatgtacgtagtgtcggggttctagctagctaggtaggtacgtgtgtcttttgttatcgatcctagtttggtggagcaagtgtggcatcatgatctagttatatatatatgtcgtgatcatcttgctctgttcagcaataaattataatggaaattaataaattagttatgccttttcaattcggccactatacttttgatctcctctgaggttgcacccgatgatgcataccagaattttgacaaaacagatgggaagcgtagtgcaaatggggtagatgaaagcaaatattgccgtggaggctatggcgactattgtggttgncgttgtggnggttgccgnggnggcttatgaggcctgcggggggctattgtgggggccggggggctttgggggctggcggggggcnttgnggggggcggggg

SEQ ID NO: 118634 - DNA, 833 bp, Glycine max
  Clone ID: PAT_MRT3847_78135C.1
gacagaagggggaactaaacaattcaattcaatctgcctcgatcatggagaggaaaacatttgggtttttgttcttgctcctccttgtcttagcttctggtaagatacatatttatagttccgtgttattcatttggggcacataattaaattatttttcacgtatggtatttgattttttaacttaatattaattgtttttttattaatactttaattaatttttttaatctaatattgatattattttttcatttatttaataattattttggggggaagataggaatatcttgaccatatatgtgacaagttgatataatgaacttttaatttctcttgtgactaatctgatggtgtgaaaatagatgtgacggtgaagagagcagaggcgaaagattgcttgacaaggaggcacgggttccagggtagatgcttattcgacaggcaatgtgcacatgtgtgcaggagcgatggtttcatcggtggtcagtgccgaggccctcttcgcaaatgcttttgcagcaggccatgttgatcgaaattactactgccaaagaggccatgaaataaacaaacaaacaaataaataaatagctctaaccgacacatatgtacgtagtgtcggggttctagctagctaggtaggtacgtgtgtcttttgttatcgatcctagtttggtggagcaagtgtggcatcatgatctagttatatatatatgtcgtgatcatcttgctctgttcagcaataaattataatggaaattaataaattagttatgccttttcaacaaaaaaaaaaaaataaaaaaaaaataaaaaaaaagcgggcc

SEQ ID NO: 118635 - DNA, 752 bp, Glycine max
  Clone ID: PAT_MRT3847_78136C.1
agaaggtggaattacacatgtccagttttccagagatggaaattatttatatactggaggtcggaaggatccttacatactctgctgggatgtgcgcaaatctgttgattgtgtctacaagttatacagatcatcaaaaaacaccaatcagcggatactgtttgatattgacccttctggaaagtatcttggtacaggtggccaggatggtttagtacatatatataatctccaaactgggcagtgggtgtcaagtttcgaggctgctttagacacagttaatggtttctcattccatccatttctaccccatgctgtatcatcctcaggccaccgaagatttgtaattccagatgatggcaatgaagaattttgcttgactggtcgtgaaaactgcctctcaatgtggactttctgttgtgattcaatgatggagacagatttgaagaacgatggcagtttcaataatcagtctgagagtaggtgcttggactgaaattcattaatgtttttgcggccaccttgtactgattaggtaaaagaagtttgttttgtaggcttgtagccaatgatcaaaacggttcactgttcaattgttccgtgtttgacaaaaaaaccaagctaagttttgcatatatatctcattatcctgtaaatgtaaatttctaattgattggacttatttgcctgtcattttgttgtgagatgtttgctactgttttttacttgctaatcaagtttcacccctcaaa

SEQ ID NO: 118636 - DNA, 360 bp, Glycine max
  Clone ID: PAT_MRT3847_78137C.1
agcaattttaaataatataacttttaatactgcgggggaacccaaaccgtgggagtgggcacattattatattaggggagattatactcaacagaaaaaaagaagaaaaaaaataacattaagaaattgcattaggaaacaaacaaacctattccttcaagggttacgaacaagctgtgaaatatttaaatcacatgtacataactggcgctaaacggtcctagacaaactcgaatctaaattggcttgtcatacttatccttgtcttggcagatacactcaataatgaatgtactatcccattaactacatatggtgtataggtaacacgtgattcacagactacaccaacttttacta

SEQ ID NO: 118637 - DNA, 240 bp, Glycine max
  unsure (1)..(240): unsure at all n locations
  Clone ID: PAT_MRT3847_78138C.1
gtttggattccatcgagacaacannggaggcacgggaaggactgccaccccaacgcaggaggngcaagagacaaaagacngggccaaancctctcaggaaagagnngccaggacccaaaggggnnagaanccacaaaaaccannagcgggaaagaggnggaagggaaaaccgacnncaccccagggcactncccgaagcgggaagagaacgccccacactatagggggaggagcnggagc

SEQ ID NO: 118638 - DNA, 192 bp, Glycine max
  Clone ID: PAT_MRT3847_78139C.1
ttgacgtccacgcacgcaacggagcttgtatactgtacacgcctgcttttttttgctgaattaaggcccggaattgcaaaagagtgtttagtgaatgcatcattccaaagaaagaggggttaccaatggaaatttgatccaagggaaatccccctgccacattttggaatcttacacccaggaaaataattt

SEQ ID NO: 118639 - DNA, 221 bp, Glycine max
  Clone ID: PAT_MRT3847_7813C.1
ttgaagaacgacccctctcattgttatgccaatcgcgtttggaattggtgcgattgcatggaccatccgccggtggagcttgacggaaaatgtaccatagtcaaaggggcgtcatatatatctcaagagccaaaggaaccgcagagctagccgagctcactttaaataccatgaacatcaattccactgccgctcattgccagtagaagctggcatgaaac

SEQ ID NO: 118640 - DNA, 374 bp, Glycine max
  Clone ID: PAT_MRT3847_78140C.1
cggggccgaccacaggcgtccgccacacccgtccgtttacaagggcctaagccgattccccaaccattttttttttcttcaattcggccaccctttcttcttcttcacacggccacttccgcttccccttccccttggggcgggcagttaacttcttccttccgggcccgcccgttgggccgcctgggtttggccgggggggacccgttgttcccggcaagtgtaccgccccccgtgccgccggtaaaagaagaaggaaaggccccaagggggggtggtttcaatgccaaaaaaaaccgtgggggacctggaccgcggcggacctgaaggggaagaaggttttggtaagggccgacctaaacgtccggttggac

SEQ ID NO: 118641 - DNA, 926 bp, Glycine max
  Clone ID: PAT_MRT3847_78141C.1
gaagtctgtgcacggctctgattttgtgaagacagatgaaaagctttttgagttgcttaatgccattgtggaggaagttgcacaagagaatgttgttcaagttgtaaccgataatgggagcaactatgttttagcgggtaagttgttggaggagaaaaggaaacatttttattggactccttgtgcagctcattgtattgatttgatgcttgaagatattgggaagcttcccttgataaggaagacaattagaagggcaattaatctagttgggtttatctatgcccattctagtaccttaagtttgttgagaaattttacaaacaagagggaattggtgagacatgctattactagatttgccacttcttatctaaccttggaaaggcttcacaaagagaaagccaatattagaaaaatgtttacttctgatgaatggaccttgaacaaactatctaaggagcctaagggaaaagaagctacaaaggtagtgctcatgccttctttttggaatagtgtggtttacactcttaaagtcatggctccacttgtgaaagtgcttcgtcttgtggatggtgaaaggaaaccagccatgggctatatttatgaagcaatggacaaggcaaaagaaacaattatcaagtctttcaacaacaatgaaagcaagtacaaagatgtgtttgcaatcattgattaaagtatggaatggtcagcttcataggccattgcatgcagctgcccacttcttaaagccagagttcctttatgacaacactgacttagagtttgattttgaggtcaccaatggtttgtttgagtgcattaagaagttgattccacaatttgatgtgcaacagaaaattctaaccgagttgcatctttacaagattggtgctgaccactttggttccgactttgcaatggct

SEQ ID NO: 118642 - DNA, 324 bp, Glycine max
  Clone ID: PAT_MRT3847_78142C.1
cagccagaaactcccactgggccttcattatttatttaactacctgctacaactggggggggtatacaaagaagtgggcaactgactagacaagatggtcaaatattttatagtctgttgaatgagaacaactctcaggtatcacttgaatggcttcatgattcaagataacaagaacacatttggacttgcagctgttggaccctctaaggatccacagatgtaaaacgtagaggaagcaaggacactctaccctatggaaatgtaccataataggaaataaggtcgttctagcaaatttttacaggttgctgtgaaaaacta

SEQ ID NO: 118643 - DNA, 396 bp, Glycine max
  Clone ID: PAT_MRT3847_78143C.1
gaactaggatgacaaggtggtggtgctcgtgccagggccagtgtattacggtggataaactgaataccacaggggcatcatacttcctaacgccgcgtttgcagatccagacggcatccacattcatcaatccatttactgggactcttctgctcgtttcaactgcccttactgcgcttataccgttctcactaccgctagatctgtgccaagtctggcagcattcgttggatgctagatgccaatgacgcttgcagatcgctttctttgcccttcaatggattgcctttgtcatctatatcactactgtgctaaatgtctagacaaggctgctgatactgagaaatctgatccctgtgtcgtgatggatccagctcactggactgatgtgagctc

SEQ ID NO: 118644 - DNA, 1230 bp, Glycine max
  Clone ID: PAT_MRT3847_78144C.1
gccccaattcgtcgtggatgacacaactgagagcttccaatggtttttccttcctcctccctctccctcttcttccccattcccactctgcttcctaataaccttatcttcagaaacaataccagggcaatccttaatcaacacaaatgcccattctccgaggaaagaccacgcttttcatgttgtgctctaaaacccacttcacaaaacaggatttttagaagggatttgatgctgttaggccttacttcgttatctccaacaatgccactttcagtgacacttgcggaagaagaaccaaaaatggcttcatttcttgacgaaataaatgcctattcttatatgtaccctgttgagttaccttccgataattttaccttcaaatggattgaatcccgaaagccagaacgatattcactcaagctgcaccactttctcctgatgcacgccctgcgcattgtgtctgagcgtcttgactttattgataatgtcatcatttctgtcacgataggtccaccaaattcaagctatataaaatcaaaaggataagaagtaaatggaactgcaaaaaatgttgctgattcagttttagctgaccagatcttccctgcgagttacctcaagtcagcgcttagaagagagttcggttcttaatacccattctagtgaaattgatggtgagatgtactggtattatgaataccttgttcgtaaagcacctttgagacttaccgacgaatcaagcacttacaggcattatcttgcttcaacagctgaaagagatggttatttgtactctatcagtgcttcaaccgtcagccctctgtgggaaaaactggggcctttccttgataaagcggtgaattcgtttcgtcttcttagcccaacagaaaattatgttcctccgtacaaagatccctggagattttggtgaaatctcaatttatttttaattgtattcatcaattcatgggatctttttttaggcgtgaaatttatgtaatcatttaattgttcttcgaagaaggcaaacctaattagcatcccatattctttgggttatgtcgcaaattatattagattcttgcaaaaagatgagagcagaacttgaggccttgtaaattgtaattctgtttttttttgctaaatgtactttttatttttatcattgctacaacatcgtttggaccatgaaacaatccaacatcgataataaaactcagttttttc

SEQ ID NO: 118645 - DNA, 292 bp, Glycine max
  unsure (1)..(292): unsure at all n locations
  Clone ID: PAT_MRT3847_78145C.1
anaagntnnancgnannannnngnnnnncnnnnnnnnncnnnnnnnnnnnnnnnnnnnnnnangnnnncctcataatcattttctcttctattacaattctctttccctttgaaaccactttttttcttcttctcttgtttccttttatccattgcgttcgncagggcgatgactnctccgacaattccacttctcgcgatattcccgatcctcccggtttcagtcgcacttctctcgatcaggacgattcaacgctcagtcgccagaagaaggacgctgaatccaactgga

SEQ ID NO: 118646 - DNA, 1136 bp, Glycine max
  unsure (1)..(1136): unsure at all n locations
  Clone ID: PAT_MRT3847_78146C.1
gacccatcgcgtccggtgggatgacacaactngagagcttccaatggtttgctccttgcctcctccctctccctcttgttccccattcccactctgcttcctaataaccttatcttcagaaacaataccagggcaatccttaatcaacacaaatgcccattctccgaggaaagaccacgcttttcatgttgtgctctaaaacccacttgacaaaacaggatttttagaagggatttgatgctgttaggccttacttcgttatctccaacaatgccactttcagtgacacttgcggaagaagaaccaaaaatggcttcatttcttgacgaaataaatgcctattcttatatgtaccctgttgagttaccttccgataattttaccttcaaatggattgaatcccgaaagccagaacgatattcatcagctgcaccactttctcctgatgcacgcctgcgcattgtgtctgagcgtcttgactttattgataatgtcatcatttctgtcacggtattttctcagcctcatacttatttgatggagctttagttatctattcaagttttttgtactaaattcagataggtccaccaaattcaagctatataaaatcaaaggataagagtaaatggactgcaaaagcttttgctcttgttatttagctgacttgctttctttttttcatggaacgaatgtggctgtaatgattacttttaatttgcaaatcatcattgtacagactgatgaatcaagcactttcaggcattattttgcttcaacagctgaaaaagatggttatttgtactctatcagtgcttcaaccgtcagccctcggtgggaaaaactcggtcctttccttgataaaacggggagttcgtttcgtttttttagtccaacagaaaattatgttcctccgtacaaagatccctggagattttggtgaaaactcgtttttatttttaattgtattcatgtgatcattttttaggggtgaagtttatgtaatcatttaattgtttttcgaagaaggcaaatcgaaatagcatccccttttatagttagattcttgcgaaaagatgagagcagaacttgacgccttgtaaattgtaattgtatttttgctagatttttttttt

SEQ ID NO: 118647 - DNA, 447 bp, Glycine max
  Clone ID: PAT_MRT3847_78147C.1
gggaaaaaaccccggggggggaaaaaaataatccctttaaaaggggtttttttcccaaactaaaagacctttgaaaaccaaaaaaacctcccgggggggtaaccaaaaagcttttttaacccttaccgccaaccatgaagggttcaatagttaaattccctcaatcctttgaccctagaaaaaattcccggaaacaaggcccaactaaaccttttttttaacaaaaatttaaatcccaatgggtaacaaaagggggaaaaaaaccaacccccccccggaaaattccacacgttttgggatcccctggaaaattttctcaaatgggtaaaaaaaaaccaaaacaattagttttcttcttttcttccgggggaaggttctctttttcctttgggggggttgtctttgccacaacctgatcatccccgcctccaaaaccaaatttattaa

SEQ ID NO: 118648 - DNA, 418 bp, Glycine max
  Clone ID: PAT_MRT3847_78148C.1
tccggaccatatattcctcttaatcttgatactgagtttccactgtgtataccttatgtcttccgaattcaaagatattttgcgatatgtatagagaaaaggctcatatcaacagtgtggtgtgtgcacgtgtgcaccctgaagaggcccccaccattaacgatctgaaaaactctggtgtggagaaagaatctccagggtgtgccatatgaggatgtgcacgcacgctctcagaggaaacccaaaaaattatgataacaatatactctgaaaccctagtgtatcagtgacctcctcagtgtgtagtataatatatctttgatatggacacgctctttgatatgagagtcgtgatgaacaacaccattctgatgtattgctttccttgaaagatagtgtgtgcttcatatcttctgtc

SEQ ID NO: 118649 - DNA, 486 bp, Glycine max
  Clone ID: PAT_MRT3847_78149C.1
aggtttctgtcatcactgtatgacgtcctccttctttggggggggggggggggcgaaaaacgactagggtttggaggagtaggaaggcgagcgaaacagtggaaatgaacatgtagttggaagtattataggttgtgcaatatggaaatacatgaaaaggagagaacaccaaccgcgtggttaacaacggttaattatggtaaggagcgataagtatattaaatgtgcgtaaggatgagcggtagcccgctgataaaaccggataaagcgagtatgccgcccagtgaggatagaaggatatattagtggtaaagtaaaccacatgagttaagggggttgtggggaggatgcgggggggggggtgggtgaggaaacttacccgataaaatgcgaaatacgtaaaatgttaggaatgacgcaaacgtttttcgttagtacgtggcaaattggccttgtagtactgcctgggccacggcgtactaacat

SEQ ID NO: 118650 - DNA, 352 bp, Glycine max
  Clone ID: PAT_MRT3847_7814C.1
gagaaccccaccggcatgcccttttgaatatctgtcaaagaggcgtgcaagcgggcgaggggactcgcgctgagagacccggaatataccgaagtatataacgcggcgatgggcgcatgttgttactacatcaggcaagaagtaatatagggaccatttgggactggcgaagcccaatgccatgccgatgttcaacatgaccacgtacaagtgcgtgtgtaatacacatacgaaaccagaccaatcgtcgcaaacgacataattaatcacacagatggtgctaacaaaacaaaaaatgacgggttatatgctataaaccacacagggagcacaatatataatttattcaaat

SEQ ID NO: 118651 - DNA, 283 bp, Glycine max
  Clone ID: PAT_MRT3847_78150C.1
ccatcgccttctaaaggacgagaatcaggagaggcatatagcactgctggaacgactttctaagcgcactaagatccgtgcacagagtgactagtcttggttcatactcatacgcttctagcatctaaaagcctgcatagagtgactaactaagtccaatgaacaatacattttctgagaccctttcaagctaagactggacattaagcaaagctacgaatctatctgcgaattagaagaactagtctcagaaaactgctactccctacgactggtacgacgt

SEQ ID NO: 118652 - DNA, 444 bp, Glycine max
  Clone ID: PAT_MRT3847_78151C.1
atgagtatagtagacatttggttttccagaaaaaatacagacgaggagtatacttggtggaaaggttataagagacaaatgtggtaaacaatcaacacataaatataatattaaaaaaaatagcaaattatgatcgtctagtattttcaagcttgtcaatcaatatttaagtgatggaaaagagagatatttttgttggtcgaagacagcaggtaacgaaatttcactcatgtcaataccttgagagaatttgacactggtgtgctggctgagttattcgccttttgtcctctgaatacaccccaaaggaagaacatgccattccaacctggcaagcacaaacaagttggaaaggaaaaaatattagaaaaatgaattaaaaaataattacttatatagttaaaatctaaaaaataactgctaatgtagttatagtgatagtta

SEQ ID NO: 118653 - DNA, 502 bp, Glycine max
  Clone ID: PAT_MRT3847_78152C.1
gggcataatactcattttatctagttatttaacaatataaaaaaaaacatacaaaataaatgggtttctggtttgggaacttttagttagacttgatttaggtccttgtactttaaaattgacaaatttagtcttttaacttttaaaaatatgtaaatttagtccttcacgtttaatctttcacatttaggggcaattttttacggccacaaaattagaaaagggaccaaattcacatgttttcaaaagttagaaaactatattcatcaattttaaaatatagggaccaaaaccaatgccccgccacattgaaactccttgagctggtgtctaccatataattgaaaggaaagccagttagcattattggatttttttataaaaaaaaacatactccctccgtgtttatatatatatttaagggggaaaaaacaatatcctcaatcttgcattggaggattaaaaaccggggaggagtacttatcaacattttttaacaaaa

SEQ ID NO: 118654 - DNA, 319 bp, Glycine max
  unsure (1)..(319): unsure at all n locations
  Clone ID: PAT_MRT3847_78153C.1
cacgcaccnangannacgaaagcacnanaanacagcncgaccannacnncaactngaaacnacaacaaancacnncacagaaccacaaaacannccaaacanacaccnancnnacaaanaanaanaaccaccacnacacacnnacanaaacatcanananaaanaaaagcacaaancnaanaaaanaataatnnanggacgacnnnacaannaanangcagnaaananagnanacnananaagggaancnaannaacaacaancnacnanagaaacaaanaccaaccanaagacaaaanccaagnnacaatcccgaann

SEQ ID NO: 118655 - DNA, 112 bp, Glycine max
  Clone ID: PAT_MRT3847_78154C.1
aattcggctcgagaaaagataagtagtagcatcatacactaagaatctactccagatattaccaaatggaacatacaacttgctctgacgctgtgagcacactccctaatac

SEQ ID NO: 118656 - DNA, 186 bp, Glycine max
  Clone ID: PAT_MRT3847_78155C.1
cactactttacttgctagagacataactcaccacaaatgagcataagggtcttgtcttcatgtgtgaacttgtcttagagccactgactcgacttgtatattctctagcattgctttcagcatgatcattgccgatctataggcaacatcagactgctgctattctcttggctaccgactactact

SEQ ID NO: 118657 - DNA, 871 bp, Glycine max
  Clone ID: PAT_MRT3847_78156C.1
gaaatttttcttgtgctgatgattagaaataaactcttatacaaactatattttctgcaaatattttattttatactaataaatactatacgttgttcctcaactttttgtgctggtgaaaatcacattctgttgctactgaaggtattatgatgattctgcctgtgttctgcggaagatgttgttagatgcaaaagcacctcatctttcttcagcaattccgccaactttaccatggaaagtaaatgaactagtccaaccttctgagccactaactcgtcagggtagtggtattaatggcagttttggagattctgaggaactgcgttgtgtaattgctgttattcgtcatggtgatagaactccaattcggctcgagttacttgtaagttgtatcaccgattacattgttttaattttaattgtttgtgttattgtgattagattgcacgatattgggtaaaattttaggagctgaggaacactcgcgaggaagccattagtgttgctgagttaaagagtaaccaagaccatgattcattctctgtgaaaactgaaaaggaagatacagaggccaagtcaaaacttctcaacaagaatgatgaaataaggaaatccagcacattgaatgatatatcaatggatcaagaggacgatgatgataaagagaccaaatatcgtttggatccaaagtaagtattatgtctttgttttattttgtacattctcacttgtattctaatacttttttatcgtccacctctaggtatgcaaatgtaaagtcgcctgaacgccatgtgcgaacacgcctatacttcacatcagtaagtgctgtgttagattgtgttaataaccttgaacataaatttac

SEQ ID NO: 118658 - DNA, 320 bp, Glycine max
  Clone ID: PAT_MRT3847_78157C.1
ttccttctattttcccctctccccccccttttctttttattctctccctttccccacttgggctgggttccccttctcctcccactccccacctcctcttgcttaaacacaacctcttctctcaaattaaacttaaccggcaaacttattcaataaaatctacccttgcaaaattaaattctccaccttcccttgaaacaagtttagctaagccccattctccctatccccctgaccaactcctaaaattttatcccccctcctacccattctttccaaatccagcccctgttctttccatacctgcccctttaccttac

SEQ ID NO: 118659 - DNA, 364 bp, Glycine max
  Clone ID: PAT_MRT3847_78158C.1
gggagtataatgaatcgcatcgtttaaataattaaaaactcctgtgctaacaaaatcatctcacataattgggaaggcacgtgttctaaaacccatacctttatccctaaaataatgatcccgaatgaattacccatccatatatgggaaaagaaccaataagacagttaataaagaacctataacggaattcattatgtccagtctctgacctaatcatcattgcaatgcccggcgtcagtgtttttcttcatcacatttattcaactactttagacctggttcttttataaatttgatacagcaagccgttgtcgcttattacaagctgggatcttaccagggaaggcccaccctaacagtc

SEQ ID NO: 118660 - DNA, 1261 bp, Glycine max
  Clone ID: PAT_MRT3847_78159C.1
cccacgaactccctctacctgagaaggaggatccctgtgctagctcgatcaaagatcaaagatggaggagcggactcgcagcattctgattttgatgaccttgctttccatctccattgctggcggcaatgcaggtggcttgcagcatcataagggtaggcatggtaagcatggtcgtcatatgtctgctcgtaatgtgacttacgacggtaagtcactgttcattaacggaaggcgcgagatccttttttccggctccgtccattacacacgaagcaccccagatatgtggcctgacattcttgacaaagcaaggcgcggaggcttgaacgtcattcaaacttacgttttctggaacgctcacgagccagagcccggcaagttcaacttccaaggcaattatgatcttgtcaagttcattaggctcgttcaagccaaaggcatgtttgtcactctcagggttggtcccttcatccaagccgagtggaaccacggaggtcttccttattggcttagagaggtccctggcatcatattccgctctgacaatgagccctacaagtttcacatgaaagccttcgtgtctaagattatacagatgatgaaggatgagaagctctttgctccccaaggaggtcccatcatcttggctcaaattgagaacgagtacaatcatatccaacttgcatacgaagagaagggagacagttacgtccaatgggctgccaatatggccgtggccaccgatattggtgttccatggctcatgtgcaagcagagggatgcccctgatcccgtcatcaacgcatgcaatggtagacactgtggtgataccttcgcagggccaaacaaaccatacaaaccagccatatggaccgagaattggactgctcagtacagagtacatggagatccaccatcccagagatccgcagaagacatcgcattctcagttgcccgtttcttctccaagaatggaaatttggtcaactactatatgtaccatggtggaacaaactttggcagaacaagctctgtgtttagcacaacccgttattacgatgaggcacctcttgatgaatacggtctgcccagagaaccgaaatggagtcacctgagggacgtgcacaaagctttgctcctttgcaggagggctatccttggtggcgttcccagtgtccaaaagttgaaccattttcacgaggttagaacctttgagagggttggaaccaacctgggtgctggtttcatcactaacaac

SEQ ID NO: 118661 - DNA, 488 bp, Glycine max
  Clone ID: PAT_MRT3847_7815C.1
acaagaatcttcaatctaaaagagataatatcgagagaaaatacaacatgttcacaaataagccatacttgatgaccagacacggaatacgagaaacattcgcgcgaacaccccgaataaccttttttattaacaaaaagcagaaaaacactggggtcggtggtctcactttcacaacaaaatgatatgagacccaaagcagaagcatacgggcctaggatgaaccagatcaattgacggttgtcttgagtgacaccccactcacaggccatcaattgcctactgtctataacacggaagctggaactgccgcaagcccacatttcgtgaccccagaaggcaaacatgacacatacacctggacaatggcgacataaaatgcactcataagaaagctccccgacatgctctgcacataatccaaccttgacacgtcgccctagcagcacaaccctccacagtgcatatcttgaacacttgacccacac

SEQ ID NO: 118662 - DNA, 412 bp, Glycine max
  Clone ID: PAT_MRT3847_78160C.1
aggcctaccagaccaagccgactcaggtccaattagcatactaaataattgcctggattggtcggttattgtgtatttatatgcttctctgctcattatttcctccatttttttaattgttagattttaaaaaaataattatttttatttatctattattcagaaagttcaaaatcatattaattattattttttatttattatacctttatttatcacatggatctatcgtagagtgaaaaaaaatggataaaataagaaattttacaaatattttattaaaatcaagaaaatttattacattttttttagtttctacataaaaatattaatttacgaagatgttaacgttaatggctagctctgtaacatttacatccgcttcggccgccacttgaaaaacattaatttg

SEQ ID NO: 118663 - DNA, 188 bp, Glycine max
  Clone ID: PAT_MRT3847_78161C.1
aaaaggaattcatctataacaagatacttaaagacgtcaagaaagagttctgttgcaatggaacagttgttcacgacccacaactaagacacgttattcaacttcaacgtgatcatacgaataatgtttctaccttccttatccatactgatatcctcaacaacgatcatatcaagattcattgtttc

SEQ ID NO: 118664 - DNA, 195 bp, Glycine max
  Clone ID: PAT_MRT3847_78162C.1
atacaataaactaaatctacatggcaggcgggatatatgaatggtccatgaccaaaataaacctataaatcacacattacccggtggggcatttaattagtttatgcattacagttatggacattgatttcaaacccaatatatagatcagattagtacgctttccaagaaagtataattgctgactacaattta

SEQ ID NO: 118665 - DNA, 1182 bp, Glycine max
  Clone ID: PAT_MRT3847_78163C.1
atagtttgctttgaccatggccttaaattctccaaactccagcaactttagcactgccctctctcttgggttggcttccaacaccaacgaagccttaacggtgaaaggaatgggccaactagggttgaaccaaaggatcactaaggtgagaaaatcctcattgaccgcaaaagaaagatcgtgtctggttcatggtggcagtgaaaacaacactgagagtatcataagagcaagtcagattgtaagagcccaactggtgcatgcagtatcatcaacaccatccccagtttccagtaataatgttgtggttgttgttgcggacaaaaagaaagccatcgagattctgcaggccaaacttctctgcgcctcagcatttgctcctaaaactagtcccacatcgctcaggccaattagccttagccaccgtttaacttcaacgcccccactcaaaacgcgtcgtggttttcttaatgacgatgattttgcttattctctttgtccctctccgctgtctgtttgttttccccatgaaaccagtaccttgcagaatcatgttcgtggcggcgacaccaagtacgatggtcggatgcatagctatccgtacaagaaaaatgggccctacacgtgtcccaagtgcgggcacgtgtttgagacgtcgcagcggtttgcggcgcacgtgagttcgagtcactacaagtacgagaccaagagtgagagaaagaagagactcatggccaaaatccgaaagagaaatctccgtatagcacggggaagtggtggactcactgttgttcctgacgatgctcctcctactagtgcttttgcttattcggcacgaaacaacaacaacgttgctcctccacctcctgttagggtggtgaaggttgaaggtcagagtggtatggagcttcagcttgctcctcctcctggatgggaaaaattaactgctggaggtggagctgttaaaatcaaattggagcctgtagctagctagggtcttaatctcttatcaagggtccagtagttttagtactctgtttaattgttattcatagggtcagattcaatcttcaattgtgtttatggaccacttatacggtctatagtgcttaattaattgggtcttgtcttcattgttcgccttctctcgttgaataaatactggattttatcttcgaaaaa

SEQ ID NO: 118666 - DNA, 408 bp, Glycine max
  Clone ID: PAT_MRT3847_78164C.1
gtcatggaatgatactcagatctgccactatatgacgtacgacatgtcaacccattaacaggaacttctaacactgcacatccgctttgaacgacctcgcactctatctctactctactaacacacttacattctagaaaaatgatcgtactcagatgagcctaatgatcacgctaagcaaattccggtgccgactaccaccgtaactaaagctgcgccttcaggtacactgaagcatgtcaaactgacagctaccatcatgaatcatgatagcagctgatggaatacatgtgtggacactcagggaattgatgaaaacaatgctgaatctctatgtacatcaaagtcttttgacgttaaaattcatgactatcaatggtagaacttccatcatgctacttcaaaaat

SEQ ID NO: 118667 - DNA, 410 bp, Glycine max
  Clone ID: PAT_MRT3847_78165C.1
aaacacgaggaaccaaagttgttttttcaattcttatatgaaaatagaaaaggggggcctttgggggtcaattgtgaatatgaagcgtgaaaggcaaacatggggggggtttttacctaagtttaaaacacacctctttctagatgaaagcaccctactaacggaaaaaaaggggtatctgggggatgtgggggggattatcctaatcatccttgaatgccaaaaaaacgtccaaagggggacggttcgcaaaaaattcaaacttgggtttttcccttgcaaaaaaaagaacctttttggccatcccattttttggcggagggaacatgcttttttagggcgggcctctctcacaaaaaaaacggaagctttcaagccctttgcctttaccccccttaaaaaaaccctgg

SEQ ID NO: 118668 - DNA, 1938 bp, Glycine max
  Clone ID: PAT_MRT3847_78166C.1
ggctcgagctggcgatgagagttcattcaacatgtcagatcatgagtacactgcagggaacttcagtgatttggaagttatgtccccatctccaagacattcttgggattacgtcaatcgctgtggcagtcctttttcttcctcatccttcagccgtgcatcttgttctcctgagtcgtcagtatgcagagaggccaagaaacgactctctgaaagatgggccatgatgtcatcaagtaagggttctcaagaacaaaggcatgtgcgtagaagctctaccttgggtgagatgcttgctctttcggatataaagaaatctgtaatatctgagtttgagggtattcataaagaacaggagccaagtgaatctgtttcttgtagtcgaaattttaaagcggaaacatgtatggatggttctcctagaaacctttctaggtcaaaatctgttccaacatcttctactgtctatgaaaatgggctcaacgttgaagtttgtgataatgatgctggcaaagcacatgggtctggggagctgacaaagtcaaagagtatgaaatcatcatttaaagggaaagttacaagtttcttcttctcaaggaataagaaaccatccagagaaaaatcttgtctatctcaatctgttgatgaatcccaatccactgccattgaaacatcagattctccagtgaattcatctagagtccttagggatgatgtgtctcaaagcttcgacagtggatccatcggagagtgttctcttccagctccatatgaatcatcaggcaaaattttatcagattctatctctaatggacaaggtgctgtaccactggaggctggattgactctgtcaaagtccatggtgcctgggatttcaagcgaaaaccaggatcagcccagtccaatttcagttttagagcctccatttgaagatgataatgctgttgtcgagtccttgggctgtgtgaggggtggtcagctgggatcacgggtgtctctgaagtctaatttaattgacaaatcaccaccaatagaatcaatagcccggaccctctcatgggatgattcttgtgcagaggtggcaagtccatacccattaaggccctcatcggcatccttagacactaagcaagactggcttgtctttgtcaagaaacttctatcagctgctggaattgatgatcaagtgcagcccggctcgttttactcgagatggcattcccttgaaagcccattggatccatcattgagggacaaatacgccaatctcaatgacaaggagcctcagcagcaactccacgaggccaagcgaaggcagaggaggtccaatcagaagcttgtattcgattgtgtgaatgtctcactaatagaaattactggttatggatcagagaagaattacttgatgggtagtaggttgtgcagtgggagccacagcagggtccaagtcccagaagctgcatctcccccattggtggacctcattgtggcacagatgaaggagttaatatctagtgctatgagttctgtttgggtggtggattgtggggacagtaacagcctggtggtagagagtgttgtcagaaaagaggttgtgggcaaagggtgggttgagcttatgggattggagatggatattttggtgaaggaagtagaggggaagctgctagaagaacttgtggaggatgcggtggttgatttgacaggcagggcctgaatggttgaaaaccctgacatggctttccgctttggctttgctcttttttataatatatattgtaactctactattgttgtattcgattatcaacacaaggccctacttactaatttattaaatgctactgagaaattgtttcaacttgcagctatttcatattagtgaaactgtaatatattaatcaccccattcagctgctcaaaaaaaaaaaaaaaaaa

SEQ ID NO: 118669 - DNA, 698 bp, Glycine max
  Clone ID: PAT_MRT3847_78167C.1
ctctttttctcctctgttgggctaaatctctctctgaagtctgaactgtacaaagcagtcactaatttctcaattcagaaagatctgctattctctctctctccttttagagcgttataataatataagctgcataagttgaagactcaactgattcttcttcgtctgctgcaaattcagaagtagagatggcaagtcgactgaaggaagatgagaaaaatgaacgaataattcgaggtcttctcaaactcacaccaaatcgaagatgcattaactgtaacagcttgggaccacaatatgtttgctcaaatttctggacgtttgtttgcattaactgtagcggaatacaccgagaatttacacatcgggtaaaatcagtttcaatggctaaatttagtgcacaggaagttagtgcacttcaagaaggaggaaatcagcgtgcacaggaaatctatcttaaagaatgggatccacaacgtcattctttgcctgatagcagctatgttgacaggctccaggatttttttaagaattgttgttgtagtttgaagaataagaggcgagtggacgcaaggcaaacttccaagagtacatcttgattttaaaataaaaataattggcacaatttttttattggataaggctccattttttaatacatttaaatcaccggataaaaaaaagatcactgtttcata

SEQ ID NO: 118670 - DNA, 183 bp, Glycine max
  Clone ID: PAT_MRT3847_78168C.1
tttttgtgaagcaaggaggatacatatagtcaaagatcaaattcaggccatagttgtatactgccgtgaaaatatacggtgccactggataaccaaacaaccacatgctaccccctgttcaccgcgaatatgacatggcatgtaaatcaacgaatggatatggagccaagcttgaaaatattt

SEQ ID NO: 118671 - DNA, 300 bp, Glycine max
  Clone ID: PAT_MRT3847_78169C.1
actgacctcgactacaccgctggccaatgcccgaaagatcgagccacttccgctgagcttgtaacggtcaaccggatggggcgtgatgcgctatacactgctgctgctatagaggcatatgccggcgttcccgctctggtatgcgaggcggcgatgacgagctctgccaccccggaaggctcactattgggcccaaggggaggagtgatgagaaggatggcttagtaagtcgtaaaatgggtagcgatggggcatccgatgatcgctccgtcgagcgaccagatgctataggaaatgccg

SEQ ID NO: 118672 - DNA, 354 bp, Glycine max
  Clone ID: PAT_MRT3847_7816C.1
ctctgcgcccgttggcgaatcattaagatctgatttctataaatccacgcgatgggacccgcaccaatggaaaacgaaggcccgtaagccaacaccatggctatgctcaatgcagcggaccacaagagagtcctctcggagtgaccaatgatcgagaggctgatagagagcgagaggagagagagcaccatgcccccgacactagacaacaacaacggacgacgacccacgcggaccaacgtaaaagcagccaccaagatgaaaacggctttgacgaatgcaacggccacagttgcaaaaagacaacagcgtgcacggttgatgccagacttctggaagaacctggggctgaac

SEQ ID NO: 118673 - DNA, 399 bp, Glycine max
  unsure (1)..(399): unsure at all n locations
  Clone ID: PAT_MRT3847_78170C.1
ggacgttgggggaaagactgaaagagtaaagaaaaccctaaaaccctaaaaccctagaaattcagaattcagctgaagaagaaggaggaggaggaggaaccaatggacttcgacgagtacgaatacctggagaagacagtggaggaagacatagataaagactcctccaagaagaagaaggacatcgccgacaagagcgattttttttaccggaagccccgcgacgtcgacgacgatctcgacgccgatgacnganagagcatgaggtcaaggggcgacgacgagaacggtggttccatgaaagatcgcgactgagactgagaaagagaccgtgaccgcgaacgttcctccggccgttccaggagcgagagggagagagacggtgagaggaatgaccgg

SEQ ID NO: 118674 - DNA, 137 bp, Glycine max
  Clone ID: PAT_MRT3847_78171C.1
acgatcactatttgtgaaacgatggcggaacattcgagttcttggggcagcggactcgggagacatgtgggcctatacctgtgtctgccatcgggatggggcgagtgtatcggaaggctgcgctctcgaagccggct

SEQ ID NO: 118675 - DNA, 373 bp, Glycine max
  Clone ID: PAT_MRT3847_78172C.1
gaggaagacggtcaccaatcagggcgagtgcgtaatcccatggtacggcccataccgcgtgaagtacttgggcccattctctgtctatcccgcttgctacctcactggcgagtgcccaggtgactactgctgggacactgctgggctttgcggcgacccataaaccttctccataaaccgtgatctggaattgatccactccaagtagaccatgctcagggcctgaggctgcttcgtgccctaactattgtccaccatcggggtcaagtttgaacaaccttggttgttcaaagccagatccgacatcttcatctagggttaactgtactacttttgccacccgaacctgttccacgcccagagcatcctttca

SEQ ID NO: 118676 - DNA, 1082 bp, Glycine max
  Clone ID: PAT_MRT3847_78173C.1
aatacaaaaatatatgtataaaatagacacaagtgggtggtctgatctggtctctgagtatgtgtatacagagatgttagaaaaaatagcgcaaattaattaattaattaaatacaaaatgatgttcatgagaaggccaataaaccccttccctttgagaaggcagcagaggggcaggttgggcgatgtatgtaggatactgctgccctggcattaagactgagaaatcagatgcataattagatgctggaactgattgtgcatttccttgttttcctggttggtcctgaatctgataacgtcgcagcatagattctggtggcgtgggtttgaacaaatgttcaaatatggccattataagaaacattgaaatcaaaatggccgtggcaacaaaaccaaaagaaatagcactcatagatgtccctaagcttttccatggagcttcctcatcaactcctgttcctgtttgtgatggaccagtgtttgaggatggatatatgttccatggctttgatctttcatcgctcatgctacctatctatctatgtcactaatactttcccgtctcaacttttgttttgtccttctaaagagataaattttttatcattgcctgaaaataaccttaagcatcatcatggaagccaacttagttgagaaattctatcctttcaatttgtctttgtgacaagggatcaccttgaagtgtgttgttccaatttcttaactgacatcttctgagacaagagcacacttgtttatttatgctattatgcttcacacaaacatgatgctcagaacggttagctttataccaatagaaaatgtaaagacaaaggtgtatgataatcctattggtacacttttctatttatgttcccatgtcgatgatcctgatgcctaacttattgaatactataccttgtcagaagaagcaaactttaagaaataaaaaaagaatgggccttgctgtccggagagccagagcaagaattttcaattactacttttaaaactaaaagtagtcatatttaaggctggatttcatctaggttgttgtagttaatccaagactttaaatc

SEQ ID NO: 118677 - DNA, 517 bp, Glycine max
  Clone ID: PAT_MRT3847_78174C.1
ttgcagcgtcgacgagatttccggcattgtcgagtatgtggatatcgacgcgaatggcccagacgagtttgccggagaggacgcagagcgattcagtgtcgatggcacggctttcgcggaggccacggtccacgacacggccgagctcgacgacggcgtcggaggggcggccggggtcgaaggaggggtcggccatgggagagaactcggtgaagatggagagggagccctcgttggggcggtctcggtaggggcggacgagttgggcggtgacgaaggtcataacgtgggtttggcccaaatgaacctccgcggagccgtcttgcttggccagcttgacggtgagcttgcggtagtcggaggggcgacggccgtcgagtcggaggtcggaaaggagagcagtttctatgaatttcttgtcgttaagaggcattctccatgtgtttgctaaccgctgctccatttccactgcctgccaatgcttgaggtttaggttagggcaaaacaccctcgagcc

SEQ ID NO: 118678 - DNA, 827 bp, Glycine max
  Clone ID: PAT_MRT3847_78175C.1
taatactccttcgtacactctacacaacaacaacaacaataacaacacaacgagtttgaggcaaggcttgggaatcatactcactaatactactattctaatgcaccccttttgaactttgataccctttcttctgaaatcttaatctcatagatgattggcgcagaatttacatgtactagggcatgaaaaccttcgagcttctttgttccgaggcggccatttccattgctccaacattgctgatcggagaattgaccgatgaatcagaatcaattggacttaagagctcatcattctggatcaacacaatcagaggagtcggctctggaccttgaaaggagctactatggtcatcctaacccctccagtccttcacccttgcaaccttttgcaggaggtgctcagcattctgagagcaacgctgcctatttttcttggcctacattgagccgctggaacgatgcagcagaagatagagccaactattttgggaaccttcaaaagggtgtgctccctgaaactttgggtcgattgccaacaggacagcaagctactaccttgcttgaactgatgactattagggcatttcatagcaagatcttacgcagattcagtcttggcactgccattggatttcgaattagaggaggtgttttgactgatattacagctattcttgtattcgttgcccggaaagttctcaggcaatggctcaaccatgttcagtgcctacctgctcttgatgggccgggaggagactggagtgatgcggatgttgaagcatatcacccgtcctgatggggctgtaacgattaacaaagtcc

SEQ ID NO: 118679 - DNA, 627 bp, Glycine max
  Clone ID: PAT_MRT3847_78176C.1
cacgcgtccggctcttccatcatcatcactattctctctctctctctctccggtctcaatactcattggtacactctacacaacacaacgaggttgaggcaaagcttaggaatcatactcactaatactacgattctaatgcaccccttttgaactttgttctgatcaagcgatacccttcatctgaaatcttaatctcatagatgattagcacataatttacatgtactagggcatgaaaaccttcgagcttctttgttccgaggccatttccattgctccaacattgctgatcggaaaattgaccgatgaatcagaatcgattggacttaagagctcatcattctggatcaacacaatcagaggagtcagctctggaccttgaaaggagctactatggtcatcctaacccttcctgtccttcacccttgcaaccttttgcaggaggtgctcagcattctgagagcaacgctgcctacttttcttggcctacattgagtcgctggaatgatgcggcagaggatagagccaactattttgggaaccttgaaaagggggtgctgactgaaactttggcgcggttgccaacaggagcaggggctactaccttgctggggctggtgactg

SEQ ID NO: 118680 - DNA, 226 bp, Glycine max
  unsure (1)..(226): unsure at all n locations
  Clone ID: PAT_MRT3847_78177C.1
gaatntacagtactatgagatttcagctaaaagccactaccattttgataagcctttcctgtttttggccaggaaacttgcaggtgatccttacttggccttgggggaggctccagcattggcttcaccgaaagtctaattgatttaacttgaccacaacaaccatgaggccagccttcttgcagttgtttatcagccccttcctggacaagaagagaaatctttt

SEQ ID NO: 118681 - DNA, 488 bp, Glycine max
  Clone ID: PAT_MRT3847_78178C.1
cttcccccacgcgtccgacggctgcgagaagacgacagaaggggattctgaaaaagccgtagtttcgttggaaagggtctcgtttttcctacttcaaaggtttcttcttcgtatttctcgtaaatttctctctcaacctcctcaaaggaaaaaagaaaaggcatatagttatatggataacaaatcaccgagcaaggagtccaaggaggtgacacgagagtcgcttattgctatttctaactctttacctgataagactctggaatcaacttctgccttagagagcaagaaatcagacggggttatgataccaaaccgtgatcaagatgacaagtttaggtctgaactgatttcaatttcttatgctgaatcccctgatgacaaaatctgatctgttcacgtgtaactcctggattattatcggttgtttgaacttatgtcaatttcttatatgttgcttagctatcgtacaactgtgtaaatacttt

SEQ ID NO: 118682 - DNA, 667 bp, Glycine max
  Clone ID: PAT_MRT3847_78179C.1
gttaaatgaaaccaaatgatgtaacaaatattgtaaccattcaaattgactacccatataggaaaaacaaaagcctacgaaaaacaaaataatgtaacaaatactttcaataaaagttataaccaaaataatgtaacaaatacaagacataaacatgatctatgaatgatctgtgcactatcttcgtcgcgccctaacatacacattttcatttaaggtgacacccctagcaatcctaaggcaatcttccatgatgtcatgtaactttgtgccttcagtgaccatccttaggttgagcacacactccaacctttctgcgatcgcttcacaagcatcctatgacattcaaaaaaacacatttattacagcatttaaaataaataacattttataaaacattaaagcaactaatcttatcactgcatgtctggggggattagctacttgtgacggtccaactcctgctgccactggaacctccgagatatctggctccacgtatatctcatgttgtgggacaggtggatgtttgggctgatcagttgcctgtgtgggtgtgataaacaaatgcgatatctcgaagaaccactccatgtaatctcctgagcactgcccaggcacaagacaaacatgtcccgcagctgctggatggtctaaataatgcatt

SEQ ID NO: 118683 - DNA, 275 bp, Glycine max
  Clone ID: PAT_MRT3847_7817C.1
ggaaaagaattttccctgccttcggcttggatcccatcagcttttacaaaaaatacaattgtcccccctttgttcattgggcccccaacacagacctcaccccattccaaagggcgggtccccaagatttttgccaattgtccagcaagaagtacttggcttttttcccccccctcattattgccctggcggcaaatgtagacttaagtttttgacttaccatttggctcaggtatttactttctcctcttgggggtccctctggttcttgcacc

SEQ ID NO: 118684 - DNA, 1129 bp, Glycine max
  Clone ID: PAT_MRT3847_78180C.1
gtcgaaatcttcaacccagacaggccgcgcgggagtgagtcatccaccatcatagacacgttgttcgtttcctttcctttctgcaatttctaccctaacacgccttcatttctgggcacatttttttacacgtttcaaatgcgttaggacacacatcttgtttgcttgctttcagacaacgcttatggattcaaccaagggctttgctctctctccctctccctaatcctagtttctctcatgacccaacattccagcgactgatttctcactctccagcaactaggtttgattcactttattgcatggagtcatcagcagaaaagtatgctgcatttaaacagaaagttagtaggacagtgtacttggacaacatgtcaccacaagtcactgaatctgtgataagaactgctcttgaccagtttgcaactgtgaaaaatgtcaagtttattcccaactacatcggtccaagcaatcagccacagtgtgcattagtagaattagattctgccaaaaaggccaaggaaattttatcaatgatagcgggttatcctttcatgatgtctgggcagccacggcctgtgagggctcggcctgctgtgatggaaatgtttgatgatcaaccaataaagcctaacagaaagatcaagatccgttggttggagcctagtgatcctgattttgagctggcaaaggaagtaaagaatcttactcgcaaacatgctgcagaagtagaattccttgacaaagtaagttcattcctggaaatcaatctattttctataggggtcttatttctattactattccaattctccaattttctgagtatgcttctaggagttgatgttaagctagcaaagcagcaggaagagacccttaaggtgcattacaaaaagtttaagatgatagagggcattatggctgacaaaactgctcatcgtttggcacgaaagtataatctacatgttgcaaatgattgggctcgtttggattaacaacttatgtaaatagctttttagttttccttgctaggatttaaggtttgttgcttctttctactcccgctactactactaaagaagctcagatcatacatgttatatgatatgctctttgatccatgccc

SEQ ID NO: 118685 - DNA, 356 bp, Glycine max
  Clone ID: PAT_MRT3847_78181C.1
tggtatagctctagccaaataagcccgtcaattttccatcacactatgttaattcaaaaaaccaattttattattcatactctgctaataaatactacactacgcactccgatcagatgttctgtcaatgtagctttttcagcagatcttacgaatatgatctggcgctattggatacgattatgcaccacttgctgggcgaggcccaatgcatatgtacgagcccacaatttaaggtgaggtgggagctccagcttcagcacttcgtactcagagctgatcgactatcttggcgagctttcggggtaggaggacgactcataagacatggtgtacaaggacgttctacgacacgc

SEQ ID NO: 118686 - DNA, 299 bp, Glycine max
  unsure (1)..(299): unsure at all n locations
  Clone ID: PAT_MRT3847_78182C.1
ttagaaacctngtaggaggtgcganacgtagntgncgcaatccnaanccacgatggagcactctnctactcaanactnccacgaatntgtacatctacgccttccncccctntcgtgtttnccacaanggttactcnttntncctntcctatttcaacccatgcatggcttgtctgagccgntnnnnnnnnnnnnnnnnnnnnnnnggcgccagctggctctcttcccctgacgaaatgctccaacantgccccctctncgnccaccaccgccgtctncgcgatgacgacgccgaacct

SEQ ID NO: 118687 - DNA, 262 bp, Glycine max
  Clone ID: PAT_MRT3847_78183C.1
ttcagatcctgttatcagtaggtcattcaaaaagcgtaacaaaaattttgggaataggcatccattcagggaaaatgaatctcaagcctttgaaacgctgaaaacttacagtgatgccaccacagataaagaattttatttcaagtttgatagaaggcgccctggcttggcttcagcccctcgaacacctttagatatgagtcaaagactacgggcaaaccaatcttttactggagatcctggtgttggcaggggaagaggc

SEQ ID NO: 118688 - DNA, 1511 bp, Glycine max
  Clone ID: PAT_MRT3847_78184C.1
gttgtttggtattccccttgttacaaggtggtccagtatttcctgtggatatgatgatgttgaaagggagtttctgaagttaatcaatccatttctgatgcgcactgaaggtgtattagatgagtatgataagaatgatggtgttaaaaaaagagtaagtgaacatgatgaattgggtgatgctactaactctgcagcaataggaaatgatgcagactcaaacagtggaacagaggatgacattcattcttcaactgactttgaattctacttacaaggaatagagagggcgaagataatagtgaaaaaaccattaccacaagtcacaacgttgcctggaaagctgcctgcggtagttgtcttgtggtcggataagatgcttaaaatgtatgatacatacctgcttgactcattgcctgaggttttcaagccccagctatttgccaagagaatgcaagaatcagtttctatttacaagtggcttgaggctttcttgaaagaggaacctcttgggccagaagacatgtggtactgtcctcactgcaaagaacctcagcaagcatataagaaactagatctttggagattgcctgaaattcttgttgttcatttgaagaggttctcatacagccgctacttcaagaacaagctggaaacatttgttgatttcccaattaatgatctggacttatcaacatatgtagcccacgggaatagccagtcttccaaccgctatgtgttatatgcaattagttgtcattatggagggttaggaggaggtcactatacagcatttgtccgttatggctatgataaatggtatgattttgatgacagcagggtcgaatctgttagtgaggacatgataaagactcctgctgcctatgttcttttctacaggaaaatttagatgaaaattttagatgcaattgtgtaattagtgatagcagcatgggatgcttgaggcttttcagaccttttgcctatacatacaattgtctgatttcctcaaaattgctgcttacgcggtaccggtagggttttacggagacaagtgaagagaaatgcaaagaacttaatattgtacagcttttagaagctacaggtaaaagaaggtaggacttcaatttttaaacccagaggatagattattacatatgtgggacatgtacatatgcatcctgaaaatatttaaccaattttttaagcagatgtagcttgggttctttttaaaccatgatcatattagatatggaaaattacacattttttgcctccgtggttcaatcccattcttcttggtgctctttggttaggccaaaattgcccgtgctttcaagttgtatgtctgacttgttcagttaatgctatacatttcctatcttcggtagggaaacgtcgatatattgtatttcaattttttactcacaattgtttgtaagtgttgaattagcaatatctgaaactgaaatgcttgagaaatatttattggtttattttttggtcaaaaa

SEQ ID NO: 118689 - DNA, 767 bp, Glycine max
  Clone ID: PAT_MRT3847_78185C.1
ggcgtgggaggcactcggtcctccggattttaagggccgccgggggcgcaccggacaccacgcgacgtgcggtgctcttccagccgctggaccctacctccggctgagccgtttccagggcgtgcagttcaaagcgaaaagagattcgaatccaaggaagggaaaggaaagtaagagaagagaagaatggccgaagagggacaagtgattggtgtccacagcgtggaggagtgggaggaacatctcaagaagggacaagagtccaagaaattgattgtggtggattttactgcttcttggtgcggcccatgccgtttcattgccccaattcttgcggatatggctaaaaagttgccgaatgtcaccttcctcaaggtggatgtggatgaattggcgactgtttccagggagtgggaagttgaggctatgccaaccttcctattcttgaaagaaggcaagctggtgaagaagcttgtgggtgccaggaaagaggagctgcaagacataatagtcaaacttgctgcaattgatgctgcctgaagtgccatatgaatatgttgagaataattgactattgtcttcgagtcggtttgcttttataactattattgagtctgtttgaatgatttcagaatggatttggagtttgtaaaacatggacgggttatgtgtataaatgaaattgttgtactatcgtacttgaaacatttctgctgatgaaactagccaaaaagattagtcagtgccttatgtttatcattgccgtg

SEQ ID NO: 118690 - DNA, 411 bp, Glycine max
  Clone ID: PAT_MRT3847_78186C.1
gtggagcgctatttcactatcggtttcttcaaaaaccgatgttgaaagcaagagtggggcatcatttttagaggaccatcttccggggggggcgggggtttcattataattctcatctactctcacaatctcactccctctttctctggcgtcctctcattggttctctatcggaccctaatcactctctttccggctttggtggtacaatcatatttcgcgcgttccttttatctgggggtggtggcaaatctgtgggctacggctgcgacggctctattcgaaactctctcactctctgcggaggtaagaacaccatcgaaccctctttctggttctcttttaaaactttggaccccacctttatggcccctcgtaattcggggatttccttttggggagggggaaacc

SEQ ID NO: 118691 - DNA, 195 bp, Glycine max
  Clone ID: PAT_MRT3847_78187C.1
ggtatttcggcacgagggaactacatattgagcctcagttctctcgaatgtctgaatctctccggctgttcaaaattgaataatattggacctttacattctattcattgctggtttcctccctgtatgcgtcaatgtgatataagtttctgcaatttacttcaaatccatgatgctattggagacttaccttgc

SEQ ID NO: 118692 - DNA, 241 bp, Glycine max
  Clone ID: PAT_MRT3847_78188C.1
catcactggtatctatcatcggtggccagatatgaatgaggatacaaccctctggaagcttggaaccttacccccaggactaatcaccttttataatctgacctatccgctaaatcgaggctggcatgttttgggacttggctatgacccggctctgaacctaacagagatagagaatggcgctgtcattcactacaatggaaactacaagccatggttgaatcttgctgtttccaaatat

SEQ ID NO: 118693 - DNA, 341 bp, Glycine max
  Clone ID: PAT_MRT3847_78189C.1
gaaaatcgttgagtttatgatagaactaaaagaagtaaaagaagtaaaagaggtaatagaaaatcgggttgaaagtttggggaactcatctaatgatattaataacaagggactgcaatcgaaattggacgttcctaaggctggatagacgcctgattcacaatcaaagagttaaattggtgattttatattcagaacatcatctagaattattatggctcatacttcttacagacatgtttcgggaattctaaggagatacctgtgtaatggtggtcaatatttttttctatattctttcaatataggaccagtttgggggaatataaattgaaaaccat

SEQ ID NO: 118694 - DNA, 403 bp, Glycine max
  Clone ID: PAT_MRT3847_7818C.1
ttctttttttttttttttttttttttttttttttttttttttttttttttttttttttttttttttttttttttttggggaaacaggggttttttttcccggtgaaaaagtttcgtggtaaaactaagcaaaaaagttaaggcctttttttttcccaaggtttttttttttcgcccccaaaaaagcaggcgcggggggctttttttttcccagtttttataaaaatttaaccgcctccgacttatttagagcttatggggagaatggtccttgttttttttgcctggtgccccaccaccaaaatttggaccgacaaccgtttcgcccgggtttggcccttgggttttggaggaaccgccgcccccttttacttatgggggtttggtccttgccccaacggccg

SEQ ID NO: 118695 - DNA, 820 bp, Glycine max
  unsure (1)..(820): unsure at all n locations
  Clone ID: PAT_MRT3847_78190C.1
tttagatttctatcnnaattcaagttgaaattgaaacactgatgtaacaattggcccttaatagttgaccgtagtgcatatataatgtacaaataaaataagcacactaatactgcgaaataagctttgttccaaacagtaaatctgcaattcagtaattgacaaaagttctgactccctatgataagaatggaaaactgttgatcccatttcctaaaacacgaatacctaagaagtggataatttacaagatctactggattatacagctgatttttactacaatataaagctttagtttgagatgtcagcttgtagtctctatataggacagctatgaatgcacaagtcactgaatgctgcaaagtgttccatggtaccacccgtatcagcccagccttattggtggcaagagaacccgagtttaatggagaggcagcaaaaccaaaagattccatcaggacggaatattgatattgacaagatgtctccaacaacaagcagttcaatgatagccacttcccccatttcacaaaccctggtagtttaacgcacaaatcagcaggatgcatcaatgataattgactagaaaaattccgggcaaagtggaaaattcagtgaaactcgttacaatgattttgattgtaaaatgaaaacatctactggttattgaatatatgtgaaatttaaccatcaaatcctcaatgttagtctcctagcatcacatttattaacaaataaaacactggtgatctttgctgattaaccagtctgcatctaccacagaaattgcattagcgcatcggcaccatagaatcct

SEQ ID NO: 118696 - DNA, 560 bp, Glycine max
  Clone ID: PAT_MRT3847_78191C.1
aagaagtatatgtggatcaacctcctgtaaggaaaaactcagaaaagcctaatcatgtctttaaactgaaaaaggttttatatggattaaaacaagcccttagggcttggtatgaacttttgagtaaatttcttttagacaagggtttttcaaaaggtaaggttgatactaacctttttatttaaaagaaattgaatgatatactcttagtacagatatatgttgatgatattatttttggttcaactaatgattctctttgcaaaaaattttctcaagatatgcaaaatgaatttgaaatgtcaatgatgcgtgagttaaacttttttcttggactacaaatcaagcaaacaaagaatggaatatttatcagtcaatcaaaatattgcaaagacctgattcacagatttgggatggaaaatgataaacatatggctactccaataagtattgtttgctatctgaaataagatgaaacccgtcagtcaatagacataaagaaatatacacggaagatccgatctcctggttatttatctgccaggagacctgaaataatg

SEQ ID NO: 118697 - DNA, 370 bp, Glycine max
  Clone ID: PAT_MRT3847_78192C.1
caaaaaaactagccgaactttatacagaagcgaccagttaccaaacatttatttatatgtatatatagaaaaaaaagggaaccatgaccttaacacacccataacaggtccaaaacacttgaacttgctaaagggcaaaaaaagacccctttattttaaggggggttggttagacacaaaacaccggagggcaacataatacatactacataatttggaggttttgaaactacataaagtgggtattattattgctaagggccatttttgcttgaagcgttagctctccaacacctcacttgcaagtgcaggggttgcaggggcatttagatccacattttgcgggcatagttctcagagggaacaccca

SEQ ID NO: 118698 - DNA, 269 bp, Glycine max
  Clone ID: PAT_MRT3847_78193C.1
ccacgcgtccggttgcgttgcccagatacctccgttctgtttgccgtagagtaactttttcgcccaccgggttaagagtgttggtgaaaatggatttggtggcatgagagtttgtttagcaagtgttggaagtccgtgaagcaatggacttggtggtaccccatacacaattttgctcatataaacacttcctctgagaaagttataacactgtttctgcattcaatttggtgataatgtataatgtggcctgcaaatttcacgtattt

SEQ ID NO: 118699 - DNA, 314 bp, Glycine max
  Clone ID: PAT_MRT3847_78194C.1
gacacaccgaatggggacttgagacaatgccagcagtgctggtgcttctgagtataatccttcggctcgcagcgctacggtcaaatccatataatcaaaagatgcagcttacaacatgacacttaactttaagaatcctgtgaatgactatcatgctgccaaagacagcacagattgccatgaattatacgcagacattgttctagctctttgcaaacttgttgatcgtaagaattataccactgactgacgaccagttagactattgtacagctaaaatactaggcattcagctgcatttatatgacgcttgc

SEQ ID NO: 118700 - DNA, 1269 bp, Glycine max
  Clone ID: PAT_MRT3847_78195C.1
acggctgcgagaagacgacagaaggggctaccactgttgttgtgaagaggttgaaggaggtggctgttggaaagaaggattttgagcagcttatggaggttgttgggaatcttaaacatgagaatgtggttgagctgaaggggtattactattccaaagatgagaaactcatggtctatgattactacactcaggggagtctctcggctttcttgcatggtaaaagaggagaggatagggtgcctctagattgggatactcggatgaaaattgctttgggtgctgcacgaggccttgcttgtatacattgtgagaatggtgggaaacttgtgcatggcaatatcagatcctcaaatatctttctcaatagtaaacagtatggttgtgtatctgatcttggcctggcaaccataatgagctcagttgccataccaatctcgcgagcagctggttacagagcacctgaagtcacagacacgagaaaggcagcacagccctcagatgtttacagctttggtgtagtgttgctagagcttctgactgggaaatcccctatccacacaactggtggtgatgagattatccaccttgtgaggtgggttcattcggttgtgcgcgaggagtggacagctgaagtgtttgacttggagctgatgagatatcctaacatagaagaagagatggtggaaatgttgcagatagccatgtcatgtgtggttaggatgcctgatcagaggcctaagatgtctgaagttgtgaagatgattgaaaatgtgaggcagactgatgcacagactcactcatcatctgggaaccaagcagaacaacttaaattttctcaacgtgacaatggtaactctccttccactccctcctacttccagagaggaagtgaatgaaagaacctttgtttgtgatttgagtgcatcttgtcaatgtttaactccaagttctgaacaagagcgtggttattattattatcattattattttttctcatatttaagttgcctgagttatttaaatactattaactagtgggctagtatttgatttgaccctgcccaaaaggaagcgccatgcgctgccgtacagcaatctaagtggttataacttataatgtgaagcatttcttttgtgtgtaaactgtgcagtctttaccaagaaggtgcacctgtttgtttttcccttgcaagaggtctaacaactattacctcttgtttatttattatattagaattttttgagaaaatgggaaagaagagagga

SEQ ID NO: 118701 - DNA, 535 bp, Glycine max
  unsure (1)..(535): unsure at all n locations
  Clone ID: PAT_MRT3847_78196C.1
attcccttccaggaagccttcccgtcatcactgtatgacgtcctccttctttgggggggggggggggaagaggaaataagaaggggcctagtagaaaggtggttccaagaaggagataaaacgcattacccaaaatttcagatgcttaccggcatttatgcgaagagaacaatattactagtatgaggaatgagctacagactgtaagatagcgtaggcagtagcgactcctagaggggttaaacgtaagacccatttgggagtttgttggaagttggagattccaaaccgtattagtttgctgaaaggcgaaggctggtggtacaaagataaggagataaaccgcaggccaagagtgaggcgttaaatgagaaagcgaaaccatttggcggcttaagttgacgacgcgatttaagccgtagggataaaccgccgcataacagagcgagagataacgataattacggaatagcagcgaataagaagtagatggtccgtgggatgaccatataggatacgcacggaggagntatgc

SEQ ID NO: 118702 - DNA, 259 bp, Glycine max
  Clone ID: PAT_MRT3847_78197C.1
tccgctcgagacggctgcgagaagacgacagaagggcatatgcatttttttgccttttggtgttctaattaatatatgcattctttataataatatcacattttcgttttttttaggaaatatatatattgatacgataggagcatgtatatctaaatgggttcagctttgctttcttaaaggtatgtgccattaattgtgtgattgaaatttgaatatcattttcttgaccgttcttaagaccctgtcacacttctat

SEQ ID NO: 118703 - DNA, 321 bp, Glycine max
  Clone ID: PAT_MRT3847_78198C.1
aaaaaaaaaacccaattgaccccctttggatgaaaccaaaggaaagcttgttttttcaggtcctaaacagagttcaatactttggccccaaagcccaaacccaaaacttaaaaacagctttttccaaaacagtttgaagggcagatttttcagttcctaactacaaatttaaattttttttcaaagaagcagggtttttgatgcccaaaaattccgccttggggggtgcccccccaaccaaaaatccttcaacatggggctgggctgccaattttttggagtttcctccatttacaaaccctcctttaataatttttaaaa

SEQ ID NO: 118704 - DNA, 308 bp, Glycine max
  Clone ID: PAT_MRT3847_78199C.1
tcggctcgagaagaaattcagccgccatcatggacccaccattactgccaagctctacgggcgggcgccgcagctgcagggaaactctcctgcaggacttcagagtggttgcccagggtgtgggcatccctgaggactccatcttcaccatggctgaccgaggtgaatgtgtccctggggagcaggaaccagagcccatcttaatcccgagagtccggagggctgtgctaccccaagaagaggaaggatcagggggtgggcaactggtgaactgaagtcaccaagaaagaagattcctgccagctggg

SEQ ID NO: 118705 - DNA, 329 bp, Glycine max
  Clone ID: PAT_MRT3847_7819C.1
caggtccgttacttgtttgtgttccagttttttttatacagagacaaaagaaaactcggcccaacaaaaacacacatgcctaaagaacgaaagagggatcctcccacaaccccacacgccatacgagttgtgaccaaaacgtggaaaggcagcggagcctactgagggagcccaattgcgtgaatcaaaaggctctcaatgtctgctttcgagaactgaaacatcgtgtgcaaccttaaactcatgaagcggcaaccctgcggccgagagcagggaagaacacccgggcgccaccggggaattacccacaaataccgagacgggcacca

SEQ ID NO: 118706 - DNA, 335 bp, Glycine max
  Clone ID: PAT_MRT3847_781C.1
agtgaaatgacaaggggaggatcgtgctttagtgcgtaacgaaggatactaagagggaaaaatattataaaaaggagactgtagtcccccgtatgaaaaggatcatacgatgacgaaaaatgcaggaggacaccctgagaggacacactaaacctctgtgccttataacaatacgacccagctaacggccatatgaagagggtgaatacagaaccatcgtcgacacacgagggatgagggagttacttgaggtgaagaaggattgagttctgacgatgaaaccgtgcaagaggagcaatggtacacaattatggactgtaaaaaaagtgctggga

SEQ ID NO: 118707 - DNA, 1477 bp, Glycine max
  Clone ID: PAT_MRT3847_78200C.1
tgggattagcagaagttgtagcagggaaagtgttagcataatttttagctgttgctaatggcttactattatcataattaagagtgcaattttgggcaaaaaagtaatgtaaatgtagtttggttagcatcctacgcgtccggcgccgggaccgcttctgctctctcacgagaagaatactactaactgtgttgtaatacctcagtggagaacaagatgaatccatggaacatgagaacttccaagttactctctcaacaacttgcttatcctccttatcgcttggtagaagagattccaaacatgggaaattccagttgtgtgagcaaggagccaagaggttcacagatgacaatcttttatggtggccaagttcttgtcttggatgatattcaagctgacaaagccaaggacatcatgtcttttgccggcaaaggaatgtctcaaaaccagaacgactgtgcttacactttccctgctacaacttctgctactcccagtagaccattcccttttcttatgaatatcattccaaccactgccaacaattcggttcaagaccaccctcaaacaccatccaaacctgttatttgtgatctaccattggctaggaaagcttcacttcatcggttcttggagaaaagaaaggataggtaagtaggctgattcatgggaaattaatacatcaacgaaagtataccttcaagttttcttcaaaattgggtttagaccctacatcctaaaaacaatgattttgaccttggtattctctaaagggggggggattggggatttgggatctgcttatggcaaagagaaagtcagcgatgattataaagctaaaaaagtcaagactacaaagctttgccggcaagggaataaaaaaattacagttcgattatgcttgcactttccctgctacaacttctgctaatcccactagaccatttccttttcttatgaatatcattccaaccagtgccaacaattcggttcaagaccaccctcaagcaccatccaaacctgttatttgtgatctaccattggctaggaaagcttcacttcatcggttcttggagaaaagaaaggatagaattgctgccagagcaccatatcaaacaagcaatcacatggcagcccttaataagccagctgaatccatgacatggctcaccttggcacctaaatcaccacaacaagacgaatctgattccgatagcagctccagctttgtgttattttagctgttgctaatggcttactattatcataattaagagtgcaattttgggcaaaaaagtaatgtaaatgtagtttggttagcatagttttagtaaaatattggaatcaattcttctcaattctcaatgtcacatgtattatatgtaaaatttatggttagggttatctttttataaccatagtctgtttgttatagttcaattggtttctactagtatgtgagccacatttaacc

SEQ ID NO: 118708 - DNA, 478 bp, Glycine max
  Clone ID: PAT_MRT3847_78201C.1
ggagaacaaataagatagaagcccatatttaaactatacttcctaactagataagaagtcttttcagaagcagtagactgagaggctttggcagaattgatcgaacttcttgctctcagggtgcttcgcttgagctcaaccatccgggatgcttgttttctgaggatgattctttcgcgtaagtcagggaagtgttgagccagagtagagatgacctaggggagaccttctgaggctctaaactaatgcagggaaggacatgactacgttaaccagccgcaagggtgtgccgaaatggcacagtgagtgaatgggtagtatcccgagtcggaaggaatctactctaaagtgagtacccaggttcattctcaggtagttttctggcagttagtccaggaagagcggtttgagatctcatccgtaggtccatttggatggtactcttcatggcaaacacgagactacggcggaagggacc

SEQ ID NO: 118709 - DNA, 266 bp, Glycine max
  Clone ID: PAT_MRT3847_78202C.1
aaacagtatagtttcgttgacatatcactttgacatacaccttataatatccatcaaaattttcagaaaaccaaaaactataaatctcttttgcagtacaagcaccaaaatgctttcaattaagtgacttctaaagcatcacaacttagctcaattctatattaaaaggggaaatggagaatagggcttgattaactgacaaccatatgaccctcctctaccattgcaactggagctcgcacagctacccctccaatgggatggag

SEQ ID NO: 118710 - DNA, 414 bp, Glycine max
  Clone ID: PAT_MRT3847_78203C.1
aaacaaaaatttaatttcccaaaatttgggaaatttcccatttaaaacaatagtttgggaaagaaagaaaagaaaagaaaaaggtcccggggggggtttccaaaacaaccaacttgttcccaattgggatcccggggtaacatggacttttgacccctgcctttgccctttggggggtgttgggaaaaaaaaatggataaatatacctttcccctttcaggaggaccattgatcagggaaggggaaaaagttttttatcttggccttccggaacctttttttgttttgtttaagaaaaactttagggggggccgcattttttggacccccaagtttccctggagccttcccccatgtttccaaaagcttggcccaagggttttggctcatagaaaaaaagagccccaaaaccag

SEQ ID NO: 118711 - DNA, 242 bp, Glycine max
  Clone ID: PAT_MRT3847_78204C.1
ttcgtgacgctatctggctgtgaagaatacacacttttgtcacacgtcatcaacctccgctgttatgaaaccccatctctgatcaaagcccggaaactcattactgagcccgagaagcactctgcctataatctaatgctcgccatttctgtatgtgattcctacattgatggataccaacctcgccagtataaccagcccggacgaaacacttagtctccgaacaactcttgactaccttg

SEQ ID NO: 118712 - DNA, 447 bp, Glycine max
  Clone ID: PAT_MRT3847_78205C.1
ttggtgctcttcaaattaaccctctctcattttgtcggtccgaaaatgtccatcaacaaagccaccgtcggtgtgatcggcttgtccggcgccaccctgctgctgtgcctgttcggcattgcgtcagtgtacaacgaaatccagtccatctggaccgagctggacttggagatggaccgcttcatgctggagacggacgacatgtggcgtgacatgttggctatgggcgcaggcacgccgtctaaccgggcgcgccgtcaagccgttggcggaggatataacgcaccgcaaccggcagttgcgccggtgcccgtttgcaagtgcaaaagcaaaaatgcatgccccgctgggccgcgcgggccaatcggtgacgtgggaccagtcggactggccgggctttctaggcaagacggcattcccggaatcactgccgagaattggcacaat

SEQ ID NO: 118713 - DNA, 371 bp, Glycine max
  Clone ID: PAT_MRT3847_78206C.1
aaaaaaaaaaatttttttttaatataataaaaaacaaaaatagagagggaaaaataaaaataaaaaaaaaacaaaaaataacatttcaaaaataaattataaaaaggggcgcccccctccttttaacctcgtcaccccgggatttatttccggaccgtaccctccaggcttcccacctttccttataatgattcgtattacaccttcccgtaaccatggtcataactgtttcctgtttaaaattgttaccccctcccatttccccacatcttcctacccgaaaccataaagtgtaaaccctgggttccctaatgattgacctaactcacattatttcctttgccctaactgcccgttttccaatcagaaaa

SEQ ID NO: 118714 - DNA, 422 bp, Glycine max
  Clone ID: PAT_MRT3847_78207C.1
ggcaaagaaaaaaaacctttttacattagaaaacaaatttattgcataaaaagaaaccggcgcttgcaatatgggatggggggcccgctcaaaggccacctaatttgattatgaaacaaatggggggacaagcttattccaaaaaatgtttttcaagaaaaaacatgcgggattcaccttcatttccaaaaaaattggactccaggccccccttggttctcactaaaagggggaaccgagctgacactgtttcccttaactggccctttaaattccaaaagtttgggggccctatgtcccacatcggaacccgttaaagaaggggcccctggctggttataaaacatttggtccttttgggccgctggctttggccccctgattggttctgcagcccccgggataactttggggggggggtg

SEQ ID NO: 118715 - DNA, 314 bp, Glycine max
  Clone ID: PAT_MRT3847_78208C.1
cccacgcgtacgcccacgcgtccggtaaaactctccacgaagtactcttgtctactaggagtggggacgtacaatacctaaacctacagatgctacataatcttttatattgctagttcgagatttacgatctacagctatgaatctgaatcatgaccttgcatccgagaagaacttccagattcatacgacggcagctaaattggtcttactcagatctactactctatgattgatcagtatacacttcaacaacatccgatttgtatcagttatttttcaacagataatgtgtttgtgcaaattattttctt

SEQ ID NO: 118716 - DNA, 820 bp, Glycine max
  unsure (1)..(820): unsure at all n locations
  Clone ID: PAT_MRT3847_78209C.1
agttacaaaaaagggagaaagagcctcccccataacactaatccataccatactccaaaagaagaggaccatgtcttctatggatctaaagaaatctaacaagatcagagaaattgttaggcttcaacagatcctcaagaaatggagaaagttagccaactcatcaaaaaccactatggttaccaccaccgctaccgccactgtcacctcttccgccagcaagagcatgaagtatcttaagagaacactttccctatcagaacgtgaaggagggtcaagcaatgtagtccccaaagggtacctagctgtttgtgttggtgaagagctcaagaggttcactataccaactgaatatttaggtcatcaagcctttcagattctcctcagagaagcagaagaagaatttggctttcaacaaaccggagttctgaggattccttgtgaagtggctgtttttgagagcatcttgaagatggtggaaggaaaggaggacaagttttcctcccaagaatgtagactcagcattgaagaaatgatgatgggttaccgctccgaaaaccaacttgcttattctcaccatcctcaaagtccactgtgcagatagtatagcatgtattaatattgcattttttatcctttntctttttgtccttttgtaccttataacaaatccaatgtatgagtgagaggagagtgattgagtaagagaagagtgagttcatttagatgtaacagaaccctntttgntatttatgaacccaaggagtatgattatgactttcatttttcaatgcaaaaaaaaaaaaaaaaaaagccccta

SEQ ID NO: 118717 - DNA, 263 bp, Glycine max
  Clone ID: PAT_MRT3847_7820C.1
ctttctctctcgctctttcttcaattccaagctttattcctcatgtctttcagaggcctcagccgggtaaacattcttcttggtttttatttttgtttctttgctccattgagctatttactttgtaagttttggttcttgaacgtacctttcgcgtgtgaatgtttgaattcaaaatcatgttttggatgaaaaggcttttgacccaaatgccgttgcattccaaccaaatgccttatcaagcatgggtgttggtgatcaca

SEQ ID NO: 118718 - DNA, 188 bp, Glycine max
  Clone ID: PAT_MRT3847_78210C.1
cgagacgacgactagaatcgggatgtgctgttgcacgaacactaagggaactaacaacaaatgggacaaaaaaaagtatccacatttcccgttcttccttcttccatattgaggttttctcagacagtgatctcgcataattccgctgaacttccacaagtcaccaactcgcgatcagtcatgcacac

SEQ ID NO: 118719 - DNA, 1321 bp, Glycine max
  Clone ID: PAT_MRT3847_78211C.1
ctttctgctgctggaatacggagagtgagagaatctgttagaaaattgttgaagaagcttttccatttcgagcattttattttttttaaattattgtttggttttagggtttgagaatcagcactgtgtcgcgatgtctaatcatcaccgttcttcctccaagaacggtcttccacctcaagaactccttgacgatctctgcagccgatttgtgctaaatgtgccaaaggaagatcttcagtcatttgaaaggatcttgtttcttgtggagtacgcacattggttttatgaagataattctgtagaaaataatccatctctgaagtcattaaatctgaaggagttcacttctttacatgatattttcaaggacttcacttcctataaggttcgagttcctgtaactggggcaataattcttgatgaaacatatgaaaggtgcttgctagtgaagggatggaaaggttcaagctggagcttccctcgtggaaaaaagagcaaagacgaagaagatcatgcatgtgccattagagaagtcatggaagaaacaggttttgatgtttcaaaacttctgaacaaggatgaataccttgaagttatttttggacaacagagagttaggctttacattattgctggagtgaaagatgatacagcatttgctcctcttaccaaaaaggaaatcagtgaaatagcatggcaccggcttgatgaacttcaaccagcaagtgatgaagtgatatcgcgtagcatcaccggccttaagctttatatggtggccccttttctagcatcattgaaatcatggatttcaacacaccaacctgctatggctccaaggcccgatttgcctcttaaaggaatttgcgtgtggaaagcaaaacccggttctattggaagtagctccacagtaatggatatccagccaacaaaacctgaacctgattctcacacccctgacctggggcctggcaagagctttaggaatttcagatttgatactgcctcgattttacaagcaatggaaacttccttttcttcttgaaagtccgtcaaccttcctgtaaagtttcctgtaacttaatcgatttcccatatttcatccgtacgccaaagttggtggtattcattctccacgctaattaggttgttgctgtacatcatcttcctcaagttgtctgattgattgagtatgtacattgtgtacaggaagtatttgcacctaaatagttttctctgttattttggtattatctgtaaaactagagtaaaggttcaatgtaaaagttacgctgctccctcttaaaaaagaaaaagaaac

SEQ ID NO: 118720 - DNA, 623 bp, Glycine max
  unsure (1)..(623): unsure at all n locations
  Clone ID: PAT_MRT3847_78212C.1
ggaagcactagctcagtttctcttggcaggccatctgctactaggcggttgccaactcacacgtggatatttcatgcattcagaaaacccgtcacgagatatgccatctcagcacctactggctttatctctgccttatgctgaaaatctgactcatgatggcacaacctatcgagtataccaagctctgcaaggtaaagagagacggacgcttgttataattaattacataccagttgtgctagaaaccaactccactttatactgaagcgcttcggaagaaccacttgagagcgcctctaacgttagaaccaccatgcatcgctgggttgaatctagatctcttccaaggtatgattaaatcctcccntgccatacatcaactctcatagagataagactcgncataggaacaaaacccatctactataacaccatcctgataaactccagcagttggctccacaggattgtggatggaaacgatggacagagatatcttatgcaggctatcaatgtgttaaacgtgctaaagcagcccactctctggttagatcatggatggcagacatatttcctgcacttaatcaccggatactctctcatataacaggccttgatag

SEQ ID NO: 118721 - DNA, 1410 bp, Glycine max
  Clone ID: PAT_MRT3847_78213C.1
gctgtctgctgcaggttttctttctttctgccgctcaaatacggagagagagaaattgttgaagaagcttttctacttcgagcatttttattatttaattttgtttggttttagggtttgagaatcagcactgtgtcacgatgtccaatcatcaccgttcttcctctaagaacggccttccacctcaagaactccttgacgatctctgcagccgatttgtgctaaatgtgccaaaggaagatcttcagtcatttgaaaggatcttgtttcttgtggagaatgcacattggttttatgaagataattccgtagaaaataatccatctctgaagtcattaaatctgaaggagttcacttctttattgttcaatagctgtgatgtttttcagccttatgtggcccatatagatgatattttcaaggacttcacttcctataaggttcgagttcctgtaactggggcaataattcttgatgaaacatatgaaaggtgcttgctagtgaagggatggaaaggtacaagctggagtttccctcgtggaaaaaagagcaaagacgaagaagatcatgcatgttccattagagaagtcatggaagaaacaggttttgatgtttcaaaacttctgaacaaggatgaataccttgaagttatttttggacaacagagagtgaggctttacattattgctggagtgaaagatgatacagcatttgctcctcttaccaaaaaggaaatcagtgaaattgcatggcaccggcttgatgatcttcaaccagcaagtgatgaagtgatatcgcgtagcatcaccggccttaagctttatatggtggccccttttctagcatcattgaaatcatggatttcaatacaccaccctgcaatggctccaaggcccgatttgcctcttaaaggaatttgcgtctggaaagcaaaacccggttctattggaagtagctccacagtaatggatatccagccaacaaaacctgaacctgattctcacacccttgacatggggcctggcaagagctttcggaatttcagatttgatactgccttgattttacaagcaatggaagcttccttttcttcttgaaagtccagcaacctttatgtaaagtttcacgtaactgaattgatttcccctctttcattggtagtattcactatccatgctaattagtttgttgctgtacatcatgttcctcaagttgtctggttgattgaataatatgtatattgtgtacaggaagtatttgtacctaaatagttttctcagttagtgtggtattatctgtaaaactagagtaaaggttcaatgtaaaagttagactactccctacatttgaactcattcagactccgggtctcgggcagaattaaaccgatttatttggtaatgccattat

SEQ ID NO: 118722 - DNA, 314 bp, Glycine max
  Clone ID: PAT_MRT3847_78214C.1
ttcatatgcatcgtatatattccacaagggtttattccattataagagatacatcaaaattggaagatcaatctttaaaatctgagagacaaatatatgacggaacttctattaaaccagaagcaaagtctgaatatgcctctcctgtaaaaaaggcttaatcataaacattaatttcaatgggaaagacaaattgtgaaaaatcatttactgcacccaaaacccttgaagtttctcctgataatgaatttgagaagcgaataatgcccgaagtaatactatcaaatgatattgatgtcacattctctgatatt

SEQ ID NO: 118723 - DNA, 220 bp, Glycine max
  Clone ID: PAT_MRT3847_78215C.1
tgtccaagaaaataggtagtggatgttgcaatgtcgaaccggagaacgtactggtaaacgtgcatccaaaacatctgtggatatggataatgaagggctcgttgataaaccctctgcagtccaaaccgtcaagccacaacctatcaatgaactaacccccccacaataagccgatccctctacttaccaagatgaaaccaccggcgtacaagcgaccgca

SEQ ID NO: 118724 - DNA, 1042 bp, Glycine max
  Clone ID: PAT_MRT3847_78216C.1
tgtagaaattatgttaaagatggtcatattagagatgaagttggcctaaatgaaaaacttaatagcatttcaaagacaacatagcgaggtacattctctgtagatggtttaggtcttcgagatattcataagaatgtagatgaagagcaactacaagattatttattagaagcaggtgcacttggaccaactgaaggcctcaagcatgagagatagaactggcataaagaaagaagtattatataaaaaatctggaaaaaattcaattattaatcaacgtattgagcaacttaaacaattagaaaatcaagttcagtaatgaagaaagtgaacttgatacatatcatcgacttgtagacgataaagataaatcatcaagaagactagaaaatttgaagcaaaatttaaatcaattatcaaaaatgcatgagcaaaaacaaaaagaggttgctctacacgatcaaacgcaagaatggaaaaggttagaacagtcgcggaatatagagcctataaattttcctgaaaaagggatagatagatacgaaactgctaaatctcacaaacaatcacttgaacgagataaaagtttgcgagaagaaagattaagcatattaaataaagaggcggagtccatcaatccagtagaccaaaagtatattgattcgtttaatagcctttatcaacaagagactgaaattaaacaaaaagaatttgagttacgttcaatagagaaagatattgctgataagcaacgtgaactagaagctcttcaatctaatataggttggcaagaagtgttttacgacacagacagtactgaagcgatgaaaagtcatatgagtgatttagtattaggcaagccagaacaaattgcttatatcaatcagttagaacgtggacttgaagaaaataagattgaaagaaactctatttctaatgagattaatcaagttgagaatgagcttgttcctgacgaaacctttgaaaagaaaaaggatttacccaacaagttttagaattactgaaaaagagaacttgtttg

SEQ ID NO: 118725 - DNA, 388 bp, Glycine max
  Clone ID: PAT_MRT3847_78217C.1
aacacggccccattcctgtctccctaacctcaccggcggcgccttcacgggcatcgacgccgacaccccccctgaccttcttaatggccgtgatccgcagtcgcgtattccacacaccccacgctacaagcctcacgcttattacaatcccacgcgcgctcccgcagcgcgtccttctggagggatcaacagaggggttcacatgaggtggtggtggagccgcgtggagcttcgcctgctccacttatcagatccgcggaggattctggttccggttccaccgcgaacaggggaagttctcgctgctctctttcggcggtgactacgacggaagcgcgcgtgacggcgaaccgagagaaagagactggtgtcatcttatgtccgcatt

SEQ ID NO: 118726 - DNA, 324 bp, Glycine max
  unsure (1)..(324): unsure at all n locations
  Clone ID: PAT_MRT3847_78218C.1
gggtttggttttttttttttttttttttttcagaagaacactatgtgctgctgcacttgatttatttaacaggcataacgaattcatttgtttttaaaattaaaattaattgaagtacatggtacgtgaagagtgttccttatgggctccctcaatcgnggtttcatacaacagnaattatgaaacatatataaacttgatagatgtctccttgaaacatatataaacttgatttatttaacgggcaatctagggacagcaacaacaggtgcgttccaagcagcacttgcaaccctcatagcagcaaaagcacggacgcgtggg

SEQ ID NO: 118727 - DNA, 163 bp, Glycine max
  unsure (1)..(163): unsure at all n locations
  Clone ID: PAT_MRT3847_78219C.1
agttcacaagttcccttttacatgttctacctcaatttgacacccaaagtttctgtctttgaattgaggtaccatacccttttagttccatttagccagaagtattagtatcacncttattttgtccactttcgattgaaattggtttctgggtaggttgagt

SEQ ID NO: 118728 - DNA, 139 bp, Glycine max
  Clone ID: PAT_MRT3847_7821C.1
atgactagacaaggatacggagaatctactggaaagattattctaatgggtgaacacgcagttacatttggtcaaccggcaatcgcaattccatttaatgctggaaaaattaaagtcctcattgaaagtttagatgaag

SEQ ID NO: 118729 - DNA, 968 bp, Glycine max
  Clone ID: PAT_MRT3847_78220C.1
gtccttctctaacaatacaaatttaagtcgtacgagggaagaggctctggatttcggtgccttgagcgtttctaatggagggaagtagttacttgataacatattatgcattaatatgagtgggttgactggacctattcaatttggtttacatagatctcctctaaatccatcatatgacattcttaatgtaattgctacaggttataggagaatcggctactggtctagttactctgacctttctctaataacccctgagaaacttcatgcagagcctgccaatcgttcaatttcaagccaacatctaaactgtgtcatatggccaggaaatacaacagaaaagcctcgtggatgggttttcccaaataacgggaggtaactgagaattggaattcccaacagagttagctattaagatatgatctcccaaataaatggcaccaatgcaattcaaggatattgcatagatatattcctagctgcctttaaattgcttccctatgcagttcaatacaagttcattctgtttggagatggacacaagaacccaagctactgtgatcttgtcaacatgattacttctgatgtttttgatgctgccgtaggtgacattgcgattgtctctgtccgaacaaagattgtggattttactcgaccatatatagagtcggggctagttgtggttgctccagtaaaaaaaattgaagtcaaatgcttgggctttcttgtgaccatttactccacatatgtggggtgtcactgcattttttttcctctttgttggagcagtggtgtggattcttgaacatagaacaaacgatgagtttcgagggtcaccgagggaacatatagttacagttctttggtaagtactcttgttgtacgttgtgcacatagctaggtagtcataacagtgccttgtatgcttttgcaggctgtgtttgtcaaccatgttgtttgcgccc

SEQ ID NO: 118730 - DNA, 430 bp, Glycine max
  Clone ID: PAT_MRT3847_78221C.1
cttgttacttttactttgttgcttttttgtttacttagtatcaagatcatgtctaacggaagtgctgaactaggacacacaatgggaaggcttaccgtgccctacaaacacaaacaccacctttttcaccctgcaaggactgacaccctacccaaaggcttgttccaaaggccaaaatctgtgaaagagtcgcaagactgggtcgctggcacccacgaaatcatatgaacgccccaagaggccaacaagcccccccaagacggggaagttggaacaagtgatccaaaaaaaaaaaagaggggcctaaaaaaccctttggggagagagcaggacaccgaaccccgcccacaccgggggagccctccagcaactccacgccctcctagtaggaagcttcggccctggaaaaaggaaacccccaaattggtgg

SEQ ID NO: 118731 - DNA, 454 bp, Glycine max
  Clone ID: PAT_MRT3847_78222C.1
gtgtacatacatgaatatgtatagatgatgtttgattttcaaaaaaaaaaaaaaaaaaaaaaaaaaaaaaaaaaaaaaaaaaaaaaaaaagaaaacaaaaaaaaaaaaaaatgaacgaaaaataaacaacgaaagagactgaaaaaacacctgacgaaacccaaattaatacaacttgaaacacataccactttcaacaaatggcgggggggcccttttgggggctccgatctttccttcccgcgggtgcgcagtctgattgttttttggggcgcccccctatatcttttcatggcccgcgttttccgcggtggttacgggaaaaacccccggttcccccgcctttgcccttgtgcccgctccttcctttttctcccctggctttatagccaagggggccggctttaccgcctttgctctaattgggggcctccttttggggttggggcccccc

SEQ ID NO: 118732 - DNA, 328 bp, Glycine max
  unsure (1)..(328): unsure at all n locations
  Clone ID: PAT_MRT3847_78223C.1
gtcgcanannncgcgtncgtnagctcggnnttnggctcgagntttgtgttanntaggtggatgggaaanctgactttnccccngggcncttcccgangtgttnagagantgcntctttctntagggggaggagctggtgcnnanantgctnttctcntgancntgccanatgctgttctttcnatgtggagatnttttgttggagatctcgtctttgangtttctnngatgacttctccctacnttnnntgtacagtctctttcttcntagcntttggnantttggctgntgacnccntcnnttttgnggcctttccccncaagctgg

SEQ ID NO: 118733 - DNA, 411 bp, Glycine max
  Clone ID: PAT_MRT3847_78224C.1
aataattattcctatttataagactttatatagactattacaatcgaaagataagtgctaacattttaatccaaaaataactgaaatatgatacttatcaatcaacttcccttccaactctgattcctgattcatcttcaacaagctctaccaactctccctcctccgcaacccccacattcccctcttttcctcccaccacatcatcaacgtgtcccctaccgtgacggcgtcaaatctgttggttgacaaggaaggtgttagagccccctcgaagatgttgtgcaagtcaatgtacgtgggaggaggctatgtcgtcacacttgactgtagagagagagggtttggttgtgaaggactcagcagtgctgcaaactctcagtgagtgtctccaagacttggcagaatgtg

SEQ ID NO: 118734 - DNA, 287 bp, Glycine max
  unsure (1)..(287): unsure at all n locations
  Clone ID: PAT_MRT3847_78225C.1
tgaatcacatattgtgtttatgcatgtggcgtttcatgcaagcttcatacatcaaagaaccttcggaaggnagtttcttagttgtgactgatatgatgggagcactaagttctgccggtattttgcgtggtgtgaattgggtgatgatgttgatgacatggacatattgatagcaatagttggatcgcaattggcttacattatggaattacaagatagaaatgtggaattgaatgatgaattanatgaagcaagtaagatgcttganatggtgaatgaattgttgg

SEQ ID NO: 118735 - DNA, 1285 bp, Glycine max
  Clone ID: PAT_MRT3847_78226C.1
gctaaaatgggtttctattttggtaataggagattcgatcaatataaatatatatatatagatatatatatatatatatatatatatgattatatacgttatgtacataactttcctagaaattattcaaatgggtttctattttggacactaatgactatcatttattcagtgaatatgacatgaactctgtcgaggaacaattggagggagagaattcagtggatcctggtgaactctcatgggaaaatcactcttattcatatctcactaaagaaagcaccacccttttgagcaattcttcatctttggaagagatcaacactggctttgatatgacaagtctcaaacaagatgcttctccacagaaaccgaagtcttgcattctgtcttttgaggattccactttagtgccaattaatcccaagaaaacatgccaaatatatgatcatggtgaacattcaaaggagacacaagaaaagccacacaatagaaaacccctcaagaggggtagacgcttttctcagacacttgatcacatattggctgaaagaaaaaggagagagaatatcagcagaatgttcatagctctttcagcacttattccagacttgaaaaagatggacaaggcttctgtccttagcaacgctatagagtatgtgaaatatcttcagcagcatgtgaaagatttggaacaagagaacaagaagagaaagacggaatccttaggatgtttcaaaataaacaaaacctgtgatgataaacctataaagaaatgtcctaaagttgaagcaagagtctcaggaaaagatgttctcatcagagtaacgtgtgagaagcaaaaggacattgtacttaagctactggccaagcttgaagctcataatctctgcatagtgtgtagcaatgtcttaccttttgggaattccgctctcagcattaccagcattgctatgatggaccatgaattcagcatgacagtggacacgtacgacctagtgaaaatgttgactgaggaattgttggagtgctgtaaattgcaacgataatgagccacgctaacgaattggctaccagtaaatttaaaagtgcattttaagcagttcaagcattttatttggtgtccctattagataattaatattggcagtatcttcatatattatgcatttggtgtgcataatagttgtctttttggccatcttcacaaataatcatcatttttatggcaaaataaaatgattttgtgatttcacattttgtgcattttcaatatttttatatt

SEQ ID NO: 118736 - DNA, 428 bp, Glycine max
  Clone ID: PAT_MRT3847_78227C.1
aaaagaacaaaaaagttgtcaagcctgatgacaaaatgtatgtgccaaaaaatgtaatcaaacaagatataacatgaaaacaagacacgtgagtagtcccttcctcataatcaaggcacacaatcaactataatatttattaggtccgagtagattgcaaatagaaatatttagttgagatgatacatataatgtttggttacatttttcggcacaaaccttttgtcatcgagcttgacaactcttttgttcctttcttccattttgctcaagaatgaactcagtacctgctttgatgaacaaacttcttttagatcaaataccctaggaatgagagataaatagtagaaagaaaccaatgcataggaaaaaagggtgaatgtttatttgaaactatgacaaagctttgcaactgataaatatagata

SEQ ID NO: 118737 - DNA, 517 bp, Glycine max
  Clone ID: PAT_MRT3847_78228C.1
cataaggagtgcctgcagaactgggcaactttatgagtgtgacaagaggtgttctagcgggcttgcacccgagtaatcctgagtcctgaaccagatcgagacaatatttcctctgagacatgccactacccagtctacaatgagaaactacaagcccgaaaaagtatttcaacttacccagacctttaattttgaacgataaatcaagaacattcttgatcgtgggaaattcatcgcttgaatcacctgcgggaatgatgtcatctacatataccaacagtgcagtgacagcatttcctatgttgagactacatagggagctctcctgaacttgattgtatcgcacccttctaagagacccaaactagcccgccttttcataccacttcctaatcgatagcatcaccccatacaagctctttcagtaccttcgccatcagaactagggctgggcacaagatacccccacaggcacttttgatggcaactttctactagaaagagctccccgcaagaa

SEQ ID NO: 118738 - DNA, 364 bp, Glycine max
  Clone ID: PAT_MRT3847_78229C.1
atcctgtcctctgtcggcatcgagggtgatgccgctcaggtcaaggctctcgttgccgagctcaacggcaagaacctcgacgagatcatcgccaagggccaggctaagctgagcaccgtctctgttgccgccgcccccgctcccgctgctggtggtgctgcccccgccaagggcgacgacaagaagcccgccgctggcaagaaggaggagaagaaggaggagaagaagaaggagcccgagcctgacgccgctgaggaggacatgggcttcggtctgttcgattgaagggccttcctatcctattctcgctttctcggttgctctgcgttcgctctgttacataaatctgccatcacgcgaaaaa

SEQ ID NO: 118739 - DNA, 1581 bp, Glycine max
  Clone ID: PAT_MRT3847_7822C.1
tcgcgacgcagtatcgccgagtaagggcgatagctgtgcgctggtggcacgaccgtccgggaatgaagaagtagagagctatctcaaggtcgcgagggagaataatggccgataatgaaggaagagagtaggactctcaagcgtcactggaggatgagacaataagggtggatgaagtagattgcacgcggagacacggttaagagaagaacccacgcggccgcccacgcgtcccaaaacactatagcaatagaaacatttgcttttgaaaaacccctcactcttcatcactacactagctagccacatacaatgtcgaccaaatttaaggtgtttcgtgaattcacaagcgatgactcattcctaaaccaagttatccctgaaaacatcaccgaattccaagtgactctgtccctcgctagagactacgatggcaacaactcaaccaacggaaagttcattccttactgggacactgaaaaggtcactcccgaagtgataaaaaaattcaagaaaaaatacgaacccaccgcactgagggttaaggttcttgtcagcattggaaacaaaaacaaacaatttcctttcaccattggctcggactcgaacagcgaagcatgggtctccgaggccactgcttcgctgaagagcatcattaaaacctacaaccttgatggcatcgatgtcagctacgaggacatcgccgccaacgaagccgactttgttaattccgttggggggcttgtgaggaacctgaagcagaacaagctcattactgtggcttccttcgcaacaagcgctgatgccgccaacaacaaattctacaatctcttgtacgcagaatatgctactttctttgacactgtggtgtttctgagctgggtagggtttactccttctcgcgccaacccagttgcgagcttggaggagaagatccttgccgtggccaacgagtataaggccgtgaaggcctttctggtcgcttacagcaccgttgctgaggattgggctaatttttcgccacctatcttctttatcactctccatggccttctgggtaactctgcggttaagggagcgtccattaaggtcattagtgacgccaccgcctcctttcccgccaagtggatccctgaaattttattgttggctgcctctaaatgaatgaggtatgacatgaagggtgaacacgtatctcagaagtgttatgtgatatgtatgatgtgtgaatcttgaaataatatcttaagggcaagaagttattagttaaaattattagaggtagttttatgaatgggtcataataataaatgctagctatatgtaccactatggaataagattgggtcataataataaagctagcttgctagctatatgtactatacgtaactatggaataagacccatactagtgctataggggcttgctatatgtatgtgtttcatctgcaaattaagagctgagacgcttgccatgcaaggcagacaactattatatatattatgttatgtgtttgaaaaaataatgcatgtgtgtgtcttgtgaataaaatatatttttaagttccaaaaaaaaaa

SEQ ID NO: 118740 - DNA, 399 bp, Glycine max
  Clone ID: PAT_MRT3847_78230C.1
ggatccgcacttcggggtagttgaaggattgtagctcataatctggttctccacgtttggttggagtatgcatgcatttaacattaaacaagtgatcatgaatttagcaaacagtggagacccatttgcctatgctgatttcatttatcccctaattcctggctttagaaattatgacatcctttgcctttttattcataatctccattgatacatcgaattttgctattcccacaccattttctttttaacaaaaatacatttgatgggaatgtggtgaagtcacatctcctaataataatacaaggaaaacttattttaattgtctatctcaaaaaatatcatgaagataccaacaaaaatacaattttgttgtgtatgccacaagatgtacatttg

SEQ ID NO: 118741 - DNA, 181 bp, Glycine max
  Clone ID: PAT_MRT3847_78231C.1
tcattggagagagtccttggatgatcctgatacaaagattttgagacctcatctggttcacttaggggactggttacggtgttatacactatacaatgtgaggactacatcatgatatgctgacaagctaggcgaggtgtccatatcaattgcttcaaagcggctgcttgccggatccggg

SEQ ID NO: 118742 - DNA, 283 bp, Glycine max
  Clone ID: PAT_MRT3847_78232C.1
tgaactcttgaatgaaaacaggaagtccattgggagggttacacttgaacttggccgcagatttctaatgcattgggggtggcccctgaggacaaggacagccaattggcacaacttcatgatgcttggtgcaatagtctacagatgcatgaagcatagctaccatatgtggagcctgtggtacgagaataaggtgctcacagtccctatgacgcctgccatttgagaggggaagctctctctggagttgaacggcttcgaaaagctgatgttcctaccatag

SEQ ID NO: 118743 - DNA, 601 bp, Glycine max
  Clone ID: PAT_MRT3847_78233C.1
cggacgcgtgggtttttgttttggtgtaacttgctggtggggctttgcgttgtggagaatatgtaactcttcggaaagttggggatgcaagtcaaaagggtggtggttctggtgctcagcaaatagttattgagggtcctctgtgtgaagattactataaaattcgtgattatctctattcacagttttatttgctttagatttggttgtgctagtgcaatggcaaatcatgaacttctttccctctgccctgttttctctggacctgtttttctgataaggcagagaatgcaaaattgctctggtaaatacatggctttcaagactaaataggtctgagtagcagtgctcgggcagttgcaaactgggttaatttggtagccatttgaacaagattcacagggtccctcactttgatgttttcgatgaagaaatcacgtatcatcattcttgtgcctttgatatacatcaaccaccatagcttcttggtgatgtgaacttcaagtgtgtttaatctttcagtgtgtttatttcctggtaggctccagattttgaaagggtattcatgtgtgtgtgggcctctatctccacatgcaggttc

SEQ ID NO: 118744 - DNA, 1230 bp, Glycine max
  Clone ID: PAT_MRT3847_78234C.1
ttctagcagtccagtagatgttcctcaaatcaagtatggagccattgttaagaaggcagctaataataaagaatggagttggtcagatgtcgcaaatcccatatttaaatgctctgacaaggttagatccttgatctcctctcttacattcagtataatgaagatctcagtcaaggatatttctgctagcttaacaaaaggtgctagtcaaccatatgaagctatatttgtgtcatcaaaaactaagaaaagtgatgcacttgatccactaattgtagttcttcatgggggaccacacactgtctcattgtcaagcttttcaaagccattggcttatctttcttcccttggatatagcttgttaattgtgaactacagaggctcattaggatttggtgaggaagccttgcaatctcttccagggaaagctggatctcaggatgtcaatgatgtgctcactgctattgatcacgtcattaacttgggacttgccagtccttcaaagattgcagtcctcggtggctcacatggtggctttctgacaacccacttgattggccaggcaccagagaaatttgttgcagcagctgctagaaatcctgtatgtaaccttgctctgatggttggtacaactgatatccctgattggtgctatgtggagacctatggtacaaaggggagagataagtttactgaagcaccttcagcagaagatctaacactattttatagcaaatctcctattgcacacctctcaaaggtaaaaacaccaacgatttttctactaggtgcccaagatctccgtgtcccaatttcgactggactacaatatgctcgggctttaagggagaaaggaggtcaggttaaagtcattgtgtttccaaatgatgttcatggaattgaaaggccacaatccgactttgaaagctaccttaacattgcgatgtggttcaacaagtattgcaaatgagcgggctagcgattgaatcatttgactcccttccaggctagcgattgaatcatttgactcccttaatattaatgctattggggtagagtgcattttgtatttgaaaaagaaagggtaacacactgtatttgtcattgctatctttaatttttaataaaaaaattggttcactgaaggatgtattttagctttgggttatgaaaaagacaagacattctgattacttaaatataataaaattctcattatttatagttaaa

SEQ ID NO: 118745 - DNA, 379 bp, Glycine max
  Clone ID: PAT_MRT3847_78235C.1
ttaaccggactcaaatccatggctggcttccccacgaggaagaccaaccgacaattacctacattgctagcaactgaggaagagtacaatgcatgcaggtgtggccaccaattgacaagaagaaggtcgagactctttcctacttgccagacctcgttgatgcccaattggcaaaggaagtcgaataccttctaaggaaaggatggaatccttgcttggaattcgagttgaagcacggtttcagagaccgtgagcacaacatggcacctggatactatgatggacgctactggaccatgtggaagctgcctatgtatagctgcactgatacttctcaagtagttgaagaagcttcaagaggctaatactgataccccaa

SEQ ID NO: 118746 - DNA, 388 bp, Glycine max
  Clone ID: PAT_MRT3847_78236C.1
ccggctgcacccacgcgtaccggggacttcggcttgagcttccgattacgatacacgcaagacccgcggggccgggtacactttaaaggatccggaccccaagatcgtaaggcaggctctagaactcaccgaaaccgcaaccactgatatacctgctaccaaaaacgccatcctgaccgcagcaagaaacacaaaagcaaaaacccaagataacgacaacaaccataaaaagcacacagacagggacaaaaaccaggacaagcagcataacaaccacaagcacagacaacgacatcaaagcaaaaacaatggaaacgagacaaatccatacatacacacgcctcatgactctagaactcgacctttaacgaaacacaatgacaaacaa

SEQ ID NO: 118747 - DNA, 367 bp, Glycine max
  Clone ID: PAT_MRT3847_78237C.1
gatatctggcagcagggaagacaagtagttgagaactaagaagaaggaaatggcttcctcaatgatctcctccccagctgttaccaccgtcaaccgtgccggtgccggcatggttgctccattcaccggcctcaaatccatggctggcttccccacgaggaagaccaacaatgacattacctccattgctagcaacggtggaagagttcaatgcatgcaggtgtggccaccacttgatatgaaaaagttccagactctttcctactttgccaaacctggatgatgcccatttggcaaaggaagtcgcatacccttctatggaaaggatggttttccttgcttggaaattcgagtcggagcacgcttt

SEQ ID NO: 118748 - DNA, 438 bp, Glycine max
  Clone ID: PAT_MRT3847_78238C.1
ggctcgaggtagttgagaactaagaagaaggaaatggctgcctcaatgatctcctgcccagctgttaccaccgtgaaccgtgccggtgccggcatggctgctccattcaccgggctcaaatccatggctggctttcccacgaggaagaccaacactgacattacctacattgctagcaacggtggaagagtacaaggcatgcaagcgtggccaccaatgggctagaatgaagatcggactctttactacttgccagagctcgatgatgccccattggcctaggaaggcgcataccttctaaggaaaggatggattccttgcttggaattccaggtggagcacggattcgtgtaccgtgagcacatcaagacatctggatactatgatggacgctactggaccatgtggaagctgcctatgtttggctgcactgatgct

SEQ ID NO: 118749 - DNA, 403 bp, Glycine max
  Clone ID: PAT_MRT3847_78239C.1
cagaaaaacaagtagttcagaactaagaagacggaaatggctatctcaatgatctcctcccgagctgataccaccgtcaaccgtgccggtgccggcatggttgctacattcaccggcctcaaattcatggctggcttgcccacgaggaagaccaacaatgacattacctccattgctagcaacggtggaagagtacaatgcatgcaagtgtggccaccaattgtcaagaataagttcgagactctatcctacttgccagaccttgatgattcccaattggcaaaggaagtcgaataccttataatgaaacgatggattccttgcttggaattcgagttggagcacggattcgagtaccgtgagcacaacaggtcacctggatactatgattgacgctactgga

SEQ ID NO: 118750 - DNA, 663 bp, Glycine max
  Clone ID: PAT_MRT3847_7823C.1
gtcaaggccgctgctcaaaaccccatgcgggaactccgcatcgagaagctcgtcatcaacatctccgtcggagagtctggtgataggctcactcgtgcggccaaggttctcgaacaattgaccggtcaaactcccgtcacctcgaaggctcgttacactgtccgaactttcggtatccgtcgtaacgaaaagattgccgttcacgtcacgatccgtggacccaaggccgaagagatcctcgaacgtggtttgaaagtcaaggagttcgaactcaagaagaagaacttctccgcgactggtaactttggtttcggtatcaatgaacacatcgatatgggaatcaagtacgatcccggaatcggtatcttcggaatggacttctacactgttatgggtcgaccgggagctcgcgtttcccgacgcaagcacaagaccgggcgtgttggattctctcaccgcgtcaagcgtgaggagaccatggcttggttcaagactcgcttcgatggtatcctcctcggtcgcaaggattagatatgtttttgagggagagaaaactttttagtttcttgcaaccaaaatttttcctttttaaatttttcgattcgcttgtcctttgtgtgttcaaaagatgatggaatagtgagaaagaagaagaagaagaag

SEQ ID NO: 118751 - DNA, 2512 bp, Glycine max
  Clone ID: PAT_MRT3847_78240C.1
ttgccacccacgattcaccacaaccctctatattccattacaagaaccagtttggaatatatttttattccttctttgtttcttcactttcttccatacacataaccatgtcttctcagaccgttgtcctcaaagttggtatgtcatgtcaagggtgtgctggagctgtaaacagggttttggaaaaaatggaaggtgttgagtcatttgacattgatctgaaggagcagaaggtgacagtgaaaggaaatgtgcagccggacgaagttctgcaagccgtttccaaatccggaaagaagacggcattctgggtggatgaagcacaaccacctgaaaacaagccttctgaaactgcacctgttacctcagctgagaatgataacaaggcttcagaaagtggacctgttgcctcagaaaacaagcctccagaagctgcacatgttgcctcagctgaccctgaaaccaagccttcagaaactgctgttgaaactgttgcttaaggcatttgtggttctatttttctatgtggaagtaggtctgtttcatatagtatatgatgtgctttgtgcatgtcagctaatatatttgcattggtgtgctgttacagtgttactggtttctaagcttcaataacttgtggccgatttttcacatgagatacatttcaagtgtgctataatttagaatttaacttgtcgctgttctgtgttttttcccctctactttcatgctttttcttcacgatgatatgctccatttagattgcttgatattgaattcagaattattgccagtgaacttccaatctaatagtaaggaagtaacaatggctggtccttccctatttattaaaactctttgagtatggccccctaatattaataactattaagctgtgattttgttttagtttaaaggaatggctttcagttaattcttattgtctttgaatatgatcccagataggtggttcctgttgtttatattattatatctgaaccttcaaaatctagttttatatcagatacacgaaggtcataagaatctcattttaacagcaacagctaaccagatcatttttttctctgctcacttcccatatgattgcatatttatctcttgtccctacttttgtgcctcattccctgctttgtccttttcctctccattctgcgtctcactccatcgtaaaactgatactagtcaatatttcaccacaaccctctctctatattccattgccacccagttttgaatatatttttattccttctttgtttcttcactttcttccatacacataaccatgtcttctcagactgttgtcctcaaagttggtatgtcatgtcaagggtgtgctggagcagtgaacagggttttgggaaaaatggaaggtgttgagtcatttgacattgatctgaaggagcagaaggtgacagtgaaaggaaatgtggagccagatgaagttctgcaagccgtttccaaatctgggaagaagactgcattctgggtggatgaagcaccacaatctaaaaacaagcctttagaaagtgcacctgttgcctcagaaaacaagccttcagaagctgcaactgttgcctcagctgagcctgaaaacaagccttcagaagctgcaattgttgattcagctgagcctgaaaacaagccttcagatactgttgttgaaactgttgcttaaggcatttgtggttctatttttctatgtggaagtaggtctgtttcatatagtatttcatgtgctttgtgcatgtcagctattatatttggtgtgttgttactggtatctaagctacaataacttgtggcctatttttcacatgagatacatttcatgggtgctataatttagaatttgaacctgtcactcttgttactactgtttttgttcagtcttttatattcttaccacaacttgatcatattggaaagagcttattttccgcttatttgcactgttaatatcaaaataacggtgttcatatttataggtgttgagtcatttgacattgatctgaaggagcagaaggtgacagtgaaaggaaatgtggagccagatgaagttctgcaagccgtttccaaatctgggaagaagactgcattctgggtggatgaagcaccacaatctaaaaacaagcctttagaaagtgcacctgttgcctcagaaaacaagccttcagaagctgcaactgttgcctcagctgagcctgaaaacaagccttcagaagctgcaattgttgattcagctgagcctgaaaacaagccttcagatactgttgttgaaactgttgcttaaggcatttgtggttctatttttctatgtggaagtaggtctgtttcatatagtatttcatgtgctttgtgcatgtcagctattatatttggtgtgttgttactggtatctaagctacaataacttgtggcccttttttcccctggggttcctttcctggggggctataatttagaatttgaacctgtcactcttgttact

SEQ ID NO: 118752 - DNA, 651 bp, Glycine max
  Clone ID: PAT_MRT3847_78241C.1
tcgccccggcgctgccaagaatatcggcagcggagttgattatactaatgatgagagtaagcacaatgcgctctccttcaactgaatctacttctccacagtctggttacccacttgatcatactcgttgcctggtcgcctggctatggtctgcatccatttcacgtggcgctcaatgtccaatggcgtggcatatccccacgcaggaatgacacaactaatgactattactctccatctgcttagcaactgtgttgatagaagtgcaaatgcaatgcagggtggtggcccaccatgttggcaatgaagaacgtttgagaactctttcctacctgccatgaccttgatgatgcacaattggcaaaggaagtagaataccttcttaggaagggatggattccttgcttggaattcgagttggagcacggtttcgtgtaccgtgagcacaacaggtcaccatgatactacgatggacgctactggaccatgtggaagctgcctatgtttggttgcactgatgcttctcatgtgttgaaggagctccaagaggctaagactgcataccccatcggcttcatccgtatcatcggatacgacaacgttcgccaagtgcagtgcatcagcttcatcgcctactagcccccaggcttc

SEQ ID NO: 118753 - DNA, 598 bp, Glycine max
  Clone ID: PAT_MRT3847_78242C.1
ttttgacaggtgaacgagcaggcatttttattcgaagcaaaaggtgcagccaattcccaccatactaggaaccaggccagcgctgcccaaaaacgctcaaacaaggaaaaaaaacgagaaggaaccaaagttcttggaaaccaagtacacataactccaatacacgactaacaatgcgaattgcggtgaaacagatcgaaatgcaggcgatggttctccggcctgggcttcttcttcttcttctttccccgtactaatcgaaggacagcggaacctggcttgccaggctacggtacttcagggcgtagaacatctcgatgtagcggcgggtctcgcgcctctccaggttgctcacgtacttccagaacccgtacacgccggtcagggtcatcagcctctcggagtagagcttccaggtgtacttctcatagattctctgcaggccgccctgtgagatcttgtcccagtagctcggatctgccttgcatttgtcaaagaagttgaccaggatatccgcggccttgtcgctgaggtaagggtcaatgtgcaggccatataccccgtgcacgatgatctcagcagggccaccatggcaggt

SEQ ID NO: 118754 - DNA, 294 bp, Glycine max
  Clone ID: PAT_MRT3847_78243C.1
cccttaaacaacaacaaaaacgcgccgggaaaaagagcaagaacgaaacaaaagcgaggaaagggggggaacacgcgagggagaccgagggcgaccaccgagcaccggggcggaccaaccaaaacgacgagacagcagcgaggccgacacagaagaaagatgaaggaactgccggcggccaagacccaatgagaagcgcgaaattagagacgccattaggcggggaaacaccggcggaacacaaaaacaatgggggggggcgacaacacgagacggcgagacacggggactaac

SEQ ID NO: 118755 - DNA, 529 bp, Glycine max
  Clone ID: PAT_MRT3847_78244C.1
ggtttcctcaatgatctcctccccagctgttaccaccgtcaaccgtgccggtgccggcatggttgctccattcaccggcctcaaatccatggttggtttccccacgaggaagaccaacaatgacattacctccattgctagcaacggtggaagagtacaatgcatgcaggtgtggccaccaatcggcaagaagaagcttgagactctttcctacttgccagacctcgatgatgcccaattggcaaaggatgtcgactaccttccaaggaatggatggatttcctgcttgcaatccgagttggatcacggtttcgtgtaccgtgagcacaacaggtcacctggatactatgatggacgctactggaccatgtggaagctgcctatggttggctgttctgaagctcttcaggtgatgaatgagcttttagcagttaagactgtataccccacaggcttcattctgctcatagtatctgacaacgttcgccaagtgctgtgcatcatcttcatctactacaactccgcatct

SEQ ID NO: 118756 - DNA, 537 bp, Glycine max
  Clone ID: PAT_MRT3847_78245C.1
cgaggaatacgacaaaaggagatatggcggcagaataacagtagatgagaactacaaagaaggaagtggcttactcaatgatctcctgcccagttgttaccatccgtcaaccgcgccggtgccggtatggactgttccattcaccgggctcaaatgcatggctggcttgcccacgaggaagaccaacaatgacattacctccattgctagcaacggtggaagagacaatgcatgcaggtagtggccaccaattggcaagaagaagatcgagactctttcctacttgccagacctcgatgatgcccaattggcaaaggaagtcgaataccttataaggaaaggatggattccttgattggaattcgagttggagcacggattcgagtaccgagagcacaacgggtcacctggatactatgatggacgctactgtaccatgtggaagctgcctatgcttggctgcactgatgcttctcaggtgttgaaggagcatcaagaggctaagactgcataccccaatggcttcatccgtatcat

SEQ ID NO: 118757 - DNA, 312 bp, Glycine max
  Clone ID: PAT_MRT3847_78246C.1
cgagagaacttgggggtgacaggggaacaggatgatcgtatgtaagacacaccacacgccgtgagcagctacattaaggatggttagggcaatctcgaggttttcaattcttacaacctgccagataagtgcgtactagttaagaaactcggcttgtaacccataatcacagcatatatgaaggtgtgggaggctttatatgaaatattaaatatattttggtatataactatggctatgttaaccctcaccagctatgttattgtgggtgtccttgatgttataatgagcttagttgcttaaaaaaaaact

SEQ ID NO: 118758 - DNA, 385 bp, Glycine max
  Clone ID: PAT_MRT3847_78247C.1
ggcttcctcaatgatctcttccccacctgttaccactatcaaccgtgcctgagccggcatggctgctacattcactggcctaacttccatggctggctcccccaccaggaataccaacaatgacattacctacattgctagcaacagtggaagagtgcattgcatgcacgtgtggccaccagatgacaagaagaactttgagactatttcctacctgccagaccttgatgatgcacaattggcaaaggaagtaaaataccttcttaggaagggatggattccttgcttggaattcgagttggagcacggattcgtgttccgtgagcacaacaagtcaccagaatactacgatggacactactgtaccatgtggaaaccgcctatt

SEQ ID NO: 118759 - DNA, 455 bp, Glycine max
  Clone ID: PAT_MRT3847_78248C.1
catacattcagcttgctgctgtggaacaagataggagctataccggttctctatgacggactatgatattctggaaccgatttgatggaatcttccaaccaactcaatgaaccatttacgcattggcttacagccggatatgtttttgctgcatcttttgcactaatgctttatatggactctggcctacctgcacaaattatcaagaacaggtagaatagaacgggtggatttaacaaagcatcacacaagcctaagttgccacttcaggagttgaaacatgataaaagcaaagagtctcgaactagagcctgatagattgacacatatctttctgtggagttgctagatagaagaatatggatctatgacatcggatggctgacatgttaaacgagcttcccacaactggatgaagcaaccgaacacttcaatgaggacagtgtcattggtga

SEQ ID NO: 118760 - DNA, 398 bp, Glycine max
  Clone ID: PAT_MRT3847_78249C.1
accggcccggaatacccaggcggacgcacgcgtgcgagagaagaccacagaaggggatctggctgcataaaaacaagtagttgcgagctaataagaacgaagtgggtgactcaatgatctccttcacagctgttaccaccgtctaccgtgcctgtgccggcatggttgctccattcaccggcctcaaatacatggctggcttccccacgtggaagaccaacaatgacattacctccattgcttgcaaccgtggatgagtacaatgcatgcatgtgtggccaccaattggcaagaagaagttcgagactctttcctacttgccagacctagatgatgcacaattggcaaacgaagtcgaataccttctaaggaaacgatggattgcttgcttggaattc

SEQ ID NO: 118761 - DNA, 337 bp, Glycine max
  Clone ID: PAT_MRT3847_7824C.1
atcaatattatttcggaaatgaaaggtgtatactaaacacaagacatccacatggattatatttatagacacataccggagaacgtataatagtcggctgccttgcatggaaagcgtatgaattcttaatttgcaggtgcatggcaaacatattacaagccgctataagcctaagatggggcttattcattaattacggataggacagatagcgcgctagcttggtatattattatgacccagatcttattccagagagaggcatgtatatggcttttattattacgacccattaataaaactccctttaaaaatggaactaataatacactgccct

SEQ ID NO: 118762 - DNA, 274 bp, Glycine max
  Clone ID: PAT_MRT3847_78250C.1
gtgggctggataaaatgttcagttttattcctaccatctacttttgtgaaacctacgctgtgtagaacctgcttattggtatatttatgtaaggtcctgagacaactttagggttattctattttgaagaaaaatatgattacctcactttctaactgttaaaaggtaagcatgctcgtttgaaggtgtatccaaacgtacattgcagggtcacaacattttacccttgagggactgatagcgctatgattttttatattcttatcaattcttc

SEQ ID NO: 118763 - DNA, 931 bp, Glycine max
  Clone ID: PAT_MRT3847_78251C.1
aatttcagaattaatgtatacacccactcactctagttagctagtactaaagggagcatcagcatcagcactcagtagccagcagcagcaatgggttctgcttcagtcaccaaagcaccaccctcttcctcctcatcacccaactcttcttctactgagtcccttgatggcttgaagtttggccagaaaatctactttgaggaagtgagtgttgctgcagcagcagcaacaacaactcaagggggcaacaaaacgagaggtggggtttctgcttcaaagaagggaaggggtggctcagtgcaagctcctaggtgtcaggttgcgggctgcaaagtagatctgagtggtgctaaggcttactattctaggcacaaagtttgtgccatgcactccaagtcccctactgtcactgttgctggtttggagcaaaggttttgccaacagtgtagcaggtttcatctgctttctgaatttgatcaaggaaaacgtagctgccgcaagcgacttgctggccataatgagcgccgacgaaagcccccaccaagctccatattaacctctcgctatggcagactctctgtgccctatttttgataacaatggtcgagacgatggctttctgatggaatttgcttcataccccaagcttactttgagaaatacattgccaactcaaagatcaactgagccggctccagggaaccatgctgcaacactcacctggcaaggaggttcagacactccctctgaatttttcctgcaaggatcagggagtagtggtggaacaagcttccttaattcaaaacatcccttagtggaaagttacactggagtcactgactcaaactgtgctctctctcttctgtcaagtcaaaccctgggtttcagaaacacagccccagcaacaaagtttgaactgaacaacaacttg

SEQ ID NO: 118764 - DNA, 665 bp, Glycine max
  Clone ID: PAT_MRT3847_78252C.1
gtttgtggggggttttttttttttttttttttttttttttttttttttttttttttttttttttttggcccccccaactaaaactatacattcaaaaaaaaaacccggggattgggtcttaccaagggaaacaaattacaaagggaacccaaagggggggggaaagggcgccttcctttaggcgaaaccttggatttagttttactatgggaggggggggctaaaaccccccaggacgaattttaaagaaaacaggattactattaccctatgggggggcccccaaaaaaggggggataagttaccaagaaaaagggataaatcagtttgaccaagggcccataaaaaaaatctacaaaggcacgggaccctaggctttcaagggggccccccaaaccctaaattatacttaacggggggggggttattctctaggagccgccaaccccaggggggcatttaccaaaaaacaagaggcttccgatcttgcaactgaggggaagaataaaaacggggaaacccggcaggaaaacccagcccggggacagcaaaaatgcagtcttgccaaaaacagggattaaagcagccgaattaacatggggttgggaaaacccaggggataagacagggggaaaccctccatttttgcccaaaggccaaaccat

SEQ ID NO: 118765 - DNA, 600 bp, Glycine max
  unsure (1)..(600): unsure at all n locations
  Clone ID: PAT_MRT3847_78253C.1
aagaagttaactcgttgttttatttatataaaaagatcatcaagagagtggagaatttgatgcaattactactgtacaagtagcacacactattagtgaaacagaaattacatcaatgcgatactgcacgatgaaagactccaggacaggagagtagtaatccctgctattttcatgctcgtggcgaatcagaagtaatcaaatgcatgatccaacatggtaagcatcaaactccatttctccatccatcaacataatggcattttgctcctgtttggttatttcactcattatgtcatccaacgactcaaaagtattctgcatgagatcttcttgggactccatgctctgcaaaatgcagccatcaattgactccatcgaatagaatttctcatcttcactagactgcgtgactgatggattaaccaaagatacatcaattctcttgctgctaactgtattgttttggtctaaactatgtcctaaggaactagtgtctccattaggagagacagactttatggtgttgaaaagttgactcatttctttgntgcaaccccggtatctgcttcccagctctgatgctgggtgtaacatgat

SEQ ID NO: 118766 - DNA, 344 bp, Glycine max
  unsure (1)..(344): unsure at all n locations
  Clone ID: PAT_MRT3847_78254C.1
ggggacttaggtacatgaaaatttatggggaggaaaaattgttgcattccaagtttatgacataacataagccatttgaaatggtacttaaagttacaaatgacataccaatgggcctcatttagataaatttctcaacaaacacttataggagaaaaacaataggaggtaaaatgaatgaaatttctcccttaagtgaaaatcaacttatgcacctaacttctggacaaattagattagggagcttctaaaaaattaatgggagatgtttaattcatttaacctctttattttcttatcttataaattcttgntaaaaagattattcaaactgggcttaagta

SEQ ID NO: 118767 - DNA, 471 bp, Glycine max
  Clone ID: PAT_MRT3847_78255C.1
tcatcttcgctgctgcggactttattgtgcttctgttaaatttctcgtttctcacattgtttgcagcaggaagatccccaaaaaggaatcgtctaccatgacaatggttatggcggcgaagatgcgtacgacgattacgatggtaaaaccaaggattttagcaaattagagctgaaaccggatcaccccaatcgccctctgtgggcctgtggcaatggccgcatattcctcgagactttctcccctttgtacaagcatgcttatgattttcttatcgccatcgccgagcctgtttgcaggtagaaattgttaatatgagagagatatcaagcgcaatggcatgttaaaatgttggaactgaacttatgtgtttgatgtgtggaatggtgatgcataggccggagactatgcacgaattcaaccttactccacactcgctgtttgcgggtgttccggttggtctggaaacag

SEQ ID NO: 118768 - DNA, 279 bp, Glycine max
  unsure (1)..(279): unsure at all n locations
  Clone ID: PAT_MRT3847_78256C.1
gacccacgcgnncgcccacgcgnccgctnccacagccganncggctcngnccanggccaccgaaccaaaagcagccactgaggacgncaagagcganctctncgaagacgangacgaacnngaagagcnngaaancaacgaagagngggacgacaaggaggaagggaaagaagngactcaacagngggagganganngggangacgangacgnnagngacgacnncncncttcagnngagaagggagnnggagagcaacaccgagaagaacnaaaccac

SEQ ID NO: 118769 - DNA, 535 bp, Glycine max
  Clone ID: PAT_MRT3847_78257C.1
cttggggggggggggggggagagacaaggggacaaggagggggggggagcaaagcacatgaaagggagagcaacataagaatgaaggggaagaggagggtgacgggtatgtactatgtgactaaacatttggttagtagcaggtagcccgaccttgaacaatggcgggtatagagtacatagcgggaccttgaagggtgaggttggtaacaagcaaattatatggttacagagcatggcggcgtgttagcatgggtagggctattgcgggggtggtggccttacaaggcaacaatgtgtttagtgtaagtgttaattatttagtatggtgtatgggaccaaaggcgaaggtggcgaactcagcaggcttggggaacggcccagttaaataaatagagggacgaggctgaggcttgctgaaaatattgatgcagaatatgcgaccagccgacgcaaagttatgcctaggcagtagtggcaatataacaaaacggctagaagcacgagggcaccataccccgacacgagggagctgt

SEQ ID NO: 118770 - DNA, 252 bp, Glycine max
  Clone ID: PAT_MRT3847_78258C.1
tgattaacacttccttagttcaatatggggaagcccttcactctctctctttcttccctttgcttgctactcttgctcgagtgcatgctttgctattagctccagcaagctcaacgagtgtcaactcaacaacctcaacgcgttggaacccgactaacgcgttgagtccgaatgtggtatgattctaacatggaactctcaataccctgagctgacatgcgccgttgtcactgattccagtctcaccctcaa

SEQ ID NO: 118771 - DNA, 277 bp, Glycine max
  Clone ID: PAT_MRT3847_78259C.1
gttaacaatatggcataaacatacacaatgaaatcgtcattatttctttcagtttaaattttgactgattattaggtttatgtttacacactcccaagtctatgtaactggccaaaatcgttcaaattctaaacaagcaccaaactcttctaaggatatatttttggaaacttactcacaatcacatacaacagttggttgatggccactgtcaactagaaaccctaggttgcttgcatccatgatcaggcaaaaggttatcagatgcagctctttt

SEQ ID NO: 118772 - DNA, 461 bp, Glycine max
  unsure (1)..(461): unsure at all n locations
  Clone ID: PAT_MRT3847_7825C.1
ggctcgagattttggtttgaggtttattttctatgtttttgataatttaatgcatttgaatttgaatatgggtacttgcagagtatcatctaagttcaaggaaaaaatagcaaaactgaggacacaattattggagcctccaaaagtatgttgctatttatactatttatatcatattgttattctcaatttgttgatgattgatgcaagcttttgttatatgtctgtattctctaacttgcttattgaatgacacttatccttttgcaaagaatgagaaaccagattgcatatgcaaacaaaggttttaaattgtagttgcagttaaggcttggttttggttcataatcacagcctaatgatgcaacggctgtattccatctnanaatatggaaccttaccaaacaagccccacaaaaacatcttgaggatgctcaagggcaaaccctttgggaaaccca

SEQ ID NO: 118773 - DNA, 539 bp, Glycine max
  Clone ID: PAT_MRT3847_78260C.1
gtatgcaacctcaatgacttgaaaaagtaccagtcacaccttattgaaatgatgattatgagtacatagaaggcagctgcgatggctagacactactattgtatatgacgattatctgaatggaaaaaggagtaaagatgctatcgccgagccttgccagtggaacacaaacgagactatgggcccttggaactgggaggccagctttctattccatgctaactctggcatctttaccatgcactattcgtactggggggcccagcacttgcaggttaaaacattggataagagatgcaagaagtgttgccatttctgacatgctccaaattgacaccaggggacattatcctaccagaccgatatggttggagttggaacagctggacccttagattaagaggacctgcttgcgattcagcacgcattatctaataacctgatggtacggaattgtgatggtactgtccgagtatgtggtgcctcttgctactcgccaaacattggagagaaccagagctctctctgagatcacatac

SEQ ID NO: 118774 - DNA, 407 bp, Glycine max
  Clone ID: PAT_MRT3847_78261C.1
aaacccgggtttattaataattgggccctataaacatttgaaaaagaccgaggccactggaacccttgactactttggaaaatagactagggaattttgtcccattttcaaattagagggcagagggaaaactcctataatatggccaacgataattttatgggcgggcaaaaccactttttttcagatggggggggggttcattcaccaagtaccaaaactgcagccaaggggtttttgggggaggacttcaagacgatctttcatgacagccataaatgaataagctgggaaacacagccggaaaaagcctgtgtgaaaagaaggcaggccatcaccaggttcaagggatctgtttatgttgaggggggaagccaaaccacggaaaccttcaagggggaaatttt

SEQ ID NO: 118775 - DNA, 231 bp, Glycine max
  unsure (1)..(231): unsure at all n locations
  Clone ID: PAT_MRT3847_78262C.1
cacattactagaaagttagaaaacatttcaccgtttgccttttcttcttcctccacgattaatgtagctgctcttttcttatctttatatgaaaggctctaacaacagaaccctcaaacgntctgctacttatctaatccaaggtagacttgaaggccctcaaaccgagtacgccaatatctcgacccttccacttctaaacaccaatcttgacgaaaatcagacctacac

SEQ ID NO: 118776 - DNA, 262 bp, Glycine max
  Clone ID: PAT_MRT3847_78263C.1
ggctcgaggtacaataactaggtttggagctttgccatcacttggcgacaatgggcgcctacgttgactatgcggacttacgagccttgctgagccagtcgggaggctcctatggcgacaggatatcgtacgtgcaataatccagatgggatacgaccagttcacaggcgatcacaaccttaactaccgagtgattgcaggtgatgcgaactggagtgcagaatgaaaatgggtggtaggcatcgcacttgctgctaaagca

SEQ ID NO: 118777 - DNA, 127 bp, Glycine max
  Clone ID: PAT_MRT3847_78264C.1
atcaaacagaagaggctcaagggcgcataagcggcagctacaggacagtcagcataagattcgtcacttgagtgaaggagacgtactcttgattcctgctgcggttgcttactggacctataacagc

SEQ ID NO: 118778 - DNA, 1180 bp, Glycine max
  Clone ID: PAT_MRT3847_78265C.1
aggaagtcatttactctaagctttgatgagaagcatagagatgtagtaatgaacaagtacattaaccacgttctaagcacttaccaggacatgcagacagagcagaaaaccatcaagatccattccattggtggaaggtgttggcagaagagtgacttaactcatccagcttcctttgactcgcttgcattggaacctgagcagaaacaagccattattgatgatttgaatcggtttttgcgacggaaggagctttacaagaaggtggggaagccttggaaacgtggctacctcctttatgggcctcccgggacaggaaaatctagccttattgctgctatagccaactacttgaagtttgatgtgtatgatttggagctaagctctatgttttctaactcggaactcatgcgagtcatgagggaaacaaccaaccgctccatcatcgtcatcgaagacatagactgcaacaaagaggtgcatgctcgaccaacaacgaaacctttttcagattcagattcagacttcgaccgcaagcgtgttaaggttaagccttacaggtttactctgtcgggtctgcttaacaacatggatggtttgtggtcaagtggtggagaggagcgaattataatattcactactaaccacagagagagaattgaccctgcattgctgcgccctggtcgtatggacatgcacattcacttgtccttcctcaaaggcaaggcctttcgagtcttggcttccaattatttaggaattgaagatcattcactttttgaagaaattgatggactattggagaaattagaagtcacccctgcagtagtagcagagcaactgatgagaaatgaggatcctgaagttgctttggaaggacttgttgaatttctcaaagaaaaggacaaagaaagcctacttagatttatgaatgagactgcagactaaatagcatgttttagagtcttttcatctgtatcaccaccagtataagatgcagaataaaaatgaatgccctttgcttttgtaatgtttaggatttgtacttatgtatggaattgttgtacaatttcaatgcaaaaaagatttgaagattccaaaatcaaaaaaaaatccaagaaacaaaattgaatatgcagaacaccaattccattctctctttccagagttaattaactct

SEQ ID NO: 118779 - DNA, 171 bp, Glycine max
  Clone ID: PAT_MRT3847_78266C.1
cccacgcgtccgaattttcaaagccagacttacaaacatgttctagaatattgagtccaacacttcctcggtctacctcattatccgaaaggcatcgagtgctttgaccactgctatagatactggtgccgtgcctatactgattaaagcatttgagtgctgctctagtga

SEQ ID NO: 118780 - DNA, 212 bp, Glycine max
  unsure (1)..(212): unsure at all n locations
  Clone ID: PAT_MRT3847_78267C.1
cgcttttggggacccgatcctggttctaaacatnngtgcctcctgttggtctcataagagtatttcaagccctacttttaaaaaaagggggcctcagttcaatatctggaccctgacccctgtttttttttcacgtctttttacttcctggcctaccaatttttggtgggggggatgcttttatttcctgggctcttcattgccttgtctac

SEQ ID NO: 118781 - DNA, 262 bp, Glycine max
  Clone ID: PAT_MRT3847_78268C.1
caaatggcactcattcaaatatctcagtacaaactcttttaattaatgctgttgcatttcaactaatgttatattgttatctacaaaatgcttcctcgcgcattcatttttttaattaaactcatgttgccatcttactcgcttggacttgttatgccagtagtagttttctctcggttatgattttccgcatctatcataatccattgtctcaatcaacatgttattttattgtcaggccattctccaccctagacaaaac

SEQ ID NO: 118782 - DNA, 483 bp, Glycine max
  Clone ID: PAT_MRT3847_78269C.1
ctcgtcttcaatcctttcgttattctcttattcatccttctcttctgaataatccagatctctttctgcccttttctccgtcacgcttttcgtgaccggatctgtatggatttgatccagatctacacgccgatggtggttttggccggatctggtgcgtagaggctcagatctacggtaccgaggtgtgtgattcatgttcgtcttgcttttggaatctgtttcgtagaaagtcgtttggtcttgcatatggcatggctcttgaggtatttttttgcaggtacaacagagaatcgatgacaagaacgcagatccgacggtagatccagccgattccgcttgttcgatcgctacagacccctgtatcggatcattaagcagcgtgtctcgcgcgttctacacgtgttgccgatctcggatgttgtaaaattagtttatgatgtgaagctatggagtggaaaatatgtggatgtaggagatttc

SEQ ID NO: 118783 - DNA, 900 bp, Glycine max
  unsure (1)..(900): unsure at all n locations
  Clone ID: PAT_MRT3847_7826C.1
aaacaacagaaaactctagagttcattcaaacccaacataaaagataaaactatccaatataaacaccatgtccatgtaaattgaacccaaaggagtaagtaacataaaaaatatgaatcaatggcctcagacattgtagacgcggatcaattcacagaacaaaagaagaaccatttctcgagcaataattaaacaaaaaccaatgctcaagaggcagtaatatttacactcccgcgtccaccataacaacaaattcaacctgaaaaatcgcatacaccattcaccaatctttctttaaccaatcaagaattcttcgagtcacgaattttctttgccacggcagccaaattgtcacgcaaagccaaagccttggaagacacagcctcaccatgcaacatagcattacaaggctcgccataacaaccttgattacaatcctcaaactccgaagccagagcggaaaaatcctccctcatcagcaaactattgtgaagaatggagcacgcgccaatgtaagccacggccgtcttaagctcctcacacancggtcgactcagaaccccccaattccttagactcgncgcggctctgagcgcgggaagccgcatgatttcatgagcagagttgaaattctcttcagcagaggcaggagcagggtttgcatagggaaccataagccagggaagcagaggatactctgaatcgccgattagaaactgattacacggcgcgtttaggaggggttccctgctggatgtcgttgtaaagagtggaggcttgtagaatttgggaatcggatttgtgtccgaggaagccggcggcgatggtgaggatccgggaagaggaatcgacgactatttgggcggcgacttgagaaactgagactttgtcctcgagcc

SEQ ID NO: 118784 - DNA, 808 bp, Glycine max
  Clone ID: PAT_MRT3847_78270C.1
tcttcaatcctttcgttattctcttattcatccttctcttttgaaaaatccagatctctttctgcccttttctccgtcacgcttttcgtgaccggatctgtatggatttgatccagatctacacgccgatggtggttttggccgggtctttcatagatctggtgcgtagaggctcagatctacggtaccgaggtacaacagagaatcgatgacaagaacgcagatccgacggtaaatccagccgattccgcttgttcgatcgctacagacccctgtatcggatcattaagcagcgtgtctcgcgcgttctacacgtgttgccgatctcggatgttgtaaaattagtttatgatgtgaagctatggagtggaaaatatgtggatgtaggagatttcgggatgaatggcctcaaaacgcttttgtcgtttgtggttattgagtcctgagtgatcttgtcatccgacctttgccatgacaggtgcgcttgcatggcaggtcaaaaaatgttaataaaaaaagttttattggtttggggagagatcgcacgggggttgcccggggtctcttcctcttgtgtggtgtggtgtttgctgtgctctccttttcgttatgccttttattattacctatctgtcgctccactccgtattacgactctggatcagaggatacatcagaggattcgctccaacccctatcgaaagatgctaggtggagttcatcaatattctggtaggtataatatcttcatgaatctaatataacgttattcatagtgaaaataaatcgagccaaggaatttattaat

SEQ ID NO: 118785 - DNA, 260 bp, Glycine max
  Clone ID: PAT_MRT3847_78271C.1
ctcctcgtcttcaatcctttctttattctcttattcatccttctcttctgaataatccagatctctttctgcccttttctccgtcacgcttttcgtgtccggatctgtatggatttgatccagatctacacgccgatggtggttttggccgggtacaacagagaatcgatgacaagaacgctgatccgacggtagatccagccgattccgcttgttcgatcgctacagacccctgtatcggatcattaagcagcgtgtct

SEQ ID NO: 118786 - DNA, 408 bp, Glycine max
  Clone ID: PAT_MRT3847_78272C.1
cgacaggacaatatggatgttttatatagataaatccatgtcaaagttaatttcttttaatcacagttatgttttttggttgtttttttgcatctgataaagctatacatattttagctcttaaatctgaatttgttaattgactgtttaagcaacacaatgttgctttcttcacgttatttttttcatctgataaagctacatattttcgctcttaatctgaatctgttaattgacttgtttaagcaacacaatgttgcttgctttcctcacgttatttcttaagtacttatcggtgttggaattttcctaaaggttcccagcgccactatccgtgtcttaacctttttcgttattttttttcagtttgttattgtcaataaaacaggtttgtacacaatggatatt

SEQ ID NO: 118787 - DNA, 1007 bp, Glycine max
  Clone ID: PAT_MRT3847_78273C.1
tacgctgcgagaagacgacagaaggggggcgtgagtagttctgttgagatccgcataagcaaatcaatcatcctgttccttccttatctctgtctctgcatttccctccctaaaaccctaattctacatttggaaaggaaatctcaaatctaatgactaattaatcaatcaatcgtattaataatccatcgatcaagtatggagtccgaactcaaagacctcaattcgaagccacccaactgcaacggcaacgccaacagcgtttgcgacgaccgtcctctgctgaagccggagcctccggcctcctccgacagcatcgccgagatggagaagaagttcgccgcgtacgtccgccgcgacgtgtacggcaccatgggacgcggcgagttgccggcgaaggagaagctcttgctcggcttcgcgttggtcactctcctccccattcgagtcgttctcgccgtcaccatattgctcttctattacttaatttgtagggtttgcactctcttctctgctccgaccggcgaggaggaacagaaagattacgctcatatgagtgggttgaggagaaccatcattgtttcatgtggacacaccctctccagagtcacgctcttcattttcggctttaattgactcaaacctctcaagtctcaactaaactgaagatcttcttggatgaatgaggatgaaatccatgtagaagtcttttgatcataattggatagacacaccagagtgtttgggtagggggatgttgctacctcaacaaaattgctattgatcttctacagaagaaccaggataatgctaaagccagtttacaagttcttgccgctgatatacatttcttgagggaccaggttacattaacccaggtctgattgccaattttcacttgctctatatctgtgtgtgcatttgtcgttacctacccatcaaaagtaaattaatggaatcaaacttgcattgcatggccaagcactgcaagcaattcaatatctttt

SEQ ID NO: 118788 - DNA, 473 bp, Glycine max
  Clone ID: PAT_MRT3847_78274C.1
atccttctcttctgaataatccagatctctttctgcccttttctccgtcacgcttttcgtgaccggatctgtatggatttgatccagatctacacgccgatggtggttttggccgggtacgacaaaccttcgatcgtattttgctttatataggtacaacagagaatcgatgacaagaacgcagatccgacggtagatccagccgattccgcttgttcgatcgctacagacccctgtatcggatcattaagcagcgtgtctcgcgcgttctacacgtgttgccgatctcggatgttgtaaaattagtttatgatgtgaagctatggagtggaaaatatgtggatgtaggagatttcgggatgaatggcctcaaaacgctttgtcgtttgtggttattgagtcctgagtgatcttgtcatccgacctttgccatgacaggtgcgcttgcatggcaggtcaaaaaaatgttaatt

SEQ ID NO: 118789 - DNA, 1818 bp, Glycine max
  Clone ID: PAT_MRT3847_78275C.1
gaaggagggaaagaacctgacccaggatgaggatcgcgtgagcactcctcttcagatccgcacaagcattgcatatcaaatcaagcatcctgttccttatctctgtctctgcatttcccttccttcttcttctctctctctctctaaaaccctaattctatacatggaagggaaatctcaaatctaatgactaattaattaatccatcgatcaagcatggagtccgaactcaaagacctcaattcgaagccgccgaacggcaacggcaacagcgttcgcgatgaccgtcctctgctgaagccggagcctccggtctccgccgacagcatcgccgatatggagaagaagttcgccgcttacgtccgccgcgacgtgtacggcaccatgggacgcggcgagttgcctcccaaggagaagctcttgctcggtttcgcgttggtcactcttctccccattcgagtcgttctcgccgtcaccatattgctcttttattacttaatttgtagggtttgcactctcttctctgcgcccactggcgaagaggaacaggaagattacgctcacatgagtgggtggaggagaaccattattgtttcgtgtggacgcgccctctccagactcatgcttttcattttcggcttttattggatccccgaatcgaactctgcctctcaggaagacaagaatctgcagcccgaagatctaaggatatctggtgtaatgatttctaatcatatgtcgtacttggatattttgtatcacatgtctatcctcattccctagtttttttgctaagtgatcagaggcgaaacttccgctagtcggtctcattagcacgtgcctcggtggtatctaagttcagcgggaatcaaggtcatcagacttcaagggtgtttcagctgttgtcactgacagaattcgagaagctcatcagaatgagtctgctccattaatgatgttatttccagaaggtacaaccacaaatggagagttcctccttccattcaagactggtggttttttggcaaaggcaccggtacttcctgtgatattacgatatcattaccagagatttagccctgcctgggattccatatctggagtgcgccatgtgatatttctcctgtgtcagtttgtgaattatatggaggtgatccgattacctgtttaccatccttcacagcaggagatggatgatcccaaactatacgctaataatgttagaaggttgatggctactgagggtaatttgatactttctgatattgggctagctgaaaaacgaatatatcacgctgctctcaatggtaataatagcctgcctagtgttttgcatcagaaagacgaatgataatttcatggccccccgtctcaaatgaaatgtagttcccgtcgagttttagtttcaaacttagtatctgcttatgaatggacagcttgtgtgtgaggggtatttatagctaaatagtacacattcacctaaacatctgaatggtacttgtgtaattttcttgtaaataatgtgaccaataatgttttaattgctggtgaactcaattgagccacacaattcaagatctataagttttactgttcttcgtaaaaaaaaaaaaaaaaaaaaatctctctctccataggatccgcggtctgtatattcattgtatggtcccattatttatcaggaaagaaaaagtaaattaatatagaaaattctgtgcagaacaagtattcatacttgaaaatgtatttatctgataattgtctctagagcattaacggatttctgagcagggttcaatgtatctatatttttggtct

SEQ ID NO: 118790 - DNA, 155 bp, Glycine max
  unsure (1)..(155): unsure at all n locations
  Clone ID: PAT_MRT3847_78276C.1
aaaaacnccttcttcagggtcaccgctgtcagggtagggttttccaccttcttnatttagcaatcttcttctacntaccactttatccctcgttncnctctctagtctcttcaatgtaagcntttgcgcaggggttactcggcaatcgctgtatt

SEQ ID NO: 118791 - DNA, 130 bp, Glycine max
  Clone ID: PAT_MRT3847_78277C.1
caataattccttcacttgcagaacttagctctctgggtccatgagaataacttgattagtgttagccctaaaatttacctttaaaccttaccacagtgccaccacacattgtacaaatgcacacacacaa

SEQ ID NO: 118792 - DNA, 3262 bp, Glycine max
  Clone ID: PAT_MRT3847_78278C.1
cttttcttcaatcctttcgttattctcttattcatccttctcttctgaaaaatccagatctctttctgcccttttctccgtcacgcttttcgtgaccggatctgtatggatttgatccagatctacacgccgatggtggttttggccgggtctttcatagatctggtgcgtagaggctcagatctacggtaccgaggtgtgtgattcatgttcgtcttgcttttggaatctgtttcgtagaaagtcgtttggtcttgcatatggcatggctcttgaggtatttttttgcaggtacaacagagaatcgatgacaagaacgcagatccgacggtagatccagccgattccgcttgttcgatcgctacagacccctgtatcggatcattaagcagcgtgtctcgcgcgttctacacgtgttgccgatctcggatgttgtaaaattagtttatgatgtgaagctatggagtggaaaatatgtggatgtaggagatttcgggatgaatggcctcaaaacgctttgtcgtttgtggttattgagtcctgagtgatcttgtcatccgacctttgccatgacaggtgcgcttgcatggcaggtcaaaaaatgttaataaaaaaagttttattggtttggggagagatcgcacgggggttgcccggggtctcttcctcttgtgtggtgtggtgtttgctgtgctctccttttcgttatgccttttattattacctatctgtcgctccactccgtattacgactctggatcagaggatacatcagaggattcgctccaacccctatcgagtaaggtattatctgtcaatttacattcgaaagggttaggctattgaattttaaataattacagataaaatcatcgatagctttgattttaaaaattaatcataatcatcggttaggttgcaacataatacttaattcgcctaattttttaactgcgcctcagagtattcataacatattctattaaattaataagctggtgatgtaattaatattaatatgtagttttggcaatcttattggcagaagatgctaggtggagttcatcaatattctggtaggtataatatcttcatgaatctaatataacgttattcatagtgaaaataaatcgagccaaggaatttattaataattgtcttcatttcatattagctgcctgctgcgacttccttatgcataattttactgtttatagaaattgtgaagctatactgttgtaattgtcatgtatattgttccctttttcatcttacttgatttggtaaactccggttacttgtatccaaataagatgggccatttgtattgcgggggctttgtataattgtacaattatctacttgtaagaagttcagattcgggcgacaacatttgtaatgcagaattaggtcattaacattgtaaatcttctggcgatgattggaatatcaatgtgaagacgctatatgacttctgctatgacaatatcattgtggttgtcaaggtatttttgaagaaatatcgtggatttacaaagaatctggttaggcttctacaattctttaaggtgaagataacttcggctctttacacaagcatagaatgatattttttcttggtatcaagttattcagtatgtatgtttgtttgttttaattcccttgtgctgcaattattttgatttttctgctgcgattattcagtataaataagttattcagcgtatattcagttatttagtacattgttattcagtatacataattattctttgtatatatatagttattctgtagtttacatagtaattctgtatagtataaatggttttttctgttgtctatacagttattttgctgcgatttgtatactgattaaattaatgcatgttctgtttaagttcgtacctacctgtatacttgaaatgcttattgagaacctacagtaaacagaagcccagagtagtatcttcgatttggccatcctattttgaatgttgcattgttttttaatgtatttcaactatcttcaattcactaatcatatatgttatctatttgaggttgactcgccgatttataaatttgttacctgtatgctttaaaagcttattgagaaccacagaaaacagaagcccaaagtatcttcgatttgaagttcctattttgattgttgtactgttttttaatgtatttcaatttcgacttccattttcaactcactaatcatttttgttgatgacttgccgatttatatattattacatgttctttttttacaagttcttacctgtgtagtattgcttattgagaaccacagaaatcttcgatttgaagttcctatttttgaaggttcaactgttttttaatgtatgtcaacttccatttttaattcaataatcattcatgttatctacttgaggcagtttacatgttctacttttaatctgaaacaatgttactgagttttaaaatagtgtatctgttccagtaaataaagtagtgtttatttattgttatattattttacgtatgatgtcaataatgtgtaatgtatttttattgatatcataatttttatagtgttacgagacacaataaaaagtcattacgtttaggatttatagtgtcatagatgtttggataaaaataattctccttcagtacaagttatttaaggacaggatgatattaatgttttatttcggtcctctttatctccatgtcagtgttaatttcatttaatctcagtttttaaagtttatatgaagtaatggaattttagatactttttaattttttaaatgataaaatgttttggacgacaggacaatatggatgttttatatagataaatccatgtcaaagttaatttcttttaatcacagttttaaattttatatgaagtaatggaattttaaatatttaaaaaaaattatgttttttggttgtttttttgcatctgataaagctatacatattttagctcttaaatctgaatttgttaattgactgtttaagcaacacaatgttgctttcttcacgttttttttttcatctgataaagctacatattttcgctcttaatctgaatctgttaattgacttgtttaagcaacacaatgttgcttgctttccacgttattttttaagtacttatcggtgttggaattttcctaaaggttcccagcgccactatccgtgtcttaacctttttcgttattttttttcagtttgttattgtcaataaaacaggtttgta

SEQ ID NO: 118793 - DNA, 1272 bp, Glycine max
  Clone ID: PAT_MRT3847_78279C.1
ctcgtcttcaatcctttcgttattctcttattcatccttctcttctgaaaaatccagatctctttctgcccttttctccgtcacgcttttcgtgaccggatctgtatggatttgatccagatctacacgccgatggtggttttggccgggtacgacaaaccttcgatcgtattttgctttatataggttcgatccatcgttattagcgttttgattttgttatttaaattaatcttgtaggtctttcatagatctggtgcgtagaggctcagatctacggtaccgaggtgtgtgattcatgttcgtcttgcttttggaatctgtttcgtagaaagtcgtttggtcttgcatatggcatggctcttgaggtatttttttgcaggtacaacagagaatcgatgacaagaacgcagatccgacggtagatccagccgattccgcttgttcgatcgctacagacccctgtatcggatcattaagcagcgtgtctcgcgcgttctacacgtgttgccgatctcggatgttgtaaaattagtttatgatgtgaagctatggagtggaaaatatgtggatgtaggagatttcgggatgaatggcctcaaaacgctttgtcgtttgtggttattgagtcctgagtgatcttgtcatccgacctttgccatgacaggtgcgcttgcatggcaggtcaaaaaatgttaataaaaaaagttttattggtttggggagagatcgcacgggggttgcccggggtctcttcctcttgtgtggtgtggtgtttgctgtgctctccttttcgttatgccttttattattacctatctgtcgctccactccgtattacgactctggatcagaggatacatcagaggattcgctccaacccctatcgagtaagttttggcaatcttattggcagaagatgctaggtggagttcatcaatattctggtaggtataatatcttcatgaatctaatataacgttattcatagtgaaaataaatcgagccaaggaatttattaataattgtcttcatttcatattagctgcctgctgcgacttccttatgcataattttactgtttatagaaattgtgaagctatactgttgtaattgtcatgtaaattgttccctttttcatcttacttgatttggtaaactccggttacttgtatccaaataagatgggccatttgtattgcgggggctttgtataattgtacaattatctacttgtaagaagttcagattcgggcgacaacatttgtaatg

SEQ ID NO: 118794 - DNA, 184 bp, Glycine max
  unsure (1)..(184): unsure at all n locations
  Clone ID: PAT_MRT3847_7827C.1
caagttcccagagttaagaaatggcgcatgacttggcattggatttggaggagctatgcgacctncgcatcatctccggaagacgctcaaccctatctcttctctcctacgaaattcgtatcctcgcaaagttatcgccagaggtagcttctgcgcacattcctgcgcctatttcaaccgtctc

SEQ ID NO: 118795 - DNA, 774 bp, Glycine max
  unsure (1)..(774): unsure at all n locations
  Clone ID: PAT_MRT3847_78280C.1
ccacgcgtccgggtgatctatggagggtggcgcagcagctgaaaaagtcttcttcatagcactgctcacgttctctctttctttctctcttatatatatataaggcctttattaatgtggcggcttcatgtgtaatctagcaaactactagtagtagttagtttccttccacaatgggcaaagcctctagttcttcctcctcctctatctccagctgcagaaacccttccaattcaactgcatcctctctcacacaccaacatagtcaagaccaccttcgcacagatcttaggcttggactaagcctttccgctactcaacatgttggctcttctagttcagggggacactggcaaccgatgcagccacatctaataagtagtttttcacaagctactgaagtgaatgattgcagcgatcataccagcttctttgtgaaggtgtacatggaaggcattccgattggtagaaaactcaacttgttagctcatgatggttatcacgagttagtaaagactcttgaacagatgtttgacactaccattctgtgggggactgaaatggatggagtgcaaccagagagatgtcatgttctaacttatgaagatggagaaggagatttgattatggttggggatgtcccttgggagatgttcttatcagctgtaaagaggttgaagatcacaagggtggaggcattcgggtgataaatgcatacatatgaagaagctntgcctctcctgtgacttcaaatttagtcctatagagtgagag

SEQ ID NO: 118796 - DNA, 857 bp, Glycine max
  unsure (1)..(857): unsure at all n locations
  Clone ID: PAT_MRT3847_78281C.1
aatgtagggtgcccgggaggccgacagagacggccaattctaacacngacaatcgtggacccactaattccacaaggagcggtaatgttagcaacaacaacattagtggtggaagaccaaaagtaccctctcgggtatttgctatgagtggttcagaagcggctgcctccgacgatttgatacggggtaagtgtttgattgctgataaactactagatgtactttatgattcaggtgccacgcattctttcatatctcatgcatgtgtggagaggttggggttatgtgcgacggagttgccatatgatatggtggtgtctactccgacgagcgagcctgtaaccacctctcgggtgtgcttgaagtgtcctataattgttgagggtcgatcttttatggcggacttgatttgcctacctttagctcatctagatgtgatcttggggatggattggttatctactaaccatatctttctagactgtaaggagaagatgctagtgtttggtggagatgtagttccacgtgaacctttgaaagaggatgcggccaacgaaggaacgggggatgttcgaacttacatggtgttgttctctatgtatgtggaagaggacgctgaagttagttgtataccggtggtgtcagaatttccagaagtttttccggatgatgtttgtgaattgccacctgagagagaagtggaattcattattgacgtggtgcctggggcgaatccagtgtcgattgcgccttatagaatgtctccggtggaactagcagaggtgaaggcacaagtacaggaccttttgagcaaacaatttgttcgtccaagcgcatcaccgtggggagcgcctcgt

SEQ ID NO: 118797 - DNA, 2400 bp, Glycine max
  Clone ID: PAT_MRT3847_78282C.1
gcacgaggctcgtcttcaatcctttcgttattctcttattcatccttctcttctgaaaaatccagatctctttctgcccttttctccgtcacgcttttcgtgaccggatctgtatggatttgatccagatctacacgccgatggtggttttggccgggtctttcatagatctggtgcgtagaggctcagatctacggtaccgaggtacaacagagaatcgatgacaagaacgcagatccgacggtagatccagccgattccgcttgttcgatcgctacagacccctgtatcggatcattaagcagcgtgtctcgcgcgttctacacgtgttgccgatctcggatgttgtaaaattagtttatgatgtgaagctatggagtggaaaatatgtggatgtaggagatttcgggatgaatggcctcaaaacgctttgtcgtttgtggttattgagtcctgagtgatcttgtcatccgacctttgccatgacaggtgcgcttgcatggcaggtcaaaaaatgttaataaaaaaagttttattggtttggggagagatcgcacgggggttgcccggggtctcttcctcttgtgtggtgtggtgtttgctgtgctctccttttcgttatgccttttattattacctatctgtcgctccactccgtattacgactctggatcagaggatacatcagaggattcgctccaacccctatcgagtaaggtattatctgtcaatttacattcgaaagggttaggctattgaattttaaataattacagataaaataatcgatagctttgattttaaaaattaatcataatcatcggttaggttgcaacataatacttaattcgcttaattttttaactgcgcctcagagtattcataacatattctattaaattaataagctggtgatgtaattaacattaatatgtagttttggcaatcttattggcagaagatgctaggtggagttcatcaatattctggtaggtataatatcttcatgaatctaatataacgttattcatagtgaaaataaatcgagccaaggaatttattaataattgtcttcatttcatattagctgcctgctgcgacttccttatgcataattttactgtttatagaaattgtgaagctatactgttgtaattgtcatgtaaattgttccctttttcatcttacttgatttggtaaactccggttacttgtatccaaataagatgggccatttgtattgcgggggctttgtataattgtacaattatctacttgtaagaagttcagattcgggcgacaacatttgtaatgcagaattaggtcattaacattgtaaatcttctggcgatgattggaatatcaatgtgaagacgctatatgacttctgctatgacaatatcattgtggttgtcaaggtatttttgaagaaatatcgtggatttacaaagaatctggttaggcttctacaattctttaaggtgaagataacttcggctctttacacaagcatagaatgatattttttcttggtatcaagttattcagtatgtatgtttgtttgttttaattcccttgtgctgcaattattttgatatttctgctgcgattattcagtataattaagttattcagcgtatattcagttatttagtacattgttattcagtatacataattattctttgtatatatatagttattctgtagtttacatagtaattctgtatagtataaatggttttttctgttttctatacagttattttgctgcgatttgtatactgattaaattaatgcatgttctgtttaagttcttacctgtatacttgaaatgcttattgagaacctacagtaaacagaagcccagagtagtatcttcgatttggccatcctattttgaatgtggcagtgttttttaatgtatttcaacttccatcttcaattcactaatcatatatgttatctatttgaggttgactcgccgatttataaatttgttacctgtatgctttaaaagcttattgagaaccacagaaaacagaagcccaaagtatcttcgatttgaagttcctattttgattgttgtactgttttttaatgtatttcaatttcgactaccattttcaactcactaatcatttttgttgatgacttgccgatttatatattattacatgttctttttttacaagttcttacctgtgtagtattgcttattgagaaccacagaaatcttcgatttgaagttcctatttttgaaggttcaactgttttttaatgtatgtcaacttccatttttaattcaataatcattcatgttatctacttgaggcagtttacatgttctacttttaatctgaaacaatgttactgagttttaaaatagtgtacctgttc

SEQ ID NO: 118798 - DNA, 221 bp, Glycine max
  Clone ID: PAT_MRT3847_78283C.1
gggcgttcgcccacgcgttcgtacggctgcgagaagacgacagaagggggatgcgaaaaaaaactggtgaaaaaaagagagacagggagagataactcggttgaatcagacttatactgtgggttgcaatttgcattgtgacatacatactcttatctattggtgggttgaatcactttgtgcgatcaccatggtcatcgatattgaaacctttggagaca

SEQ ID NO: 118799 - DNA, 357 bp, Glycine max
  Clone ID: PAT_MRT3847_78284C.1
ggtagagagaagaaagacttgtttattgatccggaaggccgtccaaaagaggcacacaaacgcagaaatagagaaacgcgattttcaaattattattattattttttccgactttgcattttgcaacctaagctcgcatttatttttcttttttttttttcctcttcaaagcactcatcgttttgttcttgttgtttcattagctgcctccgctttctagggctgcaaaccaccgaaacattttccgaaaaattagacaaagctagattgatcgaactaaattcaaataaaaaaataaaaaaaaataaggaaaagttcggaaacgcggagaagaaaaactgaattgacaattcaaaa

SEQ ID NO: 118800 - DNA, 226 bp, Glycine max
  Clone ID: PAT_MRT3847_78285C.1
gtgattctcataaatgcagtgctaacatctattccaatttatttgctatcttttgtcagggtccctaggcaggtgattagcaagataaccagattacaaaggaacttcttatggggtggtgcagctgatcaaaataagatcccttggatcaagtgggaaaaggtgtgtttgccataggaacaaggtgggttgggagtcaaggatatcatctcgttcaacacatcat

SEQ ID NO: 118801 - DNA, 509 bp, Glycine max
  Clone ID: PAT_MRT3847_78286C.1
ctccacaaaaacaaacagaaccacaaatacaggttttgttgctcttctgctcttcttggcggagagagatagagagggttgaagacgatgttctgagaggaccgctttatctgaaaaaagatcttggttagctgtttgtcatctttcacagagagagagagtgagagactatttaggtgtaatagaaaaagagtgttgtctttagaagtttgtcactttacattgaatgccattatttatttctctctctctcttgcgttactcgcttcaggctatattactataaccgactccatcttttaccgcgggagacggaaatgaatttcacaagtggaagatgacacagaatgcactaggagcatatttactttcagacagatcatggttcttgatcagaaaacatctaaaacaaaaacttatatgttttttcttgctgtaaaaatataacatcttttttttattttcttgctgacaacaactacttcccaatttgaaccacttccaccacc

SEQ ID NO: 118802 - DNA, 1082 bp, Glycine max
  Clone ID: PAT_MRT3847_78287C.1
ccacgcgtccgcttcttaattcgttcactccacaaagtatatgcatcttaaacttcgatctcctcccaaagcccaatttgcaaaaattacataaattcctagcccaaaaaacttgattcctgaacaaacatgggaagttccgtgcgcgtaaaagaagcatcagtgattacaccttccgagcccactccatcaagcgtgttggctctatcagctcttgattcacaactcttccttcgttttaccaaagagtatctgttggtctacaacccttgcccaggcctggaccaggctgccaccacggcccgtttaaaagccgcattagcccgagcgctggttctttattatccttttgcgggccgggtcaggcccaggcccgatggccctggcctggaggtggtgtgtggagcccaaggcgcggtgttcatagaagcctccgctgactgttacaatgttaacgacttcgagaaagcgcctaaaacagttacgcactggaggtctctcttgtcgctccacgtggcagacgttctcaaaggatcgccgccgttggtggttcagatgacgtggctccgcgacggcgccgccgactcggcgtcgggatcaaccactgcatctgcgacgggatcgggagcgcggagtttctaaaccacttcgccgagttagccaacgagaaacgcgagttgttattattagctctcaggcccaaacataaacctgtctgggagcgtcaccttctgaacccgccgcgtgggaagcagacgcgggttgactcggcgagtcaccccgagttcaaccgagtcccggatttatgcaacttcatgagcaaggtctcgacggggcttaaaccaacatcggtgaccttcgacaagaggagactcaacgagctgaagcgactcgcgcgttgcacgagtcaaccaggcgagtcggtgtgttacacgtcgttcgaggtgctagcggcgcacgtgtggagaagctgggcgagagcaatagggtttccgccgaaccagaagctgaagctggtgttcagtgtaaacgtgcggacccgggttaaaccgggtttgccggacgggtattatgggaacgcg

SEQ ID NO: 118803 - DNA, 275 bp, Glycine max
  Clone ID: PAT_MRT3847_78288C.1
gtataatctgaagattctattcctatttgttctgattcttttttatatttttctttcttctggtttcaggaccgagagcactgtgaatagagagtttctggggaggaattgttttcacaatcatggaaaggctgaactcagagttgtactaccagaactgtcacataatgaaagagaatgaaaggctgaggaagaaagctcagcttcttaatcaagagaatcaacaacttctgtctgaactcaaaaagaagctctccaagggaaatgcaaaaacc

SEQ ID NO: 118804 - DNA, 177 bp, Glycine max
  Clone ID: PAT_MRT3847_78289C.1
cacgcttcttgggaccgcgtgtttttttttttttccgacgcgtggttagaccctttgtcgggcgcgtgttttttttcgtgggggggagagaataaaccaaagcggccgcccaccggtttccccacgcattcgccaacgggttcgcccacacgtccgcccacatattctgggaccggg

SEQ ID NO: 118805 - DNA, 784 bp, Glycine max
  Clone ID: PAT_MRT3847_7828C.1
cttgtttttttttttttttttttttttttttttagagggagagaaaacatgtttgatcattattattagtgcctgtgaatgtgaggacccacgaaggtacaggaaatgaatgcacttgagtcacataaaataactgaataaaaggaatgcgcttcaatattttgctagtcttatagctacgcaagggggcttacatcatgattcatggatgaaagttaatgggactagacacgttgccttcccaccgtgaaacaactcaacatgaagatgatgatgattgttaccaattttctggtttttcttacaaatgattggaaggtttatgatgaaaaataaacacatgcatagtaaaagctttattcatggattaacttggtaaatagagaggcagcattcatgctaatagcaactctagcatgattacttgattcttggcttgagttttactagcagtggatggagcttgcgggtggtaaagcactgtgtattgacattctcttcctccccttgtccgagttcccactcaaattcctgaaccaatcttccaattgcagtgcaagctatcaacatggcctgaagagagcctgcacacaccctcttccctgctccaaaggccatcgtcttgaataaatccacggggtcatatttctcatcaagaaacctctcaggcatccactcataaggattttcccaccgattgctgtccatgttgcatccgtatatattttattgcgatctcccttcctgcaggaatatgatatcctcccaattgtgtggtcttcat

SEQ ID NO: 118806 - DNA, 404 bp, Glycine max
  unsure (1)..(404): unsure at all n locations
  Clone ID: PAT_MRT3847_78290C.1
tcagaacgatgtgcatcgatggcaatgggaaagacagtgcgatactttagcaacttcttcgataacgactatgcaacatcaatttactgtcagctgaggaccttggtgtatccaaggaagagaggcaacttgtggactccctgtaggaaacttgcttcaacgatccgtcatcgcgtcgagagaaacgtcttctaatgcttccgggggatgacgtgcgccctccagatgttgctatcacatactttgagactcctcgtacatcttcaaatgcanatctatcatccaagaacgaacgagacaagaatgagatccctttgcgttaatggtcaggaccttctcctacatacactatcaaccacagttcacatatcggagatgctacttcatatacagatgctaatata

SEQ ID NO: 118807 - DNA, 461 bp, Glycine max
  Clone ID: PAT_MRT3847_78291C.1
ccacgcgtccggaagaagaggagtgatttattgcttggccacccgaacattgataggcatggattgatacatggcaagccgtaaggaatacgaagaagtgaagagtgagctccttggggataggttattgaaacggaatatccactacgctcatttccttattattaactaagatatcaacgctgacaacttccaatgctcgtgtatcctactagttaatgtattcacagctgttgaggaagaaaaaatctattccaaaaagatcttggggctggaaaacacaatgtacaccattctatggaaaaacaaccaatatcttcctcacatactctattagataccatccggtctatggagtgccgtgtgaatggctcaagcctacctgatgacttttgtttccacttgctgatccttgctgtgacggagttgttcttgaagtacaatgcgttcactatgatcaa

SEQ ID NO: 118808 - DNA, 265 bp, Glycine max
  unsure (1)..(265): unsure at all n locations
  Clone ID: PAT_MRT3847_78292C.1
gattctagggtttctgcctttcaaaaactccgtttttgtgaagaactccaccaccgatntccanttccttcgtcccantcaaatttcgaaatgggtaagaagaaacaaaagaacccgcaacantcctncganaccgacgccgtttcaaccccttccagcattttcagcaaactcttcgccaacgcgccggaacagancacngnaaccgccgctgcctnctctattttccgatgacatccctttcgaagaaaatccgntccacttt

SEQ ID NO: 118809 - DNA, 412 bp, Glycine max
  Clone ID: PAT_MRT3847_78293C.1
gacttttacactgattcactaatgacattcaactcgcacagccaaatagacttcaatgcttcctctacaccatagctccgtgtttgttcctctcagactccattccatgccatgcaattctgaccactgcagacctagaaagacccgtacacagaacctgcgctagcacgctcaaacaaccgtcgtacagacaaagacaggcttatctacgaagcgttcccccgccgactcaacacttgaggcaaattggaatagtgatcacggtatgccctcgttgaggagaacagtttcctacacatgatcgtgcccccgactgaaaccttcataaatgggatcttacaaggaagtctttacgaatagggagtggccagcggaaacgcgtatcacatggtacagggaaaatgcgttcttt

SEQ ID NO: 118810 - DNA, 230 bp, Glycine max
  Clone ID: PAT_MRT3847_78294C.1
aagaaaccgttgccgggggcaagtcaaaaaacaatgcccattggacctaaaaactgatagtgtactcctacgatacaacaaagggcaatatgcatccaaggtaaacctggccgggacttcacccattgtgctccattggcacaaaaagggaaccgcaagggtcaaaggacgcgctcaggtgagtgctccatgaacaacaaagggcacgaatgattaccttgaacaaacaa

SEQ ID NO: 118811 - DNA, 480 bp, Glycine max
  Clone ID: PAT_MRT3847_78295C.1
atcctatctttttgcgatttttttttttaatcatatgagtggtggcatgatacagaaagttttttgtgcttattcccaaactataatgctgtttctgaaagcattgataaatattttattattgagaagggaaaaaaagaaacaaaatgtttggtgtctgaaaagagaaaaaccggggaaacaaccaaggggggggggcccgcggacttgaaggggggaaaaaaaaccaaccccgcccgccatagggcacccctgaaggccccccgacgggggcctccaacttcaaaacaagcgcccccagaaacagaaaaaaggactgccacgacaaccccccctgcggggaggggggggcgccccccaaaaactgattcccccccccctctgtagaaggggggagaaaggcccctccccgaagcggcgctttcgggcggggggcgggggaaaaaaaaaaatacaggggcaataaggcccccccccccc

SEQ ID NO: 118812 - DNA, 255 bp, Glycine max
  Clone ID: PAT_MRT3847_78296C.1
gttctaaattatgacatcgggttttgttttgtgaaactcatggttgaattgttttgtcaattcctaaactttatttaaatatgttttgagctattttgaaacatgtctagaatgttgagcactatatgttatttaaatatgtttcaagcttttttcaaggcgtctttgaatttactattcaatatgatttgtaagtcatgattcaaaaaacagcttggaattcgtaatttgataacaccagctacaaagtttata

SEQ ID NO: 118813 - DNA, 337 bp, Glycine max
  Clone ID: PAT_MRT3847_78297C.1
ggctcgagctcccattctttctcatctaactaccattttgaaatgccaaaagaaaacaaacggtgcttgatgggcgccaacaccctacagtcatggacatggatgcagaacactttcatcttcgttctggagtgaatgggatcaggagttatgaatgtagcctactgacactccacagtgttccaccgacactttttcgggaattactcgaatgctgcacagtagcttacagtgaagccttcatgcaaagctaatatggaccataatggtgttgaaacagctgacatggctgacattgccgctgcttcagcagaaaaaggccagttttttatagact

SEQ ID NO: 118814 - DNA, 335 bp, Glycine max
  Clone ID: PAT_MRT3847_78298C.1
gagctttcaattgacgcagttgagggagagcccttccactgcggggactcttcaatgggtgcctacaagattgtttaagatctatggcacaagaatcagcctgatgtcgtgcgcttattgcactgactgaggcgctgtgaatgtaggtatcaatctttcattgttcgctgatatgtctacccccctgcaaggttcgtctttgtcttcaagctaaccacggactatgcgatttaccgtgttcgtgctatgaggggtgtcctaaagaaaccatttcccatatgtattgcctattgcaagcgcaccaaccactgcggtacccaactgaaatttcaccg

SEQ ID NO: 118815 - DNA, 275 bp, Glycine max
  Clone ID: PAT_MRT3847_78299C.1
ctttgtgcttactctttggtctggttcaaatgacgataaaatataatttgatttgctcaatcgctgaatgtgatgtcctctgcataaacaccaaggtctgcttcgccttctcctgttagaagccgtcgaagtcgatcaaagtcattatcaaggtccaggagaagtcgttccaggtgtagcttcccagaaacgcacttctaattggctctataacttaccctatattagacatgcacacacattcataaacgctaagttgtgatatgatagatatc

SEQ ID NO: 118816 - DNA, 181 bp, Glycine max
  unsure (1)..(181): unsure at all n locations
  Clone ID: PAT_MRT3847_7829C.1
tattctctctttccttcttctttttggtcttggcctgncccnncctgtcngccccntgctggctcccttctccncccnnntctccccttcntccctgcttcccgttcctcctgcgctgctctctgcttcgtcgcggcccgngtcctccccggcctgccgntttggccctcggctcgccctt

SEQ ID NO: 118817 - DNA, 418 bp, Glycine max
  Clone ID: PAT_MRT3847_782C.1
ctagcgtagttgtaaggctcgtgtgtacagagcctatatatagttcgttatcatgtaatagaatgcatatgaataataatatcgacattccttctctcttttcttggaggctcataatcgtcgaattctaggactgttcttaggttcataggtcataacatatttggtgcttgcattgagcactcccatggctgagtctacttgctccaaagctaccattgattgaattgaagaggccattgccaagttgactgcgaattagcaacactatagcgctatgtagaacaacgttaatgccaagctggatgagctcctccaacgcgtttccgccattgaaaatagccacaattcacctctgcttccactcttaagacaaatgaattgctagaccattttgcaaaacttactgcacctgctc

SEQ ID NO: 118818 - DNA, 452 bp, Glycine max
  Clone ID: PAT_MRT3847_78300C.1
tacggctgcgagaagacgacagaaggggaggaccaaacacaacatataatgaaatgaaataacccaatctgttctgttccaatttcctaacttgaaagccaaaacgaaacaaacggggttttggaaatggaacgagaaaatctaaactgggaaaagaaatgaaagcttaagcctttgagtctgaggtgaggtgactcaccgagtcgtggctcgctagctttttaataacattttcgtatatgtcaagttgaagttttttttttttttttttaaaaaaggttttaaaaaaaccattgtttgactcaaaaagcagagagaagagtggggactggagaatgaatagggagtgttggcgaagtagatctgaaaggtgaagaatttgagtacgtaaaacccaaagttttcaactttgaatcaaagggtcatcaaatgctttaaacgttttgtttttt

SEQ ID NO: 118819 - DNA, 681 bp, Glycine max
  unsure (1)..(681): unsure at all n locations
  Clone ID: PAT_MRT3847_78301C.1
gcaatacatcagaatggtactgttcatcaagactctcatctcaaagaacgtaaccatagcaaagctagcttaaactacacactgattgcacatgagggagctgtattttcatcttggtttgttttcagtagtcatcncagttttttctcatcctgagttgcagttcatagcagctatgatgaatgcaaggcataagatacaatgctgctattatttccctcatttttgagaaatctatatttttttgtcactaaaaaagaggatggaagagttattaaactgtcatccaattatttataatcatcaataacaccaaatctattttcaggaaaagtatgctagcacaagctgcacaacaatgttgttctatttttgttacaaatgaggtatacagattacataggcagactgaagtataggtaaagctaaattggactcagtttcgatcctgtgatcaatcagctcctaaaataacttaataccacttgactcaaggctcttgagcagaatacacggaacaatacgatactcccccaagccatctgatgcatgctgcttagacttgccttttaagcattatttctgaatactggcagcatatatcagctattaaacaaaattgaaagatattccaacaggaaggagaaactttctgcttttctgggcagcctggagtaaagc

SEQ ID NO: 118820 - DNA, 1618 bp, Glycine max
  Clone ID: PAT_MRT3847_78302C.1
atcattataaagatcagacagtgccttggcataataaattcgcgagtgttgcgaccctggatcacgcgaatcacgggttgtccgcaaaatgggtgttgtggagggtctcttagcattggctttggttctgagtgtttgcgtgatgtgcaatggaggctcaagcagccccttcattaggaaagttgagaagacagtggatatgccacttgacagcgatgtctttgctgttcctcctggttataatgctccccagcaggttcatataacgcaaggtgaccttgtggggaaagcactgatcgtgtcatgggtgacagtggatgaaccggggtcgagcgaagtgcattactggagtgagaacagtgacctgaagaagaaagcagtgatcatgtcatgagtgactgtggcttaaattactcatctgggtttatacaccacaccaccgtcagaaatttggagtacaaaaccaaatactactatgaggttggacttgggaacacaacacggcagttttggtttgtgactcctcctgaaatcggtcctgatgtgccatatacatttggtctcataggggatcttggtcagagttttgattcaaataaaactctttctcactatgaattgaacccaagaaaaggacaaactgtactattcgttggagacctctcttatgcggataactacccaaatcatgataacattaggtgggattcttggggaaggtttacagaaaggagtgttgcttatcaaccatggatatggactgcaggaaaccatgaaattgattttgctccagaaattggtgaaactgtacctttcaagccttatacccaccgttaccatgttccttataaagcatctcaaagtacttcacccttctggtattctatcaagagagcttcagcacacatcattgttttggcctcatattcagcgtatggaaaatatacaccacaatataaatggcttgaaaaggagctaccgaaagttaacaggacagagactccttggttgattgttctcatgcattcaccttggtataatagctacaattatcactatatggaaggggaaacaatgagagtcatgtatgagccctggtttgtgcagtacaaggttgatgttgtgtttgctggtcatgttcatgcctatgaacgatctgagcgtgtttccaatgttgcatacaatattgtaaatggtctttgtgctcctgtaaatgataaatcagctcctgtatatataaccattggggatggaggaaaccttgaaggtttagcaaccaacatgacagaaccacagccaaagtattctgcattccgagaggccagctttggacatgccatttttgacataacgaaccgaactcatgctcactatagctggcaccgaaatcaagatggagttgctgtggaggccgattccctttggtttttcaacagatactggcacccagttgatgattccactgctcatgtttcacattaacacagattcacttgtcttatgagaagaataccaaatgtcatgtcaataaattcatgagtcgacaattgattgtatgtcaatactaccaacattgattagcagtatctttatatctctgtcacatttgataagtgca

SEQ ID NO: 118821 - DNA, 273 bp, Glycine max
  Clone ID: PAT_MRT3847_78303C.1
atctctatatttgtatggtatatgttttgtttgccaattatagagaggggtatttatagagagataagctatgaattatcttgtttgccaatacatactggttgacagatggattgttcttcagcaatgttccacgtaaaatatgattcttatgagtggcgcgtctgtctgttcctccagcttcagcaatcgagcacatggagactcggcccaccatcacatcgcctttgtggcaatatgttaagctgttgtgggtcaggggaggtttacgtt

SEQ ID NO: 118822 - DNA, 1048 bp, Glycine max
  Clone ID: PAT_MRT3847_78304C.1
cccacgcgtccgcccacgcgtccgcccacgcgtccggctttgttgtagggtgaaactgtacctttcaagccttatacccaccgttaccatgttccttataaagcatctcaaagtacttcacccttctggtattctatcaagagagcttcagcacacatcattgttttggcctcatattcagcgtatggtaatgctagatgtcttttgcatgatacatatttatgtagagagcactggctgattctatgatttcagacaaacacgattctgtttgtaataatttcaccttagtgattacctatatgacttggaaaagatcaaattttactgaataatttcagttcttagatctatatatatctatctgtatgtatgtatgtttccattaaatgtggaatgttaaatatcacagacaaacacttgccttaaatgatctgtgcgtgtgtctgtgctaacatgtaaagttaaattgcattcgtcagctgttctgttactacttggattaaatgcacacataatctgagatatcattgtttttaaagtggtatctcttttgttacaataatcttccattttctcaggaaaatatacaccacaatataaatggcttgaaatggatgtaccgaaagctcatgtgacagagtccacagattcacttgtcttatgagaagaatcccaaatgtcatgtcaataaattcatgagtcgacaattgattgtggcactgcataaacacaaaaacagctccttctcaaatccatcatcaaatacgcgtctcaacatttcttcagcacggtagcattttgatgcagaaaagataaatcttagagctttaccctttgcaccccattgattgaatagtaaaggacggttgaaaatggaagctgatcacaaaaaattatagttttgtttttgttttgccaccttccattgcccttattccttcttaaagtatgtatgaatgtacaagagcttaggaggaatctggtgttttactgtgaattttgttttgagatactagtcataaataaatttgcagagtaattatcg

SEQ ID NO: 118823 - DNA, 603 bp, Glycine max
  Clone ID: PAT_MRT3847_78305C.1
ggctcgagaaatcttattaattaccctcacctagcaaccagttcgtagctcctccctctcccctccacaaaaactcaccacacactctcttcaatccttcaaatttttcatattatatatatatattgcacaagaaaaaggaaacttaaactgaacgagagggaaaaggaaatctacacgactaagtacacaaagagagaagaagaagccaaagcagcataaagaggtaaagataaaggcttgtttggatggagttattcccagcacaaccagacttgtccttacaaatcagccctccaaacgcgaaacccacatcaagttggaggagaagcacagaagaagacatggatttggggttttggaagagagccttggactcaagaaactccattcaatcaatggccaaacaagactcttgcttcgacctctccctctccaatccaaaagcttcagataacaacaacaaccaccactccaacaccaccacctgtaacctcattcatcatcaccacttgcaaaacggtgccacccccactaatgccaccaccaccaccaccaaccccttgcaactaccctttcagaagaaccactacttccaccagc

SEQ ID NO: 118824 - DNA, 526 bp, Glycine max
  Clone ID: PAT_MRT3847_78306C.1
aaatgtcaccatctgaaattctatcaattgcactaggaatcatagataactgagaatgattggctatgaatgacagttgaacaaatagtctgtccggatcaggtattagaccttcatggaccatcatattgaaaaataaaacacattcctttactttattttgtttactcatgctttgaaaaagtatacactatgcttccaaatcaagattgcttcctaccatcgacatttgtgagaggaatgctaacagatcttctgcccttcttgattttgacagctcatgcatgatagtcgtgtgtgtagcaatacagcatgacataccacagaaataagctaattgccatagacattttatcaacttgtagaaggacaaggaatgaagagagcatctcttcattgacatatagtgaaacacttcaatggcatcttcagaatgcttgatgttacagacatatagtgaaacacttcaatggcatcttcagaatgagcatctcttcacaaagccatctaatgagaatattccaag

SEQ ID NO: 118825 - DNA, 770 bp, Glycine max
  unsure (1)..(770): unsure at all n locations
  Clone ID: PAT_MRT3847_78307C.1
ccggtccggaattcccggngtcgacccacgcgtccgcgggttttgagcaaaatgggtgttgtggagggtctcttggcattgggtttgattctgaatgtgtgtgttgtgtgcaatggaggcacaagcagccccttcgtcaggaaagttgagaaggctgtagatatgccacttgacagcgatgtctttgctattcctcctggttataatgccccccagcaggttcatataacgcaaggtgacctagtggggaaagcagtgatcgtgtcatgggtgactgtggatgagccggggtcgagcgaagtgcgttactggagtgagaacagtgaccagaagaagatagttgaaggaaaacttgttacttataggttcttcaattacacatctggttttattcatcacaccaccatcagaaatttggagtacaacaccaaatactactatgaggttggacttgggaacacaacacggcagttttggtttgtgactcctcctgaaatcggtcccgatgtgccatatacatttggtctcataggggatcttggtcagagttttgattcaaataaaactctgtctcactatgaattgaacccaagaaaaggacaaactgtactattcgttggagacctctcttatgcggataactacccaaatcatgataacattaggtgggattcttggggaaggtttacagaaaggagtgttgcttatcaaccatggatatggactgcangaaaccatgaaattgattttgctccagaaatggtgaaact

SEQ ID NO: 118826 - DNA, 724 bp, Glycine max
  unsure (1)..(724): unsure at all n locations
  Clone ID: PAT_MRT3847_78308C.1
gcacttatcaaatgtgacagagatataaagatactgctaatcaatgttggtagtattgacatacaatcaattgtcgactcatgaatttattgacatgacatttggtattcttctcataagacaagtgaatctgtgttaatgtgaaacatgagcagtggaatcatcaactgggtgccagtatctgttgaaaaaccaaagggaatcggcctccacagcaactccatcttgatttcggtgccagctatagtgagcatgagttcggttcgttatgtcaaaaatggcatgtccaaagctggcctctcggaatgcaaaatactttggctgtggttctgtcatgctgcaactcatgtcatttatatcagacttagaggcataaaaataagaagaaatgtgacaagactcatcatgttacatataatgaacttacttggttgctaaaccttcaaggtttcctccatccccaatggttatatatacaggagctgatttatcatttacaggagcacaaagaccatttacaatattgtatgcaacattggaaacacgctcctgatacatagtagctcatcaatcagatacaaattcaaaaaagtttattgaagtgtattacttgtgcaatattnttgtagcttatttcatcttaagtttttagggccagaaactgacatttacttgcacagttatcttttcaagtttgatgcaagcctaatgatacatgattgat

SEQ ID NO: 118827 - DNA, 140 bp, Glycine max
  Clone ID: PAT_MRT3847_78309C.1
gcggacggagacgagagtgcgcaccgagctacatccgtggctacggctctgtatcctacacactcatgcgtggcctatctcgtctctcagataacttggctaacaattatgtgctacttcgctgttgactcatcgaaaca

SEQ ID NO: 118828 - DNA, 532 bp, Glycine max
  Clone ID: PAT_MRT3847_7830C.1
gctctgaagcaggcttgaggttacacttgcataaggaacatgccttggagatgtataaggaagatcatgcatgatacatggatacgatgaacaaggttgttagtgctcatttacgtgcttatataccagcatcggagaaactacaattggatatagcatcatattatgactaactggagcgagacttcagcattcgcctatgcataagaccaagggaactactggagaatcgatgtgctgcattcgctattggggataggatcaatatattgcaggatattgatgaacctgcattaattcctcatataagctgaagcactgctccaatagatatccatatgaggtcctattcacgagcttgcagaagctgctgatggatactgctacttgataatgtaagctgtgtgatgatttctttggagaagaatctatattcgatgaacatgtgtcaggtccatctggtgtaattgatgagcacttaatgctatacttccaaattgctatgatgctatatgtctcatgcttatgagtc

SEQ ID NO: 118829 - DNA, 1278 bp, Glycine max
  unsure (1)..(1278): unsure at all n locations
  Clone ID: PAT_MRT3847_78310C.1
ggctcgagcaacctcacaattcgaagttcaaaccccaaatcttcaaaaacctcacaccaaacccaaaataaaaaaacaacgtaaaaaccttaataatagcaaaaccaaaaccacacttgcagtcaaatgttcttcctctcttcccccttctcttcatgcttcagagcttcacaacgtaccaaccacgatcccacaaacctcaccacctacatctaccacaccgaatacggcaccgtttcactgacatggtcgcgctccctgctaggccgctccctccacgtgaacctccacaaccgttcctccttccacctcctcctcaagccatggaagaaaaacgggtccaagaagctttctcacaatacggtcttcctctggaacctctccaacgcgaggttcgagtctggactcgaacctcgctctagattctacctcgccatcgaggtagaacatggcctcagcctactcattggggacttatcccccaggagtagtaaggccaagaagcccagcaaaacaaaccaattactcgtnctgaagcgggacaacgtccacgtggcgccacaccgcagccgggtgtaccaaaccaaagcgaaactcggaggtaaggtaagggaaatcgaaatagattgcgacggttacaactgtaacggtggcgggtacgagaactagaacgagagtagtttaaggttgttgttcggtgtggatggagacaaggttctggaagtgacgcggctgaagtggaagttcagagggaacgagcgtgtggagatcgacggggtgcacgtgcagatctcgtgggatgtgcacgattggcttttcgagaaggataaggataataatcattgtagtgctaataacaatagcaataatttcggtaatgagggtcacgcagttttcgtgtttaagttccagaaggacaaggtacgaggtggtggtgggaaggaggaggagcatcagtggagtttggggagtggtggggagtggaggaatgggaagagttggtcttcttcatctttgtcggtgtcttcttctgttgggtcttttggggggagttcttcggttatggaatggtccagtgcggaggagaatgagttggtggttcctcttgggttttctttggttgtttatgcttggagaaggtgagcattaatttgggtggtttttgtttcatttttcccccctttacagtaaaattttagggggaaaaaagaatgaaattagatattggcatgtgtatagaaaaatatatgttctttgaatgaattttattaatacttc

SEQ ID NO: 118830 - DNA, 197 bp, Glycine max
  Clone ID: PAT_MRT3847_78311C.1
gatatgggatgccatcaagtcctgggtgcaagaatatgtgtcattctactacaagtcagatgcagcaattcaacaagaccccgaactccaagcttggtggaaagaacttgtccaagtgggtcatggtgatttgaaagataagccatggcggcaaaagacgcaaacatgcgaagagatgaatgaagccacggccaccc

SEQ ID NO: 118831 - DNA, 225 bp, Glycine max
  Clone ID: PAT_MRT3847_78312C.1
gcgcgctagaattccttataaataacagggttatatgcttatgcgttggggaaacatgacaatgagtgttcttggggatagtaaaaatgtaaaatgggttgggccaatccaatcactcaatttaatccaccatttgttcggtgtgtgcctaaagaagtcaactattttatctgtattatctgcattatccattttaactttattatcaattgaggtcttttttac

SEQ ID NO: 118832 - DNA, 232 bp, Glycine max
  Clone ID: PAT_MRT3847_78313C.1
gtctcgctccgagcctttgggttcaaccatgggtgtcttgcttctgcttatggtggccactgagatgatggggccaacaatggtggcagaagcaagaacttgtgagtctcacagccaccgtttcaaagggccatatatgattaacaccaactatagctgtatgtacctaaccaaacatttcactaggaaacactaccataacttccatcacatattcttctacaccaaacat

SEQ ID NO: 118833 - DNA, 919 bp, Glycine max
  Clone ID: PAT_MRT3847_78314C.1
tttttttccaaaaatagacagataatccgccaccataaaaaaagttttcaagttgtttcctgtttcaactttatataggcacaacacaggttacatataaatcatacatagtgtgttgtttttcataaagaaattaaatggagcactagaatagaagtctaatatgagtgccactagaaaactttgcaaaagcaaatgttaacaaagttctaccaagttagaaaaacttagaaaacaacttctgattgcatctagatcttgcattttccacgtttaagttcttccattagtagatgtgccactgatttgtatcccatttcccgagctctgtatactgctattccagttggaggcatttttcgtttcctcaggcatattgagctgttacatatccagtgagggtttattccttttgcttctatgcaatgaggacacgtccatcccttgttctttctcacttcctctatttcttctccataccgaatcttgagacaggctctacaaaaaacaccagtgctagagtgacagacagaacaatcagtctttcccaggcatggttcattcacatcaaaattgccacatctcttgcagtcttcttcaccacacaatttcttttgcctgcaaaaatggcagcatatccccaaaactggattgtagacactacctctgcccttgctatcacagcgccgagcagaactctctgctgaaagcaaaagatctgcattgcttaggtttatgaaaggagcattggcaggcctctgctcctcttctttctcttcacacacagttaccttcttctcttgttttatgggtgtggaaggctgaaagggtggcggcgtaaggttgttgattcgctgagagcggcgcaaaggggtgagaccgtacagttttttttcggacgcgtgggcggacgcgtggg

SEQ ID NO: 118834 - DNA, 205 bp, Glycine max
  Clone ID: PAT_MRT3847_78315C.1
attccgcgctggacccactcatccgctaagcttttacttcttccgcattactttataaccaagacgaaaggccacttggtgtgtctttcttcagggacggcagcgtactattattttagccttcattatctcatcccgtttgacgctaattactcacataaatctctgcagataacttctataaacttccttaattccgtacaat

SEQ ID NO: 118835 - DNA, 481 bp, Glycine max
  Clone ID: PAT_MRT3847_78316C.1
tctttctctttctaagctctgaccccaatttctgtggcggctctctctctacttattttctcttctgagatggagatttggatccaccctcttccccttctttcggtctttgatttgatcttttccttacctttctttgggtttgggtctgggtcttcagcttcaacttcaacaacaacaaaaaacagctatggttacccaacaacagccacagccacagcttcaggttcagcctcagcagtcgacaccaccctcttcacaagatgaggccttgaagaggaacaccgattgtgtctacttccttgcatctcctttgacatgcaaaaagggaaatgaatgcgagtaccgccatagcgagtatgcacgtgttaatcctagggactgtcggtattggttgagtggcaattgcttgaatcccaaatgtccatttcgtcatccgcctcttgatggcttgttaggaacacaggcagcagtgactggt

SEQ ID NO: 118836 - DNA, 136 bp, Glycine max
  Clone ID: PAT_MRT3847_78317C.1
gggccgaggacgcagggagtgggtgaaaacggtttttctttcatgataccacgggttaccagtggcgaaggatggtacaaccatggactgggccataaaaccgcttccactgagaaaagacatacaatgtctcatc

SEQ ID NO: 118837 - DNA, 264 bp, Glycine max
  Clone ID: PAT_MRT3847_78318C.1
tcggctgcttaaggggtttcagccagtgacatgtttatacgccaagagttggtaaagaattagaaggctaatcttcaatctcccatatatcacagctcaagaacttgactcattaatctcaacttaccctagtcaatgcatgagaaagaactcaagaagctttgcattgattcatgtatctctagagcttccaagcataaacctgtaattcggcatataaagcctttgaaaaatgaaaagtatggaaatgtttctcaagaacgc

SEQ ID NO: 118838 - DNA, 163 bp, Glycine max
  Clone ID: PAT_MRT3847_78319C.1
tccagagcgcgagcggccgcacctaggaaaggctaatattgaaactaaaacaccccgaaagggcaacacaggcaacagaaagacccccagagacacaggaagcaaccgcgggcaccagggcaagcgaaaaaaaaacggcgacgaggagccaaaatagcaagac

SEQ ID NO: 118839 - DNA, 300 bp, Glycine max
  Clone ID: PAT_MRT3847_78320C.1
acaaaaaatgggggtgattttcaataacaacgatcaaggtttcaaaaacctccccccaaaacttttgaagttaatttttacaggacagggcctacctcaatcgttgggtgatgatgccccaaagccaatttttttgatcaaacaggccatcacttaaattaaatttccttcaggggaaggacatttaacttaaccctcaagcaaagaggcataagggccttcccttctttttcggaaaaaataaggatgcttttttttttcttttggcaaatatttcgttcttttttcaaacatttaaac

SEQ ID NO: 118840 - DNA, 390 bp, Glycine max
  Clone ID: PAT_MRT3847_78321C.1
ggacttaagagagagttttacttttgcaaatcaaatctctcaatctctccctattttcgatctctctctcttttcaatctctctcttccatggctgtcaaatcacaatccccaccattgcatcaccagtttctcagcacaaccccaaacgactacaccagcgatattgaatcaattgatcaagaaggtccagaatcactttcaaaccctactccattcatggaaaatgcagaacaacatcaccatgaagatcaaaaatcaatgaagaacaagaggtacaagtttctcttgtttagaaattatgttttgctctttgtgggatcagtctcctctagtttgctcacaaaatattactttaaccacaaagggtcaaacaaatgggtctctacat

SEQ ID NO: 118841 - DNA, 388 bp, Glycine max
  Clone ID: PAT_MRT3847_78322C.1
ggcagcaacagcagcattcactgaaggcactcaggggggtttgcggtttcagagattgtgacacacacatccatggccaccaataccaacgccgactcagatatgtcgcaccagctatactagaatgatgccgacatccatatgatgctagccgccgacgtacacatagtcaccaaagactgcgactttcaaaaggaacgttacatcttcaagcgcctgatcgacgggatttacattaacaatccttgggaagacatgggacatgcttcagttagctattagggatactagagcaactgaaaaccctgatgagatcatcgtacaatccttaaggccctatgatcgaagagcagatgtgaaatatgctaaggacactgaagctcatgct

SEQ ID NO: 118842 - DNA, 332 bp, Glycine max
  unsure (1)..(332): unsure at all n locations
  Clone ID: PAT_MRT3847_78323C.1
gtgggggatggntnaacaacgcaaaaccccccctgccttaatcaggaaaacttatttcataagttgccgggggtttttacacctttcataagcnncagtttcggtagaaaaaagacctcaatacgcaacaaagaaaaagcgcaattaccacaaactcaaagtgatccaatcaaaggtcaaaaatactaagcccacctttcctacaccaactaaaatggtttttaacacaaacttcccacaccagaaaaataaacacttactgtcactggttgggcaaaaaaaaaaccctcacttattgctgcggttggcccttttgtgaaaacctaaggccc

SEQ ID NO: 118843 - DNA, 251 bp, Glycine max
  unsure (1)..(251): unsure at all n locations
  Clone ID: PAT_MRT3847_78324C.1
tccaaaacaaaatgaagagnctcctccctctctctacttcctctaccncttcttagcctcctccgccgtngcnaccgtncncgcncanaacatcanccgcatgctggccgcacanttcggcttcnccaccttcaagcactacgtctcngtcatccacctggtccgaagagatcnaccgtngcnagaccntcaccgtctgggcctcganaatgtcgccatgtcctccctcctcganaagcacctctccctnc

SEQ ID NO: 118844 - DNA, 259 bp, Glycine max
  Clone ID: PAT_MRT3847_78325C.1
aagttctgctatatcccatttgaaaagtaatgtgtcaccttaaagtttctttcatgtttgatcatgctactatccattttgtagcaactgatctgcttggatagtatttttcttctactacaaaaaattacataccctcatcccatagagttagctgtatgcattgctagacatatcagaaattcattcatttttcttgttgccgttgtccaccttccattatactttatggaaattcttcaaaggcacaagctacctt

SEQ ID NO: 118845 - DNA, 508 bp, Glycine max
  Clone ID: PAT_MRT3847_78326C.1
aaatacgaatcaaacatgggagaaattgttatgtggaaaccgacccaactggtcggtgtggcaggtttggagatgttcttggaaaaagggcaatgaaaacagtgtacaaagcagtcgaggaggcgctgggaattgaagtagcatggaaccaggtcagactcaacgaggcgcttcgcacgccggacgatttgcagcggctttactcagaggttcatctcctcagtaccctcaagcatcagtccatcataagattctacacttcttggattgatattgataacagggccttcaactttatcacagaattgttcacatctgggtcactgagagaatacaggaagaattataaacgtgtcaacatacaagctataaagaattgggcttgccaaatcttgcaaggtcttgtttatctacattgccatgatccaccagtgatccataaagacctcaaatgtgataacatatttgtcaatggtcatcttggacaagtaaaaattggtgatctggg

SEQ ID NO: 118846 - DNA, 2569 bp, Glycine max
  Clone ID: PAT_MRT3847_78327C.1
atataaatacgaatcaaacatgggagaaaattgttatgtggaaaccgacccaactggtcggtatggcaggtttggagatgttcttggaaaaggggcaatgaagacagtgtacaaagcaatcgatgaggtgcttggaattgaggtagcatggaaccaggtcagactcaacgaggcgcttcgcacgccggacgatttgcagcggctttactcagaggttcatctcctcagtaccctcaagcatcagtccatcataagattctacacttcttggattgatattgataacagggccttcaactttatcacagaattgttcacatctgggtcactgagagaatacaatgacaagctcggcgattatcattatatgctttatgctctatgaaataactgatagttttcataaagcatgttaacgtaacagttattaagagattcttagcttctggctgaggatatcctaggtcgacctaaaaaaaataactaattttcgggcatgtgcagatataggaagaactataaacgtgtaagcatacaagctataaagaattgggctcgccaaatcttacagggtcttgtttatctacatggacatgatcctccagtaattcatagggacctcaaatgtgataacatatttgtcaatggtcatcttggacaagtaaaaattggtgatctgggactggctgcaattcttcgcggttcccaattagcacatagtgttataggcactcctgagttcatggcaccagaattgtatgaggaagaatacaatgaacttgctgatgtatattcatttggcatgtgtgttctggaaatgctcacatctgaatatccatatagtgaatgttctaatccagcacaaatctacaagaaagtgacatcgggaaaactaccaatggcttttttccggattgaagacatggaagcacaaagatttattggaagatgcttggtacctgcagaaaagagaccatcagcaaaagaattgttgcttgacccttttcttgtgtctgatgatccatcatcaacaatgaaatttgcaattcagaaaccatttttgaatgtcaatgagatggagaaactgcaattaagtgatgatcttcctaggactggaatgaaagtgatagggaagctgaaccctgaagatggcactatctttctcaaagtgcaaatttctgataaggatggttctgctagaaatgtattttttccctttgacatattatctgacacacctattgatgttgcaaccgagatggtgaaagagttggagattgcagattgggagccttttgagattgcaaatatgattgacagagagatatctgctctgctacctcacagaaggcaaagtagttgttcagatgccttccacacattcaattatctggatgatgattgtgatgatgatgaacctcatcatcatttccgctcgttctcttctagttcatcgttccaagaatcaatgtcagatttagtcggcaaagctgaggaaatatcaagtggatattattggctccatgatgatttgcatgatgataccagttcacgatgctcttcacaagggacatattccaacttgaattactattctgtggatgatcatcatcaagagtacaacgtgccatctttgagaaaagataaacttcccatcacaaagagtcacaacaagggcaaaaaggtttcctcaggcgaagacttgagcaatttcaaccaatataaactcatggtaggatcacaggttcctctcactagtaaaagcaagatgatgatgaacaatcatcatagattaacaaggaacaggtcattgattgatataaggagccaactattgcaccgttcactggttgaagaggtgaacaaaagaaggttattcaagacagttggtgctgtggagaatattggatttcaggcaccttgtgatgtttccacaaaaaggtcacagcatgtatgtgttgctccaaatgagaactctccaaggagtggcaaggaaggaaaaattaagagatgaatttttttttttttttgagaaatgagtgtctcttaaacattgaaaaataatagatgtgatgcatgcatagccttctgtgttatatttggccactaagataggaaaatatacactgtttggagttaggttcagatgaaggtgattatgtgtatagattatggagtgtgctgaacaaaaaatgattttaggcgatggagaacttttcccaagatgctggaccaacaagctctactatttctgtagatgcatggaaatgaaaggagatgcagctggtcgacaagctaggattaagattcactatgccagtggtttgttttactagttgctttctcatttttggaacatacactgatttgtatgttgttaaagatgattgtatgtgagccctttgcttttgctatcagttataaaattcaaagagccatgtggcaaaacttttttctaacagaagtcatgtgtgtatacgtagtttgtttgtggcattgttattgtgacatgaactttgtccatagcaatcaatttagaagttttagatgtgattgttgatactcgatc

SEQ ID NO: 118847 - DNA, 238 bp, Glycine max
  unsure (1)..(238): unsure at all n locations
  Clone ID: PAT_MRT3847_78328C.1
canccccccctcccccgaanggnancacatgccngagncntcctacacgngnntngcnacattaagntgncannancgcntncntgnctgcacangnnagaagaaacanctagcagctanctgnggnanngaaggananntnccccagaaggccantnggacnctggcnnncgtgtggatgnaatgnancaggcatgncnanagcaaggaancagnagngntccnggaggacaganca

SEQ ID NO: 118848 - DNA, 431 bp, Glycine max
  Clone ID: PAT_MRT3847_78329C.1
tttttaggtgaacacactctattcttaggcatgcctatgccaccttgccgactggctaaattggtgcattccacgctacttaaatttggacgcatgatatctataaaggtagatatggagtatgaacacacccacaatcccaagcctgcatgggtgtaataaaggaacaagcgaatccaacttatacacgcaaagactggacacactacccactactttgttgtataaaccacctatcgagcttcaataaggtgacctgcctgctgacttaaagacaggagatgctggacccatcatgccaggtgtatcataatacacaaagggcgtgattgcatacatatcacaatgctgcatggcgtttccacaatgtcgcaagatatgcagcgtgcttgacttgcaaaggagatgcatgcacgcagcccttccacatc

SEQ ID NO: 118849 - DNA, 230 bp, Glycine max
  unsure (1)..(230): unsure at all n locations
  Clone ID: PAT_MRT3847_7832C.1
gtcgtcttcaaattctggatctggtctccatgagcaccgccaccgctgtcggtgtcgtnctcgaatgtaagaggttttttngcgcgtccggtttaaggggctctgnaaggtctctcntggtctcattctctcaattctctacactctccttcgtatcactgcccgcctcatccgcagatatccttgccgaactcataagtgtngtnanatttcagggagtgcacaatgtc

SEQ ID NO: 118850 - DNA, 504 bp, Glycine max
  Clone ID: PAT_MRT3847_78330C.1
ggagcttagagctataaaatatctggaatggatggtgtggatttcaatgaagcaagagaacttttgttaactatttgtttattacatggaagttcttctaacctagagacatttactataaagtgcaatagcatggcagtggagctacaacagattttggatgtgtttgactatagtaactgttactttaatctgcttcaagatgtgaaaatcacagttaaaacttcctataagcctgcacttgatttgatacggcttgtgcttgcaagatcaccggcattgaagatccttactttcagggttggtcttggtctaaatcgatcagatgcatctgtattgttaagtatttcatgtgatttgttgcaaatggatcgagcatcacctagagcaaaagttaaattcctttatgatgaccttagtgaatagtgctgcgacatgtaaaaggttggagcaaagggcgatggtagtgttgtggcgtggcggaggtggcgtaacggagttgat

SEQ ID NO: 118851 - DNA, 210 bp, Glycine max
  Clone ID: PAT_MRT3847_78331C.1
atagcagaattgaggcggcatctataaatgcttacaaaaagctccacaaccactaacgaaccttctccaaactcccatctccttaacaatagactccaacgacaaaccgttctatcgtttcccttaaccaccaatctctgaaccctttgcagagaaacctggtcgaaataaacaaacattatttacagacacctaccaactatttaaaca

SEQ ID NO: 118852 - DNA, 289 bp, Glycine max
  Clone ID: PAT_MRT3847_78332C.1
aaaaaacaaaaccctttcccaggtaaatttttaagggggagaggggcccccgggggggccaggtccccttccaaaccaaggggtgggaggctaaaaaccccaaaaaaatcaatttcgcccaaaaggcaaaaaaggggggaataaccccccacctggggaccccctttgccaaaaagccctaggggttggcccttatttttgggggaccggggaagaccccccctcccttccagggctgggggaacttggcaggggggggtgaaccacccaacccggccccggggggccc

SEQ ID NO: 118853 - DNA, 1141 bp, Glycine max
  unsure (1)..(1141): unsure at all n locations
  Clone ID: PAT_MRT3847_78333C.1
ggtccggattcccgcgtcgacccacgcgtccgcttgctgctgtggagtacattgatgacatttacaagttctacaaacttgttgagaacgagagccacccccacgactacattgattcacaacctgaaataaatgagaggatgagagctattctggttgattggctgatagacgttcacaccaagtttgaactttctctagagaccctttacctgaccatcaacataattgatcggtttttagcagttaagacagttccaaggagggaactgcaattggttggcatcagtgccatgctgatggcatccaaatatgaagaaatctggccccctgaggttaatgactttgtgtgcctctcagatagggcttacactcatgaacagatactggccatggagaaaaccatattaaataagctggaatggactttgactgtgcctacaccttttgttttcctagttcgttttatcaaggcagcggtcccagatcaggagttggaaaacatggctcattttatgtctgagttgggaatgatgaactatgcaaccttaatgtactgcccatcaatggttgctgcctcagcagtgtttgcagcaagatgcactctgaacaaggctcccctttggaatgagacacttaagctgcacactggttactcacaagagcaactcatggattgtgctagactattggtggggttccattccactcttgggaatggaaagcttagggttgtgtacagaaagtactctgaccctcagaagggtgcagttgctgtgctcccacctgctaaacttctgcctgaaggctctgcttcccaacatagttgaaagaagaaaaggtggggaggagcagtgataatatagagccttttatgattcagcaaatttgtatttttattttcacaaggtacaagagttgatttttatataagttgcaagttgtgcacttgccaattgtcacaatatcatatctaacttctataatggggttcacgttccatgagtgtgcaaccaggttgcagttcccttgttaaaaaaactttgttgctaacattgttatgttgtctgccaacataaaatgtttcttgnaagttgacgcaaccaacttttgaaacatttcttgaaacaaccaattttat

SEQ ID NO: 118854 - DNA, 460 bp, Glycine max
  Clone ID: PAT_MRT3847_78334C.1
ggagaggcaattagaccacatagtttaagacctcacttttgattctataaaattctctgagctctccactgtcagggctgacgataaactgcgcataacatctaagaataactacaaacttatctgatggaacataagaaccaagctaggaatctgatctttgacctgtaatccagctaagattgacattatacactccactactcacttctggccttcaaactcaaggtagctacccatcatgagggggatctcagaaagccttggatgttacaactctgcaattacggttttaccaattgatctatgcatgctttctctggataatgctccagctgtacaaagacttcaaactatacctgtaacatcataggactaacagtcaaagctactacattctaggacagtgagaagaaattactgtgccatggaggtcctactacccactgactcaggggac

SEQ ID NO: 118855 - DNA, 1816 bp, Glycine max
  Clone ID: PAT_MRT3847_78335C.1
tcccacgcgtccgacggctgcgagaagacgacagaagcgggcagagagagagagagagagagagtgagggagagagagtgaggcttcttctacccagatttgtttcattttaaccaaagaagaatctctcacaaatggcgtcaagagcaattgttcaacaacaacaagccagaggtgaagcagtagtagggggaggaaaacagcagaagaagaacggtgttgcggatggaaggaaccgcaaggcattgggtgacattgggaatttggccaatataagaagtgccgttgaagtcaagccaaatcgccctatcacaaggagttttggtgcgcaattacttgccaatgcacaagcggcagcagctgctgggaataacaagaagcaagcttgtgctaatgtggctggtcctcctgctgttgctaatggaggagttgcggtggccaaaagagtggcccccaaaccgggttcgaagaaagtgatcgtaaaacctaagccttctgagaaagtcactgacattgatgctagtccagataagaaggaggtcctgaaagacaagaagaatgaaggagatgccaaccccaagaagaaatcacaacacactcttacttcagtgctcactgcaagaagcaaggcagcatgtggcataacaaacaaaccaaaggagcagatcattgacattgatgcttctgatgctgcgagaagacgacagaagggggagtacattgatgacatttacaagttctacaaacttgttgagaacgagagccgcccccacgactacattggttcacagcctgagataaatgagaggatgagagctattctggttgattggctgatagatgttcacaccaagtttgaactttcacttgagaccctttacttgaccatcaatataattgatcggtttttagcagttaagacagttccaaggagggaactgcaattggctggcatcagtgccatgctgatggcatccaaatatgaagaaatctggccccctgaggttaatgactttgtctgcctctcagatagggcttacactcatgaacatatactaaccatggagaaaaccatattgaacaagctggaatggactttgactgtgccaacacctttagttttccttgttcgttttatcaaggcatcagtcccagatcaggagttggacaacatggctcatttcctgtctgagttgggaatgatgaactacgcaaccttaatgtactgcccgtcaatggttgctgcctcagcagtgcttgcagcaagatgcactttgaacaaggctcctttttggaatgagacacttaagctgcacactggttactcacaagagcaactcatggattgtgctagactattggtggggttctactccactcttgagaatggaaagcttagggttgtgtacggaaaatattctgaccctcagaagggtgctgttgctgtgctcccacccgctaaatttcttctgcctgaaggttctgcttcccaacatagttaaaaagaagaaaagggagaggagtagtcttttatgattttcagcaaataatcatttgtattttttttcttcataaggtacaagaattgatttttatataagatgcaagtttgtcacttgccaattgtcacagcatcaaacttttatttggggttcacgttctctgagtgtagtgtgcaaccaggttgcagttatatatacaaagaaagtccattgttaaaactttttgatgctgttgcgaccaaaacatactgtttcttacaacacaatttttgaaattgcttactacaaccaacatctgctaaaaaaaaaaaaaa

SEQ ID NO: 118856 - DNA, 258 bp, Glycine max
  unsure (1)..(258): unsure at all n locations
  Clone ID: PAT_MRT3847_78336C.1
ctanaattctcagcatttgcggggngancatgatccagcagttagngacncggcatggcacctcatcancatgggccnagcagcagtcgnaacagtaccagnagcntcagccgcagnagcagcaaccctacgtcatgatgacgnngnaggnctaggcngggaaggntatgtngntacctncngnctaggntctgcgtnngcagtannncgccagcgccgaagaggtnggaacactttngataggagtttgcagtactg

SEQ ID NO: 118857 - DNA, 541 bp, Glycine max
  Clone ID: PAT_MRT3847_78337C.1
atgcaagacacgctaaagctcaaactatacatgtagaatcatcacgtaatagagttgcctaccctcttcatggactaaaaaccactaaaaactacggctactggctctgccagagtttgatccccaatgggcccttaccggagaggaacgttgaaacatcccttgcactatctgatgatcgacgacactgttaaaccttacatgctttagtgcgaatatcaacaccagcctgaaaaaacccatgacaaattgttgggctattaaatggggaacataaactgccatgactactacgatcccttgttatacccgccagaacacctacaactatcccaagagctttgtttaactgttcgggtatatgaaaagaatagaggccacgcgagtatgttctatgagctgctctctctttgatcttcgccgacttactgaaaccactgattcgtgccttgcttcatgcaccatcctatgtagcagcatctgaggcataaccagctacactatgaggcggaacctcaaaaggggctttgcccgatccttc

SEQ ID NO: 118858 - DNA, 388 bp, Glycine max
  Clone ID: PAT_MRT3847_78338C.1
ctccgtatgctggtcatggctctcgggcctccgccggtgacgccgaatctatacgctgctaaccgccgaccctgaccgtaaggcggagcaggcctaagtgttaccgctcctggagcgagagcgccatcgggactcatcacgcgaagctgtatgtttcaacgaatgcgctgtcagacaagcagccgaccagaacgacatggagttggaagccattcgtgccgcaaaagagaacgcttagctggacgatgctctcagaggatccacgccccagtaccggcagattacatgggatgaaataatcctagctacttcatctatatctgacgatctgccaattgcaagggcagcgtaccgtgtagtatacaagtgcaatattgctaacacacct

SEQ ID NO: 118859 - DNA, 1183 bp, Glycine max
  Clone ID: PAT_MRT3847_78339C.1
agaacatgttttttctggggcgttagctggtatatgtgtcagcctttgtctgcatcctgttgacacaattaagacagtcattcaagcatgccgtgctgaacacaggtccatcttttacattgggaagtcaattgtttctgatagaggtttgcttggagcgtacggtggaattaccacaaacattgcatgttcagctccaatttctgcagtttatactttctcctatgaatcagttaaagcagctttgcttcctcatcttccaaaggagtattgttcttttgcccattgcatgggaggtggttgtgcaagcattgccacctctttcatttttactcccagtgagcgaataaagcagcagatgcaagttggttctcattatcgcaactgctgggatgtattggttggaattatcagaaatggtggtttttcctccctatatgcaggttggagagctgtactattccggaatgttccacattcaattatcaagttttacacatatgaaagcttgaagcaagtgatgccatctagtattcaacccaactcgtttaagactgtagtgtgtggaggattagctggatctacggctgctttattcacgactccttttgatgtgatcaagactagattacagacacagattcctgggtctgcaaatcaatatgatagtgtgctccatgccctttacaaaattagtaagagtgaaggattgaagggcctgtacagggggttgattccgaggttgattatgtacatgtctcaaggatcactgttctttgcttcatatgaatttttcaagaggacattttctctggaagcaccatatcccactgatttatgcattcaggacaatgatgggaatgctgaagagtgaagacagcaaaaactttgaattaacaggtccatcgttgggttttccagcagcagtttccccaagtcctgagcattcttgataactagatagtgtgtggaagaaaagtttaattgtgccacaagatgtaagcagtttcataaactatggatttaaagagtaatattaaatccttctttaacattatcttacaagtcttcctatttattaagtgaagaatgaattgaaagcatagtgttttcaagattttttttaatgtatttattattttataaaatattaggatatagtattgtttttaatttaataaaa

SEQ ID NO: 118860 - DNA, 292 bp, Glycine max
  Clone ID: PAT_MRT3847_7833C.1
gcgtacgtgagctcgggttcaatatcctagtacaccgtattaaagaatttaagatatactatgatgagagcgcggttcccattactgttgctgggagttgttttcctggcatcagtctctgtctcattgggcattgcgtattgggaaagtgaaccccagtcacaacaagtgcctccgaagttgcaatagcgagaaagactcctataggaaacaagcatgccacgctcgttgcaagctccttaaggtggaggaagatgtagcatgcgaagacggtctaattccacgagtatga

SEQ ID NO: 118861 - DNA, 456 bp, Glycine max
  Clone ID: PAT_MRT3847_78340C.1
gaaagcttgaagcaagtgatgccatctagtattcaacccaactcgtttaagactgtgagttaatgtttgtccctggctcttaaccatcattttttttgtctcattgcaatgaatgtaactaggatgattttacaaatttctgtaggtagtgtgtggaggattagctggatctacggctgctttattcacgactccttttgatgtgatcaagactagattacagacacagattcctgggtctgcaaatcaatatgatagtgtgctccatgccctttacaaaattagtaagagtgaaggattgaagggcctgtacagggggttgattccgaggttgattatgtacatgtctcaaggatcactgttctttgcttcatatgaatttttcaagaggacattttctctggaagcaccatatcccactgatttatgcattcaagacaatgatgggaatgctga

SEQ ID NO: 118862 - DNA, 456 bp, Glycine max
  Clone ID: PAT_MRT3847_78341C.1
ttgggggggggggggggggggggggggggggggggggggggggtaatattcgaaacatggggagtgggtcaagtaagtccgagagtagccggagatagcattacacggtgtcgctaacaagagctgtataagtaagacaaaggaaaaatgcgtcactgaaaccaggtgtgcagtagtgggtgagttaaatcaacaaagcaggggaaaaagaagggtggtgataggggcatataagggtaaagataggggaatgaatgatgcggtaaatatggccaataaaacaaaaaactagtatgattccccggtgaatgtggtttgcgaagtgccaggtgttggtaaaaggatcaaattggtaacaaggccgcagaccccaagcgagggggttcggcttactgtactttgcgttttactacttaccacaataccccgccacgcccgtgcaaacttacgcaggcg

SEQ ID NO: 118863 - DNA, 404 bp, Glycine max
  Clone ID: PAT_MRT3847_78342C.1
aatactcgggccaacccacgcatccatccgctcttccgcacacatatgcatactttttacatttatacatttcccaatatggaacccgtacattcactaacgtctacgctctctatctatagcacacaatatggttaacatttatccagaacaacctaactttataaatgaaagagcaagtaaatcttcatcatcaacaaatacattacgagccacaactcatacaagccaaagcaaccacatagagttcttagaccaactcaattgcataaactcatattacatggctatcaccctactctgcacgctccttaccctactaataatctcaactaagatccaatagtgctaatagcaaattcatcgctaccatcatcttcattttcatactcatcatcatactc

SEQ ID NO: 118864 - DNA, 510 bp, Glycine max
  Clone ID: PAT_MRT3847_78343C.1
caaaatcagaaccacattcactgggaatggatcttcccaatagaggtatgtggtcctaataatggttgagaaatgaggagttctgactggccaaatcaaactgcatggcatttgagtttacttattgacactcccaaacagtctacagatgttgatattctcttgagaatctctcaagattttgaaattgctggtaatactcttatgccagcttattctcgcccacaggctactgccagatcttgtgaatatgcagaatgctctgcatgatctgcaatttgcgatttgttatcactaaggtctcttgtttaattcaataggagatattacgcatgaccctcttgttaagaatgctctgcctattggaaaatcaccacacctattttaattggcagaacgatgtgtgaagtgtgtgttattgtcttctccctacattaaatgtacagtctctttcttcataagcatttggaaatttggctgatgataccatcaattttgaggcttttcccc

SEQ ID NO: 118865 - DNA, 766 bp, Glycine max
  unsure (1)..(766): unsure at all n locations
  Clone ID: PAT_MRT3847_78344C.1
ttacggctgcgagaagacgacagaagggggataatttcacaccttatctatctaatactatactatacaaaaagttctcagtgacagagtaaaggaggcatgccgatgacgatggcgatgacggcgtcgcagttgcggtgggggtggaggccaacgccgaagcagcagcaacgacgccgtatggttccggtggtgtgttccatcgctataaagaacgctcagaacaaagagagagcgaaactgaagaagctcttcgaagaagcgtacgagaggtgccgcactgctcccaccgaaggcgtttccttcactatccaacaattcaccgacgctctcgacaagtacgacttcgacgccgaaatgggcaccaaggttaagggcactgtttttgccacagataacagcggagcttatgttgacattactgctaagtccacggcctacttgcctctgcatgaggcttgcatccacagaattaagaatgtggaagaagcaggcataattcctggcatgagagaggaatttatgatcattgatgagaatcaagcggatgataccttgatcttgagtttgaggtctatccaatatgacattgcatgggaacgctgccgacacttaaggctgaagatgctgttgtcaagggtaagtaatgcaatgcanacaaaggaggtctggtggctcaagtgggaggccttaaagggtttggtccattttcacagatatcatcgaaatcagctggagaaagacttcttgagcaggtgattccttt

SEQ ID NO: 118866 - DNA, 601 bp, Glycine max
  Clone ID: PAT_MRT3847_78345C.1
tcgtacgttaggtccgaatagaaactcaggttggtgagagagggatacaactctcaggagggcaaaagcaaaggattgcaatatctcgtgcaatcgtgaagaatccatcaatccttttgttggacgaagcgacgagtgcactggatgctgagtctgagaagagtgtacaagaggctcttgatcgtgtcatggttgggagaacaaccgttgtagtggcacacagactctctaccattaggaatgcagatatgattgctgttgtgcagggagggaagattgtggaaactggtaaccatgaagagctcatggccaacccaactagtgtttatgcatctcttgttcaactccaggaggctgcttctctgcatcgcctcccatcaattggtcctagcatgggatgccaaccaagcataacctactccagagaattatcccgtacaacaacaagccttggtggaagttttcgatcagataaagaatctattggccgggtttgtgctgaagaaacagaaaatgcaggcaagaaaaggcatgtttcagcagcaaggctgtactctatggttggtcctgactggttttatggagttgctgggaccttatg

SEQ ID NO: 118867 - DNA, 286 bp, Glycine max
  Clone ID: PAT_MRT3847_78346C.1
ttcacaccctctcactctccttggattcgctggtctttctcttagatctgtttgctatacgacatctattcgcaagagtgggcctcgttgcactttcagatcgcagccatacttggcttaaatatgccacttgaacgtctgagagattctgctgtgccgaacgaggactttcgttgacgactggaacctggggcgtttggaggttaaggagatacttataccgaatgacgcgtactgcaactgtccatacgagggacacttgctccggtttgaggtttatacccat

SEQ ID NO: 118868 - DNA, 118 bp, Glycine max
  unsure (1)..(118): unsure at all n locations
  Clone ID: PAT_MRT3847_78347C.1
aggagctggaggaagaggntgatagcgggatangtttgcttnatgagtnanagtgatcatcaatatgagaatgttgnctgnttacncagacaccccaagntattcnacacaacnnnag

SEQ ID NO: 118869 - DNA, 394 bp, Glycine max
  Clone ID: PAT_MRT3847_78348C.1
gtaactgatgatttgcctgagtttagaataggccatagagttgttaaagtgcacaatattgagagactttttctttttttctttctagaagtgttaatatgaagttgcattatatatttgtgggaaaaactattgactttcagaaaacagaagaaggttgtttagaaatggcattgctgttttgacagtaactttttaggtaagggaatggaatattttgaagatgttgattaatcactagaaaatgcaaagaaattgtgtttttgcttttgccatttcaactgatgcctggtgaaaatttgctcacatttgctagctaccttaaaaattttgtgttgctgttctatagcatgccgtgaaagtttaaatggaatcttcattttatatgcttttt

SEQ ID NO: 118870 - DNA, 356 bp, Glycine max
  Clone ID: PAT_MRT3847_78349C.1
actcagctcacacattccagagttttctaagtgagggccttcatggggagtcttggcgggacacggggttctgaactgcggtacctacaacacaggcgctggctatgctggctcctgtctgaggctgccctgctgctggcacggtaagtgcctggatgctgccttgaagcaggggcagggcagtgaggagcccgctgggtccacccaactgtgccctgcctgccccctgtatggggacccaccccgcctgccgcatggagcctccatcctgtgccccctgcatggggacccacccccctgccacatggagcctccatcctgtgccccctgcatggggacccacccgccctgccgca

SEQ ID NO: 118871 - DNA, 666 bp, Glycine max
  unsure (1)..(666): unsure at all n locations
  Clone ID: PAT_MRT3847_7834C.1
ccacgcgtccgtaacctccgaagcatggcaactcgaagagtaagatgcatgcagtgcggaaggcccctgctagtgccaattgaagttgcctatagcattcctttgatgtgttatggatgccaagctagcagacccaattatcattttgcaaacaatgttacacctccatttgttaattatcaccctgctcctggctatgcacataggatacgacgtaaccaattcaattatcctcggccattgccactgacgccgccaccaactccattgaaccctccttcttcctatggcaacaagagggctgtcttagttggcattagttattgcaatcagattaacaaccttaaaggttctgtcaatgacgctcagagcatgaaatactttctcattaacaagatgggtttccctagtgactccattcgcgtcctcacagatgatccagaggagaaaaacccaatgagaattccaacaaaatataacatgcgaatggcaatgaagtggttggtcgagggttgtcgatcaggggactcgttgggtgtttcacttctctggacatggttcacaggaagaagacaccaacatggatggaggttgatggatatgatgaaacantatgcccccgttgattttgagcttgaaggggaagatacttgacgatgaaatcaa

SEQ ID NO: 118872 - DNA, 537 bp, Glycine max
  unsure (1)..(537): unsure at all n locations
  Clone ID: PAT_MRT3847_78350C.1
tcgacccacgcgtccgcggacgcgtgggcgcgactatcgctcggcctcggcaccccccccgatggatacgcgctcccttttcccctcgcaacttccttcctcaggctccattccctccctcacgccttctttcttctttaatttagggtttctcttccactttcatcttcttcctctttcgtttcgcacgcaaattctttcgttcttctccttttccctccttaacttatcttcttttccccttcccttgaatcttcaactatcggttgttgacgagaccaaaaaacaaaaacaaaaaaagaagagagagtagggatttcgatttgtaattttatttttgttggtctgtggatatattcgattctttnttccgtcctctgattatatttagcctggtgnttttagggaaattattgtcaattgggttattcgcaagaaactctgtgaagtttttggtgccgtcgttttagttgccatccgaatcgaaggtttttcttgtagatctctgctagtgcacacttttttaatttttttttt

SEQ ID NO: 118873 - DNA, 388 bp, Glycine max
  Clone ID: PAT_MRT3847_78351C.1
gtagttttccaaagtaaatgtgcagcatggtcagattcagtgttgcaactaaaagatcatcctgggcatactgtttgctggaggcatccttatgattggcacttggattggaaggttggctgacaagaatgttgtatttgttggatgagtagcctgatgcttcgacaagtgacatttctgtaaggcttatgaaaaatgttttacatctactggacttatgtatatatcttgtgccgaccctttgctatatatttggcattatggatatctgttgtaaaatgaatattatatagcatgtttgagaaagaaaggaacttgtgatattaaattaatacaaattctgaaggactctgtattacaacgactttgattgctcatcatatatact

SEQ ID NO: 118874 - DNA, 237 bp, Glycine max
  Clone ID: PAT_MRT3847_78352C.1
ggaattggcctcgagcatatataattgtcccccatttcactcttttcatccaaaaatctagctgccgggggggtgaattttagttagccttatacactcatcaccttgggaagtgagttatgcaattaagaaagatactacgtggtatttaagaatgggcacaggcgaacgcactatgacagtaactacttgaaaaaaaactttagaatgaagatgaaaccaataaaataccagcat

SEQ ID NO: 118875 - DNA, 2305 bp, Glycine max
  Clone ID: PAT_MRT3847_78353C.1
ttggatttcacttgcattcgataggagcttaggagggagggactttgatgaggttatatttagtcattttgcagcaaaattcaaggaagagtaccacattgacgtgtattctaaaacaaaggcgtgctctaggctacgtgcagcatgtgagaaattgaagaaagttttgagtgcaaatctagaggcacctctaaatatcgagtgcttgatggacgggaaagatgttaagggatttatcacaagggaagaatttgagaagctggcatcaggattactggagagagtttctattccttgccgcagagcattaactgatgcaaacttgacagcagagaagatttcttctgtagagctagttggttcaggttctaggattccagctataagtacatcactaacttctctgctcaagagagaacccagccgacagctgaatgcaagtgagtgtgtagcccgtggttgtgctctacagtgtgcaatgctcagtcctatttaccgtgtgagagaatacgaggtcaaggatgttattcccttttcaattggactttcatcagatgaaggtccagttgctgtgagatcaaatggtgtacttttcccaagaggccaaccctttccaagtgttaaagtcataacctttcggcgaagtgatttgtttcatttggaagctttctatgctaatccagatgaactaccacctgggacatctcctataattagttggctcgcggttgggctctacagtgtgcaatgctcagtcctgtttaccgcgtgagagaatacgaggtcaaggatgttattcccttttcaattggactttcatcagatgaaggtccagttgctgtgagatcaaatggtgtacttttcccaagaggccaaccctttccaagtgttaaagtcataacctttcagcgaagtaatttgtttcatttggaagctttctatgctaacccagatgaactaccacctaggacatctcctaaaattagctgtgtcacgattggtcctttccatggatcccatggtagtaagatcagagttaaagttagagttccacttgatctgcatggcattgtcagtattgaatcagctacatttgatcaaggatgacatggatgatttggttatggctggtgattatcattcaaattctgatgcaatggacattgatcccatttctgagacagttaccaatgggtttgaagatgataccaataagaagttggaatttccatgtagttctgctgatggtacaagaaaagataatagaaggcttaatgtgccagtgaatgagaatgtctatggtggaatgacaaaggcagagatctcagaagctcttgaaaaagaactccagttagcccaacaggacagaattgtagagcaaaccaaagaaaagaagaatagcttggagtcttttgtttatgatatgaggagtaagctcttccacacatatcggagctttgcaagtgaacaagagaaggatggcatatctagaagccttcaagagactgaggaatggctttatgaggatggtgttgatgaaactgaacatgcttattcttcaaaactggaagatctgaaaaagctggtagatccaattgagaatcggtacaaagatgataaagaaagagtgcatgctacacgagatttatcaaagtgcattttaaagcatcgtgcttctgcagattcccttccaccccaggataaagaactgatcatcaatgagtgcaataaagtggagcagtggttgaaagagaagatccagcaacaagaatcatttccaaagaatactgacccaatattatggtcaagtgatatcaagagcaagacagaggagttaaacttaaaatgccaacagatattgggatctaacgcttctccatctccagaagacaaagacaagccggatactttcaatgatccatgaatacattgatgtgattataccacatggaactgaagacccaagttttcatcactgataccatctgacaaatatagaaaaaaaaagtttcctttcatttttgctttgcagcgatttgtattttcataatctatctaatattttctgatatgatatagtttcttcaaatgaatcgaatagattctgctttagggaagaaaaaaaatgtgtgaagtattagtggcacttgtttctgctttgtgctcaaataaattcttacaaaattgattggtcaatctcgaataatgtcggagtctgttgtgaagcttttagcatataagaacgtgttacgcggctttatgataatgaatgaaattaaatgactgttattattattgttaaaaa

SEQ ID NO: 118876 - DNA, 519 bp, Glycine max
  Clone ID: PAT_MRT3847_78354C.1
tggaggattttatgagatacgctaccaacgagctcttgtttatttcttacaggaacaagggaaccatttgcctcgccaccatacctgaaaacctaccaacggcgattgactatgatgacccaaaggctaaccgtgccgctctcaacggaacgcctcatatattataccatggtcgcaaccagactcgagtgctaagagaccaaacatgcttgcgtggtgtcagaatgtaacgaatcacgcctccaacgcaagatattgcgtaacacgattcatgtgcggttagagaatgatatgaccttcaatgtgctctgaagagaacctgctcgcgagaattaagaatgaactgctaaaggccgaaaccggggtcaaggatctaaagataagcatcaagagacatctcttgtcacacccaacccgttatacatggtcggagggtgctgaccctatgagacaattacccccatgccatatgatgctcgacaatgacgctcacgtttaggttatgagtaatgtgctacc

SEQ ID NO: 118877 - DNA, 294 bp, Glycine max
  Clone ID: PAT_MRT3847_78355C.1
gaccgaggcggccgctgctacctataccttctgtccccatcctttattttaatgatcctcgaccttcatcacgtgtcgcttttttacaattactccattcctaaccctcacaatatcaataatcacttctataacacataactctttcttaccaccccccaactcaaaaacaaactctatcacacctctcatctttcataaacaaaccctccatgcatccttttccagctagaacaaatagatccatttcaagactctttattgaccaacaacaaaaatccctcctatctattc

SEQ ID NO: 118878 - DNA, 3463 bp, Glycine max
  Clone ID: PAT_MRT3847_78356C.1
cccggggtcgacccacgcgtccggtttaatattttcacagttcagtatgaaaaatcccctttttatttaatgttctatcttcatttgcctgattctgctctatctttttctctcacctcctcctaactttctgccttccctcattctcggtctcacaaacttaaagtaatatccagaaaggaatgaagaaaacctgggctcttcttcttatgtgttttttcttgtttgaggatggtgtgctttaaactagaactaatgagatatatcctgtaaatgttgatcacactctattggtttaaactaattataataaccttctagaaattgctaatttggttctatggttcttatctgtggaataagctcctgttctcaccctttttattctacattgcggggatttaaactctcacataattctcagggaatatcgacacaagatgggaaccaaggcgaagtttacaagtgctaaagaaaatgaagaatctcttaaacagagcaaaggttgcaaaaagccctagctagggtgaagtcaatggttcagtatccagaggcaagagaccaataccataggctgttgaatgttgtaactgagatccaaaaaaatcaggtaaagcatgagagcagttataacaattcagaagaaccgagagaattcggtgacctcaacgatcttgaagcattgttggacgaagatattttcatgcctacagcaacttagaagttagctttcattgttcattgtatgactttgaatttctcatcaagagaagttacctattattcctggggtgaattatatctcactcactcaagacaataaaaccaaagacattcttaatgctggattgacatatgaatccccaaaaccccttggcttttcctcatgggaaggtatcttagaaaataatgctggaagtcaacatgtgcattttcagcctttatttcctggaacacagcctgataacatgggaatcaatagcaatttttctcaaggagaagagataatggtgccatatttgaccaccagcattgctaagcagcatgagaatggaagtatcattaaagctgaaggaaattggcaggtttatgatgttgattctttacgcatgtccagttggcctatagatagtgcttattcaggctcaacatgtgaggtaagttgtagcaactgtgagcaggaagttaatgatgttgattttcagaaatccttggaacagtgtcttctacattcacacaaacaaaacaaggttctcatgcaaaatgatcttcaagaaaaacttttgaatgaaaaagaaaagataaaatcaaatctagaggcctatggaatagaagacacatatttatcttttaaaaggactctgttagatggacctccagctgaagagggtctgaagaagcttgacagtttcaaccaatggatgagtaaagagcttggagatgtggaagaatcaaataaaccatccacttctggtggttattgggatacagttgaaactgaaaatgaggttggcaacacaactattccttcccaagggcacctggacacctatgtattggatccatctgtttcccatgatcagctttttagcattattgactattccccaagctgggcatttgaagggtcagaaattaaggttatcatttctggagaattcctaagaagtcaacatgaagcagaacaatgtaagtggtcatgcatgtttggtgaggtagaagtgccagcagtgatcattgcaaaaggtgttctttgttgtcatacacctccacacaaggctgggagggtacctttctatgtaacttgttccaataggttagcatgtagtgaagtgagagaatttgatttccaagtccactatactccagaagacactacaggtgagaatagaggaagcacttttgatacttttagtatccgatttggagaacttttgtccctggggcatgcctttcctcagaattcagattcaattagtgtaagtgagaaatctcaactgagaagtaaaatcaattctttactgagggaggaggaggatgattgggacaagctactgaaacttactcaagaggaagatttttctccagaaaatttacaggagcagctgcttcaaaatcttctgaaagataagttacatgcatggctccttcagaaaataacagaagaggggaaaggccctaatatattagatgagggtggccaaggtgtgcttcattttgcatctgctcttggctatgattgggccctagaacccacaatagttgctggtgtgaatgtgaactttcgtgatgtaaatggatggacttctcttcattgggcagcattttgtggcagggagcgcacagttgctttcctcatctctctcggcgcagcacccggagcactgactgatccatgtccagaacatccttctggtagaacaccagctgacctagcttctgcaaatggacacaaaggaattgcagggtatcttgctgagtcttcactaagtgcacacctcacaactctcgatttgaacagggacgcgggagaaaattccggagcaaaagtagtccaaagactccaaaacattgctcaagttaatgatcttgatggtttatcatatgaactgtcattgaaagattcactggctgcagtgtgtaatgccacccacgctgcagctcgtattcatcaagttttcagaatgcaatcatttcagagaaaacaactgaaggaatatgatgatgacaaacttggattatctgatgagcgtgctctttcactcataaaaatgaatgtaaaatcacacaagtctggaccacgtgacgagcctgtccatgctgctgcagtacgaatccaaaacaaattccgcagttggaagggaagaagagaatttttaatgattcgacaacgcatagtaaaaattcaggctcacgtgagaggtcaccaggtcaggaaaagctgtgggaagataatttggtccgttggaatcttggagaaggttattttacgttggcgtcgaaaaggtagtggtttgcgtggatttaaaccggaggccaattctgagggaactatgatacaagatgtatcttcaacagatgatgactatgatgtcttaaaagaaggcaggaagcaaacagagcaaaggttgcagaaagccctagctagggtgaagtcaatggttcagtatccagaggcaagagaccaataccataggctgttgaatgttgtaactgagatccaagaaaatcaggtaaagcatgagagcagttataacaattcagaagaaccgagagaattcggtgacctcaacgatcttgaagcattgttggacgaagatattttcatgcctacagcaacttaaaagttagctttcattgttcattgtatgactttgaatttcacagcagagttaggtgatcaactgtctcactttgattgttatagtaaattagtaatcttaattctcattcttttgttgtt

SEQ ID NO: 118879 - DNA, 416 bp, Glycine max
  unsure (1)..(416): unsure at all n locations
  Clone ID: PAT_MRT3847_78357C.1
tatatatatttgacatcatgcatagtatcttctcgtgactggcagtagagcttagacttctgtatatgtcttttgcaggtaaagcatgagagcagttctaacaattcagaagaaccgagagaattcggtgacctcaatgatcttgaagcattgttggacgaagatattttcatgcctacagcaacttaaaatttcattgttaaggggtgatttagaatttcacagctgagttaggtgatcaactgtctcactttgattgttatagtaaattagtaatcttaattctcattcttttgttgttaaggggtgatttgctaacatgtcacacaagaattaaaaaaaaaatgcataaccattaaaaccattcttacaatgcaaaaaaaaaaaaaaagggcggtcgncgactagtgagctcg

SEQ ID NO: 118880 - DNA, 629 bp, Glycine max
  Clone ID: PAT_MRT3847_78358C.1
ggtccggattcccgggtcgacccacgcgtccggttattgtagcactggaggcagcagggggcttgacttcatgtcgtgtggtgagggacaaggttctgttttgctgacagcgcaatgggcggtcatagctggttcggcattgtaacctgattggcgtatcgttgtaaatccaaagattgtgacttagttgcttaggtttatcaagcataaactgcttgtatctctttataaaacccaaagaactactgtaaatgtgtctcactgctccatctatgaaacagttctttggatccatattaaagtaataccactacaatatacatgttatttataaatgtctccgaagatggttctatgttcagataaatttccacatacaccatattgcttttttctcggtttcactagatgtatagagaacatgtgttagattattcttacagatgtacggatctctcactctaggcaggttaaagaccatatgtgtatgatgatgctatgaagaagatggactagagactgttttctcctttgttttgaaatactggcgttacattgggtgcgatgcactcatttcttactggggcgggtgacaactggtatttggatttttggtcacgttgccattt

SEQ ID NO: 118881 - DNA, 259 bp, Glycine max
  Clone ID: PAT_MRT3847_78359C.1
ctgaaaaggcggaatcctctgcatgacctggaattcgagcatagttacgcttgatcgtaaggttaattcaataaaggaaatcaggcatgaccctcttgcagagtatgctctgcctatcagaaaatgaccacacaccttacacatgattacgacaagttagagaggtgtggatataatcgtggaagagggggatcttatgatgaatgattttgttggacggccggcttcttttgtgctcgtggacccggtttgttatatc

SEQ ID NO: 118882 - DNA, 485 bp, Glycine max
  Clone ID: PAT_MRT3847_7835C.1
cttgggggggggggggggtacgaaagaaagaggagggacataggcccatatgggataggcaaaagagtggataaagtgaatcaacaaacttaggtaatgcctaaattaccatgtataacctgcaactataaaaaaagcgacgagcgtaaacgcgcatgggatatatataaaggtcctaataaaaccttatcgggtgggggggccgcaaaatcaaaccttatcgtcagaggacgtatgacataagacggatgtttgttttgggggtgaaggggcgcagcagatagggcgagtaggaaaaagagtggataaattgagcgtgtgatgacaacctaataaaagtatgctaagataataaggcgaagaacaagtactgcaaaaagataggcgctgtggtactgggtgaatagaaatgaggggcctgcgccggataaaccatgatgcggatagggatacctgggatacgcccgctaacagaggtttagctt

SEQ ID NO: 118883 - DNA, 322 bp, Glycine max
  Clone ID: PAT_MRT3847_78360C.1
ggcgcaaaaaccataattaattacacccagcctgaactacttcaatgcacccatggaacggtacctactctcatatatcaacttacatgtgcacacacccattctttattgttttaataaactctacgtgcactagcggtggcggtaaagtgaccagagcaccaatcctatcggtgtataaaaaaaactctctatgatgctaaggcgatcgtctaaataaccaggacattgaaatgatgcctgccctttatgttgagacgctatatagcaaagaaaaagcgtgtgctttgttgcgccatttggccaatcagtgaatcatttc

SEQ ID NO: 118884 - DNA, 287 bp, Glycine max
  Clone ID: PAT_MRT3847_78361C.1
tcgagcgtcagcaatggtgtacgacaaggctcagacatcagaagcctacctcaagagctatcaagtctagttacagataagacgagagggaaaaacggattatcgtgccaagattcggttgattaatcaggacaagaacaaatataacactccgaaataccgatttgtggtgcgctttagcaacaaggacattgttgcacaaataatatctgctagcattgccggcgatttagttcatgctacagcatagtcacatgagctgtcacgatatggtcttgaagtaggac

SEQ ID NO: 118885 - DNA, 1022 bp, Glycine max
  Clone ID: PAT_MRT3847_78362C.1
cgtaagctcggaattcggcttcagcaattccattctctttgcctgcctagtttcaattctgtccaatttccaaaaccaaaacaagccacacaagttcatggcaactcccaataacagactctctcttgccatggagagaactgggcaatgggttttctctcaagacataccaactgatgttatagtggaagttggagaaacaactttctctctgcacaagttcatgctagtggcaaaaagcaactacataagaaaactgatattggaatcagatgagagcgaactcaccagaatcgacctctctgacataccaggaggcccttcaatcttcgagaaaaccgcgaaattctgttacggcgtcaacttcgagataacggtccacaacgtcgccgttttgcgatgcgccgcggagttcctccagatgacggatcagtactgcgagaacaaccttgcaggccggacagaggagtttctcacgcaggtcgcgttcttcacgcttaccggcgccgtcacggtgctcaagtcctgccgccatctcctcccctatgctgacgatatcaacgtcgtgaaacgctgcgtcgaagccgtcagcgccaaggcctgcagcgaggccaatttccccagccgctcgccgccgaactggtggacggaggagctcgccctcctcgatatcgatttcttcgccagagtcatcgacgccatgaagcagcgcagcgcgaaggctcttaccgtcgccgctgcgctcatcacctacacggagcgcgccctacgagatctcgtccgtgaccacaccggcaacggaatccggtcctcagatcccggcgattccgattccagatccaaacagcggaagcttctggaagcaatcgtggatccgttcccctcggagaaagccgcgtttccgatccacttcctctgctgcctcctccgatgcgcgatctacctacgtgcctacgccggctgcaaaaccgagctcgagaagcgaatttcagcgatcctcgagcacgttaccgtcgacaacc

SEQ ID NO: 118886 - DNA, 372 bp, Glycine max
  Clone ID: PAT_MRT3847_78363C.1
aaaacaaacaagccatttatagaacataaaagttataacaggttggcatttgctccagttcccattcaataatatgttatacaacataaatgcattcactgaaccaaagccatattttgtaactccccttttgcagctactgaggttgaaaaagttaaatagagtaagcttcatttacggggcttcagccaaaccccactaatgaactgaactctggcacttaaaactggtgaaactggggctacccttcaaaaatttgagcacagcacaggaagcagtacccaccgattacagaaagctcaaattcaccaccatagatgttatgacagtaagtagcactacccaatttatataactacaccggacgcgtgg

SEQ ID NO: 118887 - DNA, 451 bp, Glycine max
  unsure (1)..(451): unsure at all n locations
  Clone ID: PAT_MRT3847_78364C.1
ggggggacgcgtccgagacgacagaagggtcctccaaaaaagtggcttcttcgttcttcttctttcnacatgaagggacagctgcagccgatgaagacggccctttctgagtgtccatactctgagactgagactccaaacaaaagttagttacctttattaaacgctgtaaaatgatcaaggaacttagttaaacattatcgccatcatcccagaacatcaaggaacttagttaaccagaccaaatgattaaaacacaacaataatttttttttattattatttgttaccatgtcataggtgagaaataattggttttattatctaatagacaaactgaattacattcattacagagactcaaagagagacactatctattaatacaaacacggtagcacaaaccgatttgcctcgtgagcatcataattcgtcgcgggtgaattaaggg

SEQ ID NO: 118888 - DNA, 352 bp, Glycine max
  Clone ID: PAT_MRT3847_78365C.1
tcggccacgcatccgaccacgcgtcacgttgaatccataccacgttatcattgggacctatgaaacaaaccgatgatgtctcaactccttcagcttctgctactctacacagtcaccgcccgcacttttttctaatgcataatatttccctctatatctctacctccatatgttgctctttcatattcaccctcgtggttcctatttcgcatacatatataaatcaatataaccaccatgagcgttcctccaccgcctacggcggcgatgtggacgccgttcaacgcagcgcactggcactagctggatcaccaggccctcatcttcaagtacactcaaggcgggtctctcg

SEQ ID NO: 118889 - DNA, 2061 bp, Glycine max
  Clone ID: PAT_MRT3847_78366C.1
gcggagatgtatgaggtgccaataacacaggccgcaccctgattataatttagaacctttcagacccaacaatccccctggttttgacgccctgtttcgcgttctcggggttggtttttctttatctttctctacacgcaatcatcggtatttaatccgctgtcagacgacagcggagaccgacttcgctgcacgccaaacattgcactgcgcgaaaaggttttctccctctgcttctatcatttccttcatgttgggtatttcattcactttttttccccatcttttttcgaatccctttctctaaaaatttttaaatgatacagtctggcttggtaggtcacacaagtttaaacattacattccgtaagcgccttttctaaaatcttcgattacattctttagttttcttttgagtatttaaagcccttaattcaaccgcgacgaattatgatgcttacgaggcaaatcggtttgtgctaacgtgtttgtatttatagatagtgtctctctttgagtctctgtaatgaatgtaattcagtttgtctattagataataaaaacaattatttcttacctatgacatggtaacaaataataataaaaaaaaattattgttgtgttttaatcatttggtctggttaactaagttccttgatgttctgggatgatggtccgcaagaggcgacccacttcgcttccggccaaacattgcactgcgcgaaaagcgtttaataaaggtaactaacttttgtttggagtctcagtctcagagtatggacactcagaaagggccgtcttcatcggctgcagctgttacttcatgtcgaaagaagaagaacgaagaagccacttttttggaggacttgaaggatcacattgacgagtttattaatgcttctatggatgaacataagacttgcttcaagaaaacagttcagaagatgttcggaatgtccaaggctgttgcagagagggacaccaatgctgccaaagaagttgagagttctctgcctcttcagacaactttgcaagactagtatcatgcttgctctcaagaaaaataatgtttgttttctagaagctcttttggaggatgttgataaaaataagtgagtgattaagttggttggtcttgatccatgggactaggttgttgttgaatgtgtgatttgcttacatttcttaatgctacacaaccctaagaaatcgatggccagaggtcttaagaagcattgaattcgatgaaggcaacagacaggttgcattaacattatgggtagggaaggaagggtctccttagagagagaagcaaaaaataaataaataaaaaatcaatcattattccgataatgtttaactaagttccttgatcatttaacagcgtttaataaaggtaactaacttttgtttggagtctcagtctcagagtatggacactcagaaagggccgtcttcatcggctgcagctgttacttcatgtcgaaagaagaagaacgaagaagccacttttttggaggacttgaaggatcacattgacgagtttattaatgcttctatggatgaacataagacttgcttcaagaaaacggttcagaaggttatttagtgatgtacctaaactttcttgttaggacaatttgtgtgcatccctttgttaaccgatgtagtgcggtgtttggttggtttcagatgttcggaatgtccaaggctgttgcagagagggacaccaatgctgccaaagaagttgagagttctctgcctcttcagacaactttgcaagactagtatcatgcttgctctcaagaaaaataatgtttgttttctagaagctcttttgaaggatgttgataaaaataagtgagtgattaagttggttggtcttgatccatgggactaggttgttgttgaatgtgtgatttgcttacatttcttaatgctacacaaccctaagaaatcgatggccagaggtcttaagaagcattgaattcgatgaaggcaacagacaggttgcattaacattatgggtagggaaggaagggtctccttagagagagaagc

SEQ ID NO: 118890 - DNA, 184 bp, Glycine max
  Clone ID: PAT_MRT3847_78367C.1
cacttgacactatagttgagctatgacgcccccttccctaagctctaaactcggaattagcttatatcaaaaacacttgggctatgttgctacatttttcttcattaacttacgctgtatacaacacggagagtggggttctaaaaacctatacccaaccaccgtcacatttcacttttgaacc

SEQ ID NO: 118891 - DNA, 250 bp, Glycine max
  Clone ID: PAT_MRT3847_78368C.1
gttattcagtttttgtaagtgaaccttatctctcaagcttgtaacttttgttctctcaagagacttggtattagaagggaaacagcatgtgctctatctcttcaaaacagacccttcatttggttcttcctcgtccatggccatctaaaagacaccaccacaaccacaggcccccttcggttgggcatgctcaacagaaggagggcacacttgaaagaagcaagacaaaggaaaaggattgttgtggtga

SEQ ID NO: 118892 - DNA, 624 bp, Glycine max
  Clone ID: PAT_MRT3847_78369C.1
cttttccttgctgttctacactacactcacagtgaggtccatgttggaagtcagagttgtcactttcaagattcagcagctgcattatgcttgtggcttatgttgcatacctattttttcagttaaaaagtcaaagaaatctttacgtctctgtgaacgagggagcatctatggcatgggaaattccagtagcatttattagtgtcatattgcttccactagtggggaatgcaactgaacatgccagtgctataatgtttgccatgaaagataaacttgacatttccttaggagtagcaattgggtcatccacacagatatctatgtttgtgccggcaggttggttgttctacctattgatgataggcacacacatttacttggcagccggcaggtctttggcaacaagctcttttgatggcctctgctgcttataatcctgtagtagtgtcaaagtaaaaggaatactacagcaatttaagcaaggctagaaaatcaaattataattccgtttgaataaacttctcctcttcctttgcttatgaacatgtgtttaaaggatataattaaaagttaaaatgcacaacctgtccattgatctatagtaaaaaaaaaaaaaaatat

SEQ ID NO: 118893 - DNA, 470 bp, Glycine max
  Clone ID: PAT_MRT3847_7836C.1
taatttcttccatcagatatattttcttcaaaaacaatggcaggcgaggtggtgaagaagggagactcgctcaacctgaaagtcactaacaagagtcatgttcaacctgaggagaaaattggaaggaaagagtaccagctggtcacttttgatcttccctacttggccttctactacaaccagaagctgctgttttacaagggtgaagattttgagggtatggtccaaaaactcaaagtaggacttggtgtggtgttgaaggagtttcaccaacttgctggcaagttagggaaagatgaagagggggtgttcagagtgaaattggacctatcgcttgctgagcccaacggcccaccaacttccaacggtgaggcaaagaccgcgccagcacttacggaaaagatcttcaaattctccgagtcaggccatcgacaagataaagtcaacggtcaacgagaacccctcatccg

SEQ ID NO: 118894 - DNA, 1375 bp, Glycine max
  Clone ID: PAT_MRT3847_78370C.1
tccacgcgtccgcccacgcgtccgcccacgcgtccgtacggctgcgagaagacgacagaagggggaggatcatgcccatggaatgaagtaactaacccagtcccttgacttggctcgctagttcgattcgattcgattctcggagatgaagaagggcttgtgttggctttgagtttgtgtttgggttcatcatcggagcaattaaattcgcgagaatgcgagaatctcggtttcatcggacttgtcttgtgctccgactgcaacactctctctgagtacgtcaaggacaaagggaatagaaagaatcagagtcatgacaccggcaagaaagaaaatcgtgaagttcaatgcaacagaactaatcatctcaatatatgcactgaaaagtggaatgacatgcgttgtccagctctctttgttgggttcaatattgtccaatatgttactggtgcttgggtgtgcattcttatgtggtgggattgttaatcatgagaaggagcaagtgtttaacaaggcagctacttccgtgaactcaagattattgctaatggcagtcatgggcatactttttcctgctgttctacactacactcacagtgaggtccatgttgggaagtcagagttgtcactttcaagattcagcagctgcattatgcttgtggcttatgttgcatacctattttttcagttaaaaagtcaaagaaatctctacgtctctgtgaacgaggatgagggtcagaatggaaccaactcaaatgatgatgaatcttcagatatttctaaatgggaaacaataatctggctttcggttatgactgcttggatatcaatcctgtcagaatatttggttggcgctatagagggagcatctacggcatgggaaattccagtagcatttattagtgtcatattgcttccactagtggggaatgcagctgaacatgccagtgctataatgtttgccatgaaagataaacttgacatttccttaggagtagcaattgggtcatccacacagatatctatgtttgtgataccattttgtgttgttattggctggataacagggcaccctatggacttaaactttcaactttttgagactgcagtactatttcttactgttatagttgtcgccttcatgttacaggaaggaactgctaattacttcaaaggactaatgcttattctttgctatctgatagtggcagccagtttttatgtacatgtagattcctctcaataagttagacttgtattaatgaattgattttcgctttaaatataccttctcttgtacatttagttttctgaaatgaggctgtgaagattttgttgttcccctgatgcaaatcaaagaaattaatttgtttcc

SEQ ID NO: 118895 - DNA, 485 bp, Glycine max
  Clone ID: PAT_MRT3847_78371C.1
attcgcacgcattgcttcgcctcacaacagcagctgcagcagcaatgggctcccaaacgaggtggaaaggctccggctcttgccgctaataagaagcctgataaggtcacgactccgttgtttgagatgcgtgcgatccagttcggaatcggaggggcgtggcctacgaacatagatttgactggggtggggggggtgtcctttttttttctgattcacccgaggaagaggattctgaagctgaggttgaagggtcccacatctctcaaccattgtacccgctctctggtgactcccctgccctgcgtgctgtgcagcgcgcttgcgatgtacctggcccgaggtctcagtctctctgcaacgattagttcttgtaaggggccgcaggcctaggctcgtgtgccacctcccttctgttagaagcctctcgttgttggttattgcctcgaccttgttgctttgctccttgcgctgaggctgcgcag

SEQ ID NO: 118896 - DNA, 164 bp, Glycine max
  Clone ID: PAT_MRT3847_78372C.1
aaaaaaaagcttaaattttattgaatttcatcttggacctccgaggaggacccttcctggtttatacagcaaactttcttctaagtttctgaaaaccccttcaaaaaaaaagtgtaaaagggttttttttcaaaggcttaataggggagaaagggcctttaaaa

SEQ ID NO: 118897 - DNA, 387 bp, Glycine max
  Clone ID: PAT_MRT3847_78373C.1
agcaagaacaacaacacaaatgtaataattttctacctaagtgtcgtaagcagttgatgtagtagtatgataaaacctaagcattatatttacaaagtttaactggtttaagtcttcctccttcctgatcaaattatttatcatagccagcagtctgatcatactagcaattagaaggaaaaacttgaacactgctccagatgctgccacgtctactgataatagtttctcatttctcccattttaaagaagggaaaagaaattatgaatcttccaaacaaccaacaagttcctgtctctcaaaacactttataaacaaaacgattgtcttcactatccaatattactaatacccattttcccatttcttcaaacaatttcacagcc

SEQ ID NO: 118898 - DNA, 540 bp, Glycine max
  Clone ID: PAT_MRT3847_78374C.1
ggccgcccccctcccccccccccccccccccccccccccccccccccccccccccccccccccccccccccccccccccctctttttttttttttttttttttcaaacccgggggcccccccggaatttccggcccggtccctgggggcgccccatttttccttttagggaggcgtttaaaacctgggggaaatcatggccatatcttttccctgggaaaaattgtttccccctcaaattcccacaaaaaatacaacccgaaaccttaaagggaaaacccggggggccctaaagagggacccaccccactttatttgggtggcccccactcccccttttcaaaaagaaaaacctgtcggcccaccttttttaataaatccccccccccccgggaaaaggcgtttttctttttggcccccaggggtgtttttttttttccccaaggaaacgggcaacatttttttccccttccccccctgcccctaaaaaatttccaaaaagcgccccaccctggtttcccccaaaaagaaaaaacccttt

SEQ ID NO: 118899 - DNA, 264 bp, Glycine max
  Clone ID: PAT_MRT3847_78375C.1
gcgagactcacacatggtgcgaagatccgcgaggtgttataggcaaattaagaagaaaccataccccaagtcacggttttgacgtggtgttcctgatcccacgatcaggatttacgatgttggtatgaagacagaagggtgttgatgagtttcctttctgtgtccatctggttagttgggagaaggaatacgtttctagtgaagccctggaagctgctcgtattgcttgcaacaagtacatggccaaatttgctggaaggatgc

SEQ ID NO: 118900 - DNA, 227 bp, Glycine max
  Clone ID: PAT_MRT3847_78376C.1
aaagatttcacttttgtgcaaaaggttttgtctttggaggggtgttgtgttgtgattcctgagagatcccgtgggatttttttttcatgttaaatggtgtgtgttgagttgagtttgaagtgaaaggtttttgtttttggggtcaaagatcttacatttcaagtggggactgagggaactcacaccctctacactggttggtgaatggtttctcaccttccattttt

SEQ ID NO: 118901 - DNA, 346 bp, Glycine max
  Clone ID: PAT_MRT3847_78377C.1
tccacgaaaattggacagcaatcatagaatctcatactgatttggcttataattgaagactacaatgaaacgatcaccgacaatgcatcttcttttatctttcttcatagaatctaacgtttacgcaaacatgcttaactaactttaaaccaccacaggaccctctagaactaacgacatgcttaaatattaagtggaaagatttgctggggatgtcatagaattaatgtttattgaaaattatctctcagacagaacctagatgcctattcctaaagttgaatgttaccttagggataacagagtaaaaattttttagagatcaaatcaaaaaaattatatccta

SEQ ID NO: 118902 - DNA, 459 bp, Glycine max
  Clone ID: PAT_MRT3847_78378C.1
gacagatggatgacgcatgtgaggctaattaggggaagcgcggtctgtatatactatgagagatagaattagaattaaaatgcgtgaaggacagagataggtttggatcgtaaggaagaagacgatgaaggtcatagtgattacgaggccaggaggttccgaagtgatccaacttgtagatgtgtaagatgccctagggaagagacgactagtttctgatgggattgcacgccacttcctttaacagatgcgagacctttcatatgataggtttctaccctcactctatgggtgccagcttttatcttaggactagaatgttaacggaactgtccttttcctgggtaaaaactattacagctggacaattagcgataagtgtgtgggttcttctcgacggaggcggatatgccaaggaaagcatctgttactgaagacaagggcttcctggttcagact

SEQ ID NO: 118903 - DNA, 324 bp, Glycine max
  Clone ID: PAT_MRT3847_78379C.1
ggaagggaagtgtcaaatgaaattgaataaaccatccaatcttgaaagtaaatttcatggaataagtaaaccttacatatcagaatagccaatagattgtggcttcctttagttctattttgtgtctagctccttggtattactggtcatgtccagccaagttctgaatatttaccttctgaagaaagaaatcatgggagaaggcttatgtctttgaaagccactaagtactccttcctgagttttaataagccactgattttgagaggggatatgctctatcatatagacagacagataacaaggaaggtttagatttagact

SEQ ID NO: 118904 - DNA, 1318 bp, Glycine max
  unsure (1)..(1318): unsure at all n locations
  Clone ID: PAT_MRT3847_7837C.1
aaaaaaaacnncccctcgcccgctcaatctaacccgtcttaccctccccggccgctcgaagacggacgggtcgggacttctactccctaatggcaacttctctttcgtttctcatcatcagagacttacactccaatttccaaaccgaatcgaatttgaatttcgatttgaatttgaatttcattttcaacttccctgtgatgccttacacggtccgcgagaacctttcgatcgggaacatcggcgacgcggcggagattctcgaaaacggcgccgtccagagcgtgacacacatcctctccgtcctcagctccgcctccatctccttcttctccgaatggaaaaccactctctccatccccgccaaggagatcaccaaagtccacgcggcggacgccgccgccaaatcggcgctcccgccggagaagctcctctactctctcgagtacgccggccgcgacctcaagctcgtgcgcatggccgtgcctctcagagacaccgagaaggagactgctcgattactgcctggatcttctccggcgggagcgccgatttggcggcggcgtccgccgcgtggactttggcccacgcgtccgcgtccgcttccatcagatatattttcttcaaaaacaatggcaggcgaggtggtgaagaaggaagactctctcaacctgaaagtcactaacaagagtcatgttcaacctgaggagaaaattggaaggaaagagtaccagctggtcacttttgatcttccctacttggccttctactacaaccagaagctgctgttttacaagggtgaagattttgagggtatggtccaaaaactcaaagttggacttggtgtggtgctgaaggagtttcaccaacttgctggtaagttagggaaagatgaagagggggtgttcagagtggagtatgatgatgacatgcttggtgtggaggttgttgaagctgttgttgttgatgataatgagattggtgtggatgatctaactgtggctgaaattagtaacactaatttgaaggagctgataccttatagtggtatcttgaatttggaaggcatgcataggcctttgctggctgttcagttaacgaagctcaaagatgggcttgcaatgggcctagcattcaaccatgctgtcttggacggtactgccacctggcaattcatgacctcatgggccgagatctgcagcggttcaccctccacgtcagcaccacccttcctggaccgaaccaaggcccggaacacacgcgtgaaattggacctctcgcttcctgagccaacggcccaccaacttccaacggtgag

SEQ ID NO: 118905 - DNA, 658 bp, Glycine max
  Clone ID: PAT_MRT3847_78380C.1
gcgccagtgccattccccgccagccgcgacgccattggtacagtgtatcaaagacgagaattactgtatctcaatggcagcttcagagaaaactctaacaaacaaatgcacaacaaatgaaggttggactgtagttttaccccgtcgcagcagacaaagaagaaaagctaccaaatctggagttttggaggaaaaacaagagccatggactccaacagattctcagactgacccaagcaaagaagcaacattggtgcagaaaatggaaagatgtataaataggattgagagatctgaattctatcatactttcagggatcaaattcaaacatctgttgttgattacttcaatagagttttgggctcagagataaagatgcaaatggtcatttatggtattggcagcatcaaattgtatgagccccctcgactgcagcttagtcttgcaatattgatgagaagagatttcagttggattggaaacatagaggtatttgatcctattctttctgcaactgagtctcgggttttggaagctcttggctgttctgtcatgtccataaatgagcatgggaggcgagaggctctaaagccaacaatgttcttcatgcctcactgtgaagcagagctatataacaacctgttgcaagcaaattgg

SEQ ID NO: 118906 - DNA, 367 bp, Glycine max
  Clone ID: PAT_MRT3847_78381C.1
aaaaataatttaaccaccattgaagatgattgtttttgattgagagaaaacactactattcaaaagcgatggcatgacgcacaaagggacactgcccctaccagccatgaacaccctgtacctgaccggacattcatctatattaggaacccaaagcattgcggaccacacgatctttttgacacacactgatgacgctgctcgtaatgctacacataacagagcaaaggtaccaccctgattcaactggaatgccccaaacgagaaagagccaacgaaagtttcgacgcacaaacaagtgcgcggtggtcatagctggttgtgtggcatgaggaaatatgccagggctcgaggagaggatctggaa

SEQ ID NO: 118907 - DNA, 328 bp, Glycine max
  Clone ID: PAT_MRT3847_78382C.1
ccttcaaaatttccattaagccgccgaaggaacttaaacggggggaaaggcttcctgtttccagccacgtaaagcatcaaaggcataaaaaggaaggggggtcccacggctcaagggtttaaaaatcaaagggtttcccccaaaacccatttcgggaaaaggagacgtatcgggtttctgtccccactctgggaagggggaaaagtccattatggagggcctccgagtttcgaccaaccagccattgaaacaaatgcctcgccggccaccttggggaaaaagttcaacgccggcggctttaaaggcgttctcggaaacttccaattcc

SEQ ID NO: 118908 - DNA, 960 bp, Glycine max
  Clone ID: PAT_MRT3847_78383C.1
ccacgcgtccgagctaaacccccctctccaaatcgaaaacccctctccttttgaaaacgagacgctcctcactccaaacaggcaaagcaagagatagcgcacaacaacaatgtcgggtttctccttcggatcttcttcttcccaatcttctgcattctccttcacaaacccttcttcttcttcttcttccccgttctcacttagctccacccccgctttctcatttggatcctcctctctcttcaccacaaaccctacctccgccgcgtcttcttcgccctcccctctcactttctccttcgcttcctctgcctctcccgcacccgcatccgccgccgccgccgcttcttcaatcttcggtgccgccacttctgcctcccccttgttctcttctcccgcaacggcgccgtctggggcttcttcctcgtccgcaatgacgccgtcgtttggagcagcagcttcctccgccgcggcgtcgcctttcggtggcggaacgccctctgccaaaacgacacgcgtccgcccacgagcatcctcggtttcaactaatctgtttggagcagggtcctctgcttccactactctatttggtggagtatcctctgcttcaacgacgccgtttggcggagcgccctcagcttcattaacggcgtttggtggaacgccctcagctcctacggcgccgtttggcacagcttcctcaacgccaacaacaactacatccacgactctgttcggaggagcgtcttctgcttcagcgacgccgtttggagtagcgtcctcagcttcaacgacgccgtctggtgcagcgtcttcagcttcaacgacgccgattggtgcaccgtcgtctgcttcattaacggcgtttgctggaacgtcatcttcatcgacactattcggattcagcggaacagcttctgcaacgacgccgtttggtggtagtagtagtagtagtagtac

SEQ ID NO: 118909 - DNA, 492 bp, Glycine max
  Clone ID: PAT_MRT3847_78384C.1
aaatcggaaccgttttcactaaagaagggggccaccaatttgatttttctgcctttccggacgggaagaacctttaaaatcttttccccgacctttattttgataccaaacatctttactgagttggagaaatattaaaggggcattaaatcaaaggaaaagggggggccccccgcaagaggaatttttttaaaactaaaagggcgccatttttgataatcctttccaaaccccaatggtttttggcgccttttgaggggccaaaaacaccccccaaatgttggtcccccaaaaacattttatttagccttgacaaagttttgaaaaccctttttggaagccccttaaaccttccaatctgcagaccattcccccccaaaggggggggggcccactccggggggtattttttcccacggtgattgaccggctttgtaaagaaaataaaggttctcttgcccattaatgcgttcaaaaatttcaaaacaaaga

SEQ ID NO: 118910 - DNA, 430 bp, Glycine max
  Clone ID: PAT_MRT3847_78385C.1
gcttctgttacttacttttcattttcttcgactcacacgacttattctcacgttcgtagccaattgggatatttgtttcggcgaagtttggtacgacgcatgcctgacaggccccagccacccggaagcgacccatagttttgtttggctctttccttcgttggaccgaactacttcacgatcgctttgtccgcacagttctcacgagtcacgatacactagacgaacaccacgatgctctcattcagcatactggccctcctggcgctgccgctctttggctcagtcattgcggaagaggccgtcgttccgaccaagagcgttgaccaaaccaactccatctactccaacgcacaagaagcatttccggacctgctcaatgccttacccgtggaatctctacacgcagccctaagcggtcttcaggact

SEQ ID NO: 118911 - DNA, 1778 bp, Glycine max
  Clone ID: PAT_MRT3847_78386C.1
ctcgcgtccggtcggaacccctgctgagagaaagaaggcaagtcgctccgacctcgagccacggcaacgttgagcatagagtgacagagtgaagaggttccgtcatggcccccagaatccttctatgcggcgacgttttagggcgcctcaaccagctcttcaagcgcgtctcatcggtgaacaaatctgcaggtccattcgacgcgctcttgtgcgtgggtcagttcttccctgactcaccggagcagctcgaggacttcacgaaatacatcgaaggtggatctcactttcctcttccgacgtacttcatcggcgactacggcgtcgccgcccccaaacttctcttgcaagcttccaaggactccgccaaccaaggcttcaagatggacggcttcaaggtttgccacaacttgtattggctgaaaggcagtggcaaattccctctctttgggttatccgtggcctatttatctggtaggaagtcatccagtggtcagcagtttggaaattacactgaagatgatgttgatgcattacgcgcaattgccgaggaacctggagttgttgatttgttcttgactaacgaatggccgaatggggtcaccaatagagcagctgattcggacattcctgctggactctctgatggcagtgattcaactgtatcggaattagtacaagagatcaaaccacgttatcacattgcaggcaccaaaggcatttactatgcccgcgaaccatattccaatgttgatgctgtgcatgtcactcgtttcatagggcttgcgtctgttggaaatagagataagcagaaatttattcatgcaatctcccccacacccgcatccaccatgtcttcaactgagattgccatgaaaaccacaaataccaccttatcgccatacacattcaaggagaaaagaacttctccaatggattcagcaaagagatccagtgattctatctctgatcctcaatattggagatatgatgttgctcaaaagcgacaaaaacatgaagctggacatggtgataaattgtgtttcaaatttgtttcttctggctcttgtccacgaggagagaagtgcaattttcaacatgatacagatgcaagggagcagtgtatgagaggtgtttgttttgattttttgaataagggaaaatgtgaaaggggtccagattgcaactttaagcacagcttgcaggatgagggcaacaggcttccttctaggaggcctggatctggcaggtcaaaggaatgttggttttgcttgtcaagcccaaatgtggagtcacatttaatcataagcattggggaaaattactacttggcactggctaaaggtccacttgttgaagaccatgtactgattataccagtcgagcatatgcctagtaccttatccatgtcttctgaatctgaaatagagctctctaggtttcagaacagtctcaagagttactgcaagagccaagagaaggaagtcatcttttttgagtgggtctccgtacgtggcactcatgccaatattcaggccattcccattccatcttccaaagcaattatggccgagaaaattttcaatttagctgcacagaagttgggatttgaatttgtgactaagaaatttgatagcatttctgaaggaaggaagtttttgaaggcgcaaattgatggggattcaagcttgttctatgctcaaatccccagaggcacaattctgctgcatcatgttgaagagaaagagaaaattccttgtcaatttggtcgtgaggtc

SEQ ID NO: 118912 - DNA, 486 bp, Glycine max
  Clone ID: PAT_MRT3847_78387C.1
ggaaagccaattcttgttctgttttatctttggtacttttaatagaagaaaggaatttaaacaaagaggataatatgcaagtccaggacgagatatcccttgaggaatacaaaaatttaaagacaatacactcagtttaagttatgcaaaaactccctcctctgaaataacaataaaagaaagagttgtcaatagccattaagcttctagtgaaggctgaatttctgtatgcatgcatggatttcagaatgtttgtgaataatgggttaattcagtttacagctttattattaataattttggttcttcaaatagaagaaaaaaatttgaagagaatattgcacaaaactaaagatgagatgtccttaaaagaattgaaggttataatcaattgaaaagtgcttgcaccactaaagctatgaaaattctttgtgtagggcccattaattatgtgtttgtaccattctcttgttacatgagaagatc

SEQ ID NO: 118913 - DNA, 771 bp, Glycine max
  unsure (1)..(771): unsure at all n locations
  Clone ID: PAT_MRT3847_78388C.1
atcgcgcacccgcgaaccagaaatttcaattccctccattttcccctcaaattcaaatcccctaaagtctcccttatatacattacaaacacacacctcaattcaatttccatggcgaacttcgaagtgccctcattttccctaggcctcgacgatacgcccccccattccccaatccatccacctctttctcccgatcttcacgtctccgactccgactccgactccgatcccgaatcccgacccgacccgcctcgccccctcctcaaacgcctccgccgcgggcccccgccaccgtgtctcgaccccgatgccgacgccgacgatgacatcgaggatttctcctcgcaagaagatcccgatcaagggcatgcggttccatcggcgtggaatcgaaatcattctgtgtgtagcagctcgaaagtttcgttgaatagaagtggggttttgacccctcattcgtgtagcaactctttcagggataggaaaagaaaggaactttctaatgatgttccggcttcagccaggttagagacagggaagagtggcttgatgtttcccaagttaaccactagtcctctccgaaggtttcaattgattgattcggactccgatgatgctgatgttggtgttggtgctggtactagtgatgccaataaagttaaccctaatagtcatttggaacaagaaaaaaaaacatctgctgacgaaaacataaatgaaggatctgtggaaaggatttttcgccggtgaaaaatgtttnctgttaat

SEQ ID NO: 118914 - DNA, 290 bp, Glycine max
  unsure (1)..(290): unsure at all n locations
  Clone ID: PAT_MRT3847_78389C.1
aatgggctagggtggccccatttcgccttaccaaccccagggaaactccgaatacaggcctagatcgtttgtacagacagacttttagggtgctaagatgaaccttgcttgagtcatcaaagcccttctgactcggcctggcccggtcgccctacgcgactggcgcttcaaaaagagttgacttgctttactcgttgagttagggtcgcgagagagnaaagcgaccgccctgccattagtcggaagttggtatagtcgcgactgtggcatagtcaacaagttgaaacttc

SEQ ID NO: 118915 - DNA, 3424 bp, Glycine max
  unsure (1)..(3424): unsure at all n locations
  Clone ID: PAT_MRT3847_7838C.1
gactctctttcgtttctcatcagagacttacacagtccaatttccaaaccgaatcgagtttaaatttgaatttcattttcaacttccctgtgatgccttacacggtccgagagaacctctcgatcgggaacatcggcgacgcggcggagattctcgaaaacggcgccgctcagagcgtgacgcacatcctctccgtcctcagctccgcctctatctccttcttctccgaatggaaaaccactctctccatccccgccatggagatcaccaaagtccacgtggcggacgccgccgccaaatcggctctcccgccggagaagctcctctactcgctcgagtacgccggccgcgacctcaagctcgtgcgcatggccgtgcctctcagagacaccgagaaagatgacttgctcgattacttggaagtctgcatcgatttcattgatcgcggtcggaaggaaggttccgttctcgttcactgtttcgccggagtttccagaagtgcggcggttattacggcgtatttgatgagaaccgaacgtctatctgtagaagatgcccttgaatcgttgaggcagagctgtgagtgggtttgtcccaatgatggttttttagagcagttgaaaatgttcgaggggatgggttttaaggttgatcactccagccctatatacaagcgctttcgtctaaaattactatatgagaatcatttctcagggttgaggatagacagttctaaacttctcgagccgaatcggctcgagcggctcgaggtgctatggcacataattgagagacagtaatgatttgttataacactaccgatgtgagaaaatatagatgagaatcatttctcagggttgaggatagacagttctaaacttggtgcagatcctggtatgcctgttgaagtttcttcagaggcagaagaaactactaaagtaggaaataatcgtaggcctacatatcgctgtaagaagtgtcgacgacttgttgcattgcaagaacatgtcatagaccatgttcctggtgagggtgagagagcctttgagttccacaaacggagaggtggcaaccctttcaacaaatctgatgaatttgagtgttcatccatatttattgagcctctacggtggatgaaagctgttgaggaaggtgcaatggagggaaaactgtcctgtgcacattgtgatgcccgtttgggatacttcaattggtcaggcatacaatgcagctgtggaagctggatcactccagcttttcaactccacanaggtccggaattcccggctcgacccacgcgtccgttcgtttcccatcagagtcatgccgacttgagtttcaaaaaaacgtctctctctattttgaatccacatcaaacgaacactcagttcataatttcttccaacaaattatatttttcttacaaaaaaaatggcaggtgaggtggtgaagaaggaagagtctctcaacctgaaagtcactaacaagagccatgttcaatcagaggagaaaattggaagaaaagagtaccaattggtcacttttgatcttccctacttggccttttactacaaccagaagctcttgttttacaagggtgaagatttcgagggcatggtccaaaaactcaaagttggacttggagtggtgctgaaggagttccaccaacttgctggcaagttagggaaagatgaagagggggtgttcagagtggagtatgatgatgacatgcttggtgtggaggttgttgaagctgttgtagctgatgatgaaattggtgtggatgatctaactgtggctgaaattagtaacactaatttgaaggagctgataccttatagtggtatcttgaatttggaaggcatgcataggcctttgctggctgttcagttaacgaagctcaaagatgggctcgcaatgggcctagcgttcaaccatgctgtcttggacgggactgccacgtgggcagttcatgacctcatgggccgagatctgcagcggttcaccttccacgtcagcaccacccttcctggaccgaaccaaggcccggaacacacgcgtgaaattggacctttcgctaccagagcccaacggcccaccaacttccaacggtgaggcaaagcccgcgccagcacttagggaaaatatcttcaaattctctgagtcagccatcgacaagatcaagtcaacggtcaacgagaaccctccatccgatggctcaaaaattctaccaacatttcaggctctttcctcccacgtttggcgccatgtaagccatgcacgtaacttgaagccggaggattataccgtgttcactgtctttgccgattgccggaagcgggtggacccgccaatgccggagacttatttcggaaacttaattcaagctatttttaccgttacagcggttgggctattaaccgcccatccgccacaatttggggcttcattggtccagaaagccattgaagcccacaatgctaagactattgaggaacgtaacaaggagtgggaaagtgcacccaaaatttttgaattcaaagatgctggggtgaattgtgtggctgtgggaagctccccaaggtttaaggtttatgacattgattttgggtgggggaagccagagaatgtgaggagtgggactaataacaagtttgatgggatgatttatttgtatccggggaaaagtggaggaaggagcattgatgtggaactaacattggagcctgaggctatggggaagttggagcaagacaaggattttcttttggaagcataaaattgctagagtaagtgcaataaaaaaaatggctagaaaaagtacgttgagcaaatttggaagtagtactgctcagattgttgaaggggtcgacttcaatgtccaattatgaattctgatgtgattcatggatgcaatttaatttaaagttgtgctgttttaggattttatatattttgtggttctacgcttgattgattttgaacctactaatgtctgttccatatgtatggtcaatgattgtagttcatgacaagtgaaaggaattattgtgagttttaattatagtaatatataagttatatatttataaaaagaaattatattattatcaaaaaaaaaatttcttcgctgtgaagaaattggttacaagttgaaacagacacaagaatataaatccctgatggagggttcgttgacttgatcttgtcggaagagaatttgaagatcttttccctcgagcccgcttactgtgtgctgttttaggattttatatatgttgtgggtctacgtttgattgaaaaaaaaaaaaaaaaaaaaaaaaaaaagggggcctagagctacaaatttaagaacctttgatgaggagtaaaagcgcgcttggcgtaaacatggacatagcgtggctcctgggggaaataggta

SEQ ID NO: 118916 - DNA, 1815 bp, Glycine max
  unsure (1)..(1815): unsure at all n locations
  Clone ID: PAT_MRT3847_78390C.1
caaagcacgacttagcttaggaaataagagagtctggaataaccggtagccaaacaggtcatagccgaagttggctggtggttctacttgtttctgcaaagcacaagagcaaaaccctacttgaaccctttctctctctcaggtcactgctcacaaacatcacaactatgtccttgggaattcttcgatcccgagcgatttcattggcatcgaagcgattcctctgcaccaatgccgcttccgcttcccctcctcttccccctcctccttccgccgcctctcccagccgctggagcttcctcaaatacgccctcgtcggcgctctcaccggaggcactgtctttgccggttacgcctcttacgcttacagcttggacgaaatagaacagaaaacgaggtcgctccgtgaatcggccaagtacactgctggtgatggagtcactgctcttgataaatttcaaggtttgctatactcaactgcaatgacagttcctgctaaagcagtagagctttatttggatgcaagaagggtaattgaagaacaagttaagagttatactgaaccatacacagacaagctccttcctgatttgcttcctcaggagcaacatgtgtttacacttgttcttgatctcaatgagacattgattcactatatatggacgcgagatacaggttggcagacttttaaaagacctggagttgatgccttcttggaacatttagctcagttctatgaaatagtggtttacacagatgaacaaaatatgtttgtagaccctgttatagaaaggctggatactaagcattgcattagatacaggctatcaaggccggctactaagtatcaggatgggaaacacttcagagacctctcaaaactaaacagaaatccaggaaaagttctttatttaagtggccatgctttggaaagttgcctacaacctgagaactgtctccctattaaggcttggcagcagcaagatatagatgacacagctcttttggattttataccatttcttgagtttgttgcccgtagtagtccacctgatataagaccagtgctagcctcttaccaaggatgtgatattccaagtgagttcatcaggcgttccaaagagcatcaaaggagaatgcaagaacaaaagaattgtggtcgcttatggaaatgagattcagtttcattgcaagttgaaatgtaatgtttttttttagttcaaggaaaggagattgtcagtttatatacgacctgtgcgatcatcttaccaaagatgtgatattccaagtgagttcatcaggcgttccaaggaatatcaaagatgaatgtaataatttaagaatcctttgcgattctggaaatgaagattctttttcattgcaagctgataacaaatgttttttgttaaggcttgattatttgcttgtctgtttcattacaagttgatcagtcagttcatccaagattttgaagtcactgcaagttgacaagtgattgaattaaatagagaaaatgtagattttgttttacgcaagtcttgcaactcatgtcttgaaccattttttttctttttgcctattgtaattctgttgctggaaagcacttattaattttggggatggagttctcaatgctagatgtttcttgcaaggtgatttaaccttgagtacatctctgcgcggagggggctacgccgagccgtggaactggcccgcggttttaacaaaccntcgggaacgggagaaagcccgtggggggttacccaaacgttaattacggcctggacgccacgatcccaggtttgtggcagngtt

SEQ ID NO: 118917 - DNA, 419 bp, Glycine max
  Clone ID: PAT_MRT3847_78391C.1
gaaatccaggaaaagttctttatttaagtggccatgctttggaaagttgcctacaacccgagaactgtctccctattaaggcttggcagcagcaagatatagatgacacagctcttttggattttataccatttcttgagtgtaagcattccttaagatatattgaagaatgagttcatgtttgaattattgtttttattttcacatcactccttgagtgtaagtccattcccttaagatgtgtttataaatgaattcatgtttgaagttactgtggtgactttttatgcttgtaaaagttgcactaccttctctgttatctatttgcagttgttgcccgtagtagtccacctgatataagaccagtgctagcctcttaccaaggatgtgatattccaagtgagttcatcaagcgttcc

SEQ ID NO: 118918 - DNA, 605 bp, Glycine max
  unsure (1)..(605): unsure at all n locations
  Clone ID: PAT_MRT3847_78392C.1
gggtgttaagcattaaaattaaaattttgatattgggtacacttgatcaaagttttgaaacacatttggcagcttgcttacacaattatactgcccttgagaaaccaataacctaactttaatgggactctttcttcttgtccnantttnnnccttgtggggattactattttcaaagctctctttatcacttcaaaatgtaccttccccccccccgaaaatgggtgttccaaaagtaattttctccctcaatccctttcggggcaaaataaaacaaaatctgtctcccccccacccttttttgctgcgcttctcaacttctctgtggtcctttcctccaatccccctttttanaaccaatcntgcttttttaggggcccccccccctccccatcttaatctttctctttntntttaaaaaattttccttttgaaaaccgcccccctgccctttttgccctccttcattcccctttttcccttcccctttctnttggacccatattcttttttagctcttccggtttcttcacccctccatcttttttctcctctaacttgnccttccttccttctttttttcttcccttttcctttgaaatctt

SEQ ID NO: 118919 - DNA, 185 bp, Glycine max
  Clone ID: PAT_MRT3847_78393C.1
catctttccaccttctttaaaaaatggtgttagagagtggcatactttgtggtttcctcttttagcttctaaaagaggaaacaaaaaagtatgccaatttctaacacgatctttccaccttctttaaaaaatgcatgtgttccattctaaattaaagcctcaccatatttgagaacccactttga

SEQ ID NO: 118920 - DNA, 3455 bp, Glycine max
  unsure (1)..(3455): unsure at all n locations
  Clone ID: PAT_MRT3847_78394C.1
cccacgcgtccgcccacgcgtccgataaaaacagaggtcctcgcagccattttctttgacactctccaaacatgttcgccacctttcgactccttcttcttctctcattcctctcactactcaccagcgcccaatccgaagaccagcgtcaaatccttctgaacctaaaatccaccctccacaattcaaattccaaactcttccactcatggaacgccaccaattccgtttgcaccttcctcggagtcacttgcaactccctcaattccgtcacggaaatcaacctctccaaccaaactctctccggtgttctcccgttcgactcgctctgcaaacttccgtcgcttcaaaaactcgtgttcggttacaactacttaaacgggaacgtttcagaggacattagaaactgcgtcaacttgtactacttggacttgggaaacaatcttttctccgttccgagtggtgttgatggaactagtaactgggaaaaggccaactgaaccagaatttggggaaaataaggacatagtgagctgggttcataacaaggcaaggagcaaagagggacttaggagtgcggtggattcgagaattccggagatgtatacagaggaagcttgcaaggtgttgagaacagcagtgctgtgcacggggactcttccggctttgagaccaaccatgagagctgtggttcaaaagcttgaggatgccgagccttgtaaattggttgggattgttattaccaaagatgacagtgaaaagaaaataggagtcaacgacaagtaatgtattgtattccatcctccatagttggttacaaccggactgaagattatggatcatcatgaagttgaaggggaaccaaccacctccacgagttatctataattgatgtaaattttcccggaaagagggaacactgtaaaatattagtcttggcttctttaatgtctattttaaagtggaagacttgtgtagtaaaagggtctgcatctagtactcccaataaaagaaaaaaaagagaagcaaattccttcttccttaatttactaatgaaaagattcattacatggacgtgtcgtagaatttcttgacggggacgattccgccggatatgtgtaaaaagggaactatgtcggcgctgctcgtgcttcagaacaagctctccggcgagattccggccacctacggggactgtttgagtttgaaacgattcagagtcagcaacaactcgctctccggtgccgtccctctttcaatttggggattgccaaacgtggaaataatcgatattgagatgaatcagttatcaggttcgattagttcggatatcaaaaccgcgaaagcactcggttcaatattcgccaggcagaaccggttgtccggtgaaataccagaagaaatctcaatggcgacgtcgttagtgattgtggacctgagcgagaatcaaatctttgggaacattccagagggaatcggcgagcttaaacaactaggtagccttcatttacagagcaacaagttatcaggttcgataccggaatctctaggttcctgtaattccctcaacgacgttgacctatctcgaaattcattctctggagaaatcccttcctcgttgggttctttccccgctttaaattctctgaatctttcagagaacaaactctcgggtgaaatcccaaagagtttagctttcctcagattgagcctctttgacttatcgtataaccggttaaccggtccaattccacaggctctaaccctagaagcttacaacggaagcctctcgggaaaccctggtttatgcagcgtcgacgcgattaactcgttcccgcgttgccctgcttcctctggcatgtcgaaggacatgcgcgcgctcataatatgcttcgcggtggcttcgattttgttgctctcgtgtttgggcgtttacttgcaactcaagaggaggaaggaagatgcggagaaatacggagagcgttcgctgaaggaagaaacgtgggacgtgaaatcgttccacgtgttgagtttctcggagggagagattctagattccatcaagcaggagaatctcataggaaaaggaggctcggggaacgtgtacagggtcactctttccaatgggaaagaactcgcggtgaagcatatttggaacaccgatgtccctgcaaggagaaagaactcgtggagtagcacccccatgcttgggaacaagcacggtggtggtgggaagtcaaaggagtttgacgcggaggttcaggctttgagctccataaggcacgtgaatgttgtaaagcttttttgcagcataaccagcgaggattcgagcttgttggtgtacgagtatttgcccaatgggagcttgtgggaccggcttcacacgagtaggaagatggagcttgattgggaaaccaggtatgaaatcgcggttggggcagcaaaagggttggagtatttgcatcatgggtgtgagaagcctgtgattcatagagatgttaagtccagtaatattttgttggatgagtttttgaaacctatgttggatgagtttttgaaacctaggattgccgatttcgggcttgctaagcttgtccaagccaacgttggcaaggattcctccactcgtgtcattgccggaacccacggctacattgctcctgaatatggctacacataaagttttagtgtatattgtgatgtgtacagctttggggtggtgttgatggagttagtaactgggaaaaggccaattgaaccggagtttggggaaaataaggacataatgagaagagtgatgtgtacagctttggagtggtgttgatggaactagtaactgggaaaaggccaactgaaccagaatttggggaaaataaggacatagtgagctgggttcataacaaggcaaggagcaaagagggagttaggagtgcggtggattcgagaattccggagatgtatacagaggaagcttgcaaggtgttgagaacagaagttttgtgcacggggactctttgagctttgagaccaaccatgagacatgtggtttaaaagattgaggatgccgagcctttgtaaattggttgggattgttattaccaaagatgacagtgaaaagaaaataggagtcaacgacaagtaatgtattgtattccatcctccatagttggttacaaccggactgaagattatggatcatcatgaagttgaaggggaaccaaccacctccacgagttatctataattgatgtaaattttcccggaaagagggaacactgtaaaatattagtcttggcttctttaatgtctattttaaagtgaaaaaatagggtagtaaaagggtctgcatctagtactcccaataaaagaaaaaaaagagaagcaaattccttcttcctttaagggggggggggggggggggnnnnnnnnnnnnnnnnnnnnnnnnnnnnnnnnnn

SEQ ID NO: 118921 - DNA, 3224 bp, Glycine max
  Clone ID: PAT_MRT3847_78395C.1
ccacgcgtccggttcgccgccttacaactcctcctccttcttctttcactcttctcactactcaccagcgcccaatccgaggaccagcgtcaaatccttctgaacctaaaatcctccctccagaattcaaattccaaactccttcactcatggaacgccacgaattccgtttgcaccttccacggagtcacttgcaactccctcaattccgtcaccgaaatcaacctctcgaaccaaactctctccggtgttctccccttcgactcactctgcaaacttccgtccctccaaaaactcgtgttcggtttcaacaacttaaacggcaacgtttcagaggacattagaaactgcgtcaacttgcgctacttggacttgggaaacaatcttttctccggtcccttccccgatatatctcctctcaaacaattgcagtacctgtttttaaacagaagtggattttcgggaacttttccgtggcagtcgctgttgaacatgacgggtctgttacagttaagtgtcggagataaccctttcgacttaacgccgtttcccaaagaggttgttagcctcaagaatctcaattggctctatctatcgaactgcaccctcagagggaagcttccggtaggactgggcaacctcacggagctcaccgaattggaattctccgacaatttcctcaccggcgattttcccgcggagattgtgaaccttcggaagctatggcagctggtgttcttcaacaactccttcacaggaaagattccaattgggttgagaaacctcacgagacttgagtttttggatgggtcaatgaataagctggaaggtgatttgtctgaattgaagtacttgaccaatcttgtttctctgcaattctttgagaacaatttgtcgggggagattccggttgagataggcgagttcaaacgcctcgaggctctgtctttgtacaggaacagattgataggtcctattcctcagaaggttggttcctgggcagagtttgcttacatcgacgtgtcggagaatttcttgacggggacgattccgccggatatgtgtaaaaagggagccatgtgggcgcttctcgtgcttcaaaacaagctctccggcgagattccagccacctacggcgactgtttgagtttgaaacggttcagagtcagcaacaactcgctctccggcgccgtccctgcctcagtatggggacttccaaacgtggaaataatagatattgagctgaatcagttatcaggttcggttagttggaatataaaaaacgcgaaaacactggcttcaatattcgccaggcagaatcggttgtccggtgaaataccagaagaaatctcaaaagcgacgtcgttggtgaatgtggacctgagcgagaatcaaatctcggggaacattccagaaggaatcggcgagctaaaacaactaggtagccttcatttacagagcaacaagttatcaggttcgataccggaatctctgggttcctgtaattccctcaacgacgttgacctatcgcgaaattcactctccggagaaatcccttcctccctgggttctttccccgctttaaattcactgaatctttcagcaaacaaactctccggtgaaatccccaagagtttagctttcctcagattgagcctatttgatttatcatataaccggttaaccggtccaattccacaagctctaaccctcgaagcttacaacggaagcctctcgggaaaccctggtttatgcagcgtcgacgcgaataactccttcccgcgttgccctgcttcctctggcatgtcgaaggacatgcgcgcgctcataatatgcttcgtggtggcgtcgattttgctgctctcgtgtttgggcgtttacctgcaactcaagaggaggaaggaggagggagagaaatacggggagcgttcactgaagaaagaaacgtgggacgtgaaatcgttccacgtgttgagtttctcggagggggagattctagattccatcaagcaggagaatctcataggaaaaggaggttccgggaacgtgtacagggtcacgctttccaacgggaaagaactcgcggtgaagcatatttggaacaccgatgtccccgccaggagaaagtcgtcgtggagcagcactcccatgcttgggaataagttcgctgctgggaagtcaaaggagtttgacgcggaggttcaggccttgagctccataaggcacgtaaatgtcgtgaagctttattgcagcataaccagcgaggattcaagcttgttggtgtacgagtatttgcccaatgggagcttgtgggaccggcttcacacgagtaggaagatggagcttgattgggaaaccaggtatgaaatcgctgttggggcagcgaaagggttggagtatttgcatcatgggtgtgagaggcccgtcattcatagagatgttaagtctagtaacatattgttggatgagtttttgaaacctaggattgccgatttcgggcttgctaagcttgtccaagccaacgttggcaaggattcctccactcgtgtcattgccggaacccacggctacattgctcctgaatatggctacacatacaaggtgaacgagaagagtgatgtgtacagctttggggtggtgttgatggagttagtaactgggaaaaggccaattgaaccggagtttggggaaaataaggacatagtgagctgggttcataacaaggcacgaagcaaagaggggcttaggagtgcggtggattcgagaattccggagatgtatacagaggaaacttgtaaggtgttgagaactgcagttttgtgcacggggactcttccagctttgagaccaaccatgagagctgtggttcaaaaacttgaggatgctgagccttgtaaattggttgggattgttattagcaaagacggcagtgaaaagaaaataggagtcaatgacaagtaatgtattgtattctatactccatagtttttgacaccagattgaaggttatggatcatgaaatggaaccaaccatttctacgagttagctagaattaatgtaaattttgctggaaagagggaacacggtaaaatattagtcatggcttctttaatgtgtattttgaagtgagaagacagtgtagtaaaagactataagggtctccatcaataaaaggaaaaaaaaaaaaaagaagcaaattccttcttccttaatttactaattt

SEQ ID NO: 118922 - DNA, 455 bp, Glycine max
  unsure (1)..(455): unsure at all n locations
  Clone ID: PAT_MRT3847_78396C.1
aatttatcgagtctctatcggctagtgagattgaactctctgaggattacacctgtgtgatttcccatggttctaatccaaaaacaacccatattttctgtgactgcattttggaaagtcatgttaatgattctgaaagacattataaggctgaagaggagggaacgggattgccccttttcagtgttaacattttgcatactccaagccaatatccttctcatgacttcttaagtgtctgtcaccattgcaacaagaagttggaagatgggaaagatatttacatatatagaggtgaaaaatcattttgcagtttgagctgccgcgaaatagagatcacgaacgatgaggagcaagagaaatccaattcatcacctgaaaactctccaaagtggggacttggagggaaatttttttaaacaggcacccncagagctacatagaggcattcctgc

SEQ ID NO: 118923 - DNA, 1108 bp, Glycine max
  Clone ID: PAT_MRT3847_78397C.1
gcttttttgcagcataaccagcgaggattcgagcttgttggtgtacgagtatttgcccaatgggagcttgtgggaccggcttcacacgagtaggaagatggagcttgattgggaaaccaggtatgaaatcgcggttggggcagcaaaagggttggagtatttgcatcatgggtgtgagaagcctgtgattcatagagatgttaagtccagtaatattttgttggatgagtttttgaaacctaggattgcagattttggacttgctaaggttattcaggccaacgttgtcaaggattcctccactcatgtcattgccggaacccacggatacattgctcctgaatatggctacacgtacaaagtgaatgagaagagtgatgtgtacagctttggagtggtgttgatggaactagtaactgggaaaaggccaactgaaccagaatttggggaaaataaggacatagtgagctgggttcataacaaggcaaggagcaaagagggacttaggagtgcggtggattcgagaattccggagatgtatacagaggaagcttgcaaggtgttgagaacagcagtgctgtgcacggggactcttccggctttgagaccaaccatgagagctgtggttcaaaagcttgaggatgccgagccttgtaaattggttgggattgttattaccaaagatgacagtgaaaagaaaataggagtcaacgacaagtaatgtattgtattccatcctccatagttggttacaaccggactgaagattatggatcatcatgaagttgaaggggaaccaaccacctccacgagttatctataattgatgtaaattttcccggaaagagggaacactgtaaaatattagtcttggcttctttaatgtctattttaaagtggaagacttgtgtagtaaaagggtctgcatctagtactcccaataaaagaaaaaaaagagaagcaaattccttcttccttaatttactaattaaatgaaactggtagtgtccaaataattggttttaatttttatcctatcccagtcagtgtatcataaattggtatttataacatgacagtgactagtgtgcaaaaaaaaagcggccgc

SEQ ID NO: 118924 - DNA, 270 bp, Glycine max
  Clone ID: PAT_MRT3847_78398C.1
gccgcgccaccacaacctcttcaacgtcggcgacgacgcgatttccgacgttcttcttcttctgctaggttatagttacgcacacttaaggggaatcagaaaaagagcagggcatgatggatcaatgcttggttgtgcacatcccggacaagcagccgcatgaccttcaccaccaacccactgagagtgtttttgcttcagccatcgaccctaagcatgccacaaattgtaaggcgtttgaatcagatagcaccacttgaagatctccgt

SEQ ID NO: 118925 - DNA, 1019 bp, Glycine max
  unsure (1)..(1019): unsure at all n locations
  Clone ID: PAT_MRT3847_78399C.1
aatgaatttatcgagtctctatcggctagtgagattgaactctctgaggattacacctgtgtgatttcccatggttctaatccaaaaacaacccatattttctgagactgcattttggaaagtcatgttaatgattctgaaagacattataaggctgaagaggagggaacgggattgccccttttcagtgttaacattttgcatactccaagccaatatccttctcatgacttcttaagtgtctgtcaccattgcaacaagaagttggaagatgggaaagatatttacatatatgnttgtgttagcgagtctccaccggcctgcgcggctcaactctctgacgctctctcccgtgtgattgcccctggttcgaattcccctccatgcactatcttctctcccaacgttctcgagcgccgcgctaggaaatccgccagaggtgaaaaatcattttgcagtttgagttgccgcgaaatagagatcatgatggatgagcaagagaaatccaattcatcaccagaaaactctccaaagtgtggatttggaggggaagtttttgaaacaggcactcccatagctacatagagggattcctgccattggcctgagtccatgaagcgagtagacgtgtctgatcatctgttctaaaagagctgtttttgtttgcatctattggcagccatggatgattgttttgtacatcactgcgtttgctatttgtttttcagctttcatggtctcggtggaagatggctctccacagctactagatttggtttccatataactacataaatgtatggtatgacattatagaataggtttttaagcttatttttttattcaaaatatcaagggtttaagcccatttttcttggctttcccccttgttgaagttgctttgcattatctctatattatgtcaagaatcagtgtatgccaatccaaacaagtttttgacttgaaggttatactactattgtagtgcatatgaaactattttctttgttttggattgt

SEQ ID NO: 118926 - DNA, 428 bp, Glycine max
  unsure (1)..(428): unsure at all n locations
  Clone ID: PAT_MRT3847_7839C.1
tttcgagattntgaaagaaacgaatcctgttgcgtgtcactcccactctcactcaatcagggggccggtggtcttcaattttagggttttctcacagactaaaatccttattcttgggcaccaaagttacgagaccctcccatgctgggtcttggggcaccggctatcctaaccggttttcaacggagctcgaagggtgggtgccatcgtgtggtttgaccaaatctcccgatgagcggtgagtgatagccaccacatgctggttattgctattcatgaagagctgctgcttatgccttcagcaacattgatccatcaaacattacacgtgcgttcctgcgctgtcctcctgaccactattacactccaaaatgtgctctttcgactgcaactgcctacacgacacccataacgcacctgcctattga

SEQ ID NO: 118927 - DNA, 355 bp, Glycine max
  Clone ID: PAT_MRT3847_783C.1
ggagcaaaaaaagcacagagctttgactatacttccctgttaaaccaaaaaatcaaaaaaagcggtccccaggaggacaatgttagttacatggttgtaaccaaaggcatcttctgttagctggaccgtggccctggcctttgggctaagacttatgctttgttgaaaggtttaaacaaattgaaggagggaattcctggtcttgcaattggcggacaaagaacccatttgccccaggcctctactaccgggggcccctgagagagaggatgattttcttgaaaggtcacctggggagagttttttttcatgcatagaattattttgtctccaaactttagattaccggcatttg

SEQ ID NO: 118928 - DNA, 176 bp, Glycine max
  Clone ID: PAT_MRT3847_78400C.1
tggaaattcttgatccagaattcccaaaccaattttaagggacccacttattagggaaaggattggttgattaaaaattttttttgaccatttttttaattaacccatgtaatattggcttaacttcccttgggtaacattaaatgtacctggtcccttaaggcttaccaagggga

SEQ ID NO: 118929 - DNA, 740 bp, Glycine max
  unsure (1)..(740): unsure at all n locations
  Clone ID: PAT_MRT3847_78401C.1
tcgagggcgggcggacacctaagtgctatatataactcctagagagataaagagaaaggagagagaagtacatatacgatagtagtaggtgatagtatggtttaataggaagagagataatgagaaatgttaggtgttaatgaagtgttcacttatcattactcaaatggttactcttcccttactacaaaaattcttatttaggcatgatttatcatacacagtcaaattaattgttgatatatgaagtgtatggaccacattaaaatacacgaacatatctctaatgaacatataaactataaactatttatttgagcatctcaagtagattgtgtgtaacctaagaatttctcctcattcatttatcaactagttaatttgtaatatacttatttcttggctgatgagatctaatatgtgtcttactataattggactcgtgtacaaagcgagaaaagcaagctcctcatcgactttgtggggttgcatgtgtagcttctagcaactctgcttctaggagaggcaaaagaagaataaaatggaccaaagatctgcatgagccatttatgatgattgttaatangccttggtggtcccgaaagtaagttaacgaagtattagttacacttaaaacataactacaaagaaatctcttgttaccccatacttgatttattcattgttaatcgcagaggcaaagcctaaagcttactagatatgatgaaatcagatttgct

SEQ ID NO: 118930 - DNA, 519 bp, Glycine max
  Clone ID: PAT_MRT3847_78402C.1
aagaatattataaatctccgcgcctgcaacccttgcaatttttggcactggtttgcgttgtttcgcggcgttgttaacttcccttcactccaaacaccttccatctccaaacatgggtcggaaacacgacgccgttttggtcagcgaaccagtcgccgaagaagttccctacagccccgagctcgattccgagaagaagaagaagaagaaaaaaaggaagaacaagaacaaagacaagcaccaaactgatagcagcaccaaacgaaagctcgacgaacaactagaccctcaaaacggcaccgaatcgaataagaagaaaaagaagcaccacgagtccaaagagaacgccgagaaaccaacggcaacaacaacagtgacaacggtgctaatcgcgacgaaacggtggcggacgggtccgtggtggtcaccgggttgaatgcggcagacgcgaaatatgcggcggtgaagagcttcgcggattcggggctggcggagaacggctgggagtgctgcaagggt

SEQ ID NO: 118931 - DNA, 618 bp, Glycine max
  Clone ID: PAT_MRT3847_78403C.1
ctctcttggttttatggatatctttggaggttacttttgtttacctttgcagtattttccttgtgttatgccgtgttttctttctgtctacaaaaaaaccgtgttctcctcttttgtaatccttctatatattataaattatatcaatcaataaaagcaagcatgataaagtatagtttacaggtttatcccaaacaaatgcaagtgcatatataaacatctggaattgcagttcagctctatgactagacatgagaaggagtaaggctccaccaactaaaagaatagcacgaactaatatactgaaaactataaaagcatctaagtaggctatgtatgctacaaaaagccagaattatccaaaaatggaaggtcgcattatgttgtaacttgcacatacttgcaaagatcataaaaagtaaatggaaaatgacctgaataccaatttaatgttgtaggccatgcaactctgatctcacctcccacatttgtgttagatattgagcaatgtttgcaaagattcaaacacatgaacactgaatagatatcactgcctcttgctacaatttctcataagtaggctggatgaattttttggacttattattgaccaaatat

SEQ ID NO: 118932 - DNA, 849 bp, Glycine max
  Clone ID: PAT_MRT3847_78404C.1
tacggctgcgagaagacgacagaaggggtgaacatgtgtgcacagaaccgaataactgctgaaattcatcccacagaatctgccaactccgaaatgaagttatcatccggagaacatcccgggaagaaacacatcattttgaacatcaggagcaggtttgaagagttcctctccaagcctcaaccagtagagcctttttcatataaaaatcttgctgcagtttcaccttcaacaccttctaaatcctatgaaatgaggcaaattcctggcttgaattctaggaagttctcgaaggagaacgattacgagtattccgtcagggtagtcaaatggttagagcatcaagggcatatagatgaaatcttcagagtaaggtttctcacttggttcagcctcaaggctactcagcaggagagaagggtggttagtgcttttgttgatgcattgattgatgacccagcaagcttagcagaccagctcatacacactttcagcgacgagatatgttgcgagccaaaatcttagtgaggatgaatatgttctacattaaaaatttgttttggtcagagtccaccaactctatatggcactggaagcttggatagaaagtttgtaatgctttgtgggagttataggtactgtccagagatatcaggtttttcaagtgttcatttgttcttcatggaggaagttgttcaaggtctctataccatttaagtttcgattacgtattgtgcagactaattgctggatagtggtgcataatgattaattcttatttatcatatatccctcaccaaagcactctagcttaaatttctcttcatattctattggttatcatattct

SEQ ID NO: 118933 - DNA, 463 bp, Glycine max
  Clone ID: PAT_MRT3847_78405C.1
acaaggatccccatccctttccttacaaggattttggtaaccatggctctgccccatttcatgtccctgatgatcccaataaggccccttgcctcgctaatagtaattataataaggatgttcgtggttgttatggcgaccctggcggaggaactaaagttaatcccgggcattggtaaatttctcccaagaatcatattgtgattaatgtttgataattaaaccggtgattgctaaaaatacatatatgggtaaggtaagttccgagaaattcctagctgttccttccaaggatatatgcaagaattttttagtccccatatgataaacctcagtgtatctcagtatgtatgtaaatatgcgtcccctttgcccagtgtatatcccaataaaggagtgcttgtaggacttataataactgttttctgttaataaataaaaatgtgaaatggtttgcttggcc

SEQ ID NO: 118934 - DNA, 811 bp, Glycine max
  Clone ID: PAT_MRT3847_78406C.1
ttcaattgtttggggtctcactgtaaggttttggtttactcagttggtcacatctctggtgctcatttcaaccctgctgtcaccattgctcatgctaccaccaaaaggtttccactgaagcaggtgagtgttaattagttaaccaattacaccctcttttactctgcttttgcttcagctgctatattattatattctcatttggtcaaatatggtctcagtttgtctctaattattgaattttctttcattttatacatgttttaggtaccagcttatgtgatagctcaggtcgttggagccacacttgctagtggaactcttagacttatattcaatggcaagaatgaccattttgcaggaacactcccttccggttctgatttgcagtcttttgtggtcgaattcataatcactttttatctcatgtttgtcatttctggtgttgccaccgataacagagcggtaatctttcatgttcttgttcaaaaggaaaaaaaaaattgcttgtttgacgatggttgtgtcttaatctttgttgaacattttgaatttagcaaatagggttggcattggcgtatcttgccaaactctttggcctttccacataaaaaaaatggttacttaaattgcctaactgcataagcatatttgtacgtgtcgaatcacttggaatacgtgctagaagtttacaacacaagacatgcaatgcgtgtcaatactatatatatatatttgaatattcttccacactatttcataacttttgttaatttaagttattttattttaaaatacctgcaggcatgca

SEQ ID NO: 118935 - DNA, 286 bp, Glycine max
  Clone ID: PAT_MRT3847_78407C.1
tttttgtgttttttttttttttttttttttttttttttttttttttttttttttttaccatttctcttctttcttgcttttgcaggacagacccacgtccatgctttgtctacccaagtaagagggcgcaaagctgtttggccgaacactacaaaacccactgcggggcgagagcggctaaagcctctaaataaaggggccccaaaaaaagggcccccttcccaaagagaggagacacagggcccatccccacacccccccccagaagaccttaaaccaggggaaa

SEQ ID NO: 118936 - DNA, 435 bp, Glycine max
  unsure (1)..(435): unsure at all n locations
  Clone ID: PAT_MRT3847_78408C.1
ggctcgagcgcgtcgctccgcatcnggttcaccgaacgaatatctcgctgtttggagcgatccgagacaaactctgtaaacatgttggcttaccaggacctccttacaggtgatgagcttctctctgactgcttccattccaaggaaattgagaatggaatgctgagggaagttgaggggaagagggcttgacatgcatgtttaaatacgacagtggtcacggacactggaagcatgacgatgtcaccgttaaggacgagaagacccttctcttcggtgacaaggcatgcactgtttttggacacactaacccttgaagagatcccatgggggtcaactggagcttacatcattgttgagtccaccggagattttaccgataaggacaaggctgtcgcacatttgaagggtggtgccaagaatgatattattttt

SEQ ID NO: 118937 - DNA, 436 bp, Glycine max
  Clone ID: PAT_MRT3847_78409C.1
gtggcggtcaacgtccaataaaactgtgacacgtgacagtcaaggtttgaaatggttgtgtcactgtaggagaagtcacactgcttcatcagcattgaacttgttcgccagtactttttgccgtttttcttctggttgtgtggcagaagcaatcatatccacaaccagcatctctccctgttctccgatgcttcatcctctcgcaaacccaaacacccacaacacttgatctcccttcttcccagagacccttctcaacgccaacctctccaacaagtccactctcacatcatcacatctggcctcttctacaacccttttcacaacaccctaacttgtttactcctcttcaacaacgtcatccgttgttactcttttggtccttatccccatgaagctcttcacttcttcacatacacccaacactgccacattt

SEQ ID NO: 118938 - DNA, 290 bp, Glycine max
  Clone ID: PAT_MRT3847_7840C.1
cgtccgtacggctgcgagaaacgacagaaggggaccacaccaccctactacattcccaccgttaggcttgttcttagagatggcttgtgaaaccaagtcatggttggttatgtttcttggtccatcggctatatggttgcatgcaacattgggtccacagggggtctcaagtgccttgcctttttatctttgggcactctatggatgatactggaaacaacaatgaacttccaaccacttcataatctaatttcataccatatggtatcgactgtccattaggaccaact

SEQ ID NO: 118939 - DNA, 486 bp, Glycine max
  Clone ID: PAT_MRT3847_78410C.1
gccattcatccgcccactcgtccgcggacgcgtgggatttttttacgggtccatccgatctatagtatctatttagataaaacacgaaatgccaatgttaaccgcaagcactccctctatctgagagaagctcttgaaattcttctgatactcgtagaattttaatggctcgttcatcatccggttcacaaaacccagtgacgtcgttgttgttcttttgcttactaagtgcgataccttccgaatctctttccgccctacgcatactcgatacttgctcatatctctctttgtcaaaggccgagagctctatgtagcatacacaccgtgctatcccaactaacaaaccagacacatccgttaccatgggaaagcgtaattctcaacgcaaaagtgctgcgatgttcgacagtgatgacgactgatgcgtgacttcgagcgcttctgctcattctgacttgatgacggagtcctgggctgaagatg

SEQ ID NO: 118940 - DNA, 1131 bp, Glycine max
  unsure (1)..(1131): unsure at all n locations
  Clone ID: PAT_MRT3847_78411C.1
acgacccacgcgtccgctgtgttctgctattaggttatcatcgtagcccgcaccgcacacctcactcctttgtaaactttattatttctttatttaaatttagttcaatatattgatataatatattttaattttttattggtggtctctaacacggtcgcttttagttaagtttgtgtccatactccatagtccatacaagccttactcttattggccatggtaaaacgttaaactttaaacacaacaacaaatccagattcgtcgagaaagagaagaatgggcgattaccatttcgtgtacaaggatttagaaggagcctctactcaatgggatgatattcagagaaagctcggaaatttgcctccgaaggcaccagctttcaagcccccacctttcacccctgatgcctctgatgatcaacccaaagacaaaacatggattgattccaaaacctcggaggaactcgaagacctcgaagatgacctcgacgacgatcgcttcctccaagaatataggaagaagaggctggctgagatgcaagaggcagcaaaagtattgaggtttgggtcagtgattctcatttcaggatctgattttgttcgggaggtgtcacaagctccatctgatgtttgggtggttgtcatcctatacaaagaagggattcctgaatgtgggttgntgatgcaaagcattgaagaattggcagtaagatatccttcaacanaatttgtgaagataatatctactgattgcataccgaactacccggatcggaatcttcccactttgttggtgtccaccaatggagcagtcaaaggaaattatgtgggtttgcatagtttcgggcaaaaatgcactcctgaaggtgttgcattagtgttgtgccaatcagatcctgtacttaatgatggccataatggaaatgaggctatcattgaaggagtccgcaaacggtttataaaaaaagttgttgctgatcataaaaaggggggtgataatgattactctagcgattaacattttttcttgaatttgttgggttgctttctttggagggggcttttcttgttcctagaaattaaatggttttatcaggtattatgtgtatcaaagtgattttatgttttt

SEQ ID NO: 118941 - DNA, 232 bp, Glycine max
  Clone ID: PAT_MRT3847_78412C.1
gtttttattaatattggtgtacttccctgcaccttgttagcactgagagggaggccttcattgttgctcgggttgcaccatccatggctacattatctcatgggggttaatgttgtggaacgaagccccaaaggggttctgaggcttgctcttttcttatgataaaggctcaattccattaaaaaaaggacatgtcttactatcctcacgcctttttttggaggtctccttg

SEQ ID NO: 118942 - DNA, 1234 bp, Glycine max
  Clone ID: PAT_MRT3847_78413C.1
tacggctgcgagaagacgacagaaggggaatcctaaaatcacaatacccgaccacaaggtctttttttttctctgtggcggtatcattggcaatggttaaaagttaaaacttcaacacacagaatccagattcgtcgagaaagagaaaagagaaaagaagaatgggcgattaccatttcgtgtacaaggatttagaaggggcttctactcaatgggacgatattcaaagaaagctcggaaatttgcctccaaaggcacccgctttcaagcccccacctttcacccctgcctctgatgatcaacccaaagacaaaacatggatcgattccaaaacctccgaggaactcgaagacctcgaagacaacctcgatgatgatcgcttcctccaagaatacaggaagaagaggctggctgagatgcaagaggcagcaaaagtattgaggtttggatctgtgattcccatttcgggatctgatttcgttcgagaggtgtcacaagctccatctgatgtttgggtggttgtcatcctatacaaagaagggattcctgaatgtgggttgttgatgcaaagcattgaagaattggcactaagatatccttcaacaaaatttgtgaagataatatctactgattgcataccgaactacccggatcggaatcttcccactttgttggtgtacaacaatggagcagtcaaaggaaattatgtgggtttgcatagtttcgggcgaagatgcactcctgaaggtgttgcattagtgttgtgccaatcagatcctgtacttaatgatggccataatggaaatgaggctatcattgaaggagtccgcaaacggtttatagagaaagttgttgctgatcatgaagagggtggtgatgatgattactctagcgattaacattttttcttgtatttgttgtgttgctttctttggagggggtatgcttttctaactttcttttggtctcacttttataattttgcctaaaaaaaagagtaacggatctgttattaaatacttaaattatgcgtgttgtaggcttttcttgttcctagtaattagatggttttatcaggtattatgtgtatcaaagtgattttatgttttttttttgtattttttattatatgatttgtattgtaataacaaacatatgaatatgtaacctttgtgtgatgattagaacgctctaatcaactagtctaataaattttgtaataattaattttgac

SEQ ID NO: 118943 - DNA, 256 bp, Glycine max
  Clone ID: PAT_MRT3847_78414C.1
acctatattaacctgaacgtaggaaagtaacatggtacgacacttttcttatggttgagctaaacagctcatcatatcgtgagggagatccatactttaagatgaggcggggcatcacacaatatgactctatatgtcaggcctcgtttagacattgacgctttaacatatgtctctcctatgtatttacttacagctacatctcgcatacctagtgccttaggctggaccaaatttatattctcctcacaccatt

SEQ ID NO: 118944 - DNA, 775 bp, Glycine max
  Clone ID: PAT_MRT3847_78415C.1
gaccgtgtcttcgtcgtagagagagagagagttcatatccaatctttggttgggtgggtgggcactaggtacaagttatagagatcgttagagtgagtgattgaaattcttgagacccacatcgtgtgtgtttgttttcattcctcggaggatattctaaagatggttgcgagaaccccaccaaagcagaagaagctgttggctgctctcaaccctgttctgattaaagaaacactcaacaaggtggatcagtgcgtggctcggctgcaggaacttcagtacactgtgactggtggaaccaaggtggtgtcaggggtgactctcagccctcgcagcaccagaggctatctcagaaccagtctcaggtgcaagcaagaatcactcaggatcaagaatggtgcctcaaggagatctcctgtggggaagtttccagcaaacacaggtgaatggaagagaatgtcattgcctgcaatgcttgtaggcgaaactgttggagaaattttgcaggcaagtcagtttgccagagaaatagtctcagcagttggtaagaaaactgacccagaggatccaaaaactccaatgtctcaacgcagcaacaaaaaagtagaacttgaaaacacacaactcagggccagaaggaagaaagagaagcaaaccaaagcacagaacgatggttccccatcacttcaaagggctcgttccagaatcaacttcaaggtttctcctcctaaggttagagaatttgataaagaaaggaacaggtatatggcaaata

SEQ ID NO: 118945 - DNA, 421 bp, Glycine max
  Clone ID: PAT_MRT3847_78416C.1
ctggaatgacgtgcatgcacagctcacaacacacaaacacaaacctttcgttgctgtgctcgtacccttcatccattcgatcaaacacaaaatagtactttcttattatgatggccgcggctcgaaaagaactggaccggatcaaagtcccgtggaacacggatgaagacgaggatcttcataaactcgaggagcggcatgggcccaaaaactggtccctcataatcatgtccattccatggcggtctgggaaatcgtgcaggctacactggtgcaaccagctgtatggacaggtagagcacagggccttcacaccgtgagaggacaagaccatcattaaggcgcatgctaagttcgtgttcaactgagccaccataacccgcctcctctaagacgcgcaccgataacgccatcaagaatg

SEQ ID NO: 118946 - DNA, 274 bp, Glycine max
  Clone ID: PAT_MRT3847_78417C.1
gctcgagcaagggcactcctccatttctccatcagtttctccctccaccgccaaggcactcttgccttctattataaaggatggaactccctcctttaagagcttgcctagctagctagccctgtgtgccggtatattctcataatcatttacattttcatacagaatcaaatcttaataatggatattcagccatacattacagtgttttacttcttaccataacatgccctggttgacttttccaatgaaaaaaaacaagcttgataaaatt

SEQ ID NO: 118947 - DNA, 500 bp, Glycine max
  Clone ID: PAT_MRT3847_78418C.1
cacctatattacccgacgtttttttggatcagaaaaactatacgagtaatctggcaaaaacaactgcatcaattcttgaatatgtaattcgaattagaaaaactatataccagtaatatgtatgtatcacttaatgaatttcagtaaacgtggtttttcatctcggatatgtaatgggaattacaaagtttggtttgctacatccgtcctttcttacgcttgtgtttcttcttcatttacttctcaacaacaccttgaacgagtataatgttagatttaatatcttatctgaaagacatgtgacttaggtagaatcttattaaatttcttgtgtttgcaaaggtgtgtgatttatctcatatccaacgtttttgcttctaattgagtccttaatccacggataacacctatacttgccaatataggttctttcttccttattcttgcctcctccgttttctcaacggagccaaaatagttcttaatgatgcgtttgtaca

SEQ ID NO: 118948 - DNA, 360 bp, Glycine max
  Clone ID: PAT_MRT3847_78419C.1
tttttcgtttttttttccatttcatttttttcatggaccccggccatttctagaggctgaactttccaggacagatgggtctagaatttaaaagatacgcatcattaggtgggcaactacaaacaacgtttaaataaactatatcaatattagggcattttggtctccaagttattataactcaaagttgccctcaataacttgactggaccaattgtctactaatccaaaagcatttctaaaatttagaggttttcttatttttcgactccctttttctccatggccttttctgatcatgggagcaaaataatgataatctattttgggaccgttatcttgatcaattttcttgatcat

SEQ ID NO: 118949 - DNA, 346 bp, Glycine max
  Clone ID: PAT_MRT3847_7841C.1
tttaatttcagaaccagaaactgcttgaggttgatgatccttatcttgggctcgagagggattatgctattaggaggatgacaccaggtgtggtggaatgggcctttaagtgtatgcatgaggaaagagagaacagaccctccatgaaataggcgttggagatcttgagaggaaccaatactagtgatggcattggggcacggaaagagacaaaactattggaaggtaggacagaataagctctacttatgacagcacccccggtttcaccagattcaaaggatggtaaatgggttagcaggatgctctgagagtaaaacctcaaatctcctatgatttcctgttc

SEQ ID NO: 118950 - DNA, 146 bp, Glycine max
  Clone ID: PAT_MRT3847_78420C.1
accactgaacgggatacatagtccagatttcaaaaggataatgtcggtgacaaccatgggtaacgcattttttttttccaaaccatattattaccgcaatttccattatcagacatcaaacatgcttcacgatcaacactccaaaa

SEQ ID NO: 118951 - DNA, 380 bp, Glycine max
  Clone ID: PAT_MRT3847_78421C.1
tcccgaaaaaggagggagcctactgagagtgaaagcaaggccgagttagacaggttctgtgatgctcttatttccattagacaagcagctgccacagcataatgtgttcaaatgacaactattttcatttcccgttgtacataaactcttattcctattcatacagttcttgcacttgttgaatattgcttcatcatatgtgattatgatgataatccactgctcttaagtttcatccaatcataggaaaaaaaaaaaaagtaatgcgtataattgctgctgctattggattttaggaatgtattttaggcctatctgttacagtaatgtgaaaaaatggatttgatccatgtaaaaaatactcagcattagtttctttt

SEQ ID NO: 118952 - DNA, 242 bp, Glycine max
  Clone ID: PAT_MRT3847_78422C.1
caccaacacaatcttaattttttctaaaagacgtaaccggggcaagcccaaaacattaaagaatgaagggaaagtcctacaccttttctaaaatccaaatcacctttgaagctggcaaaggcccttcccctttggggggcttttctaatcaacttcagcatttaatatgccaaagatgatgcctccaagctccaacaaggttcaactggtcgcagcaaaggaccccatcatacatgccatca

SEQ ID NO: 118953 - DNA, 563 bp, Glycine max
  Clone ID: PAT_MRT3847_78423C.1
ggctcgagggcaaaacgattggagaattattacccggttcttttccgtggagtcaatggaacagttgctcatgaattcatcattgacttgagaggctttaagaatactgctggaattgagcctgaagatgttgcaaagcaaggccgagttagacaggttctgtgatgctcttatttccattagacaagaaattgctgagattgagaaaggaaaggttgacattaacaacaatgtacttaagggcgcccctcatccaccatcactgctcatggctgatgcatggacaaaaccatactccagggaatatgcagccttcccagctccttggctccgtactgcaaagttctggcctaccacaggacgtgttgataatgtgtacggtgaccgcaacctcatttgcacccttctcccagcatcacaggctgttgaagaacaagcagctgccacagcataatgtgttcaaatgacaactattttcatttcccgttgtacataaactcttattcctattcatacagttccggcacttgttgaatattgcttcatcatatgtgacaatgatg

SEQ ID NO: 118954 - DNA, 365 bp, Glycine max
  Clone ID: PAT_MRT3847_78424C.1
cttacgcgtgttttgacacgtgggcggacgcgtgggggaaaagattcaagtggtgtgaagaagcttgtgttttgtctcactgtagagatggctttataggaaacagcttttaggttgattattggccaacttcatattgtgacttatatacaaaatctttgaaaaattgaattgagcaatctacagcctataagaacttaataaatgaaggtgtgcagaagcaagagcttctcttagattgatttatccttattacggtctttatactactgctttttaaatgtgcagtataattatcactgtgctaaaaggtaatacgaggtagactttttttaatccaacataatgctgatccagaatgaggt

SEQ ID NO: 118955 - DNA, 514 bp, Glycine max
  Clone ID: PAT_MRT3847_78425C.1
ccatgcatcagccatgagcagtgatggtggatgcatggacaaaaccatactccagggaatatgcagccttcccagctccttgggctccgtactgcaaagttctggcctaccacaggacgtgttgataatgtgtacgctgaccgcaacctcatttgcacccttctcccagcatcacaggctgttgaagaacaagcagctgccacagcataatgtgttcaaatgacaactattttcatttcccgttgtacataaactcttattcctattcatacagttcttgcacttgttgaatattgcttcatcatatgtgacaatgatgataatcccctgctcttaagtttcatccaatcacaggaaaaaaaaaaaaaaaaaagtaattcgtataattgctgctgctattggattttaggaatgtattttaggcctatctgttacagtaatgtgaaaaaatggatttgattcatgtaaaaaatactcagcattagtttcttttagtaaagaatgcatttgccat

SEQ ID NO: 118956 - DNA, 1286 bp, Glycine max
  Clone ID: PAT_MRT3847_78426C.1
atgctgtatatcatggacccgaaggacttaaaaccattgcccaacgggttcatggtcttgccggggtgtttgctcagggattaaaaaaacttggaaccgtggaagttcaggaccatccattctttgacactgtgaaaattaagactgccaatgcccatgcaattgctgatgctgctcgcaagaatgaaatcaatttgcgggttgttgatgggaacactatcactgttgccttcgatgaaacaaccaccttggaggatgttgataatcttttcaaagttttttctgatggcaagcctgtctccttcacagctgcatctcttgccccagaagttcagactgcagttccttctggacttactagaaacagtccttatctgacacaccctatctttaacacgtaccacactgagcatgaggttctcaggtacattcataggcttcaatcaaaagatctttcattgtgccacagtatgatcccgctgggatcttgtacaatgaagctgaatgctacaactgaaatgatgcctgtgacatggcctagctttgctaacattcacccttttgcaccaattgaacaggctcaaggttatcaggaaatgtttgaaaatttgggtaaactgttgtgtacaatcaccgggtttgactccttctctttgcaacctaatgctggtgctgctggagaatatgctggactgatggttattcgtgcatatcatttggcaagaggagaccaccatcgcaatgtctgcattatacccgtctcagcacatggtacaaatcctgccagtgctgctatgtgtgcaatgaaaattgtatctgttggaactgatgccaagggaaacatcaatattgaagagttgaggaaggctgctgaaacacataaggacaacctagctgctcttatggtaacatatccttcaacccatggtgtttatgaagaaggtattgatgagatatgcaaggttattcatgataacggaggtcaagtatatatggatggtgctaacatgaatgcacaggtttgtttctcatgaattcacgtttttatatcctatgaaaatcttcaatcatattggcatgccaaactaggaaccatacaaactggggcttttggtgtggctggtctgctttacaggatatcattttgggcctaatttacaaacgaggttaatatttacaggtgggacttacaagcccaggttggattggagcaaatgttttgctctgaatctcctaagacatttgcatccctcatggatgaaggggccctgggctgggttctattg

SEQ ID NO: 118957 - DNA, 3690 bp, Glycine max
  Clone ID: PAT_MRT3847_78427C.1
ccacgcgtccgcaatgaagtcataacaagaagaagaaaaagaagaaaaaaaaacacttcccagagttcaaagacctcaaattccacaccaaacactaattcctctgttctctctgtttttcagtattttttcttccctctctgcagtagcagcagcactgatggaacgtgctcgcaggcttgcaaaccgcgccattctgaggcgtctggtttcagaggcaaagcagcatcagaagaatgaatccgtgctgcactcttccaccacccccatactgctctactcttcctccaggtgcatgtcctctgtttcctcccctgttcttcgaagcaggggatccaaaacagagacccttctgggaagaaacatgaacatatcacgcagcgttgttgctggtgctggttccgcccgatccatctcggttgaagcgcttcaaccgagtgacactttcccccggcgccacaactctgccacacccgaggaacagagcaagatggcagagtcgattggattcgagagcctcgactccctcgtggacgccacggtgcctaaatcgatccgcttgaaggaaatgacattcgggaaattcgatgcagggcttacagagagccagatgatagagcacatgaaggacttggcctcaaagaacaaggtttttaagtcctacattggcatggggtactataacactcatgttccaccagtgatcctgaggaacataatggagaaccctgcttggtacactcagtacacaccttaccaggctgagatatctcaggggaggcttgagtcattgctgaattaccaaaccatgatcaccgacctcaccggcttgcctatgtcgaatgcttcattgcttgatgagggtactgctgctgctgaagcaatgtctatgtgtaataatattcagaaagggaagaagaagaccttcattattgcaagtaactgccaccctcagacaattgatatttgcaagacaagagctgatggttttgatctcaaggttgtgacagcagatcttaaggacattgattacaagtctggggatgtttgtggtgtgcttgtgcagtaccctggcactgagggagaggttttggactatggagagtttgtgaagaaggctcatgctcatgaggtgaaggttgttatggcaagtgatttgttggcactgactgtgttgaagcctcctggggagtttggggcagatattgttgttggctcggctcagcaggttcggggtgccaatggggtatggagggcctcatgcagctttcttggccacttcacaagagtacaagaggatgatgcctgggagaatcatcggggtcagtgtcgattcttccggaaagaccgctttgaggatggcaatgcaaactagggagcagcatatcaggagggacaaggctaccagcaacatttgcactgctcaggcactgcttgcaaacatggctgccatgtatgctgtgtatcatggacccgaaggcctgaagaacattgcacaccgtgttcatggtcttgctggggcatttgctcttggattaaagaaacttggaactgtggaagttcaggaccttcccttctttgacactgtgaaggttaagacttctaatgcacatgcaattgctgatgctgctctcaagagtggaataaatttgcgagttgtagatggaaacactatcactgttgcttttgatgaaacaaccacattagaggatgttgataatcttttcaaagtttttgctggtggaaagccggtccccttcactgctgcatctcttgcaccagaagttcagagtgcgattccttctggattagttaggaagagcccttatctgacacactctatctttaacatgtaccaaactgagcatgagttgcttaggtacttgtataagctacaatcaaaagatctctcactatgccacagtatgattccacttggatcttgtacaatgaagctgaatgcaacaactgaaatgatgcctgtgacatggcccagctttactgatattcacccttttgcaccagttgaccaggctcaaggttatcaggaaatgttcaataatttgggtgaactgttgtgcaccatcactgggtttgactccttctccttgcaaccaaatgctggtgctgctggagaatatgccggacttatggttattcgtgcatatcatttggcaaggggagaccaccaccgcaatgtttgcattatacctgtctcagcacatggtacaaatcctgctagtgctgctatgtgtggaatgaaaattgtctctgttggaactgacgccaagggtaacattaatatagaagaattgagaaaggctgccgaaacacataaggacaacttatctgcacttatggtaacatatccttcaactcacggtgtttatgaggaaggtattgacgaaatttgcaagattattcatgataatggaggccaagtatatatggatggtgccaacatgaatgctcaggtgggactcacaagcccaggttggataggagcagatgtatgccatctcaatctccacaagacattttgcatccctcatggaggaggtggccctggcatgggtcctataggtgtaaagaaacacttggcaccatttttaccatcacaccctgtgatagcaactggtggaattcctgcccctgacaaacctcaaccacttggtaccatcgctgccgcaccatggggctcagcactcatattgccaatctcttacacttacatagccatgatgggttctaaaggactcaccgatgcatcaaagatagccattttgaatgcaaactacatggcaaaacgattggagaattattatcccgttcttttccgtggagtcaatggaacagttgctcatgaattcatcattgacctgagaggctttaagaatactgctggaattgagcctgaagatgttgcaaagcgcctcatggactacggttttcatgcaccaacaatgtcatggcctgtgcctggcacactcatgattgagccaactgagagtgaaagcaaggctgaactagacaggttctgtgatgctcttatttccattagacaagaaattgctgagattgagaaaggaaatgctgacattaacaacaatgtacttaagagcgcccctcatccaccatcactgctcatggctgatgcatggacaaaaccatactccagggaatatgcagccttcccagctccttggctccgtgcttcaaagttctggcctaccacaggacgtgttgataatgtgtacggtgaccgcaacctgatttgcacccttctgccagcatcacaggctgttgaagaacaagctgctgccacagcatagtgtgttcaaatgacaactattttcatttcccgttgtacataaactcttattcctattcatacagttcttgcacctcttgaatattgcttcatcatatgtgataatgatgataatccactgctcttaagtttcatccaaccacaggaaacaaaaaaaaagtaattcgtataattgctgctgctattttattttaggaatgtattttaggcctatctgtcacaataatgtgaaaaaatgaatttgattcatgtaaacgaattgtataaaaagaaaaaaagaaaaacattcagcattagtttcttttaataaagaatgcatttgccataaaaaaaaaaaaaaaaaaaaaaaaaaaaaaaaa

SEQ ID NO: 118958 - DNA, 356 bp, Glycine max
  Clone ID: PAT_MRT3847_78428C.1
aaaccggaaggggggggccaaaaaccccgttaaaatgggcatgaatgccccctaacaaaaaaccccaatttttaaaacctcgggccccaagggggggggttttttttagttcggaaaagggggagcaaaaaaatttacccaatcaatggcccctccccggggggaaaacaagcccaaatggctttcccccccaacaagaaaaatttaattcatttaccataaccctttaaccccccaaaaaaaaacatgggggatggttttttccaggctccaatttttaaccaagcaacaaattttgaaggggacaaacccatgggacctttgaaaggccccttttttcccacaatgttttaatt

SEQ ID NO: 118959 - DNA, 492 bp, Glycine max
  Clone ID: PAT_MRT3847_78429C.1
gatatacagcacatttttggttcggatttggttattgtttctttttttaaggaaagaggttttaggcccaattgcttgtttaattggagaggggtttgataatgtccatttaaaatcctcccccgggctatttgctattcaagattttatttccagctgaagtgtcgcccctcagctaaaagaagatttaactagcttccttacttttgttccaaaaacctaaaatgcgccggcaggtttaaatggctggccgatttatgttaaatttatttccacaacaggacaaggattagtggcccccagctccgaataaaattctttttgagtgagcgggcccatgttgcccaagatcactggcaaggacgcccttaaaaattggttgcaattgtattggtttgcaagggggtttgtaaaaatagcttttttccaattattttgggggaccaaaaacttttcaaaatatgttttgaaaagcgtcaccggatacttttt

SEQ ID NO: 118960 - DNA, 255 bp, Glycine max
  Clone ID: PAT_MRT3847_7842C.1
ctcacgcgatcgtatatatgttcatttttccgtcactgactcataccatttgggtgtatagctttgctacggggatcagtctttcaacttcccaccgttctaaaaccttagacttcctcatgttccatcgaattcagaattttttggcctcaagctatctcattcttgcttttccacaaaaaccttttcttctttttcacgtcgggcgcttcattttttccaaggtgactaaaggttcaaagccacctaatatta

SEQ ID NO: 118961 - DNA, 1055 bp, Glycine max
  Clone ID: PAT_MRT3847_78430C.1
tttggcaagaggagaccaccatcgcaatgtctgcattatacctgtctcagcacatggtacaaatcctgccagtgctgctatgtgtgcaatgaaaattgtatctgttggaactgatgccaagggaaacatcaatattgatgagttgaggaaggctgctgaaacacataaggacaacctagctgctctcatggtaacatatccttcaacccatggtgtttatgaagaaggtattgatgagatatgcaagattattcatgataatggaggtcaagtatatatggatggtgctaacatgaatgcacaggtaggacttacaagcccaggttggattggagcagatgtttgccatctgaatctccataagacattttgcatccctcatggaggaggtggccctggcatgggtcctattggagtaaagaaacacttggcaccatttttaccatcacatccagtggttcccactggtggcattcctgcccctggcaagtcacaaccacttggtaccatttctgctggcaccatggggctcagcactgatattgcctatctcatactcttacatagccatgatgggttctaaaggactcaccgaagcatcaaaaacagccattttgaatgcaaactatatggcaaaacgattggagaatcattaccctgttcttttccgtggggtcaatggaacagttgctcatgaattcattattgacttaagaggctttaagaatactgctgggatagagcctgaagatgttgcaaagcgccttatggactatggtttccatagtccgacaatgtcatttcctgtgcctggcacactcatgattgagccaactgaaagtgaaagcaaggccgagctagacaggttttgtgatgctcttatttccattcgacaagaaattgctgagattgagaaaggaaaggccgacattaacaacaatgttctaaagtgtgcccctcatccaccatcagtgctcatgggagatgcatggacaaaaccatactctcgagaatatgctgccttcccagcttcctggcttcgtgtttctaaattt

SEQ ID NO: 118962 - DNA, 647 bp, Glycine max
  Clone ID: PAT_MRT3847_78431C.1
agcatctcctcaaaactcaagcatctgcatccctcttgattcgagttgtgatttggctgtaaataaaagctctgccaatcaacatggggtttaagatcatagggtgtgatatgctgcaatgtctaacatctttgctgataagatcttgttactctttgccatttcacatacttccaacatcgctaatggatacctaatgaacaaagatgacacttgtatgacaacaagagcaaatatggaagcgtaagagataacagttaccaatgaccatcacaatgctcgaggagacgaatgcagacccaataccacaaaccctgcatgtatttctgtcagaaatgctgaaagacatgcctgtgagggccccccgaggattatgataataaagatgtgtgcccttgctacagctactggaataccaatgaaagaggacgcaaatgcccttgagcttaaacttgttcaacttcaattgacgctttcctacatacatattgcttactgccttgtgccaattgaatgcactacctaccgaatgctactagaaccattttggtgacattctatgatattatgtcgttacgaactttggtgtaacgctccaagtagacaagcatgcctgctactgagagcgtatgagtaatatgaacatc

SEQ ID NO: 118963 - DNA, 941 bp, Glycine max
  Clone ID: PAT_MRT3847_78432C.1
ccacaaatagcatctaattcttcaccaccatcacaacaacttcaccaacactaactcaacccgacacacacccacacaaaaaaaaatgtccctcctttcctccggtggcttcttcggccgcagaagaaacgacccgccaccccaccaacccacgtgggaccactaccaggcccaggaccatcaccaccctctgggagtttcccagccccaccacccaccccccttcatgtccttccccagtgactcctcgccggtgctcaacaccgccctcatagagtggaaggagaccccggaggcgcacgtttacaatgcgcacctcccgggctacaagcgcaacgacgtgcgcgtggaggtcgacgacgaccgggtgctctgcatcgtgtgcgggaagagcgtcgagaaggaggagcagaggggaggctggcaccgcgtcgagctctccagtggacagttcgttcagcgcctcactttgcctgagaattccatggtggatcatgttaaggcctatatggataacggggtgctcactatcacggttcctaaacaccacagaggggtcaataaccgtgttagaaacattaacatctcttctcgtccgtgagtgttgttgttgtgtgtctcatgaaatgaaagaattgaaacctagctaaccgctatctttgcataagaaacacggttgtctagataaataaataatagtaacaaaagttatgcgtccaagtctagacttttgcctcctttcaagtttcaactatatatattccatgtattagatcaataattagtttgagggattacccttataacaaacagttcccaatatgaaatttgcagaggcaaactaattaattgacactgctttggtgtattgagggaattaatatacatatatatgtagtattatataaaaaggaaattctgtcttaaatggatttctttct

SEQ ID NO: 118964 - DNA, 270 bp, Glycine max
  Clone ID: PAT_MRT3847_78433C.1
tttccttctgaataacctccacacatgtgtaagaaacaaatcaagacaacatgaaacacaaaaataccttgccataaaaaggattcaacggtagaataatctcacaacttgtagaagtttgaagaaagtctgagaacccgtgattgcaaaggcagcaacagccaaccactcattgatgctgaggagctcacaaagtggtccttttacagggctcttattgctgagttcattgccactttgctcttcctctacattactgtgctcacagtt

SEQ ID NO: 118965 - DNA, 280 bp, Glycine max
  Clone ID: PAT_MRT3847_78434C.1
gggaactataagaaaatggcgtcactgtaccttcaatatacctaacaaagaagacatcggaagcaactatgaatatcatataaatctcactagaaaaagctatcggtcactaatatacggcacgaatcataacatgaaaagtcctttgttgaaaactcaagcataaataagctctttaaactattccattatggatcattaaaggcaatgacatacacatggccaaattacataatacacaaagacttactccaatcatataacatttgccaccataaaa

SEQ ID NO: 118966 - DNA, 222 bp, Glycine max
  Clone ID: PAT_MRT3847_78435C.1
aaagggtgacaaatagaagttttaggtgcatccaatacaaaacaatataatacaaatttttacctcttccaagccacaaacctggggtggaggataactaaaactttcacacaccctccttgcgacttattcctaaacccctataccccgaggatgttcaacaattctcagtgcattagccctgcagccctgtgcaaaagaggctgggtaacatgccaaaat

SEQ ID NO: 118967 - DNA, 1013 bp, Glycine max
  Clone ID: PAT_MRT3847_78436C.1
gacacatactcatacactgcacactctctctacttaaacttcagcctttgcatatctctctctcttcatcattgtgctctagtaatcacactagtagtcagtagcagtagtacttgtacccataacataacaaccatggctaatgtgtcccttctccttttccttttgttcttgtctctctcatcaggagggaatttgatcatggctaatgggcagaaaacttggtgtgtggcaaagccttcatcagatcaagcaacccttttggccaacctcaattatgcctgttctcaagttgattgcaggattcttcagaaaggatgcccctgctcttaccctgacaatctcatgaaccatgcttccatagccatgaatctctattaccaatccaggggaaaaaaccactggaattgtgatttcagggcctctggaatcgttgttgtcactgatccaagttatggtaactgcatttatgcatagaagaagggtggagtacataaactaaagtatccaatgtaagcaaaatttgttggtgaacttatgtgctgctgtaattttgtggtgtatgtagttgtatttaattaggttgtaatataaatgtatgccgcattacaagaaatcaaaatatgccctttcttatgttggaaatttcaataacctaagttgtgtttacggaatgcaatatgcggtgaaaggaagaaggattgtaaaatccaatttgttgtctcaaatggccaacctcaattatgcctgttctcaagttgattgcaggattcttcagaaaggatgcccctgctcttaccctgacaatctcatgaaccatgcttccatagccatgaatctctattaccaatccaggggaaaaaaccactggaattgtgatttcagggcctctggaatcgttgttgtcactgatccaagttatggtaactgcatttatgcatagaagaagggtggagtacataaactaaagtatccaatgtaggcaaaatttgttggtgaacttatgtgctgct

SEQ ID NO: 118968 - DNA, 306 bp, Glycine max
  Clone ID: PAT_MRT3847_78437C.1
tgattcttaatttgtgaatctaacttgattgaggctgtgaagactttccaaaaaggaagggactacacctaatgtggcctatgtccagaaagcgcaggggcttcaataataaaggaaggttcttcatgaacatcactataattttgtgagaaactgcaagttctttcatcatataagttagttcccccttgtgactcttctggccttactgactgccctaccacaccttctagaatctttaaagcttctgacatctttagcctctaagttgaaagcctatagccatacttaactgtagggaactca

SEQ ID NO: 118969 - DNA, 333 bp, Glycine max
  Clone ID: PAT_MRT3847_78438C.1
ataagcggctccgatcttcgtgaaatccctagctgactgagtattactatggcagccagcactgggtcataactgcattccgctcgatgccctatggtagacaacacaggcacacctcaattccttcttcacacttgcttgagctcaagacctcaggctctgccttcttcacccacgccaagtcttactagtactacgaaatgcactccgacgcttactacgctggtgagactggcctctgctgctgatgaagaaggcatgtcactacagtgtggaccatcagccgcgaccgcatggacacaatgggcactttgtgcttactttcccttctgg

SEQ ID NO: 118970 - DNA, 1101 bp, Glycine max
  Clone ID: PAT_MRT3847_78439C.1
gttgactggtctttcccttctcactctcttctcttcacaataaaaatccaatctgtgttgttcagcgcagcacgccaaatcagagcgcgtgagaaaagcagaaatggcggcggctacggcgatttctcagctaggctgtttttccgccgtccaccgcagctcacacctccggcgccgctcgtttctgttcccttcccctcgctccaagttatcggttgttatgagtctggagaggcatgacacggatactgctgggtctgataccaaaaatacactaagttatgcagttgatgtgtcaaagctacatgttgaagaaaagaagaactcatattcaacaaaagatggccatgatgctgaaaaaatagggtttggagaggcaacacaggaaagtgtcgatcaaccgaaaaggactgcaaagattcatgacttctgtttaggcattccctttggtggatttgttttaacaggagggattattggattccttttttcacggagtcctgcaacactaagcagtggtgtgctctttgggggtgctttactattcctcagcacctttagcatgaaggtctggaggcaaggaaactcaagtttaccatttattctaggacaagcagctttggcaggggttcttatctggaagaacttccagagctactcattggcaaagaaaatatttccatcgggcattagtgctattataagttctgcaatgctctgcttttatttatatgtgcttatatctggaggaaatcccccgcctaagaaattgaaggcatctgccagcactgcatgatgagatagtcaaggttatgctagcctatatagaatatggggatatgattcttatttttctgtgaattgaaataagttttggatgaaaatctgataatttatatctatatttttttttataaatcataatcgttattttcagtccattttagctgtatattcagaattgggctacattctggtccacatgtgatgtattggatgttcaatgatttctgatcgaaatggattcagcttaaaaaaaaaaaaaaaaaaaaaaaaaaaaaaaaaaaaaaaaaaaaaaaaaaaaaaaaaaaaaaaaaaaaa

SEQ ID NO: 118971 - DNA, 251 bp, Glycine max
  Clone ID: PAT_MRT3847_7843C.1
aacgcttgacttaattgaatgagtgacacgggcataaagtccaacaagagtacatgacaaggcctcggtattaccaaacacactatgaaacaatcacaataagaaagccccggctcaccgatctaccctaaggctcacgccctgaaggatcactggtgatcaccaccttcaataccaaccgactacggagatgccaatgctgattgcagctcagccgatatcactcgaaatgaaaggcccgcaatgtgtgc

SEQ ID NO: 118972 - DNA, 410 bp, Glycine max
  Clone ID: PAT_MRT3847_78440C.1
attgatctgtgcattgttgcccattcatagtcaagcattacaacatgcaggagcctctttgttagtcttacctcaaatttgttctgtattggcagtgttgatataatatcgtgaaaggaaaaactctttgcaaatagatgatttacattttaacctcaaaaaaggatatgtagaataaagtggtgcaacatgtcactcttatatttgttcctttcataatatagttttttattttattatgttgctactctgaattcttgttattcattatttcaaattcttgtgattagatttttcattcctgacatcctccaaagtccaaagtgttaaactatttttttagtggcttgttcctgatgacaatgcacaggttttaaagtttgatttcatttgccatttacaccatataa

SEQ ID NO: 118973 - DNA, 655 bp, Glycine max
  Clone ID: PAT_MRT3847_78441C.1
aacatgcttcaactgagggtgatgtctacagttttggagtacttgtgttggagatggtctcaggtagacgccccacagatgtactcagccatgaaggctcaagcttgtgtgagtggattaaaaagcaatacacacaccaacaccaacttgaaaactttgttgaacaagcactgcaaaggttctctccttgtggcgtgccaaaccatcgtaacaaaatttggaaagatgttatactagaactcattgagctggggctagtatgcacacagtacaatccttcaacaagaccaagcatgcacgatatagctcaagagatggagagattgaaggactacctcactaagtcaaacttgccccctcattaatagttcagtttttttcattcattgtaactgtaaaactctgttacacattctactgtcaattaatttctgtaagtttaattagtacctcaattctcaagtatcatagtcaattttttaaatattttttttatttaaatttgattgagttgcgttgaaatgttggtgttttaatgttggccgagtgaaacatgcgggtcagtatatatgttcctattggtcaatcacttcttttatttagacgatcaagttgataattgattatatatatatatatatttccctttttggat

SEQ ID NO: 118974 - DNA, 477 bp, Glycine max
  Clone ID: PAT_MRT3847_78442C.1
aaatgtaaggaaggtgagactttttgtgtgccttaaggttattggtatagtcactacttatgctgtcttcaagcattcaaatggtcaacattagattatttactataattttgacatctatcattgctgcttgagttatggtaggttgcctattttatgtttgatgtgcctgggttctatgctgtcttcaaacattcaaatgtttaacaacggattattttatataattgcagtgtctattgttgctgcctaagttatggtagattgcctattttaagttatggcttttatgttaaactgcttcatgttattaggagcatgtttggtagaagaaaatatgatgctgaaggtgagggaagtgacttggcagcaatgaagggaatacgaaagtgctataacataaccctccatgggctctttctcactttcaattttccttttattttttgtttagctgctacacttgtatttatagat

SEQ ID NO: 118975 - DNA, 418 bp, Glycine max
  Clone ID: PAT_MRT3847_78443C.1
ctttgtttttttttttttttttttttttttttttttttttttttttttttttttttttttttattttttttctctttttttggtagaaaataatatgttgattttttttttatttgctcctgtctttttactccccccggtccccattgtctttgtaaaacacaaacggggccagcggagaaaaaaaaaaaacaaccgtttgtccctggggggcccgggtaatggtcccccccgggacggaaaaagattggtttcaagcccggggccgggggggttgaaaaagaaaacacccctggccccggggggggaaagtgggggggggaaaaaaagcaggaattggacctctgacaaccaaaaaaaattgcccccgagtggaagaaaaaatccgtaccacaggcccggagggctgctcaattag

SEQ ID NO: 118976 - DNA, 336 bp, Glycine max
  Clone ID: PAT_MRT3847_78444C.1
gcgaggtggaaaggagtatgaaccgatatgattgttccgtctaatcaacctggatgttctagttcttgcttgcttcctctccctcgtcctgaagtcccttgaacagcgtcgtcttgtcgttgcgcagatggttcagttcatcaatgatagacgtcagtaattggttcttggcatccatctttagccgtccattattcatcatcgacatcttcataatctctagtgcctccttgtccggatggtcagccgggataaccacatccatctccggtagtttaatgtcatcaatgtggcccgtgtgacccatacgagcaaaagcttccttcaaaatcttat

SEQ ID NO: 118977 - DNA, 323 bp, Glycine max
  Clone ID: PAT_MRT3847_78445C.1
attgattcatttttttgttttgttttttttttggttttttttttttcaaaagccaaaaccccttttttaaaattttaggggactttttccatgaggcctgataaaccccatttggcctttttgccaagcccaattgcccaaccgttataaaaaacaaatatttccctaaaaggtgccattttttttgaaacaggggtcatttatgagatcaattaacttctggcaaaaattcttctttgcctttgggggagaaatatgcaagttgcacagaacccctttcctttgaaccttgttttttgcgttcccccaccgccctatttggg

SEQ ID NO: 118978 - DNA, 498 bp, Glycine max
  Clone ID: PAT_MRT3847_78446C.1
accagaggatgcaccgcgcctgcgtatgtgccaacacatcaatttcctccttcttgtcctgcagtttcttcaactcctccctcataggatcgttgtcagcagtcagcaccagtggaacagctcttcgaaccagatccaccaccttatcaggatgcaaatacactttgtcccggaagaggagaacaaccccagcctcatcaagaaccctggcaaatgctgcagcctcctcaggactccttgcaatccccacactctcacaggcctcaagaagctcagaatagcaaatgacttccttcccttccataccaagcttcatcttcaatgactccacattcaccaacctcataagcttcttggcttcagagaatgatatagaatcttctgttgttcctttatctgttgtgttgaaccaaatcaagaggggtgtatcaacttccactgggaatggtggtgtcagcaatggcaataatggaacaacagaatgatatagaatcttct

SEQ ID NO: 118979 - DNA, 1984 bp, Glycine max
  Clone ID: PAT_MRT3847_78447C.1
ctccaattgatccatctactctggtgaaagcggaagatattgatgcttatgcgccaaaggatttgcttattgtgacaacgggatctcaagcagaacccgtgctgccttgaacctcgcatcttatggaagtagtcatgctttcaaactagccaaggaagatgttgttttgtattcagctaaggttatccctggtaatgagtctcgtgtaatgaaaatgctaaaccgcatatcggagattggatcaacaattgttatgggaaaaaatgaaggtttgcacacatctggccatgcatatcgtggagaattggaagaaatacttagaatagtgaagccacaacattttcttcccatccatggagaacttttgttcctgaaggaacatgaattacttggaaaatcaactgggattcggcacactgctgttattaagaatggagagatgcttggtgtttcacatttgagaaatagaagagtcctttctaatggtttcatttcccttggaaaagagaatttgcagttgatgtatagtgatggcgatagagcatttggtacatcaagtgatctctttattgatgaaagattgaaaattgcattagatggcatcatagtgattagcatggaaatatttcgccctcaaaatttagacagtccagttgagaacaccttaaaaggaaaaataagaattaccaccagatgcctgtggcttgacaaggggaagctgttggatgctctccataaagctgctcatgctgctcttgcaagctgccctgtaagctgtccactggctcatatggaaaaaattgtgtctgagatgttgagaaaaatggtgaggaagtacagtggcaaacggcctgaagttattgccattgccatagaaaatcctgcagctgttcttgctaatgagataaacacaaagttgtctggaaaattaaatgtggatgggatgtcggcattgagaaaagtggtggatggacatgagaaagagaatcagagaaccgaaatgcaaataagagatcgtattgatgtaggtggtctactacctacaaaagacaatgctatctcaagtggagctgaggatggcttgtctgatgcggaggatccaaatgattattttaaaccatttgttgaatcctctccagttgagaagtcaattaaaactaacaatggttatgttccacgaaaggagaagtcatccccattgaaggatgactgttctgaagacactgaagaatgcaattctgtaaatacatcagattctgaacccaaatcttcaaaatcagcaaagagaaataaatggaaacatgaagaagttaagaagctgattgatatgcgtggggaactgaatgacagatttcaagttgtgaagggaaggatggccctctgggaagaaatatctcagaatttgttggctaatgggatcagcagaagtcctgggcagtgtaaatctctgtggacttctttgttacagaaatatgagcaggaggtgaagaatgaaaagaagaacaagaaaaaatggccgtattttgaggacatggaaaggattctagctgataacaagacactagaaacaaaatgattataaaggtgatgcaccagacaagaaaaatttgcaagagttttctgcattatgattggtaatatgtctgagcatggtcgctgggaaggtaatccatcagttgcattattcttgcatcttgaactccttcattgaatatccatagttttgtgaggagatggacagcgttaaatgcattgacattttacattaacacaagttaatgagggagactatgctggttcaggggatgatttatccccttcctcaaaaggtaactacctacccagtgacagcattttagggtcattttgatgatattgattgacatattgaacaactattttaatgatagtgaagggttaatataatgtaacgagaccaaagtacattttttctgttacttataattaatttcattattttgtt

SEQ ID NO: 118980 - DNA, 351 bp, Glycine max
  Clone ID: PAT_MRT3847_78448C.1
accaccaccttccttcttgtggctttttgggagctgccaagggaccccctttaaaccgcaaaatcaccagggttaaaccctttggggattttacaaatcaatgtctcatgtgcggggaaaattaaaaccccgtcttacaaaagtttttttaacaaaccgttgcctgcatataaggatataagaaaacatatttttgtaaccacctctttctataggggataagtgctctcttccccacgggaagaaaaaccggatggaacagttttttcaacccctttttttgtaacaaggggagctggatgctcccccccttcccttttgatctttcccttttggggcccccaacttgaa

SEQ ID NO: 118981 - DNA, 1218 bp, Glycine max
  unsure (1)..(1218): unsure at all n locations
  Clone ID: PAT_MRT3847_78449C.1
ggtggttcccacgcgtccgggcaggcgagtgacgctgtgaatccagaccgacttagagagaacgaaacacagcagtgcgtatcaacacactacaatggagcgtttggccaggtcagctcgaacgtggcgttggcattggcgttcattttcctctttccaaaccctagcttctcgctcctcacctccttcttcctttcccaaatttgcgtcttcttggtctacctcttcctctgtttcgagttccagagttttgcgcgaggattattcgttgcttccggttgtcttagctggtatatttgggacgggattcgtggaagctgcatatgcggataatggtgctgttgatgtccaagaaagtgctaagaaggaacgtgagcgaattgaggagttgcttagaagtagaggaattcgatatggctcttatcctcgcttcactgtttccgttaaaggccaaaaggttcaacttcaacctctctttttcttcactcacattgaaagtcaaactatatctgatgctggaattacaattataggtcagtattaagtttcaaattcctcctaattgtgaagtttcacaacttatcgcagatcttactgcacatcttggaacaaaagctgaaggccatggtgggtggttcagacatgttattacgagcttgngacaggngaacaatctgtcttcacagatataattgcagatgatagagatctatgnatactcatatttcattctctcattggntcagataaagctgaaattgaatcatgaatgtctgagttctacggtaaaagtgaacgtcttttggggaaagtgttttcactggcgaacactcttcctaatggtgctattatatttctggatgagattgattcttttgctgctgctcgtgacaatgaaatgcatgaagctacacgtagaatattgtcagtcttattgcgacagatagatggctttgagcaggataagaaagtagttgtcattgctgccacaaatagcaaggaagaccttgatcctgcattaatcaggtgagcttgaatgcaaattgctttatagcttgcaaactttacggtcaatcatacaggaatctcatcctaactgttttttctccttctgcttgtagtcggtttgatagtatgatcgcctttggcttacctgatcatcagaatcgtcaagaaatcgcatccaaatatgcaaagcacctgtccaaacccgaacta

SEQ ID NO: 118982 - DNA, 532 bp, Glycine max
  unsure (1)..(532): unsure at all n locations
  Clone ID: PAT_MRT3847_7844C.1
tggctanctcacctagtttcctagatttgtctataaataaaatgttaaacaaggaaaaatgaagggaaagaaaacgcttgaatttgttctcgcacccttgtctcctaagttgccaacctttctttttgggctttgactggaacagttcatgcctgaatttgttcctggaggacttaccaaagatgggttttatgcttccattatcttgtatatggaaatcatatatgccgagttacatgaacaaaagactagttttaggttatgcatttcataatttaatcctgcaccttattattttgtgatatttgtgagataaatgaaccagcaacatcaagttgtgttcatattgtgctatgagtggtaagtccagtaatgctgcaaaatttatttccctttctaggtcagtagttttataaagaagtggatatgtgatttttgaactgaaatttgaattttagtcctgtaagtgttagttccacttttattgataattgatattcagataccaatcatatgtgaccctgttacaggt

SEQ ID NO: 118983 - DNA, 713 bp, Glycine max
  Clone ID: PAT_MRT3847_78450C.1
atcccgggtcgacccacgcgtccgggggtttcgtcttcataggcagcgtgagagttaagacgagattttacgacttctcttctctgtgagtctatctatgtaggtgcatctgacctcgcttcacttctcggcgtatccgagcctcagttcagaggagatggcctcttcacataatgttgaattggaggctgctaagtttctgcataaacttcaacaagattctaaagatgaaccagccaagctggctactaaactctatgtgatactacaacacatgaaatcaagtgggaaggagcattcaatgccatatcaagtgatatcaagggcaatggagactgtcatcaaccaacatggtcttgatattgaagcattgaagtcatcacgtcttcctttgactggtggtcctcaaataggttcttcttcacagtcaatgaatgttacaaaagattccagagtgagtttggctgaaaatgaggtgtccaaaatggacccgtttgcttctggccggccaccggttgccccaagtggtggagcacctgattattatcaaggatctgtggcacagaggagtggtcagtcttttgatcaaggaagtccgtctagtttggattctaggtctgctaactcacagccacagatagacgtgatactgccaatggggacaacaggtgagtcaaaaggagggaaggaagctacaacaaggagaaagaggg

SEQ ID NO: 118984 - DNA, 496 bp, Glycine max
  unsure (1)..(496): unsure at all n locations
  Clone ID: PAT_MRT3847_78451C.1
ttgatattttaataaaccgcgaccacagggtgccgcaccttataaccggaaacaaaagcaatcgttccttgattttgagaatctctcaattactttcgacttctgtgagcacgatttcttaaggcaaagaaaataactctctgcgctggccacagacttcgggaatcattgtcttttccactcttagttaataagctgaacactctcctatatgatataggacttctagaccgacttaaacttcttctggctgtttctcagttctctgtataagtgcaagttcaagctggtgaaatcttacattagagctcccactctcctatctggtatcggacttcgagggtagactttcctatggctctacttcctttcactctcttcttctcactgagccgaattgccgttcaaagtggtcttatttgacaaacactagtgcgttggcgcaaatgttggctccgttgattttctctggagacaacangctcactgagaaaac

SEQ ID NO: 118985 - DNA, 331 bp, Glycine max
  Clone ID: PAT_MRT3847_78452C.1
cgcgtccgctctcggcttcgtcgttcactccataatccatttacagtctaacaaagaataataatatacagagaagatatccgggacctctttagaacaacagcaatgcacgccaacaattcctattcgaccataaagatcatacatgccaacgctggttacatactctaagactttactcacttcaccgactacattccaaaccttcctacgtatacgaatacgcttctatccaatcctgcttactcggttgccaagcattatacactgcacatatacgacactgttcctcagaaagttgatgttcacaaggataatccaagacgcatac

SEQ ID NO: 118986 - DNA, 696 bp, Glycine max
  Clone ID: PAT_MRT3847_78453C.1
gcgcagtgtccccgttcgctgccctgtcatgcccctcgatccctacccagcacagcactctcacccccgtctcccgcctccccatcccctgcgcttccgccgcgcctaaccctgtcaccctcatcctgggctctcacaggcgtcccaagtgttcatccgcagagattaacactggtgctgcgcacacatcaacacatcaatttcatgttttcttcttcttcttcttcttcttcttcttcttcttcttctcttcccctaattgagtcttttatttttttttcactttgggctaaatcagtgacccaaaaagtgtgcgagagagagagagagtggaatgaagaaacgcaagtggattccgttggtggtgctgagaaagttgctcattgcggccatatgttccatagcgtttgttgctctcttctctgcgcgcgtacacattgtcccttcttctaaagatcacaggttcaacgacaagatctccacgactcaggatccgcaaagctggatgcgggagctcgccccacctcatttatccaaagctccacttcctactcccaagttgagtggttcaaaagggaatttagattaccagaagctgtggaagcctccatcaaatcgtgggtttctgccctgtacaaaccctacacctaattacaacactcctgccgagtcacaaggatatcttttagttcatac

SEQ ID NO: 118987 - DNA, 475 bp, Glycine max
  Clone ID: PAT_MRT3847_78454C.1
gggggagggacctttaaggggaggtcattaagaagaccccaaagggggaatcaaaagcccaaaaaaaatagggggaacaaaaaaaaaaggcccctaaacaaaagttaaagaaaggcaacacttgggtttaattcaggctttacccccaaacggaggaaaacaagggttacatggcccccccacaaactaacaaagggtacctaacttaaaccccacacaattatggccaaaccccggaaaggggggggaaaaaaaataaaaccggaacaagggccctgaaatcagcataaaggaaaaaaattccccaaaaatgagggggcatttgcccccgcaatttggtatgcgggggtaccaaaacccggttcctttccactaccgaaaaaattttggaaatctttacacttaaaaacccgtatgtaaaggatggtgggaggcattggttttagggagccgggccactctactaaaaggaaaa

SEQ ID NO: 118988 - DNA, 346 bp, Glycine max
  unsure (1)..(346): unsure at all n locations
  Clone ID: PAT_MRT3847_78455C.1
gggttttgttccacttcatactttttttttttnnaaaacaagcaacaagcattaccttcaatcctaaatggtgaaggaacaatttcctatttgataattcacaggttgggaagcaggagcaccttcttcactaaaaataaaaaaatgtttagttgcagtcttgtccgtacaaatattacattaccttgcgccacttaagggttaccaggcgtgggctattgattataaccttcctcctatccaccttctatttatagggcatttttggatagggacacaatcaattgctttctgttctaaggacagaaattttccccattaaagatttttgcttccttttgtttaa

SEQ ID NO: 118989 - DNA, 556 bp, Glycine max
  unsure (1)..(556): unsure at all n locations
  Clone ID: PAT_MRT3847_78456C.1
tcgagaaggggtttcgtcacgatacaccactctcttcttacgtcgaaatggcccgcttcttacttcctctggccgagcgagccttctcgactccgtcttcctcggccgccgacgatcggcacacggcatgcgcttcgtgcaggttctatttgaacgagagaaggaacagcttctttggttcatctagcacgctcaataccaaatatggaaaggacggtgcctggtgttgagccaatcctctacnatatanntatggcttgcagtcttgtgccagctgtaaatacgcagcttgctctaaatgctgaagcttgcacccaaccagaagtaaaggggtatngggatttggctgctactctgttctctctgttgctggnggattcccgaccagctcacactggtttcaagtttcttgggagtnggtgaattaaagaagaaaatgtgaattgtatgggatggatcatagaagctgtagaaacaagcccgaaaggatcaatttcctctaaaatcaacctgtatttggagtacttgtggtggagcttgtttcaccctgaaatgg

SEQ ID NO: 118990 - DNA, 270 bp, Glycine max
  Clone ID: PAT_MRT3847_78457C.1
aaggaacaagggcccttattttatttaagcccccaaagagaaaacaacttttggaaatctattacaatccttgggtgcacacagtttaaacaacataaagggaattttgggcccctattttaacccatgtttttacatttttatagaatggaccaagcctctttgtttcgagggtaatgaacctcccaatcgttgtacagggtattaggaagcttaaagggcctgttttcgtcatttgggccttccagggaaaagccccacttggtttcc

SEQ ID NO: 118991 - DNA, 427 bp, Glycine max
  Clone ID: PAT_MRT3847_78458C.1
gtgttggtgaggatgtactcaggggtagaccttttgtttgtgtctacggagaactatcatcctggaaacacccgtgaagcgcactgccgtaaaggaaaccaacacgaactttcctaagagacacctgacctaccagaccttacttcctttctgacgggaaatgtattaaaaccggcattaactcctacatggtttgaagagttgtgacctatgaagactgctatgagcttttatgcctgatgtctgaaagattactgccattagcttctggccgaaaaatgggcacccgcactgtcagggaagcacgggtaagagggtgagacaccaccttcaaagaagctcccggaaacacgatggcatttggagccctgaaccgctgatgagaacggtgggtctttttgtgcgctgaacccgttatactctgaat

SEQ ID NO: 118992 - DNA, 192 bp, Glycine max
  Clone ID: PAT_MRT3847_78459C.1
atggatgacactgagttggacgttgcgttcggcgacgatgaagacttcttcaccgagttgactcgccggtcgagtcacacctcactcaatgaaacaaggaagaaacaacaactccttaccgttcccatatgcaacaatgacaaagttgagagtcagaagatgatggcttgtggtttggctgggtcatcttag

SEQ ID NO: 118993 - DNA, 233 bp, Glycine max
  Clone ID: PAT_MRT3847_7845C.1
aaaaaaagtaaaagttttttaaaaagaagaagacaaaaaagaaaggaggtggtggggtgatcatgctaaatgaaagcgaactaacgcagacttaaataaaaaatagcgtatattatatagaaagaccgggtgtaatgaattggggggactgtcaaaacgatggcggttggcaaacccatgatcttcttaaatagaccccttttgcaaaaattcgtagttgtgaaaatggcggt

SEQ ID NO: 118994 - DNA, 130 bp, Glycine max
  Clone ID: PAT_MRT3847_78460C.1
cttctaatgtaggattctctattataatatataagaagactgctgtagttggattttgttagagagacatcaactaaatggttgccgtgtatgaactgagaatgttaatgaaagttattcccctcgttga

SEQ ID NO: 118995 - DNA, 393 bp, Glycine max
  Clone ID: PAT_MRT3847_78461C.1
tcctttttctttccccccaactttaaatcaccttgtgcctgtttttaaaaataaatacggtctgcgtaaacaatataaaatatattttttcctctccattattttcaatcttgtctaaatatatcatttctaaatcattgcccttcactattacatctcacatataaacctacctactaaaatccataccattcaatgtaactctcatgcacaaatacagtcttcagaatatcacacataattcactcccactttccctctgctagaatgcctttcccaccatttcttgcaattgctcctcaaacatactatctattgataccccacctgatactccccccaccaatgattaacacattaccataactaattctcttactaacaatctatttc

SEQ ID NO: 118996 - DNA, 262 bp, Glycine max
  Clone ID: PAT_MRT3847_78462C.1
gccactttgagcctccgaaaatattatcctgaagcaaacttacatagaactcatcctccatgatcagtcggtgaatgcattacttgtaccagaaaaatcttgtataattgcgggaggttactgtcggaacttggaagcaactatcgacatgtattcgagtcttgtctacccataatcaagaactgctgaggctgctatgaattacgctggaaatggctgacttagtcgctaggaatagcagtttcacatgatgcggcatgga

SEQ ID NO: 118997 - DNA, 459 bp, Glycine max
  Clone ID: PAT_MRT3847_78463C.1
gggaacaaaaaaaaaaagaggcattagccaaaaccccgttaagggggaaaacgggcccctaaaaaaaagccctttccaaaaataaaccctaggcttggggatcccggcccaggaccaataaacaaacacaacccggtttttttcactaaaaggggggggaagggtacggggaaaaaagggggaaaaacaaaaaataaaaaattttaggggaaaaaagggggggggaagggcaaaaaaggggccaaagtccaccccaaaaaaaaaaaaaaacccggatcggttttaaaccaaaaaaaggactggggtgaacggggaaaaaactataagggggggttaaaaaggggggaaaatttttttaaaaaaaaaaaaaacaggtttttacaaaaaacaacataatgggagacccttacggaaaaagggcctgggaaaaccttggccttaaaaaccccagggagaggg

SEQ ID NO: 118998 - DNA, 164 bp, Glycine max
  Clone ID: PAT_MRT3847_78464C.1
ggctcgaggaccacctatcattgaggacacccctatattttgaatgagggctatgatgcactctctctgctgcagcatttttccatcaacaacctgagggatcccttcattgaacgctagtatggtggccactctgagcacattgaggttggtgtgatggactg

SEQ ID NO: 118999 - DNA, 1268 bp, Glycine max
  Clone ID: PAT_MRT3847_78465C.1
caccaatcccctaccgcgattcaatgccgccattacattctccggtcaccggactccgtcgcgcccttccgtcggcgccacccgcagcctccgctttcgatcgccacgcgcgtccggcaacgccccttctcaaggcttttgcccgcgccgccgtctccgccctgctgtttctctgcttcggtgttcgcatgtgcttggcctcttcgccgccggcgccggctctgccgacggttcaggaggagcaaactgttcaagatgatcatgatggaataaaacaagatgacaaagaaactgtagtagataaggaattagaggaagcctttaatgcctggaaatctaaaacatttgcattgactgttcctctgaaagttgttgctctacgtggctccatacctccttcatggatcaaggacttcataaattctcaagggaggagaatgaagtttaacgtcaagtattatgcaagtcttgagaacatcttttctgacctatcaattccctttaccaaaggaaaaattggcccagcatctgctttggcggctgatattgttggtattggtgattcatgggtcaaatttgctattaacaaagctataattgaaccaataagagatgtagaagatcaggaatggtttaaaagcttagatgacaaatggaaggtatacctacgcaggaaccgtgagggagaaatggatcctaaaggtgatatatgggctgccccatatcgatggggctgcatggtaatagcatacaagacaaataaattccaaaagcataaattggctccggtagaggactgggcagatctgtggcggcccgatcttgcagggaggatttcaatggttgattctccccgagaagttattggagcagttttgaagtatatgggggcttcctacaatacaaatgacatcaacatggaagttaatggtgggagagatgctgttaaacataatttggctttgcttgcaaaacaggttcgactgtttgataggtcaaactatttaaaagcttttggagttggagacgtgtgggtagctgttggatggagtagtgatattattcctgctgctaagcgcatgtctaatgtcgctgttgtcgatccaaagttcggagcgagtttatgggcagatctttcggcaattcctgctgcctataggattcaaacatataggattggtggacgcatcatgggaccatcaccattaatccatcaatggatagagctttgtctgcaatctgcatgagcacttccttttaagcaggag

SEQ ID NO: 119000 - DNA, 359 bp, Glycine max
  unsure (1)..(359): unsure at all n locations
  Clone ID: PAT_MRT3847_78466C.1
aagaacnacnccaacggccnaaacgccaacaacgacgcgnnccggcgggacagggccgcacagacgcggcggggcgaacagnncaanaacnacgccgacaacggcaacgncgccaacacgaacnncncaagcgacggcnccgccgcgaaacaaaccnccggcgagggcagcaacnacgacaaaacggggaacgnnccgaancncggagncaccaccgacgacnccggcgcaagcaancacaaacncncgnncncgagcaacggaaangagacnaacncnggancgcaaaggggcacaagcnacggnaaacgcgnncgcggcggaacgagcgaggncgcgagcnacgccgacgacgcgaa

SEQ ID NO: 119001 - DNA, 168 bp, Glycine max
  Clone ID: PAT_MRT3847_78467C.1
cggctcgagctctcagtagttttgaattcaagtattgcaaaatatgatctccataatctcaagccttccagaactgaatagttggcaaaggattttactttgtttgttctttgaattctcctgaacagagatatgatctctttatataaactacaagtatacaacaga

SEQ ID NO: 119002 - DNA, 145 bp, Glycine max
  Clone ID: PAT_MRT3847_78468C.1
gcagcggatgaagcttctgtgttgtactagtatccaactcaggactcaatctttctactgctctattgacagcgaactatttacagaggagtgtgccttgcgcttgaaacctaataaacgtatcactcactcctagcttgatata

SEQ ID NO: 119003 - DNA, 178 bp, Glycine max
  Clone ID: PAT_MRT3847_78469C.1
atcgtgagcatatagaaccacaccaagcggaccgcgctagcagcggcctatcccagcggctaccagaatgttagcactccttgcgcttcttgcccttttttgtgaccgcaacatacgcgtgtattagtccacattgctaagtggctcctagcgccataatttcacagaccttcccagc

SEQ ID NO: 119004 - DNA, 1218 bp, Glycine max
  Clone ID: PAT_MRT3847_7846C.1
gagacgcttcatccctctctctttctctctcccaaaacgagtctttggatttggattagattcagattgtggccgtggcagccagcagcaatatctctaaactcgaaaaatggatcagcgaaagctacgagactcgtccaattcgaaacccgcttcagatgcagcaccccaacacgtcactctcacctctaaccgcttccgcaactctcaagctgctgtgagggagagagagaaagagaagggtgaaggggaaaacgaggatccaagtgcggcacgaaaggttctaaaggcagaccgcgagaagctcagaagggatcgactcaacgaacacttccaagagttgggaaacgcgttagatcctgatagaccaaagaatgacaaggcaactatcctcactgagaccgtccaaatgctaaaggacttaaccgctgaagttaataggcttaaaacagagcataaaacactttctgaagagtcacgcgaactaatgcaagaaaagaatgaactcagagaagagaagacatctcttaaatctgatatagaaaatcttaatgtgcagtatcagcagagagtcagaatcatgttcccatggagtgcaattgacccttcggctgtcattagtcaaccttactcatatccagttcccatacatatcccttctgctccaatctccatccacccatctcttcaaccttttcctttctttggaaatcaaaaccctggccacattcctaatccttgttcaatgtatgtcccatatactactccaactagccaccccccagttgagccgccatcaatgatgtatgcttccacgtcccacgcatcgaaccaaaaagaatccggtagcaagtcaccaggtcatagaaggtccagtggcgctgaaagaagtagcgagactgacgatgtggtcacagagcttgaacttaagatgcctggatcatcatcaacacaacagggttgcacttctggaggaaggaagggcaagatgaaggatagaaccatcataggtgggagtgcttcaagccagtattcttcatctctaggacttcaagatagctccaacagcgtgggtgacatcccgaagactgataattgatattgtatatggatttttgtaccatttaaccacttcatgcaggtcataaatctatagcagtttcgaattgatactcattccttggtataagtataatttagcaatagattctatcattt

SEQ ID NO: 119005 - DNA, 433 bp, Glycine max
  Clone ID: PAT_MRT3847_78470C.1
aattcggctggaggaaaaataaaagaaatggcaatggcaactcacctgcttttcgattttggagttgaggctgcacgaactgaaaaagagcatgtgatatcgggagaagaggcggtaagcaccatcagatctttacatataaattcagcatacttcattaaaactttagatagtaaattacactttcctttgagaaatgcataataacgccgccgccccccctgtctctattttttaaaataacattccctttccttaacccatcatttggtcacgaggaaagacagggaatgaatgggacaggatagatgagaaaagaaatatagaagaaatataggtgatttggttgaagagaaatagagtagaaatagaatgattagatttatgaaaaaacccttttaccccttacaagttaatggttttttttcttttt

SEQ ID NO: 119006 - DNA, 364 bp, Glycine max
  Clone ID: PAT_MRT3847_78471C.1
gcccccaaatcccggggagccccccccccccccactctctcagctgcctaaacaccaggctgctttgctagctgcgctggccaatgtcagcgaacgcaaggacttggagactctctctgaatcagctgcctatctcgctgcttcgctcgagctatcactcagaatgcgaagataactgatgaagagctctatatgcaacatattcccttcccattgacaggacgtctaccaggaagcagatgggtccaagacatcacttcttccttggtgatagtagaagaggaagttaacgccgtctgagctcccaatctcgacataatgagcatctagctcaaggccatcgctagcaaatgcacgcaaatgc

SEQ ID NO: 119007 - DNA, 1098 bp, Glycine max
  Clone ID: PAT_MRT3847_78472C.1
gaggcgtacgcccacgcgttcgtacggctgcgagaagacgacagaagggggctttcgcagtacttcaaatggccgagaagcaatctcagagacagaatcacagaaccggagagaaagagaaagaaagagagagagaatttcattgaccgccattgaagctttgcttcttctatctctcactcataacaaaattccccacacacattcttcattttctcattctctccaatttcaacactgttacggttcataattcttccaattaagacaaaatttgaggtgtgtacggttcaattggaccttctacgctgcgttttgttcgctcaatggaccaagctccgggaggattgcgcggatccgtgcatgacggcgctacgctcgagtcaattcaattcaacgaagaaattcagggaatcatggcgccggtgccggcgccggaaaacgctaactcgttcaccgcgctgctggaactccttcactcgccggaatctgacagcgctcggaaaccggctaattgccatgtcagcgcgaaccagaaaccctacctgctcaattctttcggcagcaatttgaccttcccttccaacgccgtcttaatcgaacgcgccgcgaagttctctgtgttcgccggcgagaactcgccgcttccgccgggggaggcgtgcctgattccagcagggaccggttccgtttcgaatttggatagagtgaagaacgagccacaggagaccgattcgaacccgtgctcgagctcgaggctgggttgcatttcggatcccgcggtggagaacaacaatcagaggaccgccaagagaaaggagcgagagaagaagctaacagtaacgttacttactttccctgattgcagcaaattggagaattagggtttctgttcaccgtagaattgaatgctcaaaacgtgaactaatacacgattttgtggaatccaggttaaaggatcgtcgaagaagagtaaaagcatcgccgatgagacctccggtgacggcgagaagcttccttacgttcatgttcgagttcgtcgaggtcaagccactgatagccatagcttggcagaaagggtaaacgcttgctcgagcc

SEQ ID NO: 119008 - DNA, 1279 bp, Glycine max
  Clone ID: PAT_MRT3847_78473C.1
tagagctccttgttgtgaaaagatgggattgaagaagggtccttggaccccagaggaagatcaaatcctcatgtcatacatccaaaaacatggccatggaaattggcgtgccctcccaaagcttgcagggttattaaggtgtggcaagagctgcaggctaaggtggattaactatttaaggccagatatcaagagaggaaatttttcaagcgaagaagaggaaattatcattaagatgcatgagttgctggggaacaggtggtcagcaattgcagcaaaattaccaggaagagacctggagacttgaattgctagtagatggcattgaccaagaaatattgaactgggttaaggatggaaaatacattttcttgttcggaggggatgatcctgaatgggtaagaagatttgtgaaggaagcccgcagagttgcaacggctacacaaatacccctagagatggtatatgttgggaaaagcaacaaaagggagcaagtgcagaaaatcattgacaccataattcgtgataagctcaacactcaatactggtcagagcagagcatgatatggttcttctggacccgtcttcagagcatgctcttctccaagcttcaactcaagcaaacagacgacgatgaccacgtgatgcaggaaatcaagaagcttctgagctatgacaaacagggtggatggattgttctggcaagagggtctcacattgtggtcaatggacatgccacaaccgggttgcaaaccttggtggagtatgatgctgtgtggaaagaacttgctgacagagatgggtttgaaccagcatttaagaatcactacgacaaggttcattcaattgttagtccttgctgcaggtttgagttctctcattcaatggggagaatcccagagaggctcacgtgccccgagtgtcgccgcaacatgcacgtgctcaccaccttccagtgctgccacgatgaaaaaattgatgaggacttttttgtcagcactgttactcctcctaccatttgataattcattgttcactctctattgcttcctgtgattctctgcagcgcaatttcatgcatagccctatatgtttacatgtatttttttatttttttttatcacatatctatgtaataaaatgtgagtggtgaggttcaggctcccccattgaggtatgggtaaattattatgtgatttgtgtcagggcttgactcttattgtacaattgacacttaaagaagagtatggataaattgagtacttttgaatgatcaaaa

SEQ ID NO: 119009 - DNA, 235 bp, Glycine max
  Clone ID: PAT_MRT3847_78474C.1
ctcgaggcgcactcgctgctgagcctgaacaatcatgtgcccatggttcttggatcttgaagacgttgctaagagcgatcctgctgaatggacatcgctacgggagtaccggggtgacccaaataaagtgccttataccttgaaaaacgactgaaaatgaattaaccatgcactaggtgtattatatcaaaggttactcgccaactcattaattggaccaaagaagtgccttatg

SEQ ID NO: 119010 - DNA, 530 bp, Glycine max
  Clone ID: PAT_MRT3847_78475C.1
tcgcttacgcgcggttttaatccctcaatctaaaagtgcacttcccaaaaacacagttggaggaaccattctgcgtagcgatctattggcaaacattgtgccagaaggccaatttagagcaagtttccgatttgcagcgcactgatatgtattaaaggaatgattaaaatggtggccacagttggccttcctgagaatacaggtatagcattagcctggactatgactcttttcttgggggggcgagccagttgtgatattcacaccgtctgctgtcaagactgtgaattatggaatcctgcttgcacaaaagcaatgactatgtcatttaatccaaacccgtgttctgatgcatggagtttggaatttctgaagcgtaccggatttcattgtgatatcatttgtggaatggatggtctgtcaccccagtgcaggatgttcacgttacaattgactggtatattttccttcaggaatgtgttcccaggacctattgtgtttaaaaacacaaaatccttttgtgttaaata

SEQ ID NO: 119011 - DNA, 496 bp, Glycine max
  Clone ID: PAT_MRT3847_78476C.1
ttgtagttaatttttatttttattttattatttattttattttatatgatatttattataattatttaactttatcttttctttttgatttatattttactctcttattttttaaaatttattttattaatttcttcctttaataaaaacgaaaattaatttaaattttaaaaaaagaataaataattcattcattatttggttttaatttggaattaaacttggaatcaatggtgcaaatcaacacactcttacgaaattggattgttaaatcacttcgctatggtggttacggaataataacctctccctttaaagttattataaatcaaaacgaggaaattagagtggcaaaagagaagaattagaaatagaagggaaagtatggaggaagtgtttgatatgtgaaggagaatattcagaagaggagattcgaatgagtttggagtgttttcacagttattgtaaagaatgcattgaactaacctcttctact

SEQ ID NO: 119012 - DNA, 427 bp, Glycine max
  Clone ID: PAT_MRT3847_78477C.1
cccacgcgtccggagatgatgaagagatctggaaaacatgaagcggagggaggagaagacatactcatcgacagattcctcaagcgcctctctttcgtagccatcgcagtagcctcctcctctccgccgcttcctccaacaactacaaccactcccgcgtcctctgcgtctccgccggcgccggccacgaggtcgccgcgctccgccgcctcgggatcgacgatgtcaccggagtcgagatcctcgagtccccgccgctcgtccgccgcgccgatccgcacaatctgccgttcttcgacggcgcgttcgacctcgccttcaccgcgagattcgacgaggcactgttcccggcacggttcgccgccgagatggagcgcgtcgtccggccaggtggcgcgtgctttcttctcgttgcggagtctgggga

SEQ ID NO: 119013 - DNA, 451 bp, Glycine max
  unsure (1)..(451): unsure at all n locations
  Clone ID: PAT_MRT3847_78478C.1
aaggagatgatgaagagatctggaaaacatgaagcggagggaggagaagacatactcatcgacagattcctcaagcgcctctctttcgtagccatcgcagtagcctccctcacgctcctcttcctcctcctccgcacgcccgacacgtgtgtcccccaccacgcgccccggaagccgcacctccgcttccccaaatccacgtgcgacttctcctccacgcgcccccacgtccccgccgagaagcgcgccctgcgcattcaatccacgcgcctctggaccgccaaggtcctctccttctccctcctcttccgcgaccacctcctccccctcctactctacgccgcttcctccaacaactacaacccactcccgcgtnctctgcgtctccgccggcgccggccacgaggtcgncgcgctccgccgnctngggatcgacgatgtcaccggagtc

SEQ ID NO: 119014 - DNA, 458 bp, Glycine max
  Clone ID: PAT_MRT3847_78479C.1
gggggttccttacatataaaatgagagaaaacccaaagccttgcaataaataatatataaattgctgagaagaagtacatgttaatgtagagggatcagaatctaagtggccaaaatacatcttaacctttgaaatggcaattgggaatccctacactgcattgcccatagcattccgggagagccaactgtttacactccaaaacatttcaaccgtgaaaccattcattggaatggtgtgattcccttattgcccatagcattcccaaagagccaactatgcacatcccaaaacactttaacaggaacaccatccaccaaaatggggtgattccctctgaacttccacttgagacgcttcaccttcatcactggcttgctatcaattcgaatcacaagagaaggatcgttgagtcctaacgtgtcacactcaattgtgacatcatgcacctgcccct

SEQ ID NO: 119015 - DNA, 1114 bp, Glycine max
  Clone ID: PAT_MRT3847_7847C.1
gttccttatcttacgagtcaatacaaaagcacactatttatacaagatccccaatttctctatttttcctccgtttctattgcaatttctcaattactacatcgtattctgcaaattcaaactgggtcttggttttctgaaagatgggaggtggcaaggacaagcaccatgatgaatctgacaaaggaattttttcacagcttgctcatggggtagctggtgcagcacatggtggacatgggtacccacctggggcttacccaccaccacctggggcataccctccgcaccaagggtaccctccacaacatgggtatcctccggctgggtaccctccacatcaaggttaccctcctgctggttacccaccagctggttatcctggttcatctcatgcaccaggttctcatgggcacggcggcatgggagcaatgctcaccgggggtgctgccgcggctgctgctgcttatggtgctcaccatgtctctcatggctcccatggctcctatggccaatatgctgcacatggtgctcacatgccccatggaaaattcaagcagcatggaaagcacggcaagttcaagcatggaaagcatggcaagtttggcaagcatggaaagcatggcaaattcggcaagcatggtggtgggttcaagaagtggaagtgaagaatgtgtatctaactatgattctaaaatgcagctctgtgtagagcttaaatctttataataaaccatactttggatgatgaaatcaatcgatctatgagattatgatacttgaccccttgttttcttttttgttttctgttacttcgatacttttgggctttggcattagcaaagataaacggttctgtttagatggtagaagttttgaacagcaaaacacacgggcactggatcaagagcaagtctcaaagaaccatagggatattatggcctgcaattgcacatctggaaaccgaatcgttctctttttcacatatacagtttcatggagttcatatgaacaaagatagttgaacagaacaaatgtagaactctcaggacaagtatttaaccatttgtctaactttttgaccaattgcaatcaacaacaaatccttttatat

SEQ ID NO: 119016 - DNA, 419 bp, Glycine max
  Clone ID: PAT_MRT3847_78480C.1
tacggctgcgagaagacgacagaagggtttatggataataatatggtactctaataaaatacaggggaaaaaaattaactacaaatatgtatttaattagaattatttcacgtatatttcaaaacaagtaaaagtattgaaatgagaaaaatggtctcaataaagaatttgtacggacaaaagttcaaaaattgacttcaaataatagagtgatgaatgaaggaagcaacctgtaatccgcgacaaagatttgggagtagccaccataggtgatggtgccatcccagaagattccattgtagacaaattggaggtcttggcagtagttttcctgatcggtcttgcagtggtgacattccaaacatgaagccggcaaacagcccacacccactctgtctccttccatgaaccccttcaca

SEQ ID NO: 119017 - DNA, 218 bp, Glycine max
  Clone ID: PAT_MRT3847_78481C.1
tttttattataatcttaatcaaagcacaaaaatgctacgcatccaaaaacagaggggaatatgatacattgaggcttcaaaagctgatctatactaatgacgtgcaacaaaattgacaatcccgttcagatggggctggttctaaatccaatcgattgcatcataatcacgcggcggtttttacatagcatactctgatggaggggacatgtcacact

SEQ ID NO: 119018 - DNA, 361 bp, Glycine max
  Clone ID: PAT_MRT3847_78482C.1
ccacgattcctcactcttcttccatagcctgcggtctgcgactctaatcttctgggctgcagtgagatgaaccctagctccaattggctccattagatacctctttcctgcatcttatatatcccattctttctcattcacacagcatcatgggcgtcaaacgttttgctgaaggtggcatagcttacatcatcgcctgatgtcacacacacccacttgatctcatcaaggtccgcatgcagctacagggggaaaacaatcagcccaaaccgctgcataatctacgacccggactcgccttacaaaccggctcgaccctacacgtggcagctgcacatacgccgacccgtgagggccccat

SEQ ID NO: 119019 - DNA, 292 bp, Glycine max
  unsure (1)..(292): unsure at all n locations
  Clone ID: PAT_MRT3847_78483C.1
aaacacccttntcaaccacaccaaaattaaaaacataaaaaagcataaaaacacacccgcccgtatattttttaaaataaaacatccccaccccatatttncacacttnattaaacactatcgtcccttctcacgaatgcgttacattctaataccttccctgtacgtaaaaacaactcccaaactattcacacttaaacttcataaaccacaccttttcaattttccccacactttcctcaaataaaaattacttactactccacacattttcctttcatcaagacacact

SEQ ID NO: 119020 - DNA, 821 bp, Glycine max
  Clone ID: PAT_MRT3847_78484C.1
actgggtccagaagacaccagcaagaacatagtagagataatattccactccagctggctgaagaagcaatcaccagtgtgcaaaatagaccgcatcctcaaggtccacaacacacagaaaaccataaccaaattcgaagagtacagagactccataaaagccaaggccacgaagctctcaaagaagcaccctcgttgcatagcagacggcaacgagcttctcaggttccactgcacctccttcaattgctccctgggtctaaacggctcctccaacttgtgcaactcgataccacagtgcaacgtgtgcagcataatcaagcacgggttcaaggtcaccggaggaggagccggcatcttgacgacggcgacgagtgggaaggcgcacgacaaggcggcgtgtgtggacgagagtgaggagaagagggcaatgctggtgtgtagagtgatagcaggcagggtgaagaagaatattgcagaaggtggtggcatggaagagtatgattctgttgctgctgctgttggggcttattctaatttggatgagttggttgtgtccaacccgagagctattttgccttgctttgttgtaatctatagaggcttttgatatcaatcacttttactttgctttgttaattagctcttttaattaagttctagcatcatctagttagttatgggggaagtatttgatcatttttgtatgtgttggtggctatcactaactctccaatctatggcagacttaatcaacgactgtatattactactacaacaattattaaccacataatataatcctatttatgtgtctgtaa

SEQ ID NO: 119021 - DNA, 371 bp, Glycine max
  Clone ID: PAT_MRT3847_78485C.1
ggccagttctgaagagaaaatctcccttctttcactagtaaaattttcagatattcaaatagatcccgttgctgcattcagtaatcacaaccacctggaacgccattattcaattcaattggaaataaatcatgggtcgacctagaggtgatgaaaagtactggaatgaagtaacgagttttgaagagaacgggaagcagaagtggaagtgcaagcattgtgaaaaaacgtatggtggaggttattcaagaattaaactgcatttagataaagaacaaaaaggacaaggcattactaaaagcaccgtttattgtagcaatgaagaagttctcaacatcattgcttccacttaaatccattcacaagaaact

SEQ ID NO: 119022 - DNA, 293 bp, Glycine max
  Clone ID: PAT_MRT3847_78486C.1
aggggaaggtgaggatgaacacgaagaggaaaccagagagaaaattccactgtattcgaagcatgtgtaagtttcctgtgttaagaagcaaggtgaggcagcgctgctaggaatcacatctgacggttcaaccttggatttcaatccttaagacgatgagatggtggacgaggacggcacccttgacgcccacacttctccgctctcatcctacattcaagtcggctatgaccgcgtccggagctccggtctagaccaacggtcgcagattccggcaggacgtcgacgccaac

SEQ ID NO: 119023 - DNA, 181 bp, Glycine max
  Clone ID: PAT_MRT3847_78487C.1
gaaaaaaatccccacagagggggggtttttttgagagagcctctgttctgtcgtccagaggctaatccaaaaagacaaccctcggtggggtccggtgggaagcaggctgcaactttggtttgaacccatccctccaaaaccaaagcattaaacaagggcggactcatctggtatgtgcccc

SEQ ID NO: 119024 - DNA, 381 bp, Glycine max
  Clone ID: PAT_MRT3847_78488C.1
aattcggcagaggcactacgattacttgcactcaagaaggtgaacagactcttgatggatactatggatcatttgattgtcctgatccaatgacattctgtaataccgtcggacagcagttctgcccaaggaactgtatgggaagaggtacttgtgtcaataatcaatgccagtgtgattcaggttacagtggatcagactgtgcattgggacctttaggggctaattaagacgccggctagaaaatacataattgatttcgtgatgggattatgatttgctgatattatttattttttattggctaaatacgaaaatagtttactattttttactatttgatacatcatactaactctaactactactaaaaaaaaaaaa

SEQ ID NO: 119025 - DNA, 1099 bp, Glycine max
  Clone ID: PAT_MRT3847_78489C.1
gaaaaaaaaaaccaaataggtcatttgtcatttaaaataggcaaaattgcattttggtctcccactttaggtctaatttcgcatttggtcccccactaatttaattcacaaattgggtccccctgttttataaaattctacaatgtcagtctttaaagcctcaattggatgttgacctacaatgacaccaccttcacgtgccattgatgccttcagctgaccttcgccttctcctccctcggcatccgtcgtggcagtgttgtcttcgtcctggccctgaacgtccccgtcatgtacgagctccacttcgccggcgcaattctcaacaacatcaacacccgcctctacgcccgcaccgtctccgtcatcctccgtcatgtgaaatccgcgctagtcttcgtcgactgcgcctcatgccacctcgtcctcgaagccctatctctcttccccgccgttgataatttcctcgacatcgacgaggggcttgagtgagagtgagaggggatgaaaaaaataaaagtctctcttccctgaaaaccaaaatcaatgcctaaaatggaatgatgattgaatgcttgtgttttgtgttcgttggcttgcaaggatctggtaaaacgacgacgtgtacaaaatacgcgttttatcatcagaagaaaggttggaagcctgctctggtgtgtgcggatacgttcagagctggtgcttttgatcagttgaagcaaaatgctactaaagcgaagatccctttctatggaaggtacacgctggtttcttttcttgttggagaatttcagagctggttggatttaactgtagacttattgttctgttgttggacatgctgcacatatgatatacctgttgaatgctgatagtaaagttaaggttgtatttctgtatagatcatgccttgaatgtttgtatttttttattatgttttgaaactattagatgaatagtattccaagagaactggtgattatttttcgaggcacaatttgaagatttgcttctagaaaaatgttaatagttgctagatgttggaattgctttgcagtctacaattttatgttgggttagaatttgataacttattatt

SEQ ID NO: 119026 - DNA, 577 bp, Glycine max
  Clone ID: PAT_MRT3847_7848C.1
gaaggctgcaactttatagagtctatggagtctgattttggtattccatcacgataggagcactttgcttgtgcaattgatctctatggtagggcagggcatcttaagaaggcaaaagctttggttgaaacaatgccttttgaagctgatgaaatggtgttgaaaaatttattaggtgcctgtagattttgcgttgatattgaattagctagtcaaatagcaaaaaatttgctagagccggagcctgaggagccctgcacgtatgttatactctccgaaatgtatgggtgtttcaagatgtgggatgagaaggctagtgtaacaaggatgattcgagataggggagtgaaaaaggttccaggttggagttggatagaagcgaaaaataaagtgcacgctttcaatgctgaagatcattcccatccccaatgtgaggagatatacatactactacaacacctaaaagagggaattaagttatttgataattttgtcgatcagtttagataatctagatgtttctagtgatcgaaagattttatgattcttgtattttgtttgctggatttggttggaa

SEQ ID NO: 119027 - DNA, 186 bp, Glycine max
  Clone ID: PAT_MRT3847_78490C.1
cttattttatgcttttcttggtgcttcactgcccaacatatttattaccaccgagcattgctggtctgatagttatccagtaaaattttccatgagtttgatagcctctttgccatcatacaatattattactgaagcctttcactatttcatccatacgggtttagtactacgtgggacatgaca

SEQ ID NO: 119028 - DNA, 506 bp, Glycine max
  Clone ID: PAT_MRT3847_78491C.1
gcgaaacacacggtatgcatcacgcgcctgttaaccccgtgggcacgctcaccaaaagattctactgttacaaggccatgccatgttttatgacacggctatcgaactaacacagcagcaccgaggtcgaacactaccgagaccctcaggggtgagaggatcatgctgctgttcttgacgccgtgggagaggctgaccctgctcgagatgcttatgatcatacatcaccttgatcatgtgataatactgtactatgtccacgtgcactgacttgacttctgcatggcaccgttatacactaaaatccatggaaactatggcgcggagcaaccttggactatgacgatcacacaaagttgcagttcatatgtttgacacgctaacataatcttgatgagggcgatccatactatagacacattgatctagctgtctgatacatagcatcctacgcaacttgtgagtggtactgatttattgtcaagagtaccactgctcatatcaga

SEQ ID NO: 119029 - DNA, 817 bp, Glycine max
  Clone ID: PAT_MRT3847_78492C.1
gcaccagcacagagcagagtgagagagtgttttgtttcaatgtggctaccatggcgtctacgaaccacagcttcgcgtccaaaccgatcccgatccttccccatcccctgctcttccttcaaagacatccaatccatcctccaatcccaaccccaacctccctctctcttccgccgccttatcgtctcgccctccctcatccgctcctttagcagcccccgcgccgccacctcctccatcgaaccgcctccggactccgaccgttccgccgtcgtcgtctactacaccagcctccgcgtcgtccgccgcacctacgacgactgccgcgccgtccgatccatcctccgcggcttcgccatcgccatcgacgagcgcgacgtcagcgtggacgagcgcttccgcgaggagctgcagcggatcctcgtccaccggagcgtgatgctgccgagcgtcttcgtcggcggcttgtacatcggcggcgccgacgaggtgaggaagctctacgagagcggcgaattgcacgagctgatcggacggttgccgaagtcgcagaggaacatgtgcgatttgtgcggagggctgagattcgtggtgtgcgacgagtgcgatggaagccacaaagtgttcggagagaagagtggtggattcaggagctgttcgtcttgcaattccaacggtttgattaggtgtcctgcatgtttcgtggtgcagccgcaacacaccaaataattccattccctcctcttctcttcttcatgttgaacttagatatattcctttaatttttcattggtgatgatctctctgtgaattactc

SEQ ID NO: 119030 - DNA, 397 bp, Glycine max
  Clone ID: PAT_MRT3847_78493C.1
cgtcctttttttttttttttgcttaactatccaagcggacacacattatgtttatttaaggattaggggaaccagtgcaagggggggcttcttccatctgtggtcagcgaaacaagtcaaaggggagggaaggagccaaatgaacatataatgcggcgccacctggtgatgccatcacccacgggaagctggcacatctggaccctggcttcaattgcatgagcttggagcagctccataacaacaatcgtgagggatacttaacactatccatgcgaggaccatcgagtgggagccccaccgtcaccagccctagggggactgcgtgacctatcaatcctcccagcttcactagcacaatcagcctgccgtggatgatcaagtaattgcccatatg

SEQ ID NO: 119031 - DNA, 563 bp, Glycine max
  Clone ID: PAT_MRT3847_78494C.1
gctcagcaaaattaattatatataaatatgaaaaagagtaccagaggtactatataccgtatagttagtatggaaataacagattcagagcattaagcatctgaatgaaaatgtaggggaaaaatacatgccctgcacagctatttggccgactatactctattgaatgttaagcaaagggacaagagaaaaagttgggagtagcaatgacaaagttaaaacaaatgtgtggccacacaagaaagaacaggatatgaaacgattgtatacgaggagatattggtctaggaccagttgaggaaaagatgatagaaaacaggctaaggtggttttgacacgtataaagaaggccattggaggcaccagtgaagattgtagattgcatggtttttaatcctgtgaaaaaagagagaggaaggcctggaaggacattgaggaaggatctgatggtaaataatatatctaaagaattggtatttaattgatccaaaaggcatcatgtgatctattgtaccgaccttcgctaatgggataagacttttggtggtggttaaacattgata

SEQ ID NO: 119032 - DNA, 269 bp, Glycine max
  Clone ID: PAT_MRT3847_78495C.1
aaaaaaaaaaaaaaaaaaaaaaaaaaaaaaataaaaagacaaaaaaatctaaaaaaatggaaggtgtcatactcgtgcatgcggacgtcatacctattctttcaagcaacctgcttttcaattcactgaccctacttctattaccttgactctcattaaacactgacttccctctatttactcgtcttgaaccaaattcaccttgctccaattctgctcatacctattaagcccgcatcgctcgaccttactaacacctactcgacctt

SEQ ID NO: 119033 - DNA, 899 bp, Glycine max
  Clone ID: PAT_MRT3847_78496C.1
tcgcgatctagaacttttttttttttttaatatttctcaagatgaagcaactttattatgaataacggtttaggattttacaacttgtcttccatgtaacatacaacatttgagtttcccttatgtatttttcaagctagcagaggtaccaaatgctagttattaagtcataatgtcattagtcaaagagaaatatatgtaatacaagaaaaaggggcttggtataagtgaaaaacgctgaagtactaggactacattccaattattctagcatcagctaaaggacgtttagttaatcatcaactccttgccagattcatattgaggaaaaagcagcactgagggtgtccataaaactctcctttccccataaaaacccattgggcttttccaaatgggtaaaaaaaaagaaggaaaaaaggagactaaaatgacaaacccacagtgaagcccaacccaactgtgctggcagaccatgcatggcaaggagcttccttcaaacaaagatgtcaccactttagaagatggtaaactttatgacatatattacacatatagctaaagaagaccaaaaagagagtgaaaacaagagtggtttttgtgaactcaatcatctccttgaatataccaacaaagtagcatggtggcacatcgacgtaggatatagagacgagcacgttgctccttcaccaaagaagcacacttgctgctaatcccatatccctttctctttgcaggaaccttagttccttgcttgcacttgttgtagtttagaaactcagccatggatgcttatatggtatgataataaaatataatgcaatggtagcaattaagagccttttctattttctcaaaggggaacccctaaaaaaaaggcttgctcggacgcgtgggtc

SEQ ID NO: 119034 - DNA, 483 bp, Glycine max
  Clone ID: PAT_MRT3847_78497C.1
aggaattcggctcgaggagagagggactcattggaacttcccactaagccatccacaattaacattcctcattattactctagtatttcattgttccttcattttgtatccaatgccaaggtgtgtaattataaaggttttgaaatatacttcataatatctaaatcatttcaaaacttaaataaattattttatcatgaattcttttaaaaaaaatagaaaaaatgacggccatcgactattcatctcgaaaacccgtataattatttcactgaccgacacctgcagagcccccagctttacctataaagactgggattccatctgggcgaactaatggacataaatggttgctgggtgaaagcgccattcgctcacaataacacccaacataccagccggattaataaatcgtccaacctgcggtgacatacgattgacctatctcacaccaattgggtttttctttctgcccgctttaca

SEQ ID NO: 119035 - DNA, 417 bp, Glycine max
  Clone ID: PAT_MRT3847_78498C.1
gttctccacatgacccatcatgactttgttattagtgatgaaacaaaacatgcttctgctgcgaagagtacaacttgcgtagaaatatgataaaaatggcgtgcacagaggagatagctcaaatatctttaccaaaattatattccaacagaagtaacaaggctttgcagagctgtaacattaacgaaagctttaatactttgatgagtatgcgatgcgtccttgaaacttgcttgcctattacatcagtcaaatctagctctaacggatttccagagcactgccactcagacttccttaatgattggcgttggaaggtgagaaaactttcaaggcccttgacacctgcgaaaacgtaaacaaccctgaggctgagcaagacgcatcatacctctacgctttgaaacatccttagct

SEQ ID NO: 119036 - DNA, 386 bp, Glycine max
  Clone ID: PAT_MRT3847_78499C.1
ggggaaaaaaatagacttaaaaaggccccctggttttttttaaaggctttttaaaagccccttggtttttaacagcccccgtccgtaaaagggggaatttccgggttttgcccaaattacccaaccccccttttttttttttttttccaatttttgggggcccaaaaggcaaaggcggggcctaattaaacaaccccctttgtttgatggggggggcccataaaaaaatggggcccccaaaaaagggccttgtttccaaggaaaggggaaacggggtttgttccaagaacaccccccatgggttcatgaagccgggggggattctttccaaaagtttttgggggggaaacaacaagggcctgggttttgggtccctcccccccccc

SEQ ID NO: 119037 - DNA, 180 bp, Glycine max
  unsure (1)..(180): unsure at all n locations
  Clone ID: PAT_MRT3847_7849C.1
gcctgcaggcacggatccggaatagcgggcgcgacccacgcatacgcccacgcgtgcgctgtctcatttttagcccncgctatagacgacccgaagctcagggggcgtccatgttaccctatagcgtgttctatagagacctcgtaataacaatgactgtccgtggtttctgagcgaaat

SEQ ID NO: 119038 - DNA, 130 bp, Glycine max
  unsure (1)..(130): unsure at all n locations
  Clone ID: PAT_MRT3847_784C.1
acctgccaggccgtacccagntttgccntatagtgagtncgtcattagagcttggccgtcaatncatggtccatcagctgtttgcntgtgtgaaatngtnatgccgcctccaccaattgccaccaccaac

SEQ ID NO: 119039 - DNA, 623 bp, Glycine max
  Clone ID: PAT_MRT3847_78500C.1
tttcaaaagcaacagaatgatctcttggcagacttggtagatattccaaggaaggcatgcgacagtcggatcaatgaatttgtgaaacgtgctagatctgctaaaattcatgcatatataattagtcatcttaggaatgagatgcctgcaatgatgggcaaagctaagactcaacaaaggcttatagataatcttgaagacgaatttagaaaggttcaaagggagtttcatctaccagctggtgattttcccaatgtagaacacttcagagaggttttgagtggctatagcattgacaaatttgagaaactaaagcccaaaatgattcaagccgtcgatgatatgcttggatatgaaataccagagttattaaagaaattcagaaatccttatgattgaattaaaagaatgtttaaacatgttattatgtgatgaatgttttttggctgagattttgatgtttagattgtttaaaaatgttggatttactgatgtttggatgtctatagtctataccccatgggtcacggcccatccaatatattgaccttgtctaatatgcttcaaattgaggtgtatggatacaccttttaatatgtaaaaaccctctctttattttccaa

SEQ ID NO: 119040 - DNA, 392 bp, Glycine max
  Clone ID: PAT_MRT3847_78501C.1
atagtccttgaagatctcttgaacagtggagggtttggaaggcatttagccaaaggctacagatcaaagagtgtagagaaactatgcatcagtttttaatgaataattaaaattggtcaacattatttatcacacaatattcataattaattatttgttttgataataaatagtaacattaaatattatattactatttattataataaccgttgataggatgtaattaaatttaatgaataattaaattgctcaacattatttagtacacaatattgatatttaaatattagttttataataaacaatagcattaaatattatattaatactttcgttcttttttataaaaaataaattatagtgtattttatattataaataagaataga

SEQ ID NO: 119041 - DNA, 279 bp, Glycine max
  Clone ID: PAT_MRT3847_78502C.1
ggaaggaggcgtccgatgggtgggctttgtggcaagccccttgctgaagcagaagggcgtgaagaaccgggagctcatccacatctctgactggctgccaacactcatgaagctggccaggggacacaccaatggcacaaagcctctggatggcttcgacgtgtggaaaaccatcagtgaaggaagcccatcccccagaattgagctgctgcataatattgacccgaacttcgtggactcttcaccgtgtcccaggaacagcatggctccagcaaagga

SEQ ID NO: 119042 - DNA, 344 bp, Glycine max
  Clone ID: PAT_MRT3847_78503C.1
gttctagatcgttagcggccgaccccttcattaagttgttgagataattttctatgggagatttcattgaaaactcaaataattaaaagtatcattgactctcatgcattcgtgactataaatttcggtgacctacgaagcaacctggtatattaatttggtttcagctagtcttcaatatacacttggacatggctcaaaccaatctttgttctatatctgtaccttttcttattctattaatgatcgcctttaatttcagtgcacagattactccagttagtgcaggtttgtctttctcattgaaaaatgcaaagatgtacaaaagcatatatggtagaatt

SEQ ID NO: 119043 - DNA, 309 bp, Glycine max
  Clone ID: PAT_MRT3847_78504C.1
aacccaaaatattataaataaaactccccaaaaaaatattctcaaaatttacaatacttaaaccaacctttaataaacaaacatacaaataaaactaacatttaaaaacatttaaatttttaaccctattattaatgtctcaaaaactcctcacaatgaaaaactaaaatttaaactataacctacaaatttgcttaatacattatttcaaaacttggcctttctttaacaaaactttaacttaaccccaaacccgtaatttaaattttccatttttctctttaaatttgggtctaacaaaattccttt

SEQ ID NO: 119044 - DNA, 124 bp, Glycine max
  Clone ID: PAT_MRT3847_78505C.1
tttttcccataaagttttgaacagttacgggggaaatttgcgttttcacacttttgtacataactgacttcaaagtccgggcggaaattactccctggtcctttacaaggacttgatacagacc

SEQ ID NO: 119045 - DNA, 203 bp, Glycine max
  Clone ID: PAT_MRT3847_78506C.1
tacagccgtagcctcgatctttaggaaaagatttgaagattcgcgaaggttctgttctgctatggatgttgtgtctgaattggggaaaatcgtttcagcttgggggtgcaacagatggctggtttcttctctttaggcggatcaccaaacaaagggaaaatgagggatgtttgaaaagggagggcaccaataatacccttttt

SEQ ID NO: 119046 - DNA, 245 bp, Glycine max
  Clone ID: PAT_MRT3847_78507C.1
aatcctcttaatcttaatctcatggcttacttatacaaactaaagaaggtcttataccaccgcaacttcacacactacttcgtccttcttatccatcctcaccacaccaatactacttaccccacgttacatactgtccacacctctaacaatccttaacctattatcttatatcttacatattatatcttgcttaccaggcatgtttcaaatacactacacctatttcatcataccaacttttt

SEQ ID NO: 119047 - DNA, 202 bp, Glycine max
  unsure (1)..(202): unsure at all n locations
  Clone ID: PAT_MRT3847_78508C.1
aaccagaatgggtagtctccattgtgagaaacatncctggaagccgtgttggaaaggttttacttcagacacanaattagtacaacttgctgtacgaagataacattgtgtgatatgctgtgaggggtttcaaagggaggaacttanntttgcaagtaccttttagacaggnnncaggggttagttnntttgtacccgaact

SEQ ID NO: 119048 - DNA, 464 bp, Glycine max
  unsure (1)..(464): unsure at all n locations
  Clone ID: PAT_MRT3847_78509C.1
tnnnnaaaacaacaaggggggggggttttttaaaaaaacaaagtttcctcccctcccctttttgcacaggtttgaccaatacacccaattttttaatttgtttttaagggacacttggaaaaacaaaaagcaaaatttccaacgatttttttttttgggagaggggaagcccaattttttttttcaaaaaaattcggttggtcccctaaaaaaccgatttctacccccactttaattgatcaaaacttttggaccccaacaaggagggttttttgggcaccataaaaaagcttttagttaaccttttagggtcccaaaggtgcctttgagttgggccttgttttttccaaaaaggctgtttgagactttttttaattttttttttttcctccctgcctttaggggcgggtgtggagggcccttcacaaaaaaaaaaaaaaaacaaaggtttttttttttacctt

SEQ ID NO: 119049 - DNA, 172 bp, Glycine max
  Clone ID: PAT_MRT3847_7850C.1
acgaggttggatgggttttgaattcaccttctggatctgttgaaggactcatgcaaggaactcccgctaaaattgctgaaatgaaaaactggctttgcaaaactggatctcccacttcaaagattgaaaactgcgttttcacaaacgaagaaggaaaagaagctttaaccta

SEQ ID NO: 119050 - DNA, 336 bp, Glycine max
  unsure (1)..(336): unsure at all n locations
  Clone ID: PAT_MRT3847_78510C.1
ttgctcatgaattctttgatggaaattttacggggggttttttgttaccaatgttggtgaatcgcctttatcctgtaaggcaattaccttcagaagtctgcgttgcaaatgatacatgtggtagtgtccatggccaanttttccccaaccattgggaaacatgttaaggatgggattattatcacgaagctcaccaagattaactctcagtcacgtgttaggtgaatgcaggacgtcaattcgaaaggacgtcattccggataccgctagcatcaagccacttgtgaagcatggaggcccagctaaattctatggttgatgagaatgcgtttgctt

SEQ ID NO: 119051 - DNA, 447 bp, Glycine max
  Clone ID: PAT_MRT3847_78511C.1
aaagacaagtttgttgctgtagactttggtcctcgccagctggctgttttatctgcattcttaggtcctgatcaaaatgcaacagaaaccttattggccagtgatcctgatgttgctccatgggttcagaaataccaacggagccgtgaaactgtctctcagacagattatgaggttgacctgataaccactttcacaaaactgagtaccttgggccaacaaatcaactatgaggcatatacatatcctcccccaaagatcgacattaccaaactcaaattgtaaaagtaagacacatatggtagtaccatattatcttcctcctcaagacatttcaagttttgacttgtttataattattctctttttgtttttttaacttgaaactttgagcttctatgtaattattcatgcacatacagtgagataattaagagtgttcacgaa

SEQ ID NO: 119052 - DNA, 309 bp, Glycine max
  unsure (1)..(309): unsure at all n locations
  Clone ID: PAT_MRT3847_78512C.1
gcgtgcggccaagtttttatctgagaatagtgctgcgctaggcagcctcactatggatgccttttatttgtatcctgatgaatatgaacactatgaagaacctaccgagtcaagtaaatcatcaaatgctggcttcataattagacagcaattggcggtggttcttccctgcttgtgttactactcctcaganggatggagctttatttttttttaaaaggcagaaaaagcaanccaacaaaannnccccgggggaagcggggacccgaccgacagcaanggnggcgngcccgagggcaaagggaccag

SEQ ID NO: 119053 - DNA, 240 bp, Glycine max
  Clone ID: PAT_MRT3847_78513C.1
gcacggactactctgaccaatcataaccaaatatttgatggccgcgacctggacaaacagcctgatgtggaatctccaggcccacaacttacctcctgcgtcttgctaactatactcacgaactgttcattccacccgaaatttcactgctactgaactctgccgtggggtggtatccatgggaggctctaggaaggtctgcgttggaggcaagtgctagctatatgggaccaaacactc

SEQ ID NO: 119054 - DNA, 1584 bp, Glycine max
  Clone ID: PAT_MRT3847_78514C.1
atttgcacgtcaagaatctcaagagtccccttcctctcccctcccccctctcaccttccccttggtcctgatcacaagccacccgtcaccttattcccccctcatcctgtggtcgctccttgggttcaaattgtcaaaccaaacccgtaagacgggctcttagacaggcgacgtcgttgtgtggataaattccttttaattttctgcttttgcattctctctctcgacaccaaacaaaggtagttgtgattgcagcaaacaatgggtgtctccttcctctcgacttgcccttccctgcttccactcgttgcttatgatacaccaccctccaccagataccaacctcgttcagtgtccatttgttgtaataaaaccataagcaatgttagtgatgaagagccgttccattggagaaggagagaaattcttaaatgcgctggggcaaccgttggcctgttgtatctgttttcaggaattgattggaagctccggatcgcttgttggaatggctaatgctgctgacttgatacagcgcagacagcgttctgaatttcaatctaaggttaaggaaacactttttacagccataaagggaaatcctgatcttatcccatccttactgacactggctctaaatgatgctttgacttatgataaggcaacaaaatcgggtggtccaaatggctctatacggttcagctcagaaataggtagaccagaaaatacagggctttctgctgccatgaatttattagaggaagcaaaaaaggaaatagactcatattccaaaggtggacccatttcctatgcagatctgatccactttgcagcgcaaagtgctgccaaggctacatttttagctgctgccattcgaaaatgtggtggaaatgaggagaaagggaaaacactgtacaatgcatacggatcgaatgggcagtggggtttgttcgataggcaatttggtagggctgatactcaagacccagatccagagggaagagttccaatatgggagaaggcaagtgtacaggaaatgaaagacaagtttgttgctgtaggctttggtcctcgccagctggctgttttatctgcattcttaggtcctgatcagactgcaacagagaccttattggccactgatcctgatgttgctccatgggttcagaaataccaacggagccgtgaaacagtctctcagacagattatgaggttgatctgataaccactttcacaaaactgagtaccttgggccaacaaatcaactatgaggcatatacatatcctccaccaaagatcgacattaccaaactcaaattgtaaaagtaaagcatatggtagtaccatattattttcctcctcctcaagacagaccttgaatttcaagttttgacttattttaaaattttctctttttttttttaactggaaaccttgagcttctatgtaattattcatgcacatgtagtgagataattaagagtgttcaagaaacgatctaaatttgttaaaaaaaaaaaaaaaaaaaaaaaaaaaaaaaaaaaaaaaaaaaaaaaaaaaaaaaaaaaaaaaaaaaaaaaaaaaaa

SEQ ID NO: 119055 - DNA, 409 bp, Glycine max
  Clone ID: PAT_MRT3847_78515C.1
gcacgaagaatgagagaataaaaaggattgagcatcttccttgtcacttaactatcttatggcaaatctggcaaatgctaatgatttcaggcttgtggactggctactttttgtatatgtacttagaattcaatgtgttgtttatatgcttatatttgatgtactagacttcatatggctgagctagatagtgacaagctacatactattgactttatttctctgatgatgtgaacagactaatataatgtctaggtgtttttgccgcagttttggttttattgttaagattttgttcttacgcagtcattttagttggaccacaggaagtactatagccattttgttcttatgcattgaatgcttataactcaatgtattgtttttctttaactttttttggggggca

SEQ ID NO: 119056 - DNA, 2229 bp, Glycine max
  Clone ID: PAT_MRT3847_78516C.1
cacgcgtccgcacaatgcttccagtttcttcactctccctcagccatcacaaaaccacaacaacaattgccgaagccacgtgccactgcgcgttcttcaaattcagtttcaacaaacctcatcatcatcgcactcctctcctcttccctaaccaccttcccaacgcatcgccgccacttctacgaacgacaacctctctccgtcgcaatgccgcggcagatccgcctcctggtttctccggcgtcgctgacgtgatcgtcgttggcgccggcgtcgccggttccgctctcgcctacaccctcgccaaggatggacgatgtgtccatgttattgagagagacttgagagagccagacagaatcgttggtgaacttctccagccaggaggatatctaaagctaattgaattagggttacaagactgtctggagcaaattgatgcacaaagggtgttaggatatgttcttttcaaggacgggaaaaaaactaagctgccttatcctttggagaactttcatgctgatgtggctggtaggagcttccataacggacggtttatacagaggatgagagaaaaagctgctactctgcaccatgtacgaatggagcagggcactgtaacatctcttcttgaacaggataatggaactattataggggttcagtacaaaactaaagatggccaaaaacttaaagcatatgctcccttcacaattgtttgtgatggctgtttctcaaatctacgtcggtctctctgctaccccaaggttgaactgttctaaataagttgagttgcaaaaatatcatttttcttttttaatgatatcaattcaaagacagtttgccgaaactgcaaaatctatagaattttgtcagttgtgtaccagtttgcttgacttgcctgatatattattgaacacttgccaggtagaagtaccctcctgtttcgtgggtttagttctggagaattgtcaactcccacttgaaaattacgggcatgttattttggctgatccttcccctatcttattttatcgcatcagcagcactgaagttcggtgcttagttgatatacctggtcaaaaagtttctcctgttggtaaaggtggaatggccaactaccttagggctatggtggcttcccagattccacccgagcttcgtgatgctttcatatctgcaattgatcgaggaaatatcagaaccatgcctaacagtagcatggcagcagatccatggcctactcctggagctctgttaatgggtgatgctttcaacatgcgtcatcctttgactggtggaggaatgacagtggcactgtctgatattgttgtgctgcggaatcttctaaagccaatttgtgacctgaatgatgcaacctcattatgcagacatcttgaatccttttacatcttacgcaagcctatggcatccaccataaatactttggcaggtgccctatataaggtcttttcgacttcacccaatgaagctagaaaggaactgcgccaagcatgttttgactacttgagccttggacattttttttcaagtggacccatcgctctactctctggtctaaaccctagcccgctgaatttaattctccatttttttgctgttgcattatatggggttggccgtttgctcttaccatttccttcatttgaacgtacttggattggagctaaaatagttttgtgtgcatttggcataatatttcccatcatcaagggtgaaggagtaaggcaaatgtttttccccacatccataccggcattttatagagctcctcctgataggtggtgcattgaggagtaagggaaccattgttctgcctgcaatgcattttcaattaatttgtcttgaaattaaagcggatttcgatggacgcaaaggacatttgttatgccacttggaagggattattgatgaggggtttctataggttttaggaggtaattggtcaaccccttttactttcattgtaccaaaagaaaaaagtaaatagacattgtcaacctgaaaattgtgtgcttatatatgtagtatattcctgtcttgtttttatttcccttcagcacacatcattgtaccaaaagaggggggatactttggttcagaatggatgtacagaacagaaaattatatgttagcatcattgtatattattactcataagtactttatttttttctttaacaaaaaaaaaaaaaaacgtccttgtat

SEQ ID NO: 119057 - DNA, 489 bp, Glycine max
  Clone ID: PAT_MRT3847_78517C.1
cccgcgtccgcccactctctctttctccgccgcaaacgaccctcactacggggcggcgccaccaggccatcccctattgagctagaggagcgacagactgtgccgctgggctacaaacggaggccatcgtaagcgacacagaccgggtcaacacctacgaagaaaccgggaagagccttacaaacaagcgccgcccacctctaagaaggaaacggatccgatggctaaccacggaagaagccactaccctgagcaggacccttggcaccgagcgggaataggctctacgatcatggccctacgggcggagcatcatgcgctagaccccaccgccgcgcacggcgttaggcaccgctctgttctaacagatgacaattatcagaacgtctactctggcccctatggaggataccgggcacgaaaaaagcccctagctgaaatctcccgccggactgagcggaccgtctgccggagaaactacattggaga

SEQ ID NO: 119058 - DNA, 257 bp, Glycine max
  Clone ID: PAT_MRT3847_78518C.1
tcccacgcgtcgccccacgcgaccgccaacggggaatgtcaggaccagacccggctggaaacccgcgaccacgcaccgggcgcggaacgggcagcccaacaaaacgacctaacgaacgggggaggccagcccaaggccgcggaacacgacctacacaacgcgtgccaccacaggaccaccacgaagacaaagcgaagccagaccaccgacacggaggacgagcacgaccaccgatgcacgagcagaaagaacaacac

SEQ ID NO: 119059 - DNA, 253 bp, Glycine max
  Clone ID: PAT_MRT3847_78519C.1
ggctcgagtgctgatgtgatcatacaggatgggcaaagttctgatttctctgtatttatgcacgatggggaccatgtggtacattaaacctcctgatggctggaaaggttttatgcgctttgggtacaccactatagcagatgcgtggggttctcattccaagcggatattcgcttttaaggaaaattttacagccctgctgatcatagatatgctatggggaaaatacaacctgtatctacgaatgcttgag

SEQ ID NO: 119060 - DNA, 476 bp, Glycine max
  Clone ID: PAT_MRT3847_7851C.1
tacggctgcgagaagacgacagaagggggtagtatactataataatgatgataatgtgaatgaagcagatacagagcagtggaagggatcagtgatgagatactgtcgaaaacagcaaaacacactcgcaacaaatcagacactttcactcagccttcatcagatggggatggatcccctgcaacggcgctgcacaactggttcgccaacattctcaaaccgacctatagcaataacaataacacacaacaaccacctccttctcctcctgattctcctaaaccttctctccctccacgtcagcatcatcctcgaaagtcccgcttcaaaaccgagccctctgctgcacctcacccgcaggggatccatcctcccaattcgagacgaaccttcaagacttctacgccgccgccggagaatcctccgtcggattctgctcctctttcgccgccgaggaacctcgtggaatccgctca

SEQ ID NO: 119061 - DNA, 894 bp, Glycine max
  Clone ID: PAT_MRT3847_78520C.1
tcgcccacgcgtccgcccatgtgcccttccttccaagacatccaaagcacattcccaccactatcatcatcattcagtactagctggcactactacaataccacaccaacgcaacatcatagtagaaacttgaaaccaattcaattcaattcaacctttttttttctctctcaaaacccattcgttcccgatgcctgaaatggatggctcctccgccaaaccccctcaaatctcggaaatgttccagaaattcgccctcgctttcaagaccaaaacctttgaattcttctccgaggaagaaaacaacaacgcttcccccctcttcgacgacatcgacggtttctccctccttgactccaccgaagaaatcatccccgatcagaaagtcgtcgtcatcaaacccgaccccgatccctccaacaattcctccccaccgccgctgctgccacagccacaatcccctccgccaccgccgccgccacagatcatccctccgcctccgcccccggaatcccgcgagcccgaaacgccaccgccgccgctaacctctgctcagatcagagaaatgacacacgccctggtctcctcggtcttcgccgccgtctccgccttcgaagcctcctacttccaactccagagcgcgcacgtgccgttcgtggaggagcacgtgacgagcgcggacaaggttttagtttcccacctccagaggctctcggagctgaagagattctacagcaactccgagccatgcggttttcccttagggttgcgcttggaggccgaagtggaagagaatcagagcaaattgagaaccctcggcaccgtctcgaaccgcttgcagtgggagctggagcagaagcacgacgaggtggtagccctcagagccaaactcga

SEQ ID NO: 119062 - DNA, 423 bp, Glycine max
  Clone ID: PAT_MRT3847_78521C.1
ctaacacaaaccctaaccctagccccaaacacctccccttccccttcccggaccccgcccctctgggccctccccctcctcccgcctacggcttccacatgcttgaacgccgcaccatcgtcctcgccgacggtagcgttcgctcctacttcgccctccctcctgattaccaagacttcgccccccgccctctcgacctccctccccgcttctgcctccccgactactcataccgccgccgccgccaagcgaaaatacggtgatgatgacggcggtcccagggatgacctcgccaggcagagggagcagcttctccgtaacgccaatggcatttccagggagcagttctctgcgggccccagtgacttgaggccctccaagcactccaagctcgatgggttgtcgaaatctacgagacactcg

SEQ ID NO: 119063 - DNA, 891 bp, Glycine max
  Clone ID: PAT_MRT3847_78522C.1
aacttgtgttattcatctaaccgcctgagaattcttttgtatccccattcacaaagtatcaaaggtttaaccgcctaagatctttgtcttaacacattggaggatacatcctttgtggtacaagtagagggtacatctacttggggttgttatactgagaacaagagagggtacatctcttgtggatcagttcaagtggagcatacatccacttggtggttcaaagagaacaagggagggtacatcccttgtggatcttttcttgtaaagggatctaagacaaatgctagtgataaaaatgatgataaaatcaaacttccaccaaaacttcccaaaaataaagatcatatagaggatgtaaatgtggtggatctttcttcttcacaaggcccttccaatccagcatacgataagaatgaagaaactcatgacactcttgttagcttaaatgctaaaagtgtcaataaagacaagaatgaaattaaagaacccattgttgtcaatcaagcaaacttgtctatgggggtagtggttgccacttcaattgccttgcaacaatatgcaaaacccccaacttttgaagtgagtcataatagaccttttacacattttgaggtagctatgaatcattataggaagcttgctattgataagaatttggaggaatctttagctcatcttgattacaaagaaaaacttcaacaattagtaaatgaagtcttcaaattcaatgacttggtggttgatgagcttcgtgaagaaatggagtcattccttaaccctttcaacaatgcttacgaggctcatcaactttgtaaccaacatgcttatgatattgctgagattgaatcttcaacaaagcaaggcaggaccaaacttattcaagcttga

SEQ ID NO: 119064 - DNA, 279 bp, Glycine max
  Clone ID: PAT_MRT3847_78523C.1
gggcacacacactctcactcaacactttctgggttcgcactcttatactcatctctctctctctctcttattggtggaacccgagagaattggggggaagacgctatattggagcttcttggaatacaagctctactagcacatcaactcgcccaagtgggtttacttcttttcccttgaccactcccttaatgatcatgcttactaatcttttttttcaagcctgattgcaaacatcccaatacatcaaaggattttctgagatcaaaaactccttct

SEQ ID NO: 119065 - DNA, 748 bp, Glycine max
  Clone ID: PAT_MRT3847_78524C.1
ctttagccgaggtcaggaggagcactagctaagttcacaatttcaaaatggctaggggactaaagaagcatttgaaaaggctcaatgctcctaagcattggatgcttgacaaactgggtggtgcatttgcgcctaaaccctcatctggaccacacaaatcgagggagtgcctccccctcattcttattctgcgaaaccggctgaagtatgctctgacataccgtgaagtcattgctattctgatgcagcgccatgttcttgttgatggcaaagtcaggactgacaagacttaccctgctggtttcatgggtatgtttgcagcttgtcaatttttagaataactgcctgtttcatgttatgcaaccaaaatatgttacagtatgagggggtaataatatgctaaagttcttattgtttattgagcttgaccaattctgaatctgatacatttagtaaactctcttgaagtctatgtagctggatattgtaatatatatgtatatccagaggttcgaatggaaagttaggtgttaactgattctcagctattcatgttctaagaatgtaaatgttaacccttatttctaacattctccagtggcttgtgaatagactatggttaaatgtgagcttgaatttacctaaccaaattagttgcagaaacagttcctgtccgaactctggattagtcaggtcttttcattaccctgatgtactgggagggttaagacaaaaaataatagttgca

SEQ ID NO: 119066 - DNA, 130 bp, Glycine max
  Clone ID: PAT_MRT3847_78525C.1
cggagaataatgtgtgcttctcattgagtaatagaatgacaaagttaccattccagaactgcatgactagtgtgagagcacaagacagacacaggacgcatgtgatggaaaatggaggtcggatgcatgt

SEQ ID NO: 119067 - DNA, 765 bp, Glycine max
  unsure (1)..(765): unsure at all n locations
  Clone ID: PAT_MRT3847_78526C.1
atgatcatcgtcttcttcaattgaacaaaagatgattatgacagagttgnccagattccccagaagaagggtgcaaacttcagagatctacctggagtacttgtgaatggcaacanagttgaatgggatccatcggttgaaagagtgatgctagactctggaaagcctttggttcctgattatgcaatgacatttgtccgtgggacctctactaaaacacaggccatttggtcgtttgtggtgggatgaaattgtgtcaacagtggtgacaagggccgagcctcacaaccaggccattctccaccctacacaaaaccgagtacttaccattagagagaatgcgagactacaagggtttcctgattgctataaactttgtgggcctgtcaaagagaggtacatacaagttggaaatgctgttgctgttcctgttgctctagcattgggatacacatttggtttggcctgccagggattattgtcggatgataatcccttgacaaccctccccttcaagtatccaagttgtcttgccctttcatctcttgcagaaactgagaatgataacgaatcaagttgagattgttcccacacaatcccgttctctgtcattgccatgttaaacttttccatatttcaaattttccattttaatgcaagagtgagtgtacactaaaaggccgaaattttgtatcaataatgattgtatgtacactaatgacattgtttataatgatataagattcactttgttaatggttttgc

SEQ ID NO: 119068 - DNA, 342 bp, Glycine max
  Clone ID: PAT_MRT3847_78527C.1
attcatcatttttttttcaatccgtttggatccatggaaagtaaaaaagaacgctccaacatttttttccaatttttttgtttactctctgattgaatgaacatctcgctttgtcatacatattattttttatcagtaggaatgaaagacttatcatacatatatacataaacataactgcttcggttcgctgcttttcttgctctttgcattctcttacgatggatttgatcttacaaatgttaaagaaactcgcaacatttattacaataattttcctacattttctcatcggagagaaatctaatggcatgtgtatgtgatgtttatgcgctcctctat

SEQ ID NO: 119069 - DNA, 395 bp, Glycine max
  unsure (1)..(395): unsure at all n locations
  Clone ID: PAT_MRT3847_78528C.1
ggctcgaggttctggaccgtcacctcaatcgagcgtgctaggtggctgtatgacagttcctacagaaccaaaatgttttgcttgctagctagaacgatggggacgataaagagggaacttggtattaagcgggacccagcggatatgctaagctcgctatcaggaattactgatgcagcgagggagggcattactgtcaggtgcagtgtgagcagctccgcaaggaaactggaagctaccacaataaaaccgagcatcatagaaagcctcgactcgagctgaatagaacaccaagcatgctagtgtgtcttcttctatgggactcgagtagatgttaccatgggagaaaaccgtatatccattgangaaaatgaccgaggaaagagagtcttacc

SEQ ID NO: 119070 - DNA, 288 bp, Glycine max
  Clone ID: PAT_MRT3847_78529C.1
tttatttttttttttttttttttttttttttttttttttttttttcctgtggtgtcggtgttccctaaattggttttttggggcttggcgaaacaggaaaagctgatttctgcgagaagatgtatacggggacaattccacacactaccagccggaagcaaaaggggaaagacggggggcccaaagagtgagcaagcgggggctaacaggggggagccgggggggcacccggaaacgtcgaaaccggccctgcaaggggaacaaatgaacctaacaaaacccggggag

SEQ ID NO: 119071 - DNA, 311 bp, Glycine max
  Clone ID: PAT_MRT3847_7852C.1
atagggattgttttggccttgaggaacagcagcagattcgggggggaacccaatgtgggcaggccccacaaggctgacatgggtgtattgtttgaagcaccgaccgcaaccagtcaaccaatccgccggttggatggtacagaaacaacaccttgagaactcgtctgagtccaacccatccgtcaggaggagtgtcttctgcccatgcatgaacaccacctcaaaaacctataccatgtctgaagtccgaacgcacaacaacgccggttctgcttgtatcatagtccacgagcatgtctatgattgcaccc

SEQ ID NO: 119072 - DNA, 196 bp, Glycine max
  Clone ID: PAT_MRT3847_78530C.1
gacactgagactggatctaccagcgccgttgctggtgcaaagagaaacaaatgaagcatgtgttatagatggttatgaaattccagcaaaaactatattctatgtgaatgcttgggctatccatagagaccctaaggataggaaggacacaaatgagtatataccctggaggttcttagataatactatatatttt

SEQ ID NO: 119073 - DNA, 263 bp, Glycine max
  Clone ID: PAT_MRT3847_78531C.1
aaaaaaaaaaaaaagcccgaaaaagagaatacatatttggtttagttagtttcggtggtggatccgcgttctaacaccaatgcggaattggttaggccgattccgtttttccggtttggatatgaattcggaggatttcgatccattctggaaaccccgggcttggacgtttgggccctcatgaacgcggcaattacggaggctctcaccgaccacgctcaagatatcaaacgccggaaagatgaaatcgttgacccccttta

SEQ ID NO: 119074 - DNA, 1771 bp, Glycine max
  Clone ID: PAT_MRT3847_78532C.1
atgcttctgaattaaagataatataataattcataaatcttattcaatataatgagttaaactaaatccccttagctatccaaatccctttaacttttaaataacaaaataaaagttatacacacttttatattccaacatttttatcattattcatagttttagttacttgtttatattttagaaacgtcataatactcacttcttttgcttttatatttataagataaatatatagaatataacatgtataatataaataatataaaaagaggtgataatttaaaaaaaaaaagggaaagaaataattataaaataaacacaactaataagactatttgcgtcaaaagaaattatttgaatatattttacatacttggaagaatttgagtggcccaaccgttgagaaatgtgtgttctattaaccatcccgatgttatatatatgcatgcctattggcagtgctaaagtcatcagtatcattctaattctctctaatattcagtggattcatttcatcaatcactttgcctttctgatcataatcaccaaaacgccaaccatgaatccagatcgtttcaaatacatgcaagccctaataatatttatgatgttgcaggttgatgtttctgatcaagaccatattatgtgcattgagactaagagggaagcactcctccaattcaaggctgcacttctggatccctatggcatgctctctgcttgtgccatttcttcttgttgcacctcgcctgattgccgctgcagcaacctcaccgcccatgttataatgctcgaccttcacggtttgaatcgttcttggagacatgcttatttcaagttcataagcaatttctcagatgctatttatgtcatggcagccgtgaaagttttcaagttgcatcacagatgatagctggtgccagcttggtggagtggaaaatgcgaagagacacttttattttctagatgaaacgtcatctcttccagttgcattttgtcaccgagagagaaagcagcatcccttcgagtgccaagcgcagacaattttgagtacggtccatccttgattgttgtccttctgaactttttatcctttcattgggaccttctcatgtcaatctggcctgttccctttccgtccttcatctttccttcatcagcttcgcgtctgcaatgatactccagtggctctctgggtgtgcctgattctcgctccaagaattgaacttaagaggaaatcaaatcaacggtacgcttcctgacctttcaatattttctgccttgaaaggattggatctttcaaaaaatcaattaaatggcaaaattctagagagtaccaaattgccacctctgttggagtctttgtccatcacttcaaacatttttcaaggcggagctccctcagccttttcatttgaatgtatgtgaaaattgtaattcaaatctcatttgatttcaatgaatttcaatttccttacatttttattctcagttttaatttcacaccattttttccttttaaaatagatcattctcctatgttttgttcattgttttttgggttcatagtgttttggattgaattagaggttgaaccaccatattttttgcccccttgattttggttttcaaggttgaacctgtgtagaggttgaattacacagttatacttatatgctcgggactaaggggcctagattaggttttagtctaatttacaattaaacataattaaaaaaacaagttacgcaaatcagcggacgcgtgg

SEQ ID NO: 119075 - DNA, 223 bp, Glycine max
  Clone ID: PAT_MRT3847_78533C.1
aaatgtctaatggacaacgactcacaaatgtggatcatagtgaaggaataacatacggtgataaacaatgtctcgctttagacctacatacaagagcaaaaaattttgtggattttcacaccttgtctaagaaatagcaatccattgtatcggaacccattttaaaattcttttatatgtgtacaaatgctacgcttgcgcttatggtattccttggaaaatt

SEQ ID NO: 119076 - DNA, 2090 bp, Glycine max
  unsure (1)..(2090): unsure at all n locations
  Clone ID: PAT_MRT3847_78534C.1
ccacgcgtccggtgacttagaaaagtaacagcaacgacggcaacagaagctggtcactgctgaattttgcagagctctttgtctcctctctcttttctctctctctctctctctgcctcacttgtggcctcatctcaggcacaaaaaacaaaagctttgaagctcagagggtaacacaacaaacacactaacactacaaagtttgagtctttgacacaaaaaattgagatagctcagagaaaaagaaaagagagaatgggagaaggaagaagaggagggacttcaaagctgagagaagcagcaaggagggtggctgtggcagcagcatatgcatgtggctcattctcaagaagaaaggctttggtggatccagtttccattgacaactcttgtagtctatctgccactgcctcaaattcctcatttttgtccccatcaacaacaaaaaattcctcagaggagttaacggaagaaacatattctggtatcactaccaacatcaacaatgagcttcatagtaagaatttgtgtgcaatatgtttagatcctctgagttaccacagcaagggcagcagtccaggccaagctatattcactgctcagtgctctcacacattccattttgcctgcatttcttccaatgtccgccatggtagtgtcacttgccccatttgccgtgcccattggacccagctcccgcgcaacctgaacaacaaccttggtcctttcacttctagtaaccaaagtgaccccattcttcgaatccttgatgattctatcgctaccttccgtgttcatcgccgntctctcttgcgctctgcgcgctatgacgatgatgatcctgttgaacctgatgaaacacctgagagtccaaagctgtgtttctctcttgtgcctattccaccaaatgcaccaaccagttacaatccagctttgcaagtgactaaacatgcctcatgtccttgccatctatcccttcatcctctaacctgcagctccttgtcattgctacaatctccaccaatgcaaaaaccttatgtcatgtgtccctcttccaatatgagcttatctctctgtgaaactgagccatgaacgtgccactgacttggtcttggttgctagtccaaatggaccacacctaagacttctcaaacaagcaatggctcttgtggttttctccctcagacacatagaccgcttggccattgttacatactcctcagccgcggctcgtgtcttccccttaaggcgcatgacatcctatggaaagcgcacagcccttcaagtcatcgaccgtttgttctacatgggccaagctgatccagttgaagggttgaagaaaggcattaagatacttgaagaccgtgtgcacaagaacccggagtcatgtatcctgcacttatcagataatcctacaagaccataccatgcagtaagcatggaactgccatctacaccaattcatagatttcatgtggggtttggctttggcacttctagtggatttgtcatacaagagtttgaggagttcttggccaagatgcttggaggcattgtgcgcgaaatccagctaagaatatgtggggctggggaagaagttggaagtggaagagtcataagaattggagagataagaggtggagaagaaagaaggattcttttagaccttggtgactgcactcatgtgtatgttgagtatagctacattgaaggggaaatcgatgagtgtgttaggaggacaggggaaactgttgtaggtgttggagaacataaaggtgatgtttcagaaaatggtgaaaacacaggtggtggtggtggtggtaggagtagcagtgttgaaagctgggactttcatgatccttacatggccagaagatgggccaagcatttgcatggttatagactttgaaattgctactattattttatatagaccaatgcgtttttgaggctattttggtcaaagccatccctgctgtcttcaatttttagctagacctgcaatcgtatagaatttgaaaaaatagacaatacacaagattatttcttcacacaacccagaaaagaaggaaaaagaaaaaggcacttgt

SEQ ID NO: 119077 - DNA, 519 bp, Glycine max
  unsure (1)..(519): unsure at all n locations
  Clone ID: PAT_MRT3847_78535C.1
tnnnnnntntntnttnntttttttttttggggtgacataaagcattccttatcttcactaactccagcttcaaaaggatgaatacattcattaaaaaaaaaaacattacatatacatagaagataaatcaactatgaaacttacaagggaatgataacatccaatttctaaaattctagaaattctatttattatattttataaataacttacaagaaatcttgaccttagtattaaatttttggacttgcaaggtcaagaaaacttcaacattattcataagattaaaaaaaataaaacaaaaacataagaagaataagctcaggagagataccgccataacatctaccacactttcctttcattttgaattttgtggccttcaccttgaggggtcatgacaaagagcaccaaggtcatttcctgcaacaaacaggacatgatgaaaaccctaagaatggttgagctgaggagcgttttttcagattaatttcagctcagcttgaatagtgtcccgaa

SEQ ID NO: 119078 - DNA, 183 bp, Glycine max
  Clone ID: PAT_MRT3847_78536C.1
agcaagcgtaccgtgttgcctctctgcaatctacagctaaaatgcatataaagacgtacgtagagatcggaagggttgtccaaattaactacatgctggaatatagggggctcgccttgatcgtcgacgtcattgaccagaacagagctcttgacgatgcccctgatatggctaggtcccaag

SEQ ID NO: 119079 - DNA, 1630 bp, Glycine max
  unsure (1)..(1630): unsure at all n locations
  Clone ID: PAT_MRT3847_78537C.1
ctgacgcgtgggtcggcagatgcgaggggtgagggggcgtgtacattataatcttaaaaagagtgttcttgtcactccatcagacaattggctccgctgtgatgattctttggtcatgcagtttttggagataaaaaatggatataactatttcagatatgtacactcgccatcctactcccaatctcagagagcatttgaagctgccaaagcaattaatgacataaatggcatagcgagcatattacagcaccatccttatcatatagattcccttctaacaatggcagaatattttgcggtattgggtgaacaacagatgtctgcagatgctattgccaggtgtctatatgcccttgaatgtgcatggcatcccatgttcaatccattgcagggaaattgccggctgaagttcaaacatgatacaaacaaacctatattcacagctcttttcacccacatgaaaaacttggacaggcgtggctgtcatagatctgccttagaggtctgcaaattgttgctttcgctagattctgatgatcccatgggggctattttctgcattgactactttgctttaagggctgaggagtatgcatggctggagaagttttctgaagaatataaaagtgataactccatttggttgtttccaaacttctcttattcccttgccatttgtcggttttaccttgagcgtgaggcctgcaaagatgattgtatggatgctgaaaaggcttcttcatctgatcttatgaaacaagcattggatgcttcatccctcagtcataaagaagctagtcgcaaaagtaccattgaaagatcgcacatggacagatattctcaagcatgcttttntctggtcagatcaaacaggaattccatctcaagatcacttgattaatatatatgttgagagaaattatcttatatggaggcttcctgatctgcaaaaactgcttagtggtgctgcaaaactagtgattgaaacacttgaaagtaataaaagtgaacttaaggattgggcttgtgtcagaaaagaagcattttcatctgagaaaaatgagtatggacatttgttggtatccgagttctctgattcactttcatcgattcctcgagaaaatctgcaacaatttatgggtgttccgaggatgatggagggtatgcaggatgagaaccaatttgctaatctgcctggcaatggccatgctcctcgtggtgttgcaaataggaatgcattagctgtcttgtttgagtcaatgctgccgtgggttacttacgaggatggagtggatggtgaacctgatgataaccaacacgatgaccacaggcaagacaatcaatgattctggaggccgctggccttcctgctctgaagggcctatttttggctggagtgttgtactcaatgatgagatgtctttcttgtacagagcaacgcctagggagcttcatgtcttctgctattatgttgatcattttcaaccatatgggcactctagatgcataaaaatgccatatgattttgtggtgtctaattttagggatattgatgtcaagtgttataccatatctttttggctggagtgttatgaattttgcatttgatatacttaaatttttgtca

SEQ ID NO: 119080 - DNA, 395 bp, Glycine max
  unsure (1)..(395): unsure at all n locations
  Clone ID: PAT_MRT3847_78538C.1
ctagctatctcgatcgaactgtccaaggtcctgtcactggggggctaaggcgtagggcgtattaaataaggcggcggactgtgtataactaactggtactaatcataagcaacaaacgacgtggatacggccatggatagccgcagcgaagtaagtaaaaagtgagcaaaatactagtgccttgggtacccggcaagtacgggtcggcagagcaaacatagcaaaagcagatcgcgccccccatagggagttagcacgctacgcgtcaagtgatcaacgcggcgtatatgcaaagacgggtacggccgattactaaacaacacaacaaccacaagcgccacttactaaacgattacggttgtgancgtgttagcacttgagttttngaggagtac

SEQ ID NO: 119081 - DNA, 312 bp, Glycine max
  Clone ID: PAT_MRT3847_78539C.1
tatgagtgaacagggggtccctgagccactatcattctacacagatataatggactcattgtctacatgaaagacatagaatgatggcaaatatgtactaaatatacgataacctgaacttcaaggcctgagaggtttactagctacactacatgctactcctgctagggtgtgttaagcttttctagatcgattaagtacggatgtactgtaaatgtatcgaagagaactgcatgatacatgggtgtctcgatgaagacacactgatttgatctctacttatgcacaagttctatcaaattttttgataaa

SEQ ID NO: 119082 - DNA, 277 bp, Glycine max
  Clone ID: PAT_MRT3847_7853C.1
aaccgaccgacgcatccacgcggacctccttccacttccacacctttctcatccctttcataaaacgcatcacgcccggcgatgctctacctcatctggaggcactaccccaatctccataccgacatcaccctcacttccttcgaccgcttccgcatacacccctcttaccagaccttcctctacctcagtcacgaccccatgccctatcatgcctcacccaaggagctacactctacctcactaatactgctttcacacaaggataagaaaatta

SEQ ID NO: 119083 - DNA, 132 bp, Glycine max
  Clone ID: PAT_MRT3847_78540C.1
gcaagccaaacgaaaaccagaagaacttgttcaccgcacaaggcagagaggaccctaaccaaaacactggcatatccatcttgaactgcaagattgcagctgcagcagatttgatccctgtgaaatcctcct

SEQ ID NO: 119084 - DNA, 409 bp, Glycine max
  Clone ID: PAT_MRT3847_78541C.1
acacaacctatttgaaaccccccaagaaaatacatattatacacttgaagtgtaaacaatagtttctctttatgttcaataaaataacaaatcaatgttaaaatccagtgttccccaaccactacttttttaagtgtgtcagatatacagcaagggcttaagaaagtgctctcactctaggccttccgtggagagatacaagttctcctgaatgtggagaacagaaattcataagaatcagaaaaaagggatccaaagagtatggttacttatttttttttttagtctatgatagttactttcagctctctgaactactattcaagttgagatgctaatctgctgtcacagatacttcttcctttaaacatcaacatattcatgggaactttatgccagagagaaaaat

SEQ ID NO: 119085 - DNA, 232 bp, Glycine max
  Clone ID: PAT_MRT3847_78542C.1
tgcgtgggagaaactggataaaataggcgaaaactatcatgaaggcagggtcttttgacatgacattaataataaaataagggagaaggaaacagccaagggggaagtttagacaactgcagttaagctttgggagaaagaagaaatttgaaaggctatactgaacaagatgtaaacattagaacccggcggtacaagaattaagaagaacataagcgctaagggcacacag

SEQ ID NO: 119086 - DNA, 225 bp, Glycine max
  Clone ID: PAT_MRT3847_78543C.1
gcggataagaaagcaacaagaaggctgaaatggaactcacaaaaggcaacaagtgtggatcaaccaaacaaattagatagccaaaaacaactggaaagaacttaaaaggactagtacatcatcatagcattaaactttaaaagaagatggcacatctattgggaaataacaatgtgattctgggcgtcaaccaaagaaggtgctccaaacttttggcaggaacaa

SEQ ID NO: 119087 - DNA, 661 bp, Glycine max
  Clone ID: PAT_MRT3847_78544C.1
ctccgtgtcattaacgacccacgcgtccgattgcattgccccttcatcacatcatcaacaacattcacttcaatttctgagtgagtaaatggtgcgtaattttcttctcattgcaagattaactacatcattcacacaccacagaagtaacccgatccaattgggttctcttctgcaacacaaacacaatgcatcattttttttcttcaattccttcacttcaggaatctcttctgatgctgaatcagacgatgaaaaccaccacaaaggtgacacctttactgtgtcttacctcatcaactcatggggattgtccccaaaactagccagtgaactctccaatagggtcaatttgaaaaacccagatggcccaaatgctgttattaatcttctcaacaaatatgggtttgaaaaaacccatcttgcaaaacttgcggagataaagccctccgtcattgctgcaaatgcagagaatacccttttgccgaaactcaagttcttccgttctattgggatttccaacgctgacatgcctaaaatcctaattgctagccatcatatagtagttagaagctaggacaaatgcctcattccacggtatgagattctaagtagtttacttcgtgacaaagggaaaagtgtagagctttgaaaatgcccc

SEQ ID NO: 119088 - DNA, 307 bp, Glycine max
  unsure (1)..(307): unsure at all n locations
  Clone ID: PAT_MRT3847_78545C.1
tacnttgccnncngcagnngnactagtctggtaatgtagtgtcatcatnnatctggggaaatgactaatctgcacgtctcntccaaccattctcatacccctggtcaattccgtcggttggataccgctatcttgcattanttgnaactcatgtggggtgtatnaacncgnganaaatatgggnnngcctcaccgggnagattcaaactttgaaaatttttctcgaangccangtgttnncagaatcgagatccagcnttnntnntgtccnntttnaaaaaattattangtncttgcgttcagccgc

SEQ ID NO: 119089 - DNA, 281 bp, Glycine max
  Clone ID: PAT_MRT3847_78546C.1
gaggggggcctaaaacaaaaggtcaggaagggctaaaactacccttgggtttaattcaggggggaacttgggtttccccccaaacgggggaaaacaaaatatacctggccccctcacgggctaaaaaagggtccccacctaaaaaccccacaaattatggccctcccccggagaggggggggaaaaaatataatgcctgaataagggccctgaaatcagcctttaggaaaaatattccccaaaattgggggggcatttgcccctgcaatttggtatgcggg

SEQ ID NO: 119090 - DNA, 366 bp, Glycine max
  Clone ID: PAT_MRT3847_78547C.1
gggggggcggggaaagcacattcagccaattccaaaagctatcagtggatacttcacaggaaaaacattggcggtggtgtaaacggggtgtggggcgggtgagatcactgatcgcagggccaggggtgaaacgtcaaggcattagtaccctccggtctatgcacacttttggtcatttgcaaactcacattcggtctaagagggtcacgatgtgaaatgggaatcaagcactacaaaaacaggtattacagacacacggaaaaaacctagagagcatggggcgtggggatggatgggatggcatggtgcaatcgacagaccaaggtgaagccaaggtactgggcaacgatgaagcttctatgagaa

SEQ ID NO: 119091 - DNA, 178 bp, Glycine max
  Clone ID: PAT_MRT3847_78548C.1
gtaccaatgctcgcttttccccccctctcagcatagggcggggctttcaggcatttacagtgtgcggtcccttttaagaccgatgtttacgagcacgaccacattctattttaaaaacctggcctatattatgctaattaactgtcccactacgaggacataacctaaaagtggcacg

SEQ ID NO: 119092 - DNA, 502 bp, Glycine max
  Clone ID: PAT_MRT3847_78549C.1
aaaaaaggaaggggagggggggacctcgttcaatttttaccccagttcgggtaagcaatgtcttgacagtcaatgtttaccccagttgggaacttttgtacaataaaatttttagtttgtttaattaccccaaatcctttttttttatttccttaagggggttggggacagaaaaatttgggacatttgtcttcaaaagctagaagggggggggcccccttcctacaaaggggtctttgtttaatagtaagttcaccccttaaatgaagaaatcccttgaagaaaaaaggggtttcggctgttttgaatgccgcccatggaataccaaacagggttctataccctacagccttgcccgccgggaaagtataatctcccttgcccctggttatatacccctcaggcgattttgatctagccgcaaattcatagtcaacatgaagagatcctgaccccttgaattgccctggtaaaaaaagcccaaagcaaggagaggcttttt

SEQ ID NO: 119093 - DNA, 559 bp, Glycine max
  Clone ID: PAT_MRT3847_7854C.1
gccacatctcctagaacgcgagtacctctcttctatctctcaattcacacatacacagagaaaacaaacaaactattggaacacgaaacacactcattataacatatgcagcagaatcagcaccacccaccttgtttattgttttgaattcaactgaaaaaaacgacaaacgaggatgttacatgagagcagggcgacacggaggccgtctcaaccgactgagtggactcgttaccacgacaagctctactagcgggctctgatggtggtgccggaggacctgccggaccggagggagaagatcggcgaccatgatctgcggcaggtctgcagcggaggtcagggaacactacgaggccctcgatgacaacgattattagatcaactcctggcgagccacggctctgagatgcgtacatgactgggtggcgacccgggccagtggcggtgctcaaatatgtacaactcacaacgctgatgccaactcataccggtccaaccctaagcgacatggcgacaactgatggaataggggcacaccacggactgaacaggaaca

SEQ ID NO: 119094 - DNA, 1620 bp, Glycine max
  unsure (1)..(1620): unsure at all n locations
  Clone ID: PAT_MRT3847_78550C.1
cacgcgtccgacaaaaactactatttttgtttcctatacagcagggaagaggaaccagttattttcggtgagaagtacaccggaaagtttttgcctaaagaaatcatggagggaatgcgagacacaaagtcacagcttgaaatccaagaccaagagggtactaatattgggtcctctttgtcaaagctcatattagcaagtggcagtggcacaaacacccttgactcaattttctccaattgcccacaaacaacaaatggcagcactagtagcaactccgtgttagatgatttagaaccctttaagtcttcggggtgtgagcctttggggtcttccgtgtacctccgccaaagggacatcctccaaaagttctaccaagaaagccgaggaaatgggtcttataatgttcccacttcctccttgagtaattcgttgacgaacccttgcaagaaaaagctgtacaggggagtgaggcagaggcactggggcaaatgggtggcggaaattagactcccacagaacaggatgagagtgtggttgggaacctacgacaccgccgaagctgctgcctacgcctacgaccgcgccgcgtacaagctccgtggagagtacgcgcgtttgaacttccccaatctcaaggaccccaccaagctaggtttcggtgactccgccagattgaacgccttgaagtcctccgtcgacgccaaaattcaagccatatgccagaaggtcaaaagggagagagccaaaaagaatgccgccaagaagcttcacaatagcactgaccctaaacgcggccagagtgagaagccctcctcctcgtcctcgccgtcgccgtcgccgtcgccgtcgtcgatttttaacgataattgggcgaaccagttgttttctccggccgtttcggaggatgggttttggaagggggagaattcgcattcgccggcctcggttttgacggagtgtcaaacagaggaaacagagttgttgttcgaaggttgttctctggctagattgccttccttcgaccccgagttgatttgggaggttctgaccgtttaattagttgatactgtcttcctttcttaggttactacttacagcgagcgctcatgtcatgtgtatatgaaaaatatatattattagtgtggtcttgttttgtttgtcggaatgggaagaggtcctttagcgttcaactcctcttcttgctcttcgtcatcgctgtcgcagccgttgtcgccaccttcgattttttacgataattgggcgaacgatttgttctcgccggcctcggtttcgacggagtgtcaatcaatggaaacagaggagttgttcgaaggttgttctctggctagattgccttccttcgatcccgagttgatttgggaggttctggccgtttaattcattaatactgtctttctgtctttaattaattaggttacttacagcgaccaccgctgatgtcatgtgtatatatattattattagtgtggtcttgtttttgtttgtcggaatgatgagaggtcctttagcgttttgagtaggattggtatggctgtgggttttttgctcaaggcagttgcttcctattnnncttgttgtgatagacttctccctcct

SEQ ID NO: 119095 - DNA, 435 bp, Glycine max
  Clone ID: PAT_MRT3847_78551C.1
tgggcaatccgaacagacccatccttctttgcaatcaattgcttttttttacgtgagagaaacgttttcggagggtccctaggtttctgtgaatggggcaaataacttatcagcgcaacaactggttggttcagagatacattgattccacacattgcacgatttgtatgtggggagcattatgtaggaagcaataaccagatggctccgacccaatgagattcatgccatgctttgtaattacaagtattttaccattaatgtcaagccagtgaatttgccaaaaagtggtactattgtcttatttgatcgcaagatgcttaggaacttccgtaaagatgggcacaactggaaaaagaaaaaggatgggaaaaccgctaaagaagctcatgagcacctaaaagttggttatgaagaaaggatccatgtatatta

SEQ ID NO: 119096 - DNA, 319 bp, Glycine max
  unsure (1)..(319): unsure at all n locations
  Clone ID: PAT_MRT3847_78552C.1
cattgttgacacatttanacttaaggatgaacccgcgttggatatatagctgtttgttaccttcatgaataggtttatgaagaatttgacttccaagttcgatgcagagcaacaggagttatttaagtagcacatttagggagcaactatatacttgctctctaatattgaagatttccaattttttgtttgtgtgagcatgggtgatgatgcatgcttgatctttgcctactacaaggacggcgctgctgatctgacattcctgtacttttcatatgccttaaaggaggtcaagtgctgagtgacttaatgtaacccc

SEQ ID NO: 119097 - DNA, 346 bp, Glycine max
  unsure (1)..(346): unsure at all n locations
  Clone ID: PAT_MRT3847_78553C.1
tccgatcntataactagttagctgcttatcttatacattatatctataatggtgaggcaacctaactcttattttcatatattcataatattcacacctttgattgttgtatttcaacacattaaaccaaactattcaacataacaaaaattattacataattcaatattattatagacaatctgtaataattttcaaattatacgtaattgaattttcaaactctttttttatattaaaaaacccaattacatattacataaaatttcagtcggaccatagatttattatggtcttagattatacacaaatttatcttccacacccactaattcacaaaaatatt

SEQ ID NO: 119098 - DNA, 192 bp, Glycine max
  Clone ID: PAT_MRT3847_78554C.1
cttccaaggaagcgtttcccgtcatcactgtatgacgtcctccttctttggggggggaggggtgggtggggcgatggggataatggagcgtgggacactttaaacgctaaaagattggattagggtaatttgggaggaccagaaaagattaagattatttggcaacctgtacaggtatggtatttgaccatg

SEQ ID NO: 119099 - DNA, 300 bp, Glycine max
  Clone ID: PAT_MRT3847_78555C.1
gcgggcccgaggggaggagctggacgaggatctgttcctacagcttactggagggcatgaggccttctaaagacagcccctgctctacccacaccctccagggactctcccatggccacgcccacctgaactctcccagcatgcaccctgctgggcaccctcacttgtcctcaggtaggccagggccctcactggggtagatgctaccaccacccagcctagggacgatgggccctgagccacacgaagcccctcctcttgccctattggcacaagctcacacccttgactatatgtagt

SEQ ID NO: 119100 - DNA, 466 bp, Glycine max
  Clone ID: PAT_MRT3847_78556C.1
aaaaaatgaaataacattatatgccagtgccttatacattattgataatcgattgtgacgttaaaaaaaaaaaaaaaaaaaaaaaaaaaaaaaaaaaaaaaaaaaaaaaaaaaaaaaaaaaaaaaaaaaaaaaataaaaaaaaaaaaacaaaaaaaaaaaataaaaaaaaattaaaaataaaaaaaaaggggggggtcttttaaaaaaaacaaagttaacttcccgggcaaggaaaataaataattttttttaagggcccgcaaaaaaaatttcagggggggtgttttaaaaacttggaaacgggaaaaacccgggtgtaccaaaataaatgcgcttggaaaaaaacaccctttaggggaggggaggaaataataaaaagcccctcacaaaacccttttcaaaaaggttgcccaccttaatgggaaatgggaaccccccctaaaacgacaattaaaaggcgggggg

SEQ ID NO: 119101 - DNA, 362 bp, Glycine max
  Clone ID: PAT_MRT3847_78557C.1
gacatacttaaaataatacgggttaaccatgaagtttatgtatcttgcattgctacatctatgtgtgatctgtagacaattcttgctcggaggagcatatgctttccccagacaagtgattgacacataatgcacgaaagttcgagctgtcgtagattactatatcagaccggtcctaacatccacatgtgatggccgtggaccgtgtgtgattggaagtggctatgtactgatagcaagttcatcctaccacacttgcccacttagtgttgcgttgctggagggcctccatggactatcgagcacattaaaactagttaaccctaacaaaggtgtcattaggctgtctactgacttgaaca

SEQ ID NO: 119102 - DNA, 368 bp, Glycine max
  Clone ID: PAT_MRT3847_78558C.1
aattaaaggggattggattaatcatacctcaaaaaccggaatttaaaacagaagttccccctgtttcccaacaaagataatagattgtgagatacaccactcataaaagctttctcaaagggggaaaattaacccaatcacagcacaagaaacccgcattacccaatacttttaaatatgtccttagctggagagcaatcacattaatcttccttttagagcccttccaaatctccggcccccgggtttaataaaggatctttgggttggccggattttcaaattgccgaagaatataaaaatttggagttttatcccaaattttttttgccttttgaacagctcctttgatacctttgggggggtca

SEQ ID NO: 119103 - DNA, 524 bp, Glycine max
  Clone ID: PAT_MRT3847_78559C.1
cagtttgatcttggatcccttcggaaccttgcttggtacagtagttggtgattctgtttctgcagatatcaaaccctttgcaaccaatgagcttaaaaggtttgaaattggatttagtttattatttttggcagcatttaaggtcggagctgaggaactgctaatgttagaggaagcgggtggttgagtagaaagcctttgtggtggttgtccagcctttccttgagtgttttttggcagtgtagatgagtcattatgcagaggatctaatgtggtaggtctaccagactgagtaggctgaaccccagtctgagatggatgcttccttggatccggatcacaggtaattgatttcttggggatgactccactcttgacaggtgcagctgacaaattatttgtggtcaactgtgctgaagtttctctggttaaagaaactttagactgagacgggtccagctgcttttgctgaagctttggtcgaaaagaagtcatggaagataacgggccctgcatgtcctttt

SEQ ID NO: 119104 - DNA, 489 bp, Glycine max
  Clone ID: PAT_MRT3847_7855C.1
tgacgtcgcctgcgcgcgtaccgtagctggaatcctgtaaagcgccacgcgttcttccacgcgttcaaaaattccaactaaagggtagacttttgaaacttatcgcaccccctgatgtaaagggaggcaaggacttatgctcaatcgaaccctaaacgctaaccaccccaattgcttctttcagagcttccactctctgcctttgcatctgataaatgaccaatccatacactatcacctcatgccctcaaatacactccgcaccctcttatcactgaaccgaacggcctgatggaggagaagctcttgatgaggtgtggagatgatgaatgatcgcgactagccgaatgtgcgctgttgtgctctcaagggatatgaactgctgaatatgatcaacgtctgtgggaaaactgcaggacagctggaacacgctagaacatgggggaggaggaaagttgtcggaggcgatgactatgcccgggcgatcgc

SEQ ID NO: 119105 - DNA, 534 bp, Glycine max
  Clone ID: PAT_MRT3847_78560C.1
aaaaaataaaggggaaacccgtttttctttttggggggccctttgcccttaaaaaaaaaaaaggtttttggtgggaccggaaactttttttgccacggggaaaaagggtggattgggttttaaacctggggggcaaaaccgtattttggggccaggcccttaaaattaaaatcaaaccccaaggttgggtgggggcccaactaaaaatatttccattggggttggttttgaacttctttttggaacgggccttggggcaaaaccacttgctcgaaccacttggagtccgggtgcaacctgggccccaaatccaacgggtccatgtccaatgggccgttcctgaaataatgggggccgaccattttgatctgaggctgggcttcgggctgaaactgaacctccttttttgataactgggccattttttgatccaccaccgaaccaccatggaccttttaaattttccttttttggtgggaaattcggcccaaaacccattcttaaaccctaaagtggtgggggggggggtttttt

SEQ ID NO: 119106 - DNA, 1984 bp, Glycine max
  Clone ID: PAT_MRT3847_78561C.1
ttttagctgcaaaaattatctcgcattaatatattttggccactacgcatttttttcccgggtgcatggaaaaataaagaaaaagaacaaaatttgtttgacctctctaagaaccagttagaggcaataaattttaaggataagaagccatcaaaatttagtatgcaatgtgaaactggatgggctacccttggtaagcttttctgactatgccaaagctcaaatgctatagaagcataccattaatcattatccaaattggtgtaagggataaaaatgcatcaaaaattaaaaagttgagggaaaaaagtgcaataagccaaaatttaaacacactccttcaagtagacaaattgaagctttgaagtttaaacattaaactggaagacgtcaaccaatatcagataataggccttaccaaattggtgacgattgagttctctgataagcatttggcatgaatgatgggacccacatttctactttccatctcacagttgacatctgaatagttcatgtaaacggcccctttgaacatccactcgttcctttcatgacagtacgcatcttcaaatagctcgccacacaatacacacagacactggttttcatctgctagaaccatcgtatccaattgactgctgtctgttttttgttcgtgtacatcaacagaatcattaaacccagactcagatgaatattctgccttgccagcaatccagtcactagactcagcataccaacttcttgatgccttaattggaccatgttctcttgtggcatgccactccaaatgtctattaaacagttcttcttgtttaagcttaataccacaaactttgcaattatgagggaaatcatcccataattccctaattactgatgggtggaattctcgaattacattaggtctaaaatcaaagccaacaagatttctgatttccgtgctagttgattgaggtgaggcgagagaggtttttgtagcagaatctacctcatctccggaagacgatactgggacagctgcagaaccagaaattgatgtaactggtaaagaacaactggtggtaattatttcagtttgatctttggatcccttcggaacctcacttggtaccgtagttggtgattctgtttcggcagatatcaaaccctttgcaaccaatgagcttaaaaggtttgcaattggatttaatttattatttttggcagcatttaaggttggagctgaggaactgctaacactagaggaagcaggtggttgagtagaaagcctttgtggtggttgtccagcctttcctttaggtttttttggcagtgtagatgaatcattatgcagaggatctaatgaagatggtgatgccacagcagaccctgaagaaattaatgtggtaggcctaccagactgagtaggctgaaccccagtctgagatggacgcttccttggatccagattactggtaattgatttcttggggatgattccagttttgacaggtgcagctgacaaattatttgtggtcaactgttctgaagtttctctggttaaagaaactttagactggggcagcttagttgtagcagtaacttcagtctgagatgggttcagctgcttttgctgaagctttggtcgaagagaggtcatggaagataatgggccctgcatatccttttcttgtgatcttcgcaagttaccaacctctcaacttttgggaggtcagataatcagtcagcatattagaggctgacttatcggacctcccaaaaatcgagaggttttgagattctggggcaattcttggtcagcaaaattttgcattgaatgagtatggtgtactgctcctggcagtgatggagactgttgccgcaaaggtgactgcccagaaggggattcagtttccccagaatcaaattgttgtcccacaaatttggccattcctactactgcattcgatgtaaaggattggttcccccggacgcgtgg

SEQ ID NO: 119107 - DNA, 2084 bp, Glycine max
  Clone ID: PAT_MRT3847_78562C.1
gggattcggcacgtggcccgcatccctgcttcctggtgacctcctcctttctccctgatctgtgcctccccccctccccctgccgtagccggctggtcgtttttcctcctcgtcattgatcgtgccgcttggtgttttcctctcttgtgccttgttggggacttcccagctgctgctcttgacccgtcgtctagccgcgttcctggaggcatgggatttcctgggtttttggtctcctctgtgatggatttcctctgcgatctgtcctgttccgggcgctccgacctggcccttcctctcccccgtgggcccgtttgcaccgattcacctgaacccatgccttcccgcttctccggtcccaggcattcttctgcgtcctggggggcacatggtgcgggtccaattctccttacatagccgactggtggttattcgtgcacattatttaatttgccaattgtagatatcctcatttgtgccatttagtggagtttcaagctgaagctcttgaccgattgacaagtgatgacatattctaagagacgagccagtggcatagctttatgagcttgggaagttgggtgcacaagcatggaaatgagtatttcgcccaaaaggaccggttctccattgaggagtttttatggcgtcacaatgactacatcttctctcccagggcctagcttcctgggcccgctgctgctcccccagctctttgcatccctccccccctgggtcgtgctcaggctatcatctttgcacctcgccattggccgcgccgcgatccttctgggatcttgtataatgaagccgaatgctacaaactgaaatgatgcttgcgctgtgacatggcccaactttaccgatgtatacccttttgcaccgattgaccaagacttgacggttgctgcatctcgagccgaatcggctcgagggatgctggtttgagaacttgggtggaccaaatgggaaatgtacatggtcgtgttgatggagctaaagctttattgattggatctcacatggtacatgcataggctaaaatcaaaagatctctcaatatgccacaatatgatcctactgggatcttgtataatgaagccgaatgctacaaactgaaatgatgcttgcgctgtgacatggcccaactttaccgatgtatacccttttgcaccgattgaccaaaactaaaggttatcaggaaatgttcaacaatttgagtgaactgttgctggacaaattctccttacatagccgactggtggttattcgtgcacattatttaatttgccaattgtagatatcctcatttgtgccatttagtggagtttcaagctgaagctcttgaccgattgacaagtgatgatcctggaggaaaggtatttcaagtttatatgttgtgcattaaaatgaaagaatgcacgtcagaaggaaaaaaaaaactagatttattttattctattattcttatgggaaacaagatcaaattaattaggacccaaacctaagtttactgcatcttagactactaggaaaataatttataattttctgcaaatccttgtggattgtttaagcaagaatatgatttaattattcttactaatgtatgtaatgttagtacaatatatgtaaaaataggattctacagaaatgcttctttcattcttttgtgcgtgtgggcccctaacgacggcggtggatataacttccctgccttgaatcgtataccacaagcattgcacagagtatttcgcccaaaaggaccggttctccattgaggagtttttatggcgtcacaatgactacatcttctctcccagatcctagcatccttgtgaccacatcttttctcccagatcttagcatccctcccactctgtgtcgaattcagaaaatcaattttgcacttggacaatgatcgagccgctatgttttttgttttcaagatcttagtttgagacttctcagcagctaaatttgactcgtcgtctagccgcgttaatagagacatatgattagcttggttatttgacacatcagtgaatgatttcctctccgttttatccttttcaggttgttcc

SEQ ID NO: 119108 - DNA, 883 bp, Glycine max
  Clone ID: PAT_MRT3847_78563C.1
catttctggtctatttggttacgatggaatatcaattccaccatagtttaggttcgaacgccgttgccaaaaaatagatacttgtttcttattcacgtagtattttaatacttagtcaaacacgatagcatgaacccaaaatttttgacaattgtttctcaacaagagagattttgattttagcagaaaagcaatggcaagtgcgttgggtagcagagttgaatctgttcgaaactctcacttactaagcttttcgctcaactccattagatccttgagttcttcttcttcatccgccgtttcttctgctcagaaccctaagactaagaaatcgaagcgaagaaagaagaacttgttcgatgtggctcagttcttacctaactggggaatcggctaccacatggccaagactcactggaatgaagtttcttacgaaatcactaaaatcaatctctacaaggatggaagacatggaaaagcatggggggttgcttttaaaaatgggagtttcttattgaggactaatggaggtgtgtgtttgagtttcatctgattgggcaagcttcattgccttttcgagttgcaaattaaaacaggcttgccattagcagatgctccaaaaaaaattagtggagttcacaagcgctgttggagatacctaccaaatgtagtaaaagaattagaaagttcaacaaacttaatgagttccgcagacagtgactttgggtttttaggtcatcgacattagcccgtccatgtcttttcaatttggcttagttgttttcgataatggtatcgtttcttagtagatcatgtaatattccttacgcattcatgcaaggtgcttaattaagtttctttctttttgatttttaaattggtt

SEQ ID NO: 119109 - DNA, 456 bp, Glycine max
  Clone ID: PAT_MRT3847_78564C.1
tcctcacgcgtccgcccacgcgtccgcccaaacattcaatatgcgcgccgttctcttccttgccatggttttcttggtgatggctgttattcttgagacagccaattcaaaggcagcgaaaaaagaaaataagaaaggagcagttgcaacgtcagcaaaagggaaagcggcgccgaaaggagcagcgaaaggaggaattaaaaaagacgcaaaatcaaagggaaaaggaaaaaaggacgccaaaggcaaaaaggacaaaaaagctaagccagccaaaggaaaaggagtgcctaaaaatgacaaaaaatccccaactgccaaagcaaatgacaaaaagagcccaaccaaaccaatggcagcagtgaaagccgtgccaaaggcggcggagaatgctcagaagggaccgtcgagtgcggaagtggtggcggaggaaaacaacttggacactgaggcgat

SEQ ID NO: 119110 - DNA, 567 bp, Glycine max
  Clone ID: PAT_MRT3847_78565C.1
ggtcgtcggaggtaacgtcgtggaagaattaacctcggcagggcaagtaatcgtcatcgcagcatcgttcaccaacgtggcttacgagaggctccccttagaagaagatgaacagcagcaacaacagcttcagattcagtcacccgcaacgacgtcatctcaaggaaacaacaacaataaccctttccctgacccttcttcaggacttcccttcttcaacttaccactcaatatgcagaatgttcagttaccacctttttgagggttcatgaatctgataatatgagactgatgaagatcatgttgatggaggatttatcaccaaagggtttatattattataaggtcagcaaatattcatggactagaacatatatataaactatatgttcttcttcttcttgttattatgttttttttttcttctgttgttaatggatatgatatgatatgacatgattattattattatgtagcgagtttcagtctgactctcatgtctttgggattttatttacttaatttccttgtccattattagaatatggaaccctgtattatttaatt

SEQ ID NO: 119111 - DNA, 251 bp, Glycine max
  Clone ID: PAT_MRT3847_78566C.1
tattagtggatattaaaaccctctgattgcacatattctggcactatattttggtgagttatgccctacagactaacctgcaaatgcgaaaggacaatccttatccttatattagaaactgttacaattgtcacaaagtgtcgttaggattagagtagaggccttggaactcgtattttcattcttaacgccctaaaagacaagccgtaaaggcactggaaaagggtcaattcttgtgggaaaaacaatgt

SEQ ID NO: 119112 - DNA, 764 bp, Glycine max
  Clone ID: PAT_MRT3847_78567C.1
ggaaacacatctttcagttctcgtttcctttcaacctcacacaccgtgcagtgcttgcctttgaatacactccatcatcaatcatcacccaattctgactactactactaccatcacttctctcactgttcttccctccaaaaccaagccacgtaaacaaataaaaacaacctcgtcacgttcttattcataatcataggacgaccgttttcgaagcaacccacgtaacgtaaccagtttcgcgcacgaacgatggtggagagcacagaacaaggagggagagggatactcgggttgttccagttccagttactccaccccaaaacgacacccttcgcgtctcacaagacgctcttagcgttcctgtgggtggccacgctggcctcggtgttgttgtggcagagaactacgatcagcgggtttctggtgcagggcggcgtgccggtgagggcgccgccgaagctaaggccggtggttttctgtttgacggagttcggcggtgtcggcgacggcgttacgctcaacacggaggcgtttgagagaggtgttggtgcgatctcgaagttgggagataagggtggggggtcaacttaatgtgccacctgggcggtggctcactgcgccgtttaatctcaccagtcatatgacgctctttcttgccagagattctgtcatacttgcagttcaggatgaaaagtattggccattgatgcccgcattgccttcatatgggtatggaagggagcatcctggtcctcgattta

SEQ ID NO: 119113 - DNA, 593 bp, Glycine max
  unsure (1)..(593): unsure at all n locations
  Clone ID: PAT_MRT3847_78568C.1
aaccgnngagagganngcatcatacatacgcanngacgatnnncgnnnnaaatgatctttttttttcacagcaatatactaatcaaagcnnntaaccaatattgagtcccctttctttcagcatgcagattggggcatgttgaaggagcctaattcggatattttgtttgaatcattttcaagcaaaggagttgatcatgaccctttccatgattgtctttcctttgatatgattgataactcaagggatccacaggaagaaagtcatcatcaagtgattgaagaagctatgaaaacaaagaagaagtcttatattggggtaagaagaaggccatggggaagatttgcagcggagatcagagacacaacaaggaagggtataagggtttggcttggaacgtttgatagtgctgaggaagctgcattggcttatgaccaggctgcattttccatgagnngctctnntgcagtgctgaattttccggtcaaaagngtcaaagagtctttacaagagatgaactattctggttgcagccgaaggtgctctcctgcattagaactcaaagagaggcacaacataagaagaaaanngt

SEQ ID NO: 119114 - DNA, 431 bp, Glycine max
  Clone ID: PAT_MRT3847_78569C.1
ctgtggttgcttacgtgaatattgcttgttactactttttcggtattcctctgggtcttattttagggtacaagcttgacaagggggtcatggggatttggtctggaatgttgttaggaactatcttacaaacttgtgttttattcttcatggtctatagaacagattggaataaagaggcatcccttgcggaagatagaataaagcagtggggtgggcatgaagattcaaaaacgcatgctatagcgaagaatgatcaagaaacatgaaaatttgaaaattctagaagcagggtgtaccttcttttattgattttttttcaagccatgacttagttgtttgctgtttctctttcccatggatcaggtggacgatcctgcattcatttttttccttaaaaaataaatgagtaatgttatgtttttcttaat

SEQ ID NO: 119115 - DNA, 474 bp, Glycine max
  unsure (1)..(474): unsure at all n locations
  Clone ID: PAT_MRT3847_7856C.1
cagnngggagatgatgatcacaaatgctacttggatactagttaccactttgaaattcagaagaattggtctacacccatctaagattcaatcttaagtaatttattggcggattttcttcctttgacatgttgaatctttctggggcagattgcaatccaactttttgtttattaatatagatagtcaattgtgcacatgcatgctacatgatggtgctaatcctctccttctattctatggttccttttctccaatctaataactagaattcacataaaaggaaacgctagctcgtgaaaatctcactcattccacctaagatgcttcgaatagttaattgttattatctgttaaaagtgtgaggtgtaaagggatgggggtggaaatggaccccatgtggataaaggaacagaattcaacaaatatcctcaactactgcttgtgctttatcaagcaaatagccaaaaggtc

SEQ ID NO: 119116 - DNA, 486 bp, Glycine max
  Clone ID: PAT_MRT3847_78570C.1
tttttggatgcaaatgagtaggataacatgtctatttatactactctggggagagcgctggacacactaatcctagagagctctcaactctacagatccaaagagtattctagggaatattcaaaccatcagaaatatctcgacattccaaacactacaagaatcctgtagacacatgacccattattactcacgcccaagataactaagtgcacggaaccaaattattaatatgggcccaaatcaagactatatttcaacatccgcccttaaactagatacgtgactacaagcactactcctgagctgcacgaaagtatacaacttgagtggctttgtgaaaatgcccctagctagatctagagacatgacatacgttaactgtacctccttactctcaatgcatgctcatatgaagggggaacagccggcgatgagcaaacttgttccatgatagaccggattctttgccaaatggagggctga

SEQ ID NO: 119117 - DNA, 575 bp, Glycine max
  Clone ID: PAT_MRT3847_78571C.1
acctagttaactgggggaaaaaaaaaaggggcttatttaactatttatacagaaaacacattttcaattcctgaacctggtttccctgaacggtatccccaaaaaaaaaagggaccacttgaaagaaaaaaataaacctggctaagtggacgtaaactcattcgggaatattattaatctcacaacaaaagacctggagaatccctatactttctaagctaacagggtcttacaatttaacatacataatacaacaggcttcttttgacacccttgccccagccccttttaggggatatggtggcaaaccttcttcccttttgcttaacaaagctatttggggggggtgacaagcctgattttacacccgggtggacctcatacacactggaactgttctgtgaaccaaagacaacaccgccagccacggggtgtgccccaataacataaggcccctgcgctgtataacgcaacgtctgacactccttttgctcaagaccctgagcgggcctttcctgacttgaatcaaccggagtaggggtgctggccaaagtttttgggggcggggcaaaaac

SEQ ID NO: 119118 - DNA, 256 bp, Glycine max
  Clone ID: PAT_MRT3847_78572C.1
tgacatgatattcaagtggcacactgtcagacacaggtatgacagttggtgccctcattgggaggcaagatattctggtgctccagtgcacgtctaatagtggattgcacaaattctaggtgcaagaatggctgccctcgtgctcagacttgtcacgaaaaagatgagagcatcagggctccacatgaggcaacgtgtttgtctacgacacatgcctatacttgagaggagcatgacatttgcgctaatgtagact

SEQ ID NO: 119119 - DNA, 355 bp, Glycine max
  unsure (1)..(355): unsure at all n locations
  Clone ID: PAT_MRT3847_78573C.1
gccaggtgtcacaaaaagttaattttgatcatcaacattgtttttatttaatcatgttttgttttttgtaacatctattttttccttatcgtttttttactcttcattttttacaatacaggaaggtaaggagcaagccctatactttgatgcccatgtccttgatgctcaaaggagaaggcatgatgtacgaggctgtcgctgtagatttctagttcgttatgatcatgatcagtcagaggaaattgtgccgcttaggaagatttgtcgccggcccgaaaccgattatcggtacagcaacttcatgctgtgaatgangcagcacctgtggatcagcagaagactngcatggatc

SEQ ID NO: 119120 - DNA, 607 bp, Glycine max
  Clone ID: PAT_MRT3847_78574C.1
agaactcataaataaataatgaaatccacaaggaaacttattaaaaaagaaaaaaaaaaggaaaatgtaaggatcaataaagacaatttttaaattccctatctcgcctacaaaaaaattcaaaattgcagattgcaactatttggcttccgtgatgcaactaacaaaattttacaattgaaaattaagctggttttggctttgccttaatacgcttcacccttgaatagaggaaaacgccagccagagctatagcagttccaaaagcattcacaggtgatacaggggtttggaagaatatgacagagctcacaatgaccacaacccgcttcacacagttgcccacggagtgggtaacaagtgataccctttgcaatatcatataagaaacttgttgatacgcatggaaacagagtgcaccaagaagagatctgatgtaaagttgtctaacattcaccccaccagattgcaagtaagcaagagtaaatttgacaccctccctgaagatagccacaggtgctaacaagaagaaagacattactgttatgatagagaagagagtaatgttgtccatagaatcctctttattaaccatggcctttttgct

SEQ ID NO: 119121 - DNA, 2601 bp, Glycine max
  Clone ID: PAT_MRT3847_78575C.1
cggtccggaaattcccgggttcgcacccacgcccgtccgtacggctgctgaaaaaacgacagaaggggggtgtaaagtatcttccatttgaaaacagcattgtgttgttacctacccccattcattcactcaccaacaccaaacaaacaagtccctgctggtggcggacactccgagggcctctcccctcttcctctccacagtataaaacccaaaactcacacaacccgacccatcacgcaagacaaaagcgcgctcttgtgttccgtttccgtttgtttctgttttctttctctttcagatctcgaaaaatgcagagcgcggctttcactttctctccctctctccctctccgcaacccttcccctaactcttggaggagaccctctctttctctccgtctccccgccaaacacagcaacagcaacaacaacagtaacagcaccgatggcgttaactccaatggcgtttcttccacttccttcactcgccgatcttggactcttcttccttcttcttctttcaaattcaggcctctcccttcttcacctcctcgcgccgccgaaagcgccgttcccgaaagcgcacagcacccgtcgaaaacccgctcttcaaaactctcgaactcggcgccttgtttggcttatggtacctcttcaacatctacttcaacatctacaacaaacaggtgttgaaggcgtttcattacccggtaactgtgactgttgttcagtttgcggttgggactgtgctagtggcatttatgtggggtttgaatctctataagaggccgaaactcagtggtgctatgcttggagcgattttgccgctggctgcagtgcatactttggggaaccttttcactaatatgagtcttgggaaggtggccgtgtctttcactcacactatcaaagccatggagcctttcttttcagtcatcctttctgccatgttccttggagagtttcctacaccgtgggtggttggttcccttgtgcctattgttggtggagttgcactggcgtctgttaccgaggcctctttcaattgggctggattttggagtgcaatggcatctaatgtgacaaatcaatctcgtaatgttcttagcaaaaaggccatggttaagaaagaggattctatggacaacattactctcttctctataataactgtaatgtccttcttcttgttagcacctgtggctatcttcatggagggtgtcaaatttacccctgcttacttgcaatctgctggggtgaatgttagacaactttacatcagatctcttcttgctgctctctgtttccatgcgtatcaacaagtttcgtatatgatattgcaaagggtatcacctgttacccactctgtgggtaattgtgtgaagcgggttgtggtcattgtgagctctgtcatcttcttccaaacacctgtctcacctgtgaatgcttttgggactgctatagctcttgctggagttttcctctattcaagggtgaagcgtattaaggcaaagccaaaaacagcttaattttcaatggtaaaattttgttagttccattgaggaagccaaatagttgcaatctgcaattctgaatttctttgtaggtgagatagggaatgaggattatctttattgatcctcagtcctcacatttcctttttatttcttctccttaagttaccttgtggatttcattatttatgtttgagtaagtgcctaatggttctgctccatgaaaaaattatcctcttctgaattttgcttaaataggtgtgtttttaattatcattttcgtccaagcatatatgtaatcagccatagattttttaaatgatgtgcaagttttgggccatcgttaatctttcagtatattacgtatcaattttttttttttccacaaatcgacttgtgccttaattgtgaacgactgaacgtagctgcatctggggaatgttagacaactttacatcagatctcttcttgctgcactctgtttccatgcgtatcaacaagtttcttatatgatattgcaaagggtatcacctgttacccactccgtgggcaactgtgtgaagcgggttgtggtcattgtgagctctgtcatcttcttccaaacacctgtctcacctgtgaatgcttttggaactgctatagctcttgctggcgttttcctctattcaagggtgaagcgtattaaggcaaagccaaaaacagcttaattttcaattgtaaaattttgttagttgcatcacggaagccaaatagttgcaatctgcaattctgaatttctttgtaggcgagatagggaatttgaagattatctttattgatccttacattttccttttttttttttcttctttttaagtttccttgtggatttcattatttatttctgagttctaaaacttttaaagagtttcctagattatcaattataggaaatcaataggatcttgaaatctatgattttcacaaataataaataaataatgtgtatctttctccacatggaagcttctctccgatttattttgattttcttgaagaggagaaactacgattcacattttttattattctttctacttttctat

SEQ ID NO: 119122 - DNA, 272 bp, Glycine max
  Clone ID: PAT_MRT3847_78576C.1
accgagcgccagagcttttatgcctctggccaggatgacataaactgtgagaccaccacccatccagcgcgtgaggtcactatgattatctttggacctgtactgctgctagatgaacattgtgacctaagggccatgaatatggcagaattatggacactaactgataatggttatctgggaacgtaagcatggctaactaagaaatggttgacccactcccctggatgggtgaagaaatgaacctttttgggtaactgacagaggcgaaa

SEQ ID NO: 119123 - DNA, 339 bp, Glycine max
  Clone ID: PAT_MRT3847_78577C.1
cttatttgcgagtcatgcagaactcgaatgtattagatactcgtggacatctgcggactgtattggtttatggattgcggcctcatatggtacttctaatataaaagatgtaatctttaatacatgcagaaacttgctacatttatggcgagatttttcttcagttgttaaacttgtattcgtttatgactcatgttattgtttaaagctagtattgttatatgaattttaattttttttttggccttataatttaaagcatattaaaatatacttttgttgatttgaaattttgatcaatttattcttttttatgtcaaaaagagaaagttttttatt

SEQ ID NO: 119124 - DNA, 279 bp, Glycine max
  Clone ID: PAT_MRT3847_78578C.1
caggattacattatacattgactagatgtataaacagtcaaggttgcagagatgcgagacttatctgtttagttgtacttaaacattattaaggcacattcaaaacatcctggttttcatgacatttaagcttatagtgaagctaaacgtcaaagaaaaatcaccatttaaattcaatatacattgttaagtgtatggtgaaggttaagcttaaaggtaaaaggacgtgagaaatatagtttaaacgagcgggttttagttgctactattaatgaatag

SEQ ID NO: 119125 - DNA, 482 bp, Glycine max
  Clone ID: PAT_MRT3847_78579C.1
ccaacccaaagggcctataaattccatttcttttggaaaaaaaaattctcaagggggggtttctgcaagtggaaaactctaccaaaacatgttcattactacatctccctttttggggggcggatctaattgaaactgctaccaacaaacaaaaaaacagggggggttttttcattctttacattcaaccccctaaattaaaaattggctttacgggggcttttccccaaaaatgccccccccatataaagccctcatcggaaacattggctgactttttggcttgcccggatctttggcaaaaaaccaaaatgggcctgttaaaaccagtcttgctttctggaaaacctgaagggatttcttcaactggtcaaaacccaatcttatctaaaaatatttccggaaacggggcggggcaaatcataatattacggtagtgggcaccaggggcctctaaaacattaccatggctttcatatgac

SEQ ID NO: 119126 - DNA, 264 bp, Glycine max
  Clone ID: PAT_MRT3847_7857C.1
taaacaaaacaagccttacccaacccaaatgggtaacatatcacagaaaccaacatgaagccgccttcctacttactgaacccacccactccaacaaaaggtctacaaaaataaaaaacggtacaaaacttctaccacaaatctgaaaagcctaacaccaaaaatcaaaaaaaggaaaatgaaacaatcaaatcccatagataaaaccgaatgtttgatttccctcactcactattaacttgatcataataatcacatactacc

SEQ ID NO: 119127 - DNA, 397 bp, Glycine max
  Clone ID: PAT_MRT3847_78580C.1
aggggctaaataaacaacaaacatccatataaaaaaatttggtaaaaggataccaatcacttgccgtcacagcaaagaaataaaatggctccatctcagtaataaccagtcacatcgacttacaaattgaaaacacccaagtagttctgctaaatacatcaacatttgataactaaaaaacaggagcaaacaccatgtcacagaaacaaattaactagacacataattgtatatttttactttcgctttgattgcttcgagtttttagaggatctaccagtctccagctttctccgggtagcgttaaactcctcttcaaagggtttggcgtatcaccacccccatattttgaaacttgagatgaggacattaaatcaaactgccctttttttttatt

SEQ ID NO: 119128 - DNA, 207 bp, Glycine max
  Clone ID: PAT_MRT3847_78581C.1
ccttgccaatgtctattttttgtgctttatcatttgaggccaaaatttacaaaagagccttgagaatttgaagatggaacttttccactaacactaaggtaaaatgcaaactattatggtcttagatacaaacaaaaaacttgttttttcactaaaaacactgaggaggctgttcttaaatttaaaaactatcctttaagaggaaac

SEQ ID NO: 119129 - DNA, 396 bp, Glycine max
  Clone ID: PAT_MRT3847_78582C.1
tacggctgcgagaagacgacagaaagggggcgataaccccttcacatcatacatcaggcttcttcagtactataattttagccttattagttaatttttttaaagaaattttttactttcctataaatatcactggatactcccttttcactcacaaacaactttctttctttttttataactctccagcagttacttgcctataaatatcactgtatcctcccttttcactcacaaacaactttcttcctcttttataactccagcaatagttcttctttgagaagttattcgctggtaggaacagtaaagaaggagcttttgtcaaagagaagaaagaagcattttgaggaattaatgaagcattgagcttaatccggattttggtcgtggact

SEQ ID NO: 119130 - DNA, 1045 bp, Glycine max
  Clone ID: PAT_MRT3847_78583C.1
aattcggctcgaggctccattggttctgaggctgcttgctctggtgcagacagtggcacagtctgttccatttccttttcagctgagttaactcatcctgaaaacattgaatttgttcataagcaagtatctcaaacaatagaaacaagaataaatagtacattatcattcaatcacacaatatttggtataataagtttgttgatttttataataattatcttatgagtcattcaaataataatgtctaattgattaatagtgtaaaacttttaagtacatatgtactaaattctggaaacaattttgttcagattgtaatatactcccacttgttttctaaacagaataccttaacaaatttataacttgatcttgttagaatactactaaaaaaatgtgtaatttgctaagatattctacaaggaatatgttaatacctcacatatgaataagtattgataattagaccttattatacatggttaagattaaaacacacaacacacaagtcacttgggtgttttaaaaagtgactttattttaatcttaacaatttatgtattaatgtatggctataccattcagattagagggaattttttttttttgctattttttttacctttagatgggcttcggtggtatgagactgaagccaggatggtaacagtttcttctgtcctggtttgaacaattgagcttctttttcataattggaggcacattcttcacaacagttgagtttatcctgctcctccttgttgttactgaagaactttgtttccatcatatgagatggattctgggagattgtcacctttgaatcatgaacactgcaaaatgagtgcagaaagattcaatgaacatctaacagtaatcatatagacacttctggagttttgagtatattctgcatcatcagaagctagttggtgtacttttcaatattcttgcaacattttcatgctaccttccaaaatgttactgtaaaatcatgtttgagaaaatgaaatgtttgtaacaaggaataatattatatata

SEQ ID NO: 119131 - DNA, 435 bp, Glycine max
  Clone ID: PAT_MRT3847_78584C.1
ggaattattctcaagtttgaattttcacactctccttctctctgttctggatacgtatgaagaattagtaaagctgattcctgcctgattcctattgttttttggtgcaaaattgaaaaatactttcatattagtgatattacttttaagactagaagtctagaatgaatggctttgtcgttgttaatgatatcctttcattatttctccaagtgaattgagttgcaaattttagcaattaataactaaacttgtaaacttgaatgatttcattaacgaagctctgaaatataaattaatgtttattcattcctatttgtatatacatacatgtacaagcaagtagagattaacgtaatatatatatatatatatatgctagtttgtatatactgctacttttttatttaatattaatttttgtacatgttttgc

SEQ ID NO: 119132 - DNA, 392 bp, Glycine max
  Clone ID: PAT_MRT3847_78585C.1
tcctgtgtcgcctgtctggcagtcttatgtaaaaggccctctctcactcgctgctggccatacacttgggcctgctgcatggccaatggcatgctgccctggaccaggaactgaactgctgggggtgtggacggttacccacaactgagagcgctctatcgaactggccctaacttatgatgctttaaatctcatggcttttctctcatcgcgattaaccgccggttgttctcttcaaggtaccggaaaccggactggatatatgtgggcagactagtgtttgacggcaggccggcgaaagaatacttctatgagctgatgtttcaccgagcgatgcgtttccctccgtgccggtagttctggataaacctgaggagaatctgagccctaca

SEQ ID NO: 119133 - DNA, 437 bp, Glycine max
  Clone ID: PAT_MRT3847_78586C.1
ccgggccgaccacacccttccgaagggccaggggatgttggttaattgtttagaaggagggctgtaaattggtattttcgccggatggaaaatctattgtggaacctctttattgggcgctccaaggataaataacccttccgtgcaaaagaacttcacagtttggtaagcgtttttcgggggtaaaatccccaggttttaggctggttgggaaaccccacaccatccgaccttttaaaaccattcttgaaaagtgcgttgacccaccaaaggattcctttaatggcaaccattttaaatcaaactttaaaccagttaaccaccaggcttttttttttgctattgacccctaaattccatcacaccaccttattattatccgcgttaaataccaccgtcctttttaatttcccatcctatgaaaaccatggttttgg

SEQ ID NO: 119134 - DNA, 375 bp, Glycine max
  Clone ID: PAT_MRT3847_78587C.1
agtcgggaattttagaatgtgtgtgcagaccataatttaccgaaagagatggaatctataaccactcgggcgtgttttgactcatataaaaaaaaaaaattatcaaaaataattccaatattatactaaataaaaaagtggccccccccacctagtgaacccgctccccccgatactaatccttacccttatcctttatgctcccattttttcctttttatgagtcttataaaatcttgacatattcttggctatgctttttccctttttaaaaatttttcccttttaaaattttccccattattcatactctgttgcttattggtaaaaccctttggtccctatatttccccccttacaattttttttcttttt

SEQ ID NO: 119135 - DNA, 199 bp, Glycine max
  Clone ID: PAT_MRT3847_78588C.1
ttttattcagaatggtaacattcaattatgtgttggtaaataattaaacaagcatgagtatcacagccactactacacagagaaggttcaacttaagattcaacttttttgaggaggggctgacacctaattagaaatttagatagttttaaaaattttgcgctgataacgtatcgaatttgtactccccctccccctt

SEQ ID NO: 119136 - DNA, 225 bp, Glycine max
  Clone ID: PAT_MRT3847_78589C.1
aaggaactttgaacttgaactcttggcaaaataattctgtttcctacttcactgcaaaataatgaactatcccttggctgtgtaatttgtgctctgtttgtacagattaaaaatattatttttccttgtatattgtaaaacattgatgtgtgggtttatactattgttctagctgattttcatataacttgtatatttaaaaaacattaatctgtcaggtttata

SEQ ID NO: 119137 - DNA, 279 bp, Glycine max
  Clone ID: PAT_MRT3847_7858C.1
atgctgctccttcagacgccgtaacacgatgaggtttttacagagcttgtagacgaggtcaacgctttggagctcaagagccacggagttgttcgccgatagcttatactaccttgagccggtttacgcggatcctaaccgggaggagctccggagaagagcggggtatttgtgaccggggtggaaacatctttggggcgcctaagataaagcttgcatcggatgaaaagcagctactggggaacaagactgtctgaacaggctccactctatggaacc

SEQ ID NO: 119138 - DNA, 492 bp, Glycine max
  Clone ID: PAT_MRT3847_78590C.1
cccacacccaaacccctctctcctggttgggtaaatgagttggcggtgggggaggggaagccctctgaggaagatggatttggaactggtacctcaaccgggatccgcctctggttctttttgaggaggaggaggaggaggagggggggccctctaagcatcttcttctccgccaccaccaacatgaaccttaaactccccttgtggttgtcaacgcctttgacaacgatgttgttgaaagctcgcctaggtctttcactcatgctaagaacaatgctgctgagaggaggaaagttcgcaggacgacaactattgttgatttggactcagaacatgggaccagaggagttcctcagaaccttacttcctcattggcgatctttatgtctacttggccacgacaggagttctgcgagtgaaaatgctgaaaagacacccgaacctcccaaggagcctgaagctactaaggagcctgatgttaattgcccaatc

SEQ ID NO: 119139 - DNA, 418 bp, Glycine max
  Clone ID: PAT_MRT3847_78591C.1
tagtgctcgagggaggggaaggagcaggatgtgtggatgtgagcgaacaagtttgccaagagacaggcatttggtactgactatcgtacccagctctaaccagtgcactgatgcatgccatacaagtgtccgatgtgaggcgaaacgtagagatcgaacagaaaaggttacacttcttgcattggcataagaggggagcagattcgtgtttctctacatcacccttgtaaccttgaaaaggagtcgccgaagcttggactaagactttatggaccaacttctagggaatgactcgaacactaccaagtgtgatctaggctctcgtgtactgctgctctggaatctcaaggggacacatgtactcagcggtgacatttgggctgggaccatctagggaatatgtcatgcccagtgccaa

SEQ ID NO: 119140 - DNA, 584 bp, Glycine max
  Clone ID: PAT_MRT3847_78592C.1
ccttattgttttgaaagcaagaccgcgccaagtatagtttgtatttctttacttgggaaaaaccacataactttaagttttggttcggaccccccaaaaaaaaccctttataggaaggacttcccccacccccattttacaaacccttaaaaggctttttttttttggcgctccctttccggggacaaaaatgggggactacgcccaccccctttggtcccttggccccccagggggccggagaggttttccaagggacccttccccgggagaaaggccggaaaaaaaaaacgggcccctggggttcccccaaaattcccgaccggaacccttgggggacccaggtttccctatggggactgggataaaaggttgggcaaacaaagggccacacagtttcccgggggagaaggttttgggttaaaaattgcacaccccatgggggccgtaaactaaaattgttaaccctggggggcctgacgggtgtgcccccttaaaatattgggggcccgctccccgcccggttttcaaaaagaaaacctggggggccctttgtttttatgaaccccgccccccccggggaa

SEQ ID NO: 119141 - DNA, 1168 bp, Glycine max
  Clone ID: PAT_MRT3847_78593C.1
gacccgcgcgtacccggacccacttccaatttcaaggcattcaaaacaaggaaatggagtcactacttcctaagtcaatctacgatggcataaagagctacctgagaaggcggcgctaccggcgtctccacggcggcaccaccgtcgttagaaggaagatggcgatcatccggttgagaggcccacgtaggaattggaggatcagagcaattccaaggcttagatgggtgatgagatcaccattgaagattttgacaaagctcaagaatgcttatatgaactttatgttgagactgtcatggaacgtaggtgcgctaaaaacagtgaacatctttgaagtgaaacggaattccaaaggctcgtcaagtgtataagggttattccagtgatgaatttgaggctaggctcaaagggtacttgtagaattcaaatgatacctctgaattatctcaattatgaagaagtagaatgggatggaatggccttcaaggagatgaataacctcaaaacacttatcattagaggtggttgctttaccacaggtcccaaacatcttccaaatagtttaagagtattagaatggcggcgatatccttcaccatctctaccatttgattttaatccgaagaaacttgtctcactacagttacctgatagttgcttaacgtctctcaattggctcaactcaaagaataggttcttgaatatgagagttttgaattttaatcagtgtcattatataacagagatacctgacgtatgtggtgccccaaatttacaagaattatcatttgaatattgtgagaatttaattaaaattcatgtatcggttggattcctggataaacttaaaatcttggatgctgatggctgcagcaagcttacaagttttccaccaatgaaattgacctctcttgaagaacttaaactttcattttgtgctaatcttgagtgttttccagaaatattagggaagatggaaaatgtcacttcccttgatattaaagacactcccataaaagaactgccatcttcaattcaacatctcagtcgacttcaaagaattaaactgaagaatggtgggagttatttcagttaccaagtaccttttttgcaatgaaagaacttcgttttttgcttgttaaccaatgtgaagggttgctactac

SEQ ID NO: 119142 - DNA, 528 bp, Glycine max
  Clone ID: PAT_MRT3847_78594C.1
cccacgcgtccgcggacgcgtgggttccaagctattcaaatttcaaaacaaggaaatggagtcactacttcccaagtcaatctacggtggcatcaagagttacttgagaaggcggcgctaccggcgtctccacggcggcgccaccgtcgttagaaggaagatggcgatcatccgcttgagagggccacgtaggtattggaggatcagagcagttccaaggcttagatgggtgatgagatcaccattgacgattttgacaaagctcaagaatgcttatatgaactttatgttgaagctgtcagggaacgtaggtgctatgaacagtgataacatctttgaagtgaaacggattccaaaggctcgtcaagtgtctaagggctattcccgtgatgaatttgaggccaggctcatttttgagatttctaagaccttggttgcttcctatgaacttcatcccatgtagttgtgttctatatatgttattcagatatcctacaacttttaattctatgtttgagattttctttc

SEQ ID NO: 119143 - DNA, 1094 bp, Glycine max
  Clone ID: PAT_MRT3847_78595C.1
acgaagtgtcaggttgtcagccatttattttatgtccctcaatcaagttactgagggttggaaggatcagcacgacactgagcatcagcaatggcaagcgcaagtgttggtaaagaactgacgctgtattcgtattggaggagctcttgttcccaccgagtccgaatcgctctcaacctcaaagggcttaaatacgaatacaagcccgtcaatctgctcaagggagaacaatctcgccctgagtttctccagctcaatcctgttggttgtgtccccgttctagtggatgaccacgttgttctctatgactctttcgccattattatgtatttggaagataagtatcctcacaatcctttgctccctcatgatatttacaagagagcaatcaatttccaggctgctagtgttgtttcctcaacaatacaacctcttcataacttgagtttactgaactacattggggagaaagttggccctgatgaaaaacttccttgggcccaaagtataattagaagaggctttaaagcactggaaaagctattgaaagaccacacaggaagatatgcaactggagatgaagttttcctggcagatatatttttagcacctcagttacatgcagcatttaagagattcaacattcacatgaacgagttccctattctagcaagattgcatgagacatataatgagatccctgcattccaggaggctctgccagagaaccagcctgatgcagtacactagttgaaccaataatttgggacagaaatatgagttgatattaagttggagaaattgcagcaggagctacttattcagcatccggatgaattcgttgttaaagtattaaaatatgatactcaatatagcaataaggttgccacatgcaatatttattgcacacatcatgtacaattgaaaaaaaaaaattggtttcgggtgtatgtctataaagccttatgtttattttccatttcatattcttcccagaatcccagtcaatgtagcttgatggatgattcttaatggtgtttatggttgaattggtgtttcaaaaaaaaaaaaaaaaaatatgatgatgatttttg
